United States Patent Application Publication US 2007/0214517 A1 - sequence listing, part 71

SEQ ID NO: 92169 - protein, 434 aa, Arabidopsis thaliana; identical to SEQ ID NO: 88413
  peptide (1)..(434): Ceres Seq. ID no. 12708840
  misc_feature (8)..(142): Pfam Name: UDP-glucoronosyl and UDP-glucosyl transferase Pfam Description: UDP-glucoronosyl and UDP-glucosyl transferase
  misc_feature (142)..(434): Homolog of NCBI NO: 15239287 NR Description: glucuronosyl transferase-like protein; protein At5g05890.1 [Arabidopsis thaliana] >gi|10177562|dbj|BAB10794.1|
  misc_feature (1)..(142): Homolog of NCBI NO: 15239287 NR Description: glucuronosyl transferase-like protein; protein At5g05890.1 [Arabidopsis thaliana] >gi|10177562|dbj|BAB10794.1|
  misc_feature (1)..(434): Homolog of NCBI NO: 15239288 NR Description: glucuronosyl transferase-like protein; protein At5g05900.1 [Arabidopsis thaliana] >gi|10177563|dbj|BAB10795.1|
  misc_feature (142)..(434): Homolog of NCBI NO: 15239259 NR Description: glucuronosyl transferase-like protein; protein At5g05880.1 [Arabidopsis thaliana] >gi|10177561|dbj|BAB10793.1|
  misc_feature (143)..(432): Homolog of NCBI NO: 15239258 NR Description: glucuronosyl transferase-like protein; protein At5g05870.1 [Arabidopsis thaliana] >gi|10177560|dbj|BAB10792.1|
  misc_feature (1)..(141): Homolog of NCBI NO: 15239258 NR Description: glucuronosyl transferase-like protein; protein At5g05870.1 [Arabidopsis thaliana] >gi|10177560|dbj|BAB10792.1|
  misc_feature (2)..(431): Homolog of NCBI NO: 15239257 NR Description: glucuronosyl transferase-like protein; protein At5g05860.1, supported by cDNA: gi_15010631 [Arabidopsis >gi|15010632|gb|AAK73975.1| AT5g05860/MJJ3_28 [Arabidopsis
  misc_feature (9)..(434): Homolog of NCBI NO: 26452976 NR Description: unknown protein [Arabidopsis thaliana]
  misc_feature (9)..(434): Homolog of NCBI NO: 15229731 NR Description: glucosyl transferase, putative; protein id: [Arabidopsis thaliana] >gi|12321874|gb|AAG50970.1|AC073395_12
  misc_feature (142)..(434): Homolog of NCBI NO: 15228176 NR Description: glucuronosyl transferase - like protein; protein At3g55710.1 [Arabidopsis thaliana] >gi|11258162|pir||T47710

SEQ ID NO: 92170 - protein, 412 aa, Arabidopsis thaliana; identical to SEQ ID NO: 88414
  peptide (1)..(412): Ceres Seq. ID no. 12708841
  misc_feature (1)..(120): Pfam Name: UDP-glucoronosyl and UDP-glucosyl transferase Pfam Description: UDP-glucoronosyl and UDP-glucosyl transferase
  misc_feature (120)..(412): Homolog of NCBI NO: 15239287 NR Description: glucuronosyl transferase-like protein; protein At5g05890.1 [Arabidopsis thaliana] >gi|10177562|dbj|BAB10794.1|
  misc_feature (1)..(120): Homolog of NCBI NO: 15239287 NR Description: glucuronosyl transferase-like protein; protein At5g05890.1 [Arabidopsis thaliana] >gi|10177562|dbj|BAB10794.1|
  misc_feature (1)..(412): Homolog of NCBI NO: 15239288 NR Description: glucuronosyl transferase-like protein; protein At5g05900.1 [Arabidopsis thaliana] >gi|10177563|dbj|BAB10795.1|
  misc_feature (120)..(412): Homolog of NCBI NO: 15239259 NR Description: glucuronosyl transferase-like protein; protein At5g05880.1 [Arabidopsis thaliana] >gi|10177561|dbj|BAB10793.1|
  misc_feature (121)..(410): Homolog of NCBI NO: 15239258 NR Description: glucuronosyl transferase-like protein; protein At5g05870.1 [Arabidopsis thaliana] >gi|10177560|dbj|BAB10792.1|
  misc_feature (1)..(119): Homolog of NCBI NO: 15239258 NR Description: glucuronosyl transferase-like protein; protein At5g05870.1 [Arabidopsis thaliana] >gi|10177560|dbj|BAB10792.1|
  misc_feature (1)..(409): Homolog of NCBI NO: 15239257 NR Description: glucuronosyl transferase-like protein; protein At5g05860.1, supported by cDNA: gi_15010631 [Arabidopsis >gi|15010632|gb|AAK73975.1| AT5g05860/MJJ3_28 [Arabidopsis
  misc_feature (1)..(412): Homolog of NCBI NO: 26452976 NR Description: unknown protein [Arabidopsis thaliana]
  misc_feature (1)..(412): Homolog of NCBI NO: 15229731 NR Description: glucosyl transferase, putative; protein id: [Arabidopsis thaliana] >gi|12321874|gb|AAG50970.1|AC073395_12
  misc_feature (120)..(412): Homolog of NCBI NO: 15228176 NR Description: glucuronosyl transferase - like protein; protein At3g55710.1 [Arabidopsis thaliana] >gi|11258162|pir||T47710

SEQ ID NO: 92171 - protein, 306 aa, Arabidopsis thaliana; identical to SEQ ID NO: 88415
  peptide (1)..(306): Ceres Seq. ID no. 12708842
  misc_feature (14)..(304): Pfam Name: UDP-glucoronosyl and UDP-glucosyl transferase Pfam Description: UDP-glucoronosyl and UDP-glucosyl transferase
  misc_feature (14)..(306): Homolog of NCBI NO: 15239287 NR Description: glucuronosyl transferase-like protein; protein At5g05890.1 [Arabidopsis thaliana] >gi|10177562|dbj|BAB10794.1|
  misc_feature (1)..(14): Homolog of NCBI NO: 15239287 NR Description: glucuronosyl transferase-like protein; protein At5g05890.1 [Arabidopsis thaliana] >gi|10177562|dbj|BAB10794.1|
  misc_feature (1)..(306): Homolog of NCBI NO: 15239288 NR Description: glucuronosyl transferase-like protein; protein At5g05900.1 [Arabidopsis thaliana] >gi|10177563|dbj|BAB10795.1|
  misc_feature (14)..(306): Homolog of NCBI NO: 15239259 NR Description: glucuronosyl transferase-like protein; protein At5g05880.1 [Arabidopsis thaliana] >gi|10177561|dbj|BAB10793.1|
  misc_feature (15)..(304): Homolog of NCBI NO: 15239258 NR Description: glucuronosyl transferase-like protein; protein At5g05870.1 [Arabidopsis thaliana] >gi|10177560|dbj|BAB10792.1|
  misc_feature (1)..(13): Homolog of NCBI NO: 15239258 NR Description: glucuronosyl transferase-like protein; protein At5g05870.1 [Arabidopsis thaliana] >gi|10177560|dbj|BAB10792.1|
  misc_feature (1)..(303): Homolog of NCBI NO: 15239257 NR Description: glucuronosyl transferase-like protein; protein At5g05860.1, supported by cDNA: gi_15010631 [Arabidopsis >gi|15010632|gb|AAK73975.1| AT5g05860/MJJ3_28 [Arabidopsis
  misc_feature (1)..(306): Homolog of NCBI NO: 26452976 NR Description: unknown protein [Arabidopsis thaliana]
  misc_feature (1)..(306): Homolog of NCBI NO: 15229731 NR Description: glucosyl transferase, putative; protein id: [Arabidopsis thaliana] >gi|12321874|gb|AAG50970.1|AC073395_12
  misc_feature (14)..(306): Homolog of NCBI NO: 15228176 NR Description: glucuronosyl transferase - like protein; protein At3g55710.1 [Arabidopsis thaliana] >gi|11258162|pir||T47710

SEQ ID NO: 92172 - DNA, 654 bp, Arabidopsis thaliana; identical to SEQ ID NO: 88416
  misc_feature (1)..(654): Ceres Seq. ID no. 12708847
  misc_feature: MA Experiment ID: 20000264 Result: Down-regulated in Transcription
  misc_feature: MA Experiment 20000264 PARAMETER Experiment Name: At_Open_Flower_P Parameter: Age (day) Value: 21
  misc_feature: MA Experiment 20000264 PARAMETER Experiment Name: At_Open_Flower_P Parameter: Plant Line Value: WS
  misc_feature: MA Experiment 20000264 PARAMETER Experiment Name: At_Open_Flower_P Parameter: Tissue Value: Open Flower vs. Whole Plant
  misc_feature: MA Experiment ID: 20000794 Result: Down-regulated in Transcription
  misc_feature: MA Experiment 20000794 PARAMETER Experiment Name: At_Petals_P Parameter: Age (day) Value: 23-25 days
  misc_feature: MA Experiment 20000794 PARAMETER Experiment Name: At_Petals_P Parameter: Plant Line Value: WS
  misc_feature: MA Experiment 20000794 PARAMETER Experiment Name: At_Petals_P Parameter: Tissue Value: Petals vs. Whole plant
  misc_feature: MA Experiment ID: 20001911 Result: Down-regulated in Transcription
  misc_feature: MA Experiment 20001911 PARAMETER Experiment Name: At_Drought_Reproduction_P Parameter: Age (day) Value: 40
  misc_feature: MA Experiment 20001911 PARAMETER Experiment Name: At_Drought_Reproduction_P Parameter: Organism Value: A. thaliana
  misc_feature: MA Experiment 20001911 PARAMETER Experiment Name: At_Drought_Reproduction_P Parameter: Plant Line Value: WS
  misc_feature: MA Experiment 20001911 PARAMETER Experiment Name: At_Drought_Reproduction_P Parameter: Timepoint (day) Value: 10
  misc_feature: MA Experiment 20001911 PARAMETER Experiment Name: At_Drought_Reproduction_P Parameter: Tissue Value: Flowers
  misc_feature: MA Experiment 20001911 PARAMETER Experiment Name: At_Drought_Reproduction_P Parameter: Treatment Value: Drought vs. No Drought

SEQ ID NO: 92173 - protein, 217 aa, Arabidopsis thaliana; identical to SEQ ID NO: 88417
  peptide (1)..(217): Ceres Seq. ID no. 12708848
  misc_feature (1)..(144): Homolog of NCBI NO: 15239293 NR Description: putative protein; protein id: At5g05950.1, by cDNA: 252000. [Arabidopsis thaliana] gene_id:K18J17.12~pir||T12959~similar to unknown protein
  misc_feature (3)..(142): Homolog of NCBI NO: 34395171 NR Description: unknown protein [Oryza sativa (japonica
  misc_feature (3)..(142): Homolog of NCBI NO: 34900646 NR Description: hypothetical protein~similar to Arabidopsis
  misc_feature (2)..(145): Homolog of NCBI NO: 15232676 NR Description: putative protein; protein id: At3g46890.1
  misc_feature (2)..(142): Homolog of NCBI NO: 6041846 NR Description: unknown protein [Arabidopsis thaliana]
  misc_feature (2)..(142): Homolog of NCBI NO: 18397969 NR Description: expressed protein; protein id: At3g07510.1, by cDNA: gi_13877548, supported by cDNA: gi_20148734 [Arabidopsis >gi|13877549|gb|AAK43852.1|AF370475_1 Unknown protein
  misc_feature (2)..(152): Homolog of NCBI NO: 37531676 NR Description: hypothetical protein [Oryza sativa (japonica group)] >gi|21671930|gb|AAM74292.1| Hypothetical protein [Oryza
  misc_feature (2)..(142): Homolog of NCBI NO: 15226312 NR Description: hypothetical protein; protein id: At2g01580.1
  misc_feature (5)..(89): Homolog of NCBI NO: 38345578 NR Description: OSJNBa0027H06.14 [Oryza sativa (japonica

SEQ ID NO: 92174 - protein, 167 aa, Arabidopsis thaliana; identical to SEQ ID NO: 88418
  peptide (1)..(167): Ceres Seq. ID no. 12708849
  misc_feature (1)..(94): Homolog of NCBI NO: 15239293 NR Description: putative protein; protein id: At5g05950.1, by cDNA: 252000. [Arabidopsis thaliana] gene_id:K18J17.12~pir||T12959~similar to unknown protein
  misc_feature (1)..(92): Homolog of NCBI NO: 34395171 NR Description: unknown protein [Oryza sativa (japonica
  misc_feature (1)..(92): Homolog of NCBI NO: 34900646 NR Description: hypothetical protein~similar to Arabidopsis
  misc_feature (1)..(95): Homolog of NCBI NO: 15232676 NR Description: putative protein; protein id: At3g46890.1
  misc_feature (1)..(92): Homolog of NCBI NO: 6041846 NR Description: unknown protein [Arabidopsis thaliana]
  misc_feature (1)..(92): Homolog of NCBI NO: 18397969 NR Description: expressed protein; protein id: At3g07510.1, by cDNA: gi_13877548, supported by cDNA: gi_20148734 [Arabidopsis >gi|13877549|gb|AAK43852.1|AF370475_1 Unknown protein
  misc_feature (1)..(102): Homolog of NCBI NO: 37531676 NR Description: hypothetical protein [Oryza sativa (japonica group)] >gi|21671930|gb|AAM74292.1| Hypothetical protein [Oryza
  misc_feature (1)..(92): Homolog of NCBI NO: 15226312 NR Description: hypothetical protein; protein id: At2g01580.1
  misc_feature (1)..(39): Homolog of NCBI NO: 38345578 NR Description: OSJNBa0027H06.14 [Oryza sativa (japonica

SEQ ID NO: 92175 - protein, 138 aa, Arabidopsis thaliana; identical to SEQ ID NO: 88419
  peptide (1)..(138): Ceres Seq. ID no. 12708850
  misc_feature (1)..(65): Homolog of NCBI NO: 15239293 NR Description: putative protein; protein id: At5g05950.1, by cDNA: 252000. [Arabidopsis thaliana] gene_id:K18J17.12~pir||T12959~similar to unknown protein
  misc_feature (1)..(63): Homolog of NCBI NO: 34395171 NR Description: unknown protein [Oryza sativa (japonica
  misc_feature (1)..(63): Homolog of NCBI NO: 34900646 NR Description: hypothetical protein~similar to Arabidopsis
  misc_feature (1)..(66): Homolog of NCBI NO: 15232676 NR Description: putative protein; protein id: At3g46890.1
  misc_feature (1)..(63): Homolog of NCBI NO: 6041846 NR Description: unknown protein [Arabidopsis thaliana]
  misc_feature (1)..(63): Homolog of NCBI NO: 18397969 NR Description: expressed protein; protein id: At3g07510.1, by cDNA: gi_13877548, supported by cDNA: gi_20148734 [Arabidopsis >gi|13877549|gb|AAK43852.1|AF370475_1 Unknown protein
  misc_feature (1)..(73): Homolog of NCBI NO: 37531676 NR Description: hypothetical protein [Oryza sativa (japonica group)] >gi|21671930|gb|AAM74292.1| Hypothetical protein [Oryza
  misc_feature (1)..(63): Homolog of NCBI NO: 15226312 NR Description: hypothetical protein; protein id: At2g01580.1

SEQ ID NO: 92176 - DNA, 2307 bp, Arabidopsis thaliana; identical to SEQ ID NO: 88420
  misc_feature (1)..(2307): Ceres Seq. ID no. 12708856
  misc_feature: MA Experiment ID: 108434 Result: Up-regulated in Transcription
  misc_feature: MA Experiment 108434 PARAMETER Experiment Name: At_Root_Tips_cDNA_P Parameter: Tissue Value: Root Tips
  misc_feature: MA Experiment ID: 20000113 Result: Down-regulated in Transcription
  misc_feature: MA Experiment 20000113 PARAMETER Experiment Name: At_42deg_Heat_cDNA_P Parameter: Temperature (deg C) Value: 42 vs. 22
  misc_feature: MA Experiment 20000113 PARAMETER Experiment Name: At_42deg_Heat_cDNA_P Parameter: Timepoint (hr) Value: 8
  misc_feature: MA Experiment 20000113 PARAMETER Experiment Name: At_42deg_Heat_cDNA_P Parameter: Tissue Value: Aerial
  misc_feature: MA Experiment ID: 20000117 Result: Down-regulated in Transcription
  misc_feature: MA Experiment 20000117 PARAMETER Experiment Name: At_100uM_ABA_Mutants_cDNA_P Parameter: Plant Line Value: Columbia
  misc_feature: MA Experiment 20000117 PARAMETER Experiment Name: At_100uM_ABA_Mutants_cDNA_P Parameter: Timepoint (hr) Value: 6
  misc_feature: MA Experiment 20000117 PARAMETER Experiment Name: At_100uM_ABA_Mutants_cDNA_P Parameter: Tissue Value: Aerial
  misc_feature: MA Experiment 20000117 PARAMETER Experiment Name: At_100uM_ABA_Mutants_cDNA_P Parameter: Treatment Value: 100uM ABA vs. No Treatment
  misc_feature: MA Experiment ID: 20000179 Result: Up-regulated in Transcription
  misc_feature: MA Experiment 20000179 PARAMETER Experiment Name: At_Germinating_Seeds_P Parameter: Age (hr) Value: 6 vs. 0
  misc_feature: MA Experiment 20000179 PARAMETER Experiment Name: At_Germinating_Seeds_P Parameter: Tissue Value: Germinating Seeds
  misc_feature: MA Experiment ID: 20000180 Result: Up-regulated in Transcription
  misc_feature: MA Experiment 20000180 PARAMETER Experiment Name: At_Germinating_Seeds_P Parameter: Age (hr) Value: 24 vs. 0
  misc_feature: MA Experiment 20000180 PARAMETER Experiment Name: At_Germinating_Seeds_P Parameter: Tissue Value: Germinating Seeds
  misc_feature: MA Experiment ID: 20000227 Result: Up-regulated in Transcription
  misc_feature: MA Experiment 20000227 PARAMETER Experiment Name: At_Root-Tips-vs-Tops_P Parameter: Tissue Value: Root Tips vs. Root Tops
  misc_feature: MA Experiment ID: 20000234 Result: Up-regulated in Transcription
  misc_feature: MA Experiment 20000234 PARAMETER Experiment Name: At_Siliques_P Parameter: Age (day) Value: 21
  misc_feature: MA Experiment 20000234 PARAMETER Experiment Name: At_Siliques_P Parameter: Organism Value: A. thaliana
  misc_feature: MA Experiment 20000234 PARAMETER Experiment Name: At_Siliques_P Parameter: Plant Line Value: WS
  misc_feature: MA Experiment 20000234 PARAMETER Experiment Name: At_Siliques_P Parameter: Tissue Value: Less Than 5mm Siliques vs. Whole Plant
  misc_feature: MA Experiment ID: 20000495 Result: Up-regulated in Transcription
  misc_feature: MA Experiment 20000495 PARAMETER Experiment Name: At_Guard_Cells_P Parameter: Harvest Date Value: 8/2/2002
  misc_feature: MA Experiment 20000495 PARAMETER Experiment Name: At_Guard_Cells_P Parameter: Organism Value: A. thaliana
  misc_feature: MA Experiment 20000495 PARAMETER Experiment Name: At_Guard_Cells_P Parameter: Tissue Value: Guard Cells vs. Leaves
  misc_feature: MA Experiment ID: 20001557 Result: Up-regulated in Transcription
  misc_feature: MA Experiment 20001557 PARAMETER Experiment Name: At_Drought_Soil_Dry_P Parameter: Age (day) Value: 27
  misc_feature: MA Experiment 20001557 PARAMETER Experiment Name: At_Drought_Soil_Dry_P Parameter: Organism Value: A. thaliana
  misc_feature: MA Experiment 20001557 PARAMETER Experiment Name: At_Drought_Soil_Dry_P Parameter: Plant Line Value: WS
  misc_feature: MA Experiment 20001557 PARAMETER Experiment Name: At_Drought_Soil_Dry_P Parameter: Post Timepoint (hr) Value: 3
  misc_feature: MA Experiment 20001557 PARAMETER Experiment Name: At_Drought_Soil_Dry_P Parameter: Post-Treatment Value: Re-Water vs. No Drought
  misc_feature: MA Experiment 20001557 PARAMETER Experiment Name: At_Drought_Soil_Dry_P Parameter: Timepoint (day) Value: 13
  misc_feature: MA Experiment 20001557 PARAMETER Experiment Name: At_Drought_Soil_Dry_P Parameter: Treatment Value: Drought vs. No Drought
  misc_feature: MA Experiment ID: 20001560 Result: Up-regulated in Transcription
  misc_feature: MA Experiment 20001560 PARAMETER Experiment Name: At_Drought_Soil_Dry_P Parameter: Age (day) Value: 28
  misc_feature: MA Experiment 20001560 PARAMETER Experiment Name: At_Drought_Soil_Dry_P Parameter: Organism Value: A. thaliana
  misc_feature: MA Experiment 20001560 PARAMETER Experiment Name: At_Drought_Soil_Dry_P Parameter: Plant Line Value: WS
  misc_feature: MA Experiment 20001560 PARAMETER Experiment Name: At_Drought_Soil_Dry_P Parameter: Post Timepoint (hr) Value: None
  misc_feature: MA Experiment 20001560 PARAMETER Experiment Name: At_Drought_Soil_Dry_P Parameter: Post-Treatment Value: None
  misc_feature: MA Experiment 20001560 PARAMETER Experiment Name: At_Drought_Soil_Dry_P Parameter: Timepoint (day) Value: 14
  misc_feature: MA Experiment 20001560 PARAMETER Experiment Name: At_Drought_Soil_Dry_P Parameter: Treatment Value: Drought vs. No Drought

SEQ ID NO: 92177 - protein, 682 aa, Arabidopsis thaliana; identical to SEQ ID NO: 88421
  peptide (1)..(682): Ceres Seq. ID no. 12708857
  misc_feature (158)..(661): Pfam Name: Putative methyltransferase Pfam Description: Putative methyltransferase
  misc_feature (77)..(662): Homolog of NCBI NO: 18405149 NR Description: expressed protein; protein id: At2g39750.1, by cDNA: gi_15450748 [Arabidopsis thaliana]
  misc_feature (1)..(96): Homolog of NCBI NO: 18405149 NR Description: expressed protein; protein id: At2g39750.1, by cDNA: gi_15450748 [Arabidopsis thaliana]
  misc_feature (1)..(662): Homolog of NCBI NO: 18411424 NR Description: expressed protein; protein id: At1g77260.1, by cDNA: gi_14194106, supported by cDNA: gi_20334725 [Arabidopsis >gi|14194107|gb|AAK56248.1|AF367259_1 At1g77260/T14N5_19
  misc_feature (1)..(653): Homolog of NCBI NO: 7486995 NR Description: hypothetical protein T14N5.11 - Arabidopsis >gi|3540206|gb|AAC34356.1| Hypothetical protein [Arabidopsis
  misc_feature (47)..(661): Homolog of NCBI NO: 34908262 NR Description: ankyrin-like protein [Oryza sativa (japonica
  misc_feature (77)..(601): Homolog of NCBI NO: 38567836 NR Description: OSJNBb0020J19.14 [Oryza sativa (japonica
  misc_feature (599)..(649): Homolog of NCBI NO: 38567836 NR Description: OSJNBb0020J19.14 [Oryza sativa (japonica
  misc_feature (89)..(646): Homolog of NCBI NO: 20161455 NR Description: ankyrin-like protein [Oryza sativa (japonica
  misc_feature (101)..(649): Homolog of NCBI NO: 15230391 NR Description: putative protein; protein id: At3g51070.1
  misc_feature (108)..(649): Homolog of NCBI NO: 25403070 NR Description: unknown protein, 55790-52851 [imported] -

SEQ ID NO: 92178 - protein, 577 aa, Arabidopsis thaliana; identical to SEQ ID NO: 88422
  peptide (1)..(577): Ceres Seq. ID no. 12708858
  misc_feature (53)..(556): Pfam Name: Putative methyltransferase Pfam Description: Putative methyltransferase
  misc_feature (1)..(557): Homolog of NCBI NO: 18405149 NR Description: expressed protein; protein id: At2g39750.1, by cDNA: gi_15450748 [Arabidopsis thaliana]
  misc_feature (1)..(557): Homolog of NCBI NO: 18411424 NR Description: expressed protein; protein id: At1g77260.1, by cDNA: gi_14194106, supported by cDNA: gi_20334725 [Arabidopsis >gi|14194107|gb|AAK56248.1|AF367259_1 At1g77260/T14N5_19
  misc_feature (1)..(548): Homolog of NCBI NO: 7486995 NR Description: hypothetical protein T14N5.11 - Arabidopsis >gi|3540206|gb|AAC34356.1| Hypothetical protein [Arabidopsis
  misc_feature (1)..(556): Homolog of NCBI NO: 34908262 NR Description: ankyrin-like protein [Oryza sativa (japonica
  misc_feature (1)..(496): Homolog of NCBI NO: 38567836 NR Description: OSJNBb0020J19.14 [Oryza sativa (japonica
  misc_feature (494)..(544): Homolog of NCBI NO: 38567836 NR Description: OSJNBb0020J19.14 [Oryza sativa (japonica
  misc_feature (1)..(541): Homolog of NCBI NO: 20161455 NR Description: ankyrin-like protein [Oryza sativa (japonica
  misc_feature (1)..(544): Homolog of NCBI NO: 15230391 NR Description: putative protein; protein id: At3g51070.1
  misc_feature (3)..(544): Homolog of NCBI NO: 25403070 NR Description: unknown protein, 55790-52851 [imported] -
  misc_feature (3)..(544): Homolog of NCBI NO: 30690755 NR Description: dehydration-induced protein-related [Arabidopsis

SEQ ID NO: 92179 - protein, 527 aa, Arabidopsis thaliana; identical to SEQ ID NO: 88423
  peptide (1)..(527): Ceres Seq. ID no. 12708859
  misc_feature (3)..(506): Pfam Name: Putative methyltransferase Pfam Description: Putative methyltransferase
  misc_feature (1)..(507): Homolog of NCBI NO: 18405149 NR Description: expressed protein; protein id: At2g39750.1, by cDNA: gi_15450748 [Arabidopsis thaliana]
  misc_feature (1)..(507): Homolog of NCBI NO: 18411424 NR Description: expressed protein; protein id: At1g77260.1, by cDNA: gi_14194106, supported by cDNA: gi_20334725 [Arabidopsis >gi|14194107|gb|AAK56248.1|AF367259_1 At1g77260/T14N5_19
  misc_feature (1)..(498): Homolog of NCBI NO: 7486995 NR Description: hypothetical protein T14N5.11 - Arabidopsis >gi|3540206|gb|AAC34356.1| Hypothetical protein [Arabidopsis
  misc_feature (1)..(506): Homolog of NCBI NO: 34908262 NR Description: ankyrin-like protein [Oryza sativa (japonica
  misc_feature (1)..(446): Homolog of NCBI NO: 38567836 NR Description: OSJNBb0020J19.14 [Oryza sativa (japonica
  misc_feature (444)..(494): Homolog of NCBI NO: 38567836 NR Description: OSJNBb0020J19.14 [Oryza sativa (japonica
  misc_feature (1)..(491): Homolog of NCBI NO: 20161455 NR Description: ankyrin-like protein [Oryza sativa (japonica
  misc_feature (1)..(494): Homolog of NCBI NO: 15230391 NR Description: putative protein; protein id: At3g51070.1
  misc_feature (1)..(494): Homolog of NCBI NO: 25403070 NR Description: unknown protein, 55790-52851 [imported] -
  misc_feature (1)..(494): Homolog of NCBI NO: 30690755 NR Description: dehydration-induced protein-related [Arabidopsis

SEQ ID NO: 92180 - DNA, 777 bp, Arabidopsis thaliana; identical to SEQ ID NO: 88424
  misc_feature (1)..(777): Ceres Seq. ID no. 12708860
  misc_feature: MA Experiment ID: 20000185 Result: Down-regulated in Transcription
  misc_feature: MA Experiment 20000185 PARAMETER Experiment Name: At_Roots__P Parameter: Age (day) Value: 7 vs. 21
  misc_feature: MA Experiment 20000185 PARAMETER Experiment Name: At_Roots__P Parameter: Organism Value: A. thaliana
  misc_feature: MA Experiment 20000185 PARAMETER Experiment Name: At_Roots__P Parameter: Tissue Value: Roots vs. Whole Plant
  misc_feature: MA Experiment ID: 20001557 Result: Down-regulated in Transcription
  misc_feature: MA Experiment 20001557 PARAMETER Experiment Name: At_Drought_Soil_Dry_P Parameter: Age (day) Value: 27
  misc_feature: MA Experiment 20001557 PARAMETER Experiment Name: At_Drought_Soil_Dry_P Parameter: Organism Value: A. thaliana
  misc_feature: MA Experiment 20001557 PARAMETER Experiment Name: At_Drought_Soil_Dry_P Parameter: Plant Line Value: WS
  misc_feature: MA Experiment 20001557 PARAMETER Experiment Name: At_Drought_Soil_Dry_P Parameter: Post Timepoint (hr) Value: 3
  misc_feature: MA Experiment 20001557 PARAMETER Experiment Name: At_Drought_Soil_Dry_P Parameter: Post-Treatment Value: Re-Water vs. No Drought
  misc_feature: MA Experiment 20001557 PARAMETER Experiment Name: At_Drought_Soil_Dry_P Parameter: Timepoint (day) Value: 13
  misc_feature: MA Experiment 20001557 PARAMETER Experiment Name: At_Drought_Soil_Dry_P Parameter: Treatment Value: Drought vs. No Drought
  misc_feature: MA Experiment ID: 20001905 Result: Down-regulated in Transcription
  misc_feature: MA Experiment 20001905 PARAMETER Experiment Name: At_Drought_Reproduction_P Parameter: Age (day) Value: 40
  misc_feature: MA Experiment 20001905 PARAMETER Experiment Name: At_Drought_Reproduction_P Parameter: Organism Value: A. thaliana
  misc_feature: MA Experiment 20001905 PARAMETER Experiment Name: At_Drought_Reproduction_P Parameter: Plant Line Value: WS
  misc_feature: MA Experiment 20001905 PARAMETER Experiment Name: At_Drought_Reproduction_P Parameter: Timepoint (day) Value: 10
  misc_feature: MA Experiment 20001905 PARAMETER Experiment Name: At_Drought_Reproduction_P Parameter: Tissue Value: Rosettes
  misc_feature: MA Experiment 20001905 PARAMETER Experiment Name: At_Drought_Reproduction_P Parameter: Treatment Value: Drought vs. No Drought

SEQ ID NO: 92181 - protein, 258 aa, Arabidopsis thaliana; identical to SEQ ID NO: 88425
  peptide (1)..(258): Ceres Seq. ID no. 12708861
  misc_feature (26)..(258): Homolog of NCBI NO: 15239327 NR Description: short chain alcohol dehydrogenase-like; protein
  misc_feature (26)..(258): Homolog of NCBI NO: 21536785 NR Description: short chain alcohol dehydrogenase-like
  misc_feature (32)..(194): Homolog of NCBI NO: 29893663 NR Description: unknown protein [Oryza sativa (japonica
  misc_feature (190)..(246): Homolog of NCBI NO: 29893663 NR Description: unknown protein [Oryza sativa (japonica
  misc_feature (31)..(258): Homolog of NCBI NO: 15227075 NR Description: putative tropinone reductase; protein id: supported by cDNA: 14555., supported by cDNA: gi_17473659, by cDNA: gi_20148626 [Arabidopsis thaliana]
  misc_feature (31)..(252): Homolog of NCBI NO: 15227060 NR Description: putative tropinone reductase; protein id: [Arabidopsis thaliana] >gi|25283419|pir||D84694 probable
  misc_feature (32)..(245): Homolog of NCBI NO: 34902058 NR Description: putative pfam00106, adh_short, short chain
  misc_feature (32)..(252): Homolog of NCBI NO: 38707448 NR Description: short chain alcohol dehydrogenase-like protein
  misc_feature (26)..(254): Homolog of NCBI NO: 15227069 NR Description: putative tropinone reductase; protein id: [Arabidopsis thaliana] >gi|25283126|pir||E84694 probable
  misc_feature (31)..(258): Homolog of NCBI NO: 15227076 NR Description: putative tropinone reductase; protein id: supported by cDNA: 2618., supported by cDNA: gi_15010623, by cDNA: gi_19699255 [Arabidopsis thaliana]

SEQ ID NO: 92182 - protein, 148 aa, Arabidopsis thaliana; identical to SEQ ID NO: 39956
  peptide (1)..(148): Ceres Seq. ID no. 12708862
  misc_feature (1)..(148): Homolog of NCBI NO: 15239327 NR Description: short chain alcohol dehydrogenase-like; protein
  misc_feature (1)..(148): Homolog of NCBI NO: 21536785 NR Description: short chain alcohol dehydrogenase-like
  misc_feature (1)..(84): Homolog of NCBI NO: 29893663 NR Description: unknown protein [Oryza sativa (japonica
  misc_feature (80)..(136): Homolog of NCBI NO: 29893663 NR Description: unknown protein [Oryza sativa (japonica
  misc_feature (1)..(148): Homolog of NCBI NO: 15227075 NR Description: putative tropinone reductase; protein id: supported by cDNA: 14555., supported by cDNA: gi_17473659, by cDNA: gi_20148626 [Arabidopsis thaliana]
  misc_feature (1)..(142): Homolog of NCBI NO: 15227060 NR Description: putative tropinone reductase; protein id: [Arabidopsis thaliana] >gi|25283419|pir||D84694 probable
  misc_feature (1)..(135): Homolog of NCBI NO: 34902058 NR Description: putative pfam00106, adh_short, short chain
  misc_feature (1)..(142): Homolog of NCBI NO: 38707448 NR Description: short chain alcohol dehydrogenase-like protein
  misc_feature (1)..(144): Homolog of NCBI NO: 15227069 NR Description: putative tropinone reductase; protein id: [Arabidopsis thaliana] >gi|25283126|pir||E84694 probable
  misc_feature (1)..(148): Homolog of NCBI NO: 15227076 NR Description: putative tropinone reductase; protein id: supported by cDNA: 2618., supported by cDNA: gi_15010623, by cDNA: gi_19699255 [Arabidopsis thaliana]

SEQ ID NO: 92183 - DNA, 767 bp, Arabidopsis thaliana; identical to SEQ ID NO: 88427
  misc_feature (1)..(767): Ceres Seq. ID no. 12708893
  misc_feature: MA Experiment ID: 108434 Result: Up-regulated in Transcription
  misc_feature: MA Experiment 108434 PARAMETER Experiment Name: At_Root_Tips_cDNA_P Parameter: Tissue Value: Root Tips
  misc_feature: MA Experiment ID: 108435 Result: Up-regulated in Transcription
  misc_feature: MA Experiment 108435 PARAMETER Experiment Name: At_stm_Mutants_cDNA_P Parameter: Plant Line Value: wt Landsburg vs stm
  misc_feature: MA Experiment 108435 PARAMETER Experiment Name: At_stm_Mutants_cDNA_P Parameter: Tissue Value: Shoot Apical Meristem Region
  misc_feature: MA Experiment ID: 108461 Result: Up-regulated in Transcription
  misc_feature: MA Experiment 108461 PARAMETER Experiment Name: At_Germinating_Seeds_cDNA_P Parameter: Age (day) Value: 1 vs. 0
  misc_feature: MA Experiment 108461 PARAMETER Experiment Name: At_Germinating_Seeds_cDNA_P Parameter: Tissue Value: Germinating Seeds
  misc_feature: MA Experiment ID: 108462 Result: Up-regulated in Transcription
  misc_feature: MA Experiment 108462 PARAMETER Experiment Name: At_Germinating_Seeds_cDNA_P Parameter: Age (day) Value: 2 vs. 0
  misc_feature: MA Experiment 108462 PARAMETER Experiment Name: At_Germinating_Seeds_cDNA_P Parameter: Tissue Value: Germinating Seeds
  misc_feature: MA Experiment ID: 108463 Result: Up-regulated in Transcription
  misc_feature: MA Experiment 108463 PARAMETER Experiment Name: At_Germinating_Seeds_cDNA_P Parameter: Age (day) Value: 3 vs. 0
  misc_feature: MA Experiment 108463 PARAMETER Experiment Name: At_Germinating_Seeds_cDNA_P Parameter: Tissue Value: Germinating Seeds
  misc_feature: MA Experiment ID: 108474 Result: Down-regulated in Transcription
  misc_feature: MA Experiment 108474 PARAMETER Experiment Name: At_Drought_Flowers_cDNA_P Parameter: Timepoint (hr) Value: null
  misc_feature: MA Experiment 108474 PARAMETER Experiment Name: At_Drought_Flowers_cDNA_P Parameter: Treatment Value: Drought vs. No Drought
  misc_feature: MA Experiment ID: 108501 Result: Up-regulated in Transcription
  misc_feature: MA Experiment 108501 PARAMETER Experiment Name: At_ap2_floral_buds_cDNA_P Parameter: Plant Line Value: ap2 (Ler.)
  misc_feature: MA Experiment 108501 PARAMETER Experiment Name: At_ap2_floral_buds_cDNA_P Parameter: Tissue Value: Closed Flower
  misc_feature: MA Experiment ID: 108561 Result: Down-regulated in Transcription
  misc_feature: MA Experiment 108561 PARAMETER Experiment Name: At_100uM_ABA_cDNA_P Parameter: Timepoint (hr) Value: 6
  misc_feature: MA Experiment 108561 PARAMETER Experiment Name: At_100uM_ABA_cDNA_P Parameter: Tissue Value: Aerial
  misc_feature: MA Experiment 108561 PARAMETER Experiment Name: At_100uM_ABA_cDNA_P Parameter: Treatment Value: 100uM ABA vs. No Treatment
  misc_feature: MA Experiment ID: 108572 Result: Down-regulated in Transcription
  misc_feature: MA Experiment 108572 PARAMETER Experiment Name: At_Drought_cDNA_P Parameter: Timepoint (hr) Value: 1
  misc_feature: MA Experiment 108572 PARAMETER Experiment Name: At_Drought_cDNA_P Parameter: Tissue Value: Aerial
  misc_feature: MA Experiment 108572 PARAMETER Experiment Name: At_Drought_cDNA_P Parameter: Treatment Value: Drought vs. No Drought
  misc_feature: MA Experiment ID: 108576 Result: Down-regulated in Transcription
  misc_feature: MA Experiment 108576 PARAMETER Experiment Name: At_42deg_Heat_cDNA_P Parameter: Temperature (deg C) Value: 42 vs. 22
  misc_feature: MA Experiment 108576 PARAMETER Experiment Name: At_42deg_Heat_cDNA_P Parameter: Timepoint (hr) Value: 1
  misc_feature: MA Experiment 108576 PARAMETER Experiment Name: At_42deg_Heat_cDNA_P Parameter: Tissue Value: Aerial
  misc_feature: MA Experiment ID: 108577 Result: Up-regulated in Transcription
  misc_feature: MA Experiment 108577 PARAMETER Experiment Name: At_42deg_Heat_cDNA_P Parameter: Temperature (deg C) Value: 42 vs. 22
  misc_feature: MA Experiment 108577 PARAMETER Experiment Name: At_42deg_Heat_cDNA_P Parameter: Timepoint (hr) Value: 6
  misc_feature: MA Experiment 108577 PARAMETER Experiment Name: At_42deg_Heat_cDNA_P Parameter: Tissue Value: Aerial
  misc_feature: MA Experiment ID: 108579 Result: Up-regulated in Transcription
  misc_feature: MA Experiment 108579 PARAMETER Experiment Name: At_4deg_Cold_cDNA_P Parameter: Temperature (deg C) Value: 4 vs. 22
  misc_feature: MA Experiment 108579 PARAMETER Experiment Name: At_4deg_Cold_cDNA_P Parameter: Timepoint (hr) Value: 6
  misc_feature: MA Experiment 108579 PARAMETER Experiment Name: At_4deg_Cold_cDNA_P Parameter: Tissue Value: Aerial
  misc_feature: MA Experiment ID: 108585 Result: Up-regulated in Transcription
  misc_feature: MA Experiment 108585 PARAMETER Experiment Name: At_5mM_NaNP_cDNA_P Parameter: Timepoint (hr) Value: 6
  misc_feature: MA Experiment 108585 PARAMETER Experiment Name: At_5mM_NaNP_cDNA_P Parameter: Tissue Value: Aerial
  misc_feature: MA Experiment 108585 PARAMETER Experiment Name: At_5mM_NaNP_cDNA_P Parameter: Treatment Value: null
  misc_feature: MA Experiment ID: 108595 Result: Up-regulated in Transcription
  misc_feature: MA Experiment 108595 PARAMETER Experiment Name: At_Ler-pi_Ovule_cDNA_P Parameter: Plant Line Value: null
  misc_feature: MA Experiment ID: 108605 Result: Down-regulated in Transcription
  misc_feature: MA Experiment 108605 PARAMETER Experiment Name: At_100uM_ABA_cDNA_P Parameter: Timepoint (hr) Value: 6
  misc_feature: MA Experiment 108605 PARAMETER Experiment Name: At_100uM_ABA_cDNA_P Parameter: Tissue Value: Aerial
  misc_feature: MA Experiment 108605 PARAMETER Experiment Name: At_100uM_ABA_cDNA_P Parameter: Treatment Value: 100uM ABA vs. No Treatment
  misc_feature: MA Experiment ID: 108668 Result: Up-regulated in Transcription
  misc_feature: MA Experiment 108668 PARAMETER Experiment Name: At_2mM_SA_cDNA_P Parameter: Plant Line Value: WS
  misc_feature: MA Experiment 108668 PARAMETER Experiment Name: At_2mM_SA_cDNA_P Parameter: Timepoint (hr) Value: 6
  misc_feature: MA Experiment 108668 PARAMETER Experiment Name: At_2mM_SA_cDNA_P Parameter: Treatment Value: 2mM SA vs. No Treatment
  misc_feature: MA Experiment ID: 20000069 Result: Down-regulated in Transcription
  misc_feature: MA Experiment 20000069 PARAMETER Experiment Name: At_100uM_ABA_Mutants_cDNA_P Parameter: Plant Line Value: CS23
  misc_feature: MA Experiment 20000069 PARAMETER Experiment Name: At_100uM_ABA_Mutants_cDNA_P Parameter: Timepoint (hr) Value: 6
  misc_feature: MA Experiment 20000069 PARAMETER Experiment Name: At_100uM_ABA_Mutants_cDNA_P Parameter: Tissue Value: Aerial
  misc_feature: MA Experiment 20000069 PARAMETER Experiment Name: At_100uM_ABA_Mutants_cDNA_P Parameter: Treatment Value: 100uM ABA vs. No Treatment
  misc_feature: MA Experiment ID: 20000070 Result: Down-regulated in Transcription
  misc_feature: MA Experiment 20000070 PARAMETER Experiment Name: At_100uM_ABA_Mutants_cDNA_P Parameter: Plant Line Value: CS24
  misc_feature: MA Experiment 20000070 PARAMETER Experiment Name: At_100uM_ABA_Mutants_cDNA_P Parameter: Timepoint (hr) Value: 6
  misc_feature: MA Experiment 20000070 PARAMETER Experiment Name: At_100uM_ABA_Mutants_cDNA_P Parameter: Tissue Value: Aerial
  misc_feature: MA Experiment 20000070 PARAMETER Experiment Name: At_100uM_ABA_Mutants_cDNA_P Parameter: Treatment Value: 100uM ABA vs. No Treatment
  misc_feature: MA Experiment ID: 20000071 Result: Down-regulated in Transcription
  misc_feature: MA Experiment 20000071 PARAMETER Experiment Name: At_100uM_ABA_Mutants_cDNA_P Parameter: Plant Line Value: CS8104
  misc_feature: MA Experiment 20000071 PARAMETER Experiment Name: At_100uM_ABA_Mutants_cDNA_P Parameter: Timepoint (hr) Value: 6
  misc_feature: MA Experiment 20000071 PARAMETER Experiment Name: At_100uM_ABA_Mutants_cDNA_P Parameter: Tissue Value: Aerial
  misc_feature: MA Experiment 20000071 PARAMETER Experiment Name: At_100uM_ABA_Mutants_cDNA_P Parameter: Treatment Value: 100uM ABA vs. No Treatment
  misc_feature: MA Experiment ID: 20000072 Result: Down-regulated in Transcription
  misc_feature: MA Experiment 20000072 PARAMETER Experiment Name: At_100uM_ABA_Mutants_cDNA_P Parameter: Plant Line Value: CS8105
  misc_feature: MA Experiment 20000072 PARAMETER Experiment Name: At_100uM_ABA_Mutants_cDNA_P Parameter: Timepoint (hr) Value: 6
  misc_feature: MA Experiment 20000072 PARAMETER Experiment Name: At_100uM_ABA_Mutants_cDNA_P Parameter: Tissue Value: Aerial
  misc_feature: MA Experiment 20000072 PARAMETER Experiment Name: At_100uM_ABA_Mutants_cDNA_P Parameter: Treatment Value: 100uM ABA vs. No Treatment
  misc_feature: MA Experiment ID: 20000087 Result: Down-regulated in Transcription
  misc_feature: MA Experiment 20000087 PARAMETER Experiment Name: At_100uM_ABA_Mutants_cDNA_P Parameter: Plant Line Value: WS
  misc_feature: MA Experiment 20000087 PARAMETER Experiment Name: At_100uM_ABA_Mutants_cDNA_P Parameter: Timepoint (hr) Value: 6
  misc_feature: MA Experiment 20000087 PARAMETER Experiment Name: At_100uM_ABA_Mutants_cDNA_P Parameter: Tissue Value: Aerial
  misc_feature: MA Experiment 20000087 PARAMETER Experiment Name: At_100uM_ABA_Mutants_cDNA_P Parameter: Treatment Value: 100uM ABA vs. No Treatment
  misc_feature: MA Experiment ID: 20000088 Result: Down-regulated in Transcription
  misc_feature: MA Experiment 20000088 PARAMETER Experiment Name: At_100uM_ABA_Mutants_cDNA_P Parameter: Plant Line Value: Landsberg
  misc_feature: MA Experiment 20000088 PARAMETER Experiment Name: At_100uM_ABA_Mutants_cDNA_P Parameter: Timepoint (hr) Value: 6
  misc_feature: MA Experiment 20000088 PARAMETER Experiment Name: At_100uM_ABA_Mutants_cDNA_P Parameter: Tissue Value: Aerial
  misc_feature: MA Experiment 20000088 PARAMETER Experiment Name: At_100uM_ABA_Mutants_cDNA_P Parameter: Treatment Value: 100uM ABA vs. No Treatment
  misc_feature: MA Experiment ID: 20000111 Result: Up-regulated in Transcription
  misc_feature: MA Experiment 20000111 PARAMETER Experiment Name: At_42deg_Heat_cDNA_P Parameter: Temperature (deg C) Value: 42 vs. 22
  misc_feature: MA Experiment 20000111 PARAMETER Experiment Name: At_42deg_Heat_cDNA_P Parameter: Timepoint (hr) Value: 6
  misc_feature: MA Experiment 20000111 PARAMETER Experiment Name: At_42deg_Heat_cDNA_P Parameter: Tissue Value: Aerial
  misc_feature: MA Experiment ID: 20000112 Result: Up-regulated in Transcription
  misc_feature: MA Experiment 20000112 PARAMETER Experiment Name: At_42deg_Heat_cDNA_P Parameter: Temperature (deg C) Value: 42 vs. 22
  misc_feature: MA Experiment 20000112 PARAMETER Experiment Name: At_42deg_Heat_cDNA_P Parameter: Timepoint (hr) Value: 2
  misc_feature: MA Experiment 20000112 PARAMETER Experiment Name: At_42deg_Heat_cDNA_P Parameter: Tissue Value: Aerial
  misc_feature: MA Experiment ID: 20000117 Result: Down-regulated in Transcription
  misc_feature: MA Experiment 20000117 PARAMETER Experiment Name: At_100uM_ABA_Mutants_cDNA_P Parameter: Plant Line Value: Columbia
  misc_feature: MA Experiment 20000117 PARAMETER Experiment Name: At_100uM_ABA_Mutants_cDNA_P Parameter: Timepoint (hr) Value: 6
  misc_feature: MA Experiment 20000117 PARAMETER Experiment Name: At_100uM_ABA_Mutants_cDNA_P Parameter: Tissue Value: Aerial
  misc_feature: MA Experiment 20000117 PARAMETER Experiment Name: At_100uM_ABA_Mutants_cDNA_P Parameter: Treatment Value: 100uM ABA vs. No Treatment
  misc_feature: MA Experiment ID: 20000144 Result: Up-regulated in Transcription
  misc_feature: MA Experiment 20000144 PARAMETER Experiment Name: At_42deg_Heat_cDNA_P Parameter: Temperature (deg C) Value: 42 vs. 22
  misc_feature: MA Experiment 20000144 PARAMETER Experiment Name: At_42deg_Heat_cDNA_P Parameter: Timepoint (hr) Value: 1
  misc_feature: MA Experiment 20000144 PARAMETER Experiment Name: At_42deg_Heat_cDNA_P Parameter: Tissue Value: Aerial
  misc_feature: MA Experiment ID: 20000169 Result: Down-regulated in Transcription
  misc_feature: MA Experiment 20000169 PARAMETER Experiment Name: At_100uM_ABA_P Parameter: Age (day) Value: 14
  misc_feature: MA Experiment 20000169 PARAMETER Experiment Name: At_100uM_ABA_P Parameter: Organism Value: A. thaliana
  misc_feature: MA Experiment 20000169 PARAMETER Experiment Name: At_100uM_ABA_P Parameter: Plant Line Value: WS
  misc_feature: MA Experiment 20000169 PARAMETER Experiment Name: At_100uM_ABA_P Parameter: Timepoint (hr) Value: 6
  misc_feature: MA Experiment 20000169 PARAMETER Experiment Name: At_100uM_ABA_P Parameter: Tissue Value: Aerial
  misc_feature: MA Experiment 20000169 PARAMETER Experiment Name: At_100uM_ABA_P Parameter: Treatment Value: 100uM ABA vs. No Treatment
  misc_feature: MA Experiment ID: 20000171 Result: Up-regulated in Transcription
  misc_feature: MA Experiment 20000171 PARAMETER Experiment Name: At_42deg_Heat_P Parameter: Age (day) Value: 14
  misc_feature: MA Experiment 20000171 PARAMETER Experiment Name: At_42deg_Heat_P Parameter: Organism Value: A. thaliana
  misc_feature: MA Experiment 20000171 PARAMETER Experiment Name: At_42deg_Heat_P Parameter: Plant Line Value: WS
  misc_feature: MA Experiment 20000171 PARAMETER Experiment Name: At_42deg_Heat_P Parameter: Temperature (deg C) Value: 42 vs. 22
  misc_feature: MA Experiment 20000171 PARAMETER Experiment Name: At_42deg_Heat_P Parameter: Timepoint (hr) Value: 1
  misc_feature: MA Experiment 20000171 PARAMETER Experiment Name: At_42deg_Heat_P Parameter: Tissue Value: Aerial
  misc_feature: MA Experiment ID: 20000173 Result: Up-regulated in Transcription
  misc_feature: MA Experiment 20000173 PARAMETER Experiment Name: At_42deg_Heat_P Parameter: Age (day) Value: 14
  misc_feature: MA Experiment 20000173 PARAMETER Experiment Name: At_42deg_Heat_P Parameter: Organism Value: A. thaliana
  misc_feature: MA Experiment 20000173 PARAMETER Experiment Name: At_42deg_Heat_P Parameter: Plant Line Value: WS
  misc_feature: MA Experiment 20000173 PARAMETER Experiment Name: At_42deg_Heat_P Parameter: Temperature (deg C) Value: 42 vs. 22
  misc_feature: MA Experiment 20000173 PARAMETER Experiment Name: At_42deg_Heat_P Parameter: Timepoint (hr) Value: 6
  misc_feature: MA Experiment 20000173 PARAMETER Experiment Name: At_42deg_Heat_P Parameter: Tissue Value: Aerial
  misc_feature: MA Experiment ID: 20000179 Result: Up-regulated in Transcription
  misc_feature: MA Experiment 20000179 PARAMETER Experiment Name: At_Germinating_Seeds_P Parameter: Age (hr) Value: 6 vs. 0
  misc_feature: MA Experiment 20000179 PARAMETER Experiment Name: At_Germinating_Seeds_P Parameter: Tissue Value: Germinating Seeds
  misc_feature: MA Experiment ID: 20000180 Result: Up-regulated in Transcription
  misc_feature: MA Experiment 20000180 PARAMETER Experiment Name: At_Germinating_Seeds_P Parameter: Age (hr) Value: 24 vs. 0
  misc_feature: MA Experiment 20000180 PARAMETER Experiment Name: At_Germinating_Seeds_P Parameter: Tissue Value: Germinating Seeds
  misc_feature: MA Experiment ID: 20000182 Result: Up-regulated in Transcription
  misc_feature: MA Experiment 20000182 PARAMETER Experiment Name: At_2mM_SA_P Parameter: Age (day) Value: 14
  misc_feature: MA Experiment 20000182 PARAMETER Experiment Name: At_2mM_SA_P Parameter: Organism Value: A. thaliana
  misc_feature: MA Experiment 20000182 PARAMETER Experiment Name: At_2mM_SA_P Parameter: Plant Line Value: WS
  misc_feature: MA Experiment 20000182 PARAMETER Experiment Name: At_2mM_SA_P Parameter: Timepoint (hr) Value: 6
  misc_feature: MA Experiment 20000182 PARAMETER Experiment Name: At_2mM_SA_P Parameter: Tissue Value: Aerial
  misc_feature: MA Experiment 20000182 PARAMETER Experiment Name: At_2mM_SA_P Parameter: Treatment Value: 2mM SA vs. No Treatment
  misc_feature: MA Experiment ID: 20000185 Result: Up-regulated in Transcription
  misc_feature: MA Experiment 20000185 PARAMETER Experiment Name: At_Roots__P Parameter: Age (day) Value: 7 vs. 21
  misc_feature: MA Experiment 20000185 PARAMETER Experiment Name: At_Roots__P Parameter: Organism Value: A. thaliana
  misc_feature: MA Experiment 20000185 PARAMETER Experiment Name: At_Roots__P Parameter: Tissue Value: Roots vs. Whole Plant
  misc_feature: MA Experiment ID: 20000213 Result: Up-regulated in Transcription
  misc_feature: MA Experiment 20000213 PARAMETER Experiment Name: At_4deg_Cold_P Parameter: Timepoint (hr) Value: 2
  misc_feature: MA Experiment ID: 20000234 Result: Up-regulated in Transcription
  misc_feature: MA Experiment 20000234 PARAMETER Experiment Name: At_Siliques_P Parameter: Age (day) Value: 21
  misc_feature: MA Experiment 20000234 PARAMETER Experiment Name: At_Siliques_P Parameter: Organism Value: A. thaliana
  misc_feature: MA Experiment 20000234 PARAMETER Experiment Name: At_Siliques_P Parameter: Plant Line Value: WS
  misc_feature: MA Experiment 20000234 PARAMETER Experiment Name: At_Siliques_P Parameter: Tissue Value: Less Than 5mm Siliques vs. Whole Plant
  misc_feature: MA Experiment ID: 20000235 Result: Up-regulated in Transcription
  misc_feature: MA Experiment 20000235 PARAMETER Experiment Name: At_Siliques_P Parameter: Age (day) Value: 21
  misc_feature: MA Experiment 20000235 PARAMETER Experiment Name: At_Siliques_P Parameter: Organism Value: A. thaliana
  misc_feature: MA Experiment 20000235 PARAMETER Experiment Name: At_Siliques_P Parameter: Plant Line Value: WS
  misc_feature: MA Experiment 20000235 PARAMETER Experiment Name: At_Siliques_P Parameter: Tissue Value: 5-10mm Siliques vs. Whole Plant
  misc_feature: MA Experiment ID: 20000264 Result: Up-regulated in Transcription
  misc_feature: MA Experiment 20000264 PARAMETER Experiment Name: At_Open_Flower_P Parameter: Age (day) Value: 21
  misc_feature: MA Experiment 20000264 PARAMETER Experiment Name: At_Open_Flower_P Parameter: Plant Line Value: WS
  misc_feature: MA Experiment 20000264 PARAMETER Experiment Name: At_Open_Flower_P Parameter: Tissue Value: Open Flower vs. Whole Plant
  misc_feature: MA Experiment ID: 20000265 Result: Up-regulated in Transcription
  misc_feature: MA Experiment 20000265 PARAMETER Experiment Name: At_Open_Flower_P Parameter: Age (day) Value: 21
  misc_feature: MA Experiment 20000265 PARAMETER Experiment Name: At_Open_Flower_P Parameter: Plant Line Value: WS
  misc_feature: MA Experiment 20000265 PARAMETER Experiment Name: At_Open_Flower_P Parameter: Tissue Value: Closed Flower vs. Whole Plant
  misc_feature: MA Experiment ID: 20000267 Result: Up-regulated in Transcription
  misc_feature: MA Experiment 20000267 PARAMETER Experiment Name: At_Drought_P Parameter: Age (day) Value: 7
  misc_feature: MA Experiment 20000267 PARAMETER Experiment Name: At_Drought_P Parameter: Organism Value: A. thaliana
  misc_feature: MA Experiment 20000267 PARAMETER Experiment Name: At_Drought_P Parameter: Plant Line Value: WS
  misc_feature: MA Experiment 20000267 PARAMETER Experiment Name: At_Drought_P Parameter: Timepoint (hr) Value: 6
  misc_feature: MA Experiment 20000267 PARAMETER Experiment Name: At_Drought_P Parameter: Tissue Value: Whole Plant
  misc_feature: MA Experiment 20000267 PARAMETER Experiment Name: At_Drought_P Parameter: Treatment Value: Drought vs. No Drought
  misc_feature: MA Experiment ID: 20000268 Result: Up-regulated in Transcription
  misc_feature: MA Experiment 20000268 PARAMETER Experiment Name: At_100mM_NaCl__P Parameter: Age (day) Value: 14
  misc_feature: MA Experiment 20000268 PARAMETER Experiment Name: At_100mM_NaCl__P Parameter: Organism Value: A. thaliana
  misc_feature: MA Experiment 20000268 PARAMETER Experiment Name: At_100mM_NaCl__P Parameter: Plant Line Value: WS
  misc_feature: MA Experiment 20000268 PARAMETER Experiment Name: At_100mM_NaCl__P Parameter: Timepoint (hr) Value: 6
  misc_feature: MA Experiment 20000268 PARAMETER Experiment Name: At_100mM_NaCl__P Parameter: Tissue Value: Whole Plant
  misc_feature: MA Experiment 20000268 PARAMETER Experiment Name: At_100mM_NaCl__P Parameter: Treatment Value: 100mM NaCl vs. No Treatment
  misc_feature: MA Experiment ID: 20000286 Result: Up-regulated in Transcription
  misc_feature: MA Experiment 20000286 PARAMETER Experiment Name: At_Open_Flower_P Parameter: Age (day) Value: 21
  misc_feature: MA Experiment 20000286 PARAMETER Experiment Name: At_Open_Flower_P Parameter: Plant Line Value: WS
  misc_feature: MA Experiment 20000286 PARAMETER Experiment Name: At_Open_Flower_P Parameter: Tissue Value: Half Open vs. Whole Plant
  misc_feature: MA Experiment ID: 20000439 Result: Up-regulated in Transcription
  misc_feature: MA Experiment 20000439 PARAMETER Experiment Name: At_Roots__P Parameter: Age (day) Value: 14 vs. 21
  misc_feature: MA Experiment 20000439 PARAMETER Experiment Name: At_Roots__P Parameter: Organism Value: A. thaliana
  misc_feature: MA Experiment 20000439 PARAMETER Experiment Name: At_Roots__P Parameter: Tissue Value: Roots vs. Whole Plant
  misc_feature: MA Experiment ID: 20000456 Result: Up-regulated in Transcription
  misc_feature: MA Experiment 20000456 PARAMETER Experiment Name: At_100uM_BA_P Parameter: Age (day) Value: 14
  misc_feature: MA Experiment 20000456 PARAMETER Experiment Name: At_100uM_BA_P Parameter: Organism Value: A. thaliana
  misc_feature: MA Experiment 20000456 PARAMETER Experiment Name: At_100uM_BA_P Parameter: Plant Line Value: WS
  misc_feature: MA Experiment 20000456 PARAMETER Experiment Name: At_100uM_BA_P Parameter: Timepoint (hr) Value: 6
  misc_feature: MA Experiment 20000456 PARAMETER Experiment Name: At_100uM_BA_P Parameter: Tissue Value: Aerial
  misc_feature: MA Experiment 20000456 PARAMETER Experiment Name: At_100uM_BA_P Parameter: Treatment Value: 100uM BA vs. No Treatment
  misc_feature: MA Experiment ID: 20000495 Result: Down-regulated in Transcription
  misc_feature: MA Experiment 20000495 PARAMETER Experiment Name: At_Guard_Cells_P Parameter: Harvest Date Value: 8/2/2002
  misc_feature: MA Experiment 20000495 PARAMETER Experiment Name: At_Guard_Cells_P Parameter: Organism Value: A. thaliana
  misc_feature: MA Experiment 20000495 PARAMETER Experiment Name: At_Guard_Cells_P Parameter: Tissue Value: Guard Cells vs. Leaves
  misc_feature: MA Experiment ID: 20000527 Result: Up-regulated in Transcription
  misc_feature: MA Experiment 20000527 PARAMETER Experiment Name: At_10percent_PEG_P Parameter: Age (day) Value: 20
  misc_feature: MA Experiment 20000527 PARAMETER Experiment Name: At_10percent_PEG_P Parameter: Organism Value: A. thaliana
  misc_feature: MA Experiment 20000527 PARAMETER Experiment Name: At_10percent_PEG_P Parameter: Plant Line Value: WS
  misc_feature: MA Experiment 20000527 PARAMETER Experiment Name: At_10percent_PEG_P Parameter: Timepoint (day) Value: 20
  misc_feature: MA Experiment 20000527 PARAMETER Experiment Name: At_10percent_PEG_P Parameter: Tissue Value: Whole Plant
  misc_feature: MA Experiment 20000527 PARAMETER Experiment Name: At_10percent_PEG_P Parameter: Treatment Value: 10percent PEG vs. No Treatment
  misc_feature: MA Experiment ID: 20000709 Result: Up-regulated in Transcription
  misc_feature: MA Experiment 20000709 PARAMETER Experiment Name: At_15mM_NH4NO3_L-to-H_P Parameter: Age (hr) Value: 14
  misc_feature: MA Experiment 20000709 PARAMETER Experiment Name: At_15mM_NH4NO3_L-to-H_P Parameter: Organism Value: A. thaliana
  misc_feature: MA Experiment 20000709 PARAMETER Experiment Name: At_15mM_NH4NO3_L-to-H_P Parameter: Plant Line Value: WS
  misc_feature: MA Experiment 20000709 PARAMETER Experiment Name: At_15mM_NH4NO3_L-to-H_P Parameter: Timepoint (hr) Value: 4
  misc_feature: MA Experiment 20000709 PARAMETER Experiment Name: At_15mM_NH4NO3_L-to-H_P Parameter: Tissue Value: Aerial
  misc_feature: MA Experiment 20000709 PARAMETER Experiment Name: At_15mM_NH4NO3_L-to-H_P Parameter: Treatment Value: 15mM NH4NO3 vs. 30mM Mannitol
  misc_feature: MA Experiment ID: 20000794 Result: Up-regulated in Transcription
  misc_feature: MA Experiment 20000794 PARAMETER Experiment Name: At_Petals_P Parameter: Age (day) Value: 23-25 days
  misc_feature: MA Experiment 20000794 PARAMETER Experiment Name: At_Petals_P Parameter: Plant Line Value: WS
  misc_feature: MA Experiment 20000794 PARAMETER Experiment Name: At_Petals_P Parameter: Tissue Value: Petals vs. Whole plant
  misc_feature: MA Experiment ID: 20001248 Result: Down-regulated in Transcription
  misc_feature: MA Experiment 20001248 PARAMETER Experiment Name: At_Far-red-induction_P Parameter: Age (day) Value: 7
  misc_feature: MA Experiment 20001248 PARAMETER Experiment Name: At_Far-red-induction_P Parameter: Light Value: Far-red vs. White
  misc_feature: MA Experiment 20001248 PARAMETER Experiment Name: At_Far-red-induction_P Parameter: Organism Value: A. thaliana
  misc_feature: MA Experiment 20001248 PARAMETER Experiment Name: At_Far-red-induction_P Parameter: Plant Line Value: Columbia
  misc_feature: MA Experiment 20001248 PARAMETER Experiment Name: At_Far-red-induction_P Parameter: Timepoint (hr) Value: 4
  misc_feature: MA Experiment 20001248 PARAMETER Experiment Name: At_Far-red-induction_P Parameter: Tissue Value: Whole Plant
  misc_feature: MA Experiment ID: 20001451 Result: Up-regulated in Transcription
  misc_feature: MA Experiment 20001451 PARAMETER Experiment Name: At_Far-red-induction_P Parameter: Age (day) Value: 7
  misc_feature: MA Experiment 20001451 PARAMETER Experiment Name: At_Far-red-induction_P Parameter: Light Value: Far-red vs. White
  misc_feature: MA Experiment 20001451 PARAMETER Experiment Name: At_Far-red-induction_P Parameter: Organism Value: A. thaliana
  misc_feature: MA Experiment 20001451 PARAMETER Experiment Name: At_Far-red-induction_P Parameter: Plant Line Value: Columbia
  misc_feature: MA Experiment 20001451 PARAMETER Experiment Name: At_Far-red-induction_P Parameter: Timepoint (hr) Value: 24
  misc_feature: MA Experiment 20001451 PARAMETER Experiment Name: At_Far-red-induction_P Parameter: Tissue Value: Whole Plant
  misc_feature: MA Experiment ID: 20001557 Result: Up-regulated in Transcription
  misc_feature: MA Experiment 20001557 PARAMETER Experiment Name: At_Drought_Soil_Dry_P Parameter: Age (day) Value: 27
  misc_feature: MA Experiment 20001557 PARAMETER Experiment Name: At_Drought_Soil_Dry_P Parameter: Organism Value: A. thaliana
  misc_feature: MA Experiment 20001557 PARAMETER Experiment Name: At_Drought_Soil_Dry_P Parameter: Plant Line Value: WS
  misc_feature: MA Experiment 20001557 PARAMETER Experiment Name: At_Drought_Soil_Dry_P Parameter: Post Timepoint (hr) Value: 3
  misc_feature: MA Experiment 20001557 PARAMETER Experiment Name: At_Drought_Soil_Dry_P Parameter: Post-Treatment Value: Re-Water vs. No Drought
  misc_feature: MA Experiment 20001557 PARAMETER Experiment Name: At_Drought_Soil_Dry_P Parameter: Timepoint (day) Value: 13
  misc_feature: MA Experiment 20001557 PARAMETER Experiment Name: At_Drought_Soil_Dry_P Parameter: Treatment Value: Drought vs. No Drought
  misc_feature: MA Experiment ID: 20001560 Result: Up-regulated in Transcription
  misc_feature: MA Experiment 20001560 PARAMETER Experiment Name: At_Drought_Soil_Dry_P Parameter: Age (day) Value: 28
  misc_feature: MA Experiment 20001560 PARAMETER Experiment Name: At_Drought_Soil_Dry_P Parameter: Organism Value: A. thaliana
  misc_feature: MA Experiment 20001560 PARAMETER Experiment Name: At_Drought_Soil_Dry_P Parameter: Plant Line Value: WS
  misc_feature: MA Experiment 20001560 PARAMETER Experiment Name: At_Drought_Soil_Dry_P Parameter: Post Timepoint (hr) Value: None
  misc_feature: MA Experiment 20001560 PARAMETER Experiment Name: At_Drought_Soil_Dry_P Parameter: Post-Treatment Value: None
  misc_feature: MA Experiment 20001560 PARAMETER Experiment Name: At_Drought_Soil_Dry_P Parameter: Timepoint (day) Value: 14
  misc_feature: MA Experiment 20001560 PARAMETER Experiment Name: At_Drought_Soil_Dry_P Parameter: Treatment Value: Drought vs. No Drought
  misc_feature: MA Experiment ID: 20001755 Result: Down-regulated in Transcription
  misc_feature: MA Experiment 20001755 PARAMETER Experiment Name: At_50mM_NH4NO3_L-to-H_P Parameter: Timepoint (hr) Value: 2
  misc_feature: MA Experiment 20001755 PARAMETER Experiment Name: At_50mM_NH4NO3_L-to-H_P Parameter: Tissue Value: Leaf
  misc_feature: MA Experiment 20001755 PARAMETER Experiment Name: At_50mM_NH4NO3_L-to-H_P Parameter: Treatment Value: 50mM NH4NO3 vs 100mM Mannitol
  misc_feature: MA Experiment ID: 20001756 Result: Up-regulated in Transcription
  misc_feature: MA Experiment 20001756 PARAMETER Experiment Name: At_50mM_NH4NO3_L-to-H_P Parameter: Timepoint (hr) Value: 4
  misc_feature: MA Experiment 20001756 PARAMETER Experiment Name: At_50mM_NH4NO3_L-to-H_P Parameter: Tissue Value: Leaf
  misc_feature: MA Experiment 20001756 PARAMETER Experiment Name: At_50mM_NH4NO3_L-to-H_P Parameter: Treatment Value: 50mM NH4NO3 vs 100mM Mannitol
  misc_feature: MA Experiment ID: 20001757 Result: Down-regulated in Transcription
  misc_feature: MA Experiment 20001757 PARAMETER Experiment Name: At_50mM_NH4NO3_L-to-H_P Parameter: Timepoint (hr) Value: 6
  misc_feature: MA Experiment 20001757 PARAMETER Experiment Name: At_50mM_NH4NO3_L-to-H_P Parameter: Tissue Value: Leaf
  misc_feature: MA Experiment 20001757 PARAMETER Experiment Name: At_50mM_NH4NO3_L-to-H_P Parameter: Treatment Value: 50mM NH4NO3 vs 100mM Mannitol
  misc_feature: MA Experiment ID: 20001760 Result: Up-regulated in Transcription
  misc_feature: MA Experiment 20001760 PARAMETER Experiment Name: At_50mM_NH4NO3_L-to-H_P Parameter: Timepoint (hr) Value: 2
  misc_feature: MA Experiment 20001760 PARAMETER Experiment Name: At_50mM_NH4NO3_L-to-H_P Parameter: Tissue Value: Siliques
  misc_feature: MA Experiment 20001760 PARAMETER Experiment Name: At_50mM_NH4NO3_L-to-H_P Parameter: Treatment Value: 50mM NH4NO3 vs 100mM Mannitol
  misc_feature: MA Experiment ID: 20001771 Result: Up-regulated in Transcription
  misc_feature: MA Experiment 20001771 PARAMETER Experiment Name: At_Far-red-enriched-adult_P Parameter: Age (day) Value: 28
  misc_feature: MA Experiment 20001771 PARAMETER Experiment Name: At_Far-red-enriched-adult_P Parameter: Light Value: Far-red enriched vs. White
  misc_feature: MA Experiment 20001771 PARAMETER Experiment Name: At_Far-red-enriched-adult_P Parameter: Organism Value: A. thaliana
  misc_feature: MA Experiment 20001771 PARAMETER Experiment Name: At_Far-red-enriched-adult_P Parameter: Plant Line Value: Columbia
  misc_feature: MA Experiment 20001771 PARAMETER Experiment Name: At_Far-red-enriched-adult_P Parameter: Timepoint (hr) Value: 16
  misc_feature: MA Experiment 20001771 PARAMETER Experiment Name: At_Far-red-enriched-adult_P Parameter: Tissue Value: Aerial
  misc_feature: MA Experiment ID: 20001904 Result: Up-regulated in Transcription
  misc_feature: MA Experiment 20001904 PARAMETER Experiment Name: At_Drought_Reproduction_P Parameter: Age (day) Value: 37
  misc_feature: MA Experiment 20001904 PARAMETER Experiment Name: At_Drought_Reproduction_P Parameter: Organism Value: A. thaliana
  misc_feature: MA Experiment 20001904 PARAMETER Experiment Name: At_Drought_Reproduction_P Parameter: Plant Line Value: WS
  misc_feature: MA Experiment 20001904 PARAMETER Experiment Name: At_Drought_Reproduction_P Parameter: Timepoint (day) Value: 7
  misc_feature: MA Experiment 20001904 PARAMETER Experiment Name: At_Drought_Reproduction_P Parameter: Tissue Value: Rosettes
  misc_feature: MA Experiment 20001904 PARAMETER Experiment Name: At_Drought_Reproduction_P Parameter: Treatment Value: Drought vs. No Drought
  misc_feature: MA Experiment ID: 20001906 Result: Up-regulated in Transcription
  misc_feature: MA Experiment 20001906 PARAMETER Experiment Name: At_Drought_Reproduction_P Parameter: Age (day) Value: 35
  misc_feature: MA Experiment 20001906 PARAMETER Experiment Name: At_Drought_Reproduction_P Parameter: Organism Value: A. thaliana
  misc_feature: MA Experiment 20001906 PARAMETER Experiment Name: At_Drought_Reproduction_P Parameter: Plant Line Value: WS
  misc_feature: MA Experiment 20001906 PARAMETER Experiment Name: At_Drought_Reproduction_P Parameter: Timepoint (day) Value: 5
  misc_feature: MA Experiment 20001906 PARAMETER Experiment Name: At_Drought_Reproduction_P Parameter: Tissue Value: Siliques
  misc_feature: MA Experiment 20001906 PARAMETER Experiment Name: At_Drought_Reproduction_P Parameter: Treatment Value: Drought vs. No Drought
  misc_feature: MA Experiment ID: 20001908 Result: Up-regulated in Transcription
  misc_feature: MA Experiment 20001908 PARAMETER Experiment Name: At_Drought_Reproduction_P Parameter: Age (day) Value: 40
  misc_feature: MA Experiment 20001908 PARAMETER Experiment Name: At_Drought_Reproduction_P Parameter: Organism Value: A. thaliana
  misc_feature: MA Experiment 20001908 PARAMETER Experiment Name: At_Drought_Reproduction_P Parameter: Plant Line Value: WS
  misc_feature: MA Experiment 20001908 PARAMETER Experiment Name: At_Drought_Reproduction_P Parameter: Timepoint (day) Value: 10
  misc_feature: MA Experiment 20001908 PARAMETER Experiment Name: At_Drought_Reproduction_P Parameter: Tissue Value: Siliques
  misc_feature: MA Experiment 20001908 PARAMETER Experiment Name: At_Drought_Reproduction_P Parameter: Treatment Value: Drought vs. No Drought

SEQ ID NO: 92184 - protein, 193 aa, Arabidopsis thaliana; identical to SEQ ID NO: 88428
  peptide (1)..(193): Ceres Seq. ID no. 12708894
  misc_feature (1)..(193): Homolog of NCBI NO: 18414282 NR Description: Expressed protein; protein id: At4g14690.1, by cDNA: 95834., supported by cDNA: gi_17104736 [Arabidopsis >gi|13878007|gb|AAK44081.1|AF370266_1 unknown protein
  misc_feature (1)..(192): Homolog of NCBI NO: 7488128 NR Description: probable light induced protein - Arabidopsis >gi|2244825|emb|CAB10248.1| light induced protein like thaliana] >gi|7268175|emb|CAB78511.1| light induced protein like
  misc_feature (1)..(193): Homolog of NCBI NO: 21618071 NR Description: light-induced protein-like protein [Arabidopsis
  misc_feature (8)..(193): Homolog of NCBI NO: 25315849 NR Description: early light-inducable protein [imported] -
  misc_feature (1)..(193): Homolog of NCBI NO: 15228866 NR Description: early light-induced protein; protein id: supported by cDNA: 14490., supported by cDNA: gi_15982904, by cDNA: gi_18700134, supported by cDNA: gi_1872543, supported by
  misc_feature (1)..(193): Homolog of NCBI NO: 38123375 NR Description: ELIP [Brassica rapa subsp. pekinensis]
  misc_feature (50)..(193): Homolog of NCBI NO: 16930757 NR Description: early light-induced protein-like protein [Retama

SEQ ID NO: 92185 - protein, 186 aa, Arabidopsis thaliana; identical to SEQ ID NO: 76280
  peptide (1)..(186): Ceres Seq. ID no. 12708895
  misc_feature (1)..(186): Homolog of NCBI NO: 18414282 NR Description: Expressed protein; protein id: At4g14690.1, by cDNA: 95834., supported by cDNA: gi_17104736 [Arabidopsis >gi|13878007|gb|AAK44081.1|AF370266_1 unknown protein
  misc_feature (1)..(185): Homolog of NCBI NO: 7488128 NR Description: probable light induced protein - Arabidopsis >gi|2244825|emb|CAB10248.1| light induced protein like thaliana] >gi|7268175|emb|CAB78511.1| light induced protein like
  misc_feature (1)..(186): Homolog of NCBI NO: 21618071 NR Description: light-induced protein-like protein [Arabidopsis
  misc_feature (1)..(186): Homolog of NCBI NO: 25315849 NR Description: early light-inducable protein [imported] -
  misc_feature (1)..(186): Homolog of NCBI NO: 15228866 NR Description: early light-induced protein; protein id: supported by cDNA: 14490., supported by cDNA: gi_15982904, by cDNA: gi_18700134, supported by cDNA: gi_1872543, supported by
  misc_feature (1)..(186): Homolog of NCBI NO: 38123375 NR Description: ELIP [Brassica rapa subsp. pekinensis]
  misc_feature (43)..(186): Homolog of NCBI NO: 16930757 NR Description: early light-induced protein-like protein [Retama

SEQ ID NO: 92186 - protein, 151 aa, Arabidopsis thaliana; identical to SEQ ID NO: 76281
  peptide (1)..(151): Ceres Seq. ID no. 12708896
  misc_feature (1)..(151): Homolog of NCBI NO: 18414282 NR Description: Expressed protein; protein id: At4g14690.1, by cDNA: 95834., supported by cDNA: gi_17104736 [Arabidopsis >gi|13878007|gb|AAK44081.1|AF370266_1 unknown protein
  misc_feature (1)..(150): Homolog of NCBI NO: 7488128 NR Description: probable light induced protein - Arabidopsis >gi|2244825|emb|CAB10248.1| light induced protein like thaliana] >gi|7268175|emb|CAB78511.1| light induced protein like
  misc_feature (1)..(151): Homolog of NCBI NO: 21618071 NR Description: light-induced protein-like protein [Arabidopsis
  misc_feature (1)..(151): Homolog of NCBI NO: 25315849 NR Description: early light-inducable protein [imported] -
  misc_feature (1)..(151): Homolog of NCBI NO: 15228866 NR Description: early light-induced protein; protein id: supported by cDNA: 14490., supported by cDNA: gi_15982904, by cDNA: gi_18700134, supported by cDNA: gi_1872543, supported by
  misc_feature (1)..(151): Homolog of NCBI NO: 38123375 NR Description: ELIP [Brassica rapa subsp. pekinensis]
  misc_feature (8)..(151): Homolog of NCBI NO: 16930757 NR Description: early light-induced protein-like protein [Retama

SEQ ID NO: 92187 - DNA, 708 bp, Arabidopsis thaliana; identical to SEQ ID NO: 88431
  misc_feature (1)..(708): Ceres Seq. ID no. 12708910
  misc_feature: MA Experiment ID: 20000234 Result: Up-regulated in Transcription
  misc_feature: MA Experiment 20000234 PARAMETER Experiment Name: At_Siliques_P Parameter: Age (day) Value: 21
  misc_feature: MA Experiment 20000234 PARAMETER Experiment Name: At_Siliques_P Parameter: Organism Value: A. thaliana
  misc_feature: MA Experiment 20000234 PARAMETER Experiment Name: At_Siliques_P Parameter: Plant Line Value: WS
  misc_feature: MA Experiment 20000234 PARAMETER Experiment Name: At_Siliques_P Parameter: Tissue Value: Less Than 5mm Siliques vs. Whole Plant
  misc_feature: MA Experiment ID: 20000265 Result: Up-regulated in Transcription
  misc_feature: MA Experiment 20000265 PARAMETER Experiment Name: At_Open_Flower_P Parameter: Age (day) Value: 21
  misc_feature: MA Experiment 20000265 PARAMETER Experiment Name: At_Open_Flower_P Parameter: Plant Line Value: WS
  misc_feature: MA Experiment 20000265 PARAMETER Experiment Name: At_Open_Flower_P Parameter: Tissue Value: Closed Flower vs. Whole Plant
  misc_feature: MA Experiment ID: 20000286 Result: Up-regulated in Transcription
  misc_feature: MA Experiment 20000286 PARAMETER Experiment Name: At_Open_Flower_P Parameter: Age (day) Value: 21
  misc_feature: MA Experiment 20000286 PARAMETER Experiment Name: At_Open_Flower_P Parameter: Plant Line Value: WS
  misc_feature: MA Experiment 20000286 PARAMETER Experiment Name: At_Open_Flower_P Parameter: Tissue Value: Half Open vs. Whole Plant

SEQ ID NO: 92188 - protein, 235 aa, Arabidopsis thaliana; identical to SEQ ID NO: 88432
  peptide (1)..(235): Ceres Seq. ID no. 12708911
  misc_feature (21)..(232): Pfam Name: Uncharacterised protein family UPF0005 Pfam Description: Uncharacterised protein family UPF0005
  misc_feature (3)..(232): Homolog of NCBI NO: 15218701 NR Description: putative glutamate/aspartate-binding peptide;
  misc_feature (5)..(230): Homolog of NCBI NO: 34393841 NR Description: putative z-protein [Oryza sativa (japonica
  misc_feature (3)..(233): Homolog of NCBI NO: 15229411 NR Description: putative protein; protein id: At3g63310.1
  misc_feature (14)..(230): Homolog of NCBI NO: 14626300 NR Description: putative receptor-associated protein [Oryza
  misc_feature (3)..(233): Homolog of NCBI NO: 15235466 NR Description: putative glutamate-/aspartate-binding peptide; id: At4g02690.1 [Arabidopsis thaliana] >gi|7486855|pir||T01080
  misc_feature (5)..(233): Homolog of NCBI NO: 18414455 NR Description: Expressed protein; protein id: At4g15470.1, by cDNA: gi_15215826, supported by cDNA: gi_15810200, supported cDNA: gi_20453266 [Arabidopsis thaliana]
  misc_feature (18)..(229): Homolog of NCBI NO: 34393840 NR Description: putative z-protein [Oryza sativa (japonica
  misc_feature (5)..(201): Homolog of NCBI NO: 15810201 NR Description: AT4g15470/dl3775w [Arabidopsis thaliana]
  misc_feature (5)..(81): Homolog of NCBI NO: 7485070 NR Description: hypothetical protein - Arabidopsis thaliana hypothetical protein [Arabidopsis thaliana]
  misc_feature (118)..(189): Homolog of NCBI NO: 7485070 NR Description: hypothetical protein - Arabidopsis thaliana hypothetical protein [Arabidopsis thaliana]

SEQ ID NO: 92189 - protein, 218 aa, Arabidopsis thaliana; identical to SEQ ID NO: 88433
  peptide (1)..(218): Ceres Seq. ID no. 12708912
  misc_feature (4)..(215): Pfam Name: Uncharacterised protein family UPF0005 Pfam Description: Uncharacterised protein family UPF0005
  misc_feature (1)..(215): Homolog of NCBI NO: 15218701 NR Description: putative glutamate/aspartate-binding peptide;
  misc_feature (1)..(213): Homolog of NCBI NO: 34393841 NR Description: putative z-protein [Oryza sativa (japonica
  misc_feature (1)..(216): Homolog of NCBI NO: 15229411 NR Description: putative protein; protein id: At3g63310.1
  misc_feature (1)..(213): Homolog of NCBI NO: 14626300 NR Description: putative receptor-associated protein [Oryza
  misc_feature (1)..(216): Homolog of NCBI NO: 15235466 NR Description: putative glutamate-/aspartate-binding peptide; id: At4g02690.1 [Arabidopsis thaliana] >gi|7486855|pir||T01080
  misc_feature (1)..(216): Homolog of NCBI NO: 18414455 NR Description: Expressed protein; protein id: At4g15470.1, by cDNA: gi_15215826, supported by cDNA: gi_15810200, supported cDNA: gi_20453266 [Arabidopsis thaliana]
  misc_feature (1)..(212): Homolog of NCBI NO: 34393840 NR Description: putative z-protein [Oryza sativa (japonica
  misc_feature (1)..(184): Homolog of NCBI NO: 15810201 NR Description: AT4g15470/dl3775w [Arabidopsis thaliana]
  misc_feature (1)..(64): Homolog of NCBI NO: 7485070 NR Description: hypothetical protein - Arabidopsis thaliana hypothetical protein [Arabidopsis thaliana]
  misc_feature (101)..(172): Homolog of NCBI NO: 7485070 NR Description: hypothetical protein - Arabidopsis thaliana hypothetical protein [Arabidopsis thaliana]

SEQ ID NO: 92190 - DNA, 1464 bp, Arabidopsis thaliana; identical to SEQ ID NO: 88434
  misc_feature (1)..(1464): Ceres Seq. ID no. 12708925
  misc_feature: MA Experiment ID: 20000180 Result: Up-regulated in Transcription
  misc_feature: MA Experiment 20000180 PARAMETER Experiment Name: At_Germinating_Seeds_P Parameter: Age (hr) Value: 24 vs. 0
  misc_feature: MA Experiment 20000180 PARAMETER Experiment Name: At_Germinating_Seeds_P Parameter: Tissue Value: Germinating Seeds
  misc_feature: MA Experiment ID: 20000234 Result: Up-regulated in Transcription
  misc_feature: MA Experiment 20000234 PARAMETER Experiment Name: At_Siliques_P Parameter: Age (day) Value: 21
  misc_feature: MA Experiment 20000234 PARAMETER Experiment Name: At_Siliques_P Parameter: Organism Value: A. thaliana
  misc_feature: MA Experiment 20000234 PARAMETER Experiment Name: At_Siliques_P Parameter: Plant Line Value: WS
  misc_feature: MA Experiment 20000234 PARAMETER Experiment Name: At_Siliques_P Parameter: Tissue Value: Less Than 5mm Siliques vs. Whole Plant
  misc_feature: MA Experiment ID: 20000264 Result: Up-regulated in Transcription
  misc_feature: MA Experiment 20000264 PARAMETER Experiment Name: At_Open_Flower_P Parameter: Age (day) Value: 21
  misc_feature: MA Experiment 20000264 PARAMETER Experiment Name: At_Open_Flower_P Parameter: Plant Line Value: WS
  misc_feature: MA Experiment 20000264 PARAMETER Experiment Name: At_Open_Flower_P Parameter: Tissue Value: Open Flower vs. Whole Plant
  misc_feature: MA Experiment ID: 20000265 Result: Up-regulated in Transcription
  misc_feature: MA Experiment 20000265 PARAMETER Experiment Name: At_Open_Flower_P Parameter: Age (day) Value: 21
  misc_feature: MA Experiment 20000265 PARAMETER Experiment Name: At_Open_Flower_P Parameter: Plant Line Value: WS
  misc_feature: MA Experiment 20000265 PARAMETER Experiment Name: At_Open_Flower_P Parameter: Tissue Value: Closed Flower vs. Whole Plant
  misc_feature: MA Experiment ID: 20000438 Result: Up-regulated in Transcription
  misc_feature: MA Experiment 20000438 PARAMETER Experiment Name: At_Shoots__P Parameter: Age (day) Value: 14
  misc_feature: MA Experiment 20000438 PARAMETER Experiment Name: At_Shoots__P Parameter: Tissue Value: Shoots vs. Whole Plant
  misc_feature: MA Experiment ID: 20000495 Result: Up-regulated in Transcription
  misc_feature: MA Experiment 20000495 PARAMETER Experiment Name: At_Guard_Cells_P Parameter: Harvest Date Value: 8/2/2002
  misc_feature: MA Experiment 20000495 PARAMETER Experiment Name: At_Guard_Cells_P Parameter: Organism Value: A. thaliana
  misc_feature: MA Experiment 20000495 PARAMETER Experiment Name: At_Guard_Cells_P Parameter: Tissue Value: Guard Cells vs. Leaves
  misc_feature: MA Experiment ID: 20001248 Result: Down-regulated in Transcription
  misc_feature: MA Experiment 20001248 PARAMETER Experiment Name: At_Far-red-induction_P Parameter: Age (day) Value: 7
  misc_feature: MA Experiment 20001248 PARAMETER Experiment Name: At_Far-red-induction_P Parameter: Light Value: Far-red vs. White
  misc_feature: MA Experiment 20001248 PARAMETER Experiment Name: At_Far-red-induction_P Parameter: Organism Value: A. thaliana
  misc_feature: MA Experiment 20001248 PARAMETER Experiment Name: At_Far-red-induction_P Parameter: Plant Line Value: Columbia
  misc_feature: MA Experiment 20001248 PARAMETER Experiment Name: At_Far-red-induction_P Parameter: Timepoint (hr) Value: 4
  misc_feature: MA Experiment 20001248 PARAMETER Experiment Name: At_Far-red-induction_P Parameter: Tissue Value: Whole Plant
  misc_feature: MA Experiment ID: 20001450 Result: Down-regulated in Transcription
  misc_feature: MA Experiment 20001450 PARAMETER Experiment Name: At_Far-red-induction_P Parameter: Age (day) Value: 7
  misc_feature: MA Experiment 20001450 PARAMETER Experiment Name: At_Far-red-induction_P Parameter: Light Value: Far-red vs. White
  misc_feature: MA Experiment 20001450 PARAMETER Experiment Name: At_Far-red-induction_P Parameter: Organism Value: A. thaliana
  misc_feature: MA Experiment 20001450 PARAMETER Experiment Name: At_Far-red-induction_P Parameter: Plant Line Value: Columbia
  misc_feature: MA Experiment 20001450 PARAMETER Experiment Name: At_Far-red-induction_P Parameter: Timepoint (hr) Value: 8
  misc_feature: MA Experiment 20001450 PARAMETER Experiment Name: At_Far-red-induction_P Parameter: Tissue Value: Whole Plant
  misc_feature: MA Experiment ID: 20001906 Result: Up-regulated in Transcription
  misc_feature: MA Experiment 20001906 PARAMETER Experiment Name: At_Drought_Reproduction_P Parameter: Age (day) Value: 35
  misc_feature: MA Experiment 20001906 PARAMETER Experiment Name: At_Drought_Reproduction_P Parameter: Organism Value: A. thaliana
  misc_feature: MA Experiment 20001906 PARAMETER Experiment Name: At_Drought_Reproduction_P Parameter: Plant Line Value: WS
  misc_feature: MA Experiment 20001906 PARAMETER Experiment Name: At_Drought_Reproduction_P Parameter: Timepoint (day) Value: 5
  misc_feature: MA Experiment 20001906 PARAMETER Experiment Name: At_Drought_Reproduction_P Parameter: Tissue Value: Siliques
  misc_feature: MA Experiment 20001906 PARAMETER Experiment Name: At_Drought_Reproduction_P Parameter: Treatment Value: Drought vs. No Drought
  misc_feature: MA Experiment ID: 20001911 Result: Down-regulated in Transcription
  misc_feature: MA Experiment 20001911 PARAMETER Experiment Name: At_Drought_Reproduction_P Parameter: Age (day) Value: 40
  misc_feature: MA Experiment 20001911 PARAMETER Experiment Name: At_Drought_Reproduction_P Parameter: Organism Value: A. thaliana
  misc_feature: MA Experiment 20001911 PARAMETER Experiment Name: At_Drought_Reproduction_P Parameter: Plant Line Value: WS
  misc_feature: MA Experiment 20001911 PARAMETER Experiment Name: At_Drought_Reproduction_P Parameter: Timepoint (day) Value: 10
  misc_feature: MA Experiment 20001911 PARAMETER Experiment Name: At_Drought_Reproduction_P Parameter: Tissue Value: Flowers
  misc_feature: MA Experiment 20001911 PARAMETER Experiment Name: At_Drought_Reproduction_P Parameter: Treatment Value: Drought vs. No Drought

SEQ ID NO: 92191 - protein, 487 aa, Arabidopsis thaliana; identical to SEQ ID NO: 88435
  peptide (1)..(487): Ceres Seq. ID no. 12708926
  misc_feature (271)..(312): Pfam Name: Tesmin/TSO1-like CXC domain Pfam Description: Tesmin/TSO1-like CXC domain
  misc_feature (21)..(487): Homolog of NCBI NO: 15233572 NR Description: hypothetical protein; protein id: At4g14770.1
  misc_feature (1)..(21): Homolog of NCBI NO: 15233572 NR Description: hypothetical protein; protein id: At4g14770.1
  misc_feature (15)..(485): Homolog of NCBI NO: 6739821 NR Description: putative DNA binding protein [Arabidopsis >gi|7767425|gb|AAF69124.1|AF204059_1 CXC domain protein TSO1
  misc_feature (15)..(485): Homolog of NCBI NO: 30686784 NR Description: DNA binding protein -related [Arabidopsis
  misc_feature (15)..(485): Homolog of NCBI NO: 23297130 NR Description: putative DNA binding protein [Arabidopsis
  misc_feature (15)..(485): Homolog of NCBI NO: 15028139 NR Description: putative DNA binding protein [Arabidopsis
  misc_feature (12)..(459): Homolog of NCBI NO: 7767427 NR Description: CXC domain containing TSO1-like protein 1
  misc_feature (12)..(459): Homolog of NCBI NO: 18403510 NR Description: expressed protein; protein id: At3g22760.1, by cDNA: gi_20466373, supported by cDNA: gi_7767426 [Arabidopsis >gi|20466374|gb|AAM20504.1| unknown protein [Arabidopsis
  misc_feature (1)..(21): Homolog of NCBI NO: 7767427 NR Description: CXC domain containing TSO1-like protein 1
  misc_feature (1)..(21): Homolog of NCBI NO: 18403510 NR Description: expressed protein; protein id: At3g22760.1, by cDNA: gi_20466373, supported by cDNA: gi_7767426 [Arabidopsis >gi|20466374|gb|AAM20504.1| unknown protein [Arabidopsis

SEQ ID NO: 92192 - protein, 449 aa, Arabidopsis thaliana; identical to SEQ ID NO: 88436
  peptide (1)..(449): Ceres Seq. ID no. 12708927
  misc_feature (233)..(274): Pfam Name: Tesmin/TSO1-like CXC domain Pfam Description: Tesmin/TSO1-like CXC domain
  misc_feature (1)..(449): Homolog of NCBI NO: 15233572 NR Description: hypothetical protein; protein id: At4g14770.1
  misc_feature (1)..(447): Homolog of NCBI NO: 6739821 NR Description: putative DNA binding protein [Arabidopsis >gi|7767425|gb|AAF69124.1|AF204059_1 CXC domain protein TSO1
  misc_feature (1)..(447): Homolog of NCBI NO: 30686784 NR Description: DNA binding protein -related [Arabidopsis
  misc_feature (1)..(447): Homolog of NCBI NO: 23297130 NR Description: putative DNA binding protein [Arabidopsis
  misc_feature (1)..(447): Homolog of NCBI NO: 15028139 NR Description: putative DNA binding protein [Arabidopsis
  misc_feature (1)..(421): Homolog of NCBI NO: 7767427 NR Description: CXC domain containing TSO1-like protein 1
  misc_feature (1)..(421): Homolog of NCBI NO: 18403510 NR Description: expressed protein; protein id: At3g22760.1, by cDNA: gi_20466373, supported by cDNA: gi_7767426 [Arabidopsis >gi|20466374|gb|AAM20504.1| unknown protein [Arabidopsis
  misc_feature (1)..(254): Homolog of NCBI NO: 9279694 NR Description: DNA binding protein-like [Arabidopsis thaliana]
  misc_feature (258)..(449): Homolog of NCBI NO: 9279694 NR Description: DNA binding protein-like [Arabidopsis thaliana]
  misc_feature (17)..(445): Homolog of NCBI NO: 34393829 NR Description: putative CXC domain protein TSO1 [Oryza sativa

SEQ ID NO: 92193 - protein, 414 aa, Arabidopsis thaliana; identical to SEQ ID NO: 88437
  peptide (1)..(414): Ceres Seq. ID no. 12708928
  misc_feature (198)..(239): Pfam Name: Tesmin/TSO1-like CXC domain Pfam Description: Tesmin/TSO1-like CXC domain
  misc_feature (1)..(414): Homolog of NCBI NO: 15233572 NR Description: hypothetical protein; protein id: At4g14770.1
  misc_feature (1)..(412): Homolog of NCBI NO: 6739821 NR Description: putative DNA binding protein [Arabidopsis >gi|7767425|gb|AAF69124.1|AF204059_1 CXC domain protein TSO1
  misc_feature (1)..(412): Homolog of NCBI NO: 23297130 NR Description: putative DNA binding protein [Arabidopsis
  misc_feature (1)..(412): Homolog of NCBI NO: 30686784 NR Description: DNA binding protein -related [Arabidopsis
  misc_feature (1)..(412): Homolog of NCBI NO: 15028139 NR Description: putative DNA binding protein [Arabidopsis
  misc_feature (1)..(386): Homolog of NCBI NO: 7767427 NR Description: CXC domain containing TSO1-like protein 1
  misc_feature (1)..(386): Homolog of NCBI NO: 18403510 NR Description: expressed protein; protein id: At3g22760.1, by cDNA: gi_20466373, supported by cDNA: gi_7767426 [Arabidopsis >gi|20466374|gb|AAM20504.1| unknown protein [Arabidopsis
  misc_feature (1)..(219): Homolog of NCBI NO: 9279694 NR Description: DNA binding protein-like [Arabidopsis thaliana]
  misc_feature (223)..(414): Homolog of NCBI NO: 9279694 NR Description: DNA binding protein-like [Arabidopsis thaliana]
  misc_feature (1)..(410): Homolog of NCBI NO: 34393829 NR Description: putative CXC domain protein TSO1 [Oryza sativa

SEQ ID NO: 92194 - DNA, 1585 bp, Arabidopsis thaliana; identical to SEQ ID NO: 88438
  misc_feature (1)..(1585): Ceres Seq. ID no. 12709017
  misc_feature: MA Experiment ID: 108434 Result: Down-regulated in Transcription
  misc_feature: MA Experiment 108434 PARAMETER Experiment Name: At_Root_Tips_cDNA_P Parameter: Tissue Value: Root Tips
  misc_feature: MA Experiment ID: 108464 Result: Up-regulated in Transcription
  misc_feature: MA Experiment 108464 PARAMETER Experiment Name: At_Germinating_Seeds_cDNA_P Parameter: Age (day) Value: 4 vs. 0
  misc_feature: MA Experiment 108464 PARAMETER Experiment Name: At_Germinating_Seeds_cDNA_P Parameter: Tissue Value: Germinating Seeds
  misc_feature: MA Experiment ID: 108501 Result: Up-regulated in Transcription
  misc_feature: MA Experiment 108501 PARAMETER Experiment Name: At_ap2_floral_buds_cDNA_P Parameter: Plant Line Value: ap2 (Ler.)
  misc_feature: MA Experiment 108501 PARAMETER Experiment Name: At_ap2_floral_buds_cDNA_P Parameter: Tissue Value: Closed Flower
  misc_feature: MA Experiment ID: 108561 Result: Up-regulated in Transcription
  misc_feature: MA Experiment 108561 PARAMETER Experiment Name: At_100uM_ABA_cDNA_P Parameter: Timepoint (hr) Value: 6
  misc_feature: MA Experiment 108561 PARAMETER Experiment Name: At_100uM_ABA_cDNA_P Parameter: Tissue Value: Aerial
  misc_feature: MA Experiment 108561 PARAMETER Experiment Name: At_100uM_ABA_cDNA_P Parameter: Treatment Value: 100uM ABA vs. No Treatment
  misc_feature: MA Experiment ID: 108576 Result: Up-regulated in Transcription
  misc_feature: MA Experiment 108576 PARAMETER Experiment Name: At_42deg_Heat_cDNA_P Parameter: Temperature (deg C) Value: 42 vs. 22
  misc_feature: MA Experiment 108576 PARAMETER Experiment Name: At_42deg_Heat_cDNA_P Parameter: Timepoint (hr) Value: 1
  misc_feature: MA Experiment 108576 PARAMETER Experiment Name: At_42deg_Heat_cDNA_P Parameter: Tissue Value: Aerial
  misc_feature: MA Experiment ID: 108577 Result: Up-regulated in Transcription
  misc_feature: MA Experiment 108577 PARAMETER Experiment Name: At_42deg_Heat_cDNA_P Parameter: Temperature (deg C) Value: 42 vs. 22
  misc_feature: MA Experiment 108577 PARAMETER Experiment Name: At_42deg_Heat_cDNA_P Parameter: Timepoint (hr) Value: 6
  misc_feature: MA Experiment 108577 PARAMETER Experiment Name: At_42deg_Heat_cDNA_P Parameter: Tissue Value: Aerial
  misc_feature: MA Experiment ID: 20000111 Result: Up-regulated in Transcription
  misc_feature: MA Experiment 20000111 PARAMETER Experiment Name: At_42deg_Heat_cDNA_P Parameter: Temperature (deg C) Value: 42 vs. 22
  misc_feature: MA Experiment 20000111 PARAMETER Experiment Name: At_42deg_Heat_cDNA_P Parameter: Timepoint (hr) Value: 6
  misc_feature: MA Experiment 20000111 PARAMETER Experiment Name: At_42deg_Heat_cDNA_P Parameter: Tissue Value: Aerial
  misc_feature: MA Experiment ID: 20000112 Result: Up-regulated in Transcription
  misc_feature: MA Experiment 20000112 PARAMETER Experiment Name: At_42deg_Heat_cDNA_P Parameter: Temperature (deg C) Value: 42 vs. 22
  misc_feature: MA Experiment 20000112 PARAMETER Experiment Name: At_42deg_Heat_cDNA_P Parameter: Timepoint (hr) Value: 2
  misc_feature: MA Experiment 20000112 PARAMETER Experiment Name: At_42deg_Heat_cDNA_P Parameter: Tissue Value: Aerial
  misc_feature: MA Experiment ID: 20000113 Result: Up-regulated in Transcription
  misc_feature: MA Experiment 20000113 PARAMETER Experiment Name: At_42deg_Heat_cDNA_P Parameter: Temperature (deg C) Value: 42 vs. 22
  misc_feature: MA Experiment 20000113 PARAMETER Experiment Name: At_42deg_Heat_cDNA_P Parameter: Timepoint (hr) Value: 8
  misc_feature: MA Experiment 20000113 PARAMETER Experiment Name: At_42deg_Heat_cDNA_P Parameter: Tissue Value: Aerial
  misc_feature: MA Experiment ID: 20000144 Result: Up-regulated in Transcription
  misc_feature: MA Experiment 20000144 PARAMETER Experiment Name: At_42deg_Heat_cDNA_P Parameter: Temperature (deg C) Value: 42 vs. 22
  misc_feature: MA Experiment 20000144 PARAMETER Experiment Name: At_42deg_Heat_cDNA_P Parameter: Timepoint (hr) Value: 1
  misc_feature: MA Experiment 20000144 PARAMETER Experiment Name: At_42deg_Heat_cDNA_P Parameter: Tissue Value: Aerial
  misc_feature: MA Experiment ID: 20000573 Result: Up-regulated in Transcription
  misc_feature: MA Experiment 20000573 PARAMETER Experiment Name: At_100uM_ABA_Mutants__P Parameter: Organism Value: A. thaliana
  misc_feature: MA Experiment 20000573 PARAMETER Experiment Name: At_100uM_ABA_Mutants__P Parameter: Plant Line Value: CS22 vs. Ler wt
  misc_feature: MA Experiment 20000573 PARAMETER Experiment Name: At_100uM_ABA_Mutants__P Parameter: Timepoint (hr) Value: N/A
  misc_feature: MA Experiment 20000573 PARAMETER Experiment Name: At_100uM_ABA_Mutants__P Parameter: Tissue Value: Whole Plant
  misc_feature: MA Experiment 20000573 PARAMETER Experiment Name: At_100uM_ABA_Mutants__P Parameter: Treatment Value: None

SEQ ID NO: 92195 - protein, 478 aa, Arabidopsis thaliana; identical to SEQ ID NO: 88439
  peptide (1)..(478): Ceres Seq. ID no. 12709018
  misc_feature (23)..(477): Pfam Name: UDP-glucoronosyl and UDP-glucosyl transferase Pfam Description: UDP-glucoronosyl and UDP-glucosyl transferase
  misc_feature (1)..(478): Homolog of NCBI NO: 15233761 NR Description: UTP-glucose glucosyltransferase; protein id:
  misc_feature (63)..(477): Homolog of NCBI NO: 7488111 NR Description: probable glucosyltransferase - Arabidopsis >gi|2244884|emb|CAB10305.1| glucosyltransferase [Arabidopsis >gi|7268273|emb|CAB78568.1| glucosyltransferase [Arabidopsis
  misc_feature (2)..(30): Homolog of NCBI NO: 7488111 NR Description: probable glucosyltransferase - Arabidopsis >gi|2244884|emb|CAB10305.1| glucosyltransferase [Arabidopsis >gi|7268273|emb|CAB78568.1| glucosyltransferase [Arabidopsis
  misc_feature (1)..(477): Homolog of NCBI NO: 11994646 NR Description: UTP-glucose glucosyltransferase [Arabidopsis
  misc_feature (1)..(477): Homolog of NCBI NO: 15233157 NR Description: putative UDP-glucose glucosyltransferase; protein
  misc_feature (1)..(477): Homolog of NCBI NO: 11994645 NR Description: UTP-glucose glucosyltransferase [Arabidopsis
  misc_feature (1)..(477): Homolog of NCBI NO: 15233151 NR Description: putative UDP-glucose glucosyltransferase; protein At3g21760.1, supported by cDNA: gi_13937235, supported by cDNA:
  misc_feature (2)..(473): Homolog of NCBI NO: 15233158 NR Description: putative UDP-glucose glucosyltransferase; protein
  misc_feature (56)..(477): Homolog of NCBI NO: 15233155 NR Description: putative UDP-glucose glucosyltransferase; protein
  misc_feature (1)..(477): Homolog of NCBI NO: 15233149 NR Description: UDP-glycosyltransferase family; protein id:

SEQ ID NO: 92196 - protein, 360 aa, Arabidopsis thaliana; identical to SEQ ID NO: 88440
  peptide (1)..(360): Ceres Seq. ID no. 12709019
  misc_feature (1)..(359): Pfam Name: UDP-glucoronosyl and UDP-glucosyl transferase Pfam Description: UDP-glucoronosyl and UDP-glucosyl transferase
  misc_feature (1)..(360): Homolog of NCBI NO: 15233761 NR Description: UTP-glucose glucosyltransferase; protein id:
  misc_feature (1)..(359): Homolog of NCBI NO: 7488111 NR Description: probable glucosyltransferase - Arabidopsis >gi|2244884|emb|CAB10305.1| glucosyltransferase [Arabidopsis >gi|7268273|emb|CAB78568.1| glucosyltransferase [Arabidopsis
  misc_feature (1)..(359): Homolog of NCBI NO: 11994646 NR Description: UTP-glucose glucosyltransferase [Arabidopsis
  misc_feature (1)..(359): Homolog of NCBI NO: 15233157 NR Description: putative UDP-glucose glucosyltransferase; protein
  misc_feature (1)..(359): Homolog of NCBI NO: 11994645 NR Description: UTP-glucose glucosyltransferase [Arabidopsis
  misc_feature (1)..(359): Homolog of NCBI NO: 15233151 NR Description: putative UDP-glucose glucosyltransferase; protein At3g21760.1, supported by cDNA: gi_13937235, supported by cDNA:
  misc_feature (1)..(355): Homolog of NCBI NO: 15233158 NR Description: putative UDP-glucose glucosyltransferase; protein
  misc_feature (1)..(359): Homolog of NCBI NO: 15233155 NR Description: putative UDP-glucose glucosyltransferase; protein
  misc_feature (1)..(359): Homolog of NCBI NO: 15233149 NR Description: UDP-glycosyltransferase family; protein id:
  misc_feature (1)..(358): Homolog of NCBI NO: 30680040 NR Description: glycosyltransferase family [Arabidopsis thaliana]

SEQ ID NO: 92197 - protein, 355 aa, Arabidopsis thaliana; identical to SEQ ID NO: 88441
  peptide (1)..(355): Ceres Seq. ID no. 12709020
  misc_feature (1)..(354): Pfam Name: UDP-glucoronosyl and UDP-glucosyl transferase Pfam Description: UDP-glucoronosyl and UDP-glucosyl transferase
  misc_feature (1)..(355): Homolog of NCBI NO: 15233761 NR Description: UTP-glucose glucosyltransferase; protein id:
  misc_feature (1)..(354): Homolog of NCBI NO: 7488111 NR Description: probable glucosyltransferase - Arabidopsis >gi|2244884|emb|CAB10305.1| glucosyltransferase [Arabidopsis >gi|7268273|emb|CAB78568.1| glucosyltransferase [Arabidopsis
  misc_feature (1)..(354): Homolog of NCBI NO: 11994646 NR Description: UTP-glucose glucosyltransferase [Arabidopsis
  misc_feature (1)..(354): Homolog of NCBI NO: 15233157 NR Description: putative UDP-glucose glucosyltransferase; protein
  misc_feature (1)..(354): Homolog of NCBI NO: 11994645 NR Description: UTP-glucose glucosyltransferase [Arabidopsis
  misc_feature (1)..(354): Homolog of NCBI NO: 15233151 NR Description: putative UDP-glucose glucosyltransferase; protein At3g21760.1, supported by cDNA: gi_13937235, supported by cDNA:
  misc_feature (1)..(350): Homolog of NCBI NO: 15233158 NR Description: putative UDP-glucose glucosyltransferase; protein
  misc_feature (1)..(354): Homolog of NCBI NO: 15233155 NR Description: putative UDP-glucose glucosyltransferase; protein
  misc_feature (1)..(354): Homolog of NCBI NO: 15233149 NR Description: UDP-glycosyltransferase family; protein id:
  misc_feature (1)..(353): Homolog of NCBI NO: 30680040 NR Description: glycosyltransferase family [Arabidopsis thaliana]

SEQ ID NO: 92198 - DNA, 1494 bp, Arabidopsis thaliana; identical to SEQ ID NO: 88442
  misc_feature (1)..(1494): Ceres Seq. ID no. 12709025
  misc_feature: MA Experiment ID: 20000180 Result: Down-regulated in Transcription
  misc_feature: MA Experiment 20000180 PARAMETER Experiment Name: At_Germinating_Seeds_P Parameter: Age (hr) Value: 24 vs. 0
  misc_feature: MA Experiment 20000180 PARAMETER Experiment Name: At_Germinating_Seeds_P Parameter: Tissue Value: Germinating Seeds
  misc_feature: MA Experiment ID: 20000227 Result: Up-regulated in Transcription
  misc_feature: MA Experiment 20000227 PARAMETER Experiment Name: At_Root-Tips-vs-Tops_P Parameter: Tissue Value: Root Tips vs. Root Tops
  misc_feature: MA Experiment ID: 20000439 Result: Up-regulated in Transcription
  misc_feature: MA Experiment 20000439 PARAMETER Experiment Name: At_Roots__P Parameter: Age (day) Value: 14 vs. 21
  misc_feature: MA Experiment 20000439 PARAMETER Experiment Name: At_Roots__P Parameter: Organism Value: A. thaliana
  misc_feature: MA Experiment 20000439 PARAMETER Experiment Name: At_Roots__P Parameter: Tissue Value: Roots vs. Whole Plant

SEQ ID NO: 92199 - protein, 497 aa, Arabidopsis thaliana; identical to SEQ ID NO: 88443
  peptide (1)..(497): Ceres Seq. ID no. 12709026
  misc_feature (11)..(497): Homolog of NCBI NO: 15233767 NR Description: steroid 22-alpha-hydroxylase(cytochrome p450), protein id: At4g15300.1 [Arabidopsis thaliana]
  misc_feature (1)..(278): Homolog of NCBI NO: 15218776 NR Description: cytochrome P450, putative; protein id:
  misc_feature (247)..(496): Homolog of NCBI NO: 15218776 NR Description: cytochrome P450, putative; protein id:
  misc_feature (1)..(278): Homolog of NCBI NO: 6686409 NR Description: F1E22.5 [Arabidopsis thaliana]
  misc_feature (247)..(462): Homolog of NCBI NO: 6686409 NR Description: F1E22.5 [Arabidopsis thaliana]
  misc_feature (1)..(494): Homolog of NCBI NO: 9294334 NR Description: cytochrome P450-like protein [Arabidopsis
  misc_feature (11)..(278): Homolog of NCBI NO: 2190554 NR Description: Similar to Arabidopsis cytochrome P450 CYP90
  misc_feature (247)..(462): Homolog of NCBI NO: 2190554 NR Description: Similar to Arabidopsis cytochrome P450 CYP90
  misc_feature (82)..(494): Homolog of NCBI NO: 15230741 NR Description: cytochrome P450, putative; protein id:
  misc_feature (79)..(494): Homolog of NCBI NO: 18700149 NR Description: At4g15396 [Arabidopsis thaliana]

SEQ ID NO: 92200 - protein, 487 aa, Arabidopsis thaliana; identical to SEQ ID NO: 72130
  peptide (1)..(487): Ceres Seq. ID no. 12709027
  misc_feature (1)..(487): Homolog of NCBI NO: 15233767 NR Description: steroid 22-alpha-hydroxylase(cytochrome p450), protein id: At4g15300.1 [Arabidopsis thaliana]
  misc_feature (1)..(268): Homolog of NCBI NO: 15218776 NR Description: cytochrome P450, putative; protein id:
  misc_feature (237)..(486): Homolog of NCBI NO: 15218776 NR Description: cytochrome P450, putative; protein id:
  misc_feature (1)..(268): Homolog of NCBI NO: 6686409 NR Description: F1E22.5 [Arabidopsis thaliana]
  misc_feature (237)..(452): Homolog of NCBI NO: 6686409 NR Description: F1E22.5 [Arabidopsis thaliana]
  misc_feature (1)..(484): Homolog of NCBI NO: 9294334 NR Description: cytochrome P450-like protein [Arabidopsis
  misc_feature (1)..(268): Homolog of NCBI NO: 2190554 NR Description: Similar to Arabidopsis cytochrome P450 CYP90
  misc_feature (237)..(452): Homolog of NCBI NO: 2190554 NR Description: Similar to Arabidopsis cytochrome P450 CYP90
  misc_feature (72)..(484): Homolog of NCBI NO: 15230741 NR Description: cytochrome P450, putative; protein id:
  misc_feature (69)..(484): Homolog of NCBI NO: 18700149 NR Description: At4g15396 [Arabidopsis thaliana]

SEQ ID NO: 92201 - protein, 458 aa, Arabidopsis thaliana; identical to SEQ ID NO: 72131
  peptide (1)..(458): Ceres Seq. ID no. 12709028
  misc_feature (1)..(458): Homolog of NCBI NO: 15233767 NR Description: steroid 22-alpha-hydroxylase(cytochrome p450), protein id: At4g15300.1 [Arabidopsis thaliana]
  misc_feature (1)..(239): Homolog of NCBI NO: 15218776 NR Description: cytochrome P450, putative; protein id:
  misc_feature (208)..(457): Homolog of NCBI NO: 15218776 NR Description: cytochrome P450, putative; protein id:
  misc_feature (1)..(239): Homolog of NCBI NO: 6686409 NR Description: F1E22.5 [Arabidopsis thaliana]
  misc_feature (208)..(423): Homolog of NCBI NO: 6686409 NR Description: F1E22.5 [Arabidopsis thaliana]
  misc_feature (1)..(455): Homolog of NCBI NO: 9294334 NR Description: cytochrome P450-like protein [Arabidopsis
  misc_feature (1)..(239): Homolog of NCBI NO: 2190554 NR Description: Similar to Arabidopsis cytochrome P450 CYP90
  misc_feature (208)..(423): Homolog of NCBI NO: 2190554 NR Description: Similar to Arabidopsis cytochrome P450 CYP90
  misc_feature (43)..(455): Homolog of NCBI NO: 15230741 NR Description: cytochrome P450, putative; protein id:
  misc_feature (40)..(455): Homolog of NCBI NO: 18700149 NR Description: At4g15396 [Arabidopsis thaliana]

SEQ ID NO: 92202 - DNA, 1110 bp, Arabidopsis thaliana; identical to SEQ ID NO: 88446
  misc_feature (1)..(1110): Ceres Seq. ID no. 12709040
  misc_feature: MA Experiment ID: 20000227 Result: Down-regulated in Transcription
  misc_feature: MA Experiment 20000227 PARAMETER Experiment Name: At_Root-Tips-vs-Tops_P Parameter: Tissue Value: Root Tips vs. Root Tops
  misc_feature: MA Experiment ID: 20000439 Result: Up-regulated in Transcription
  misc_feature: MA Experiment 20000439 PARAMETER Experiment Name: At_Roots__P Parameter: Age (day) Value: 14 vs. 21
  misc_feature: MA Experiment 20000439 PARAMETER Experiment Name: At_Roots__P Parameter: Organism Value: A. thaliana
  misc_feature: MA Experiment 20000439 PARAMETER Experiment Name: At_Roots__P Parameter: Tissue Value: Roots vs. Whole Plant
  misc_feature: MA Experiment ID: 20000451 Result: Up-regulated in Transcription
  misc_feature: MA Experiment 20000451 PARAMETER Experiment Name: At_CS6879_Shoots-Roots_P Parameter: Age (day) Value: 14
  misc_feature: MA Experiment 20000451 PARAMETER Experiment Name: At_CS6879_Shoots-Roots_P Parameter: Organism Value: A. thaliana
  misc_feature: MA Experiment 20000451 PARAMETER Experiment Name: At_CS6879_Shoots-Roots_P Parameter: Plant Line Value: CS6879 vs. WS
  misc_feature: MA Experiment 20000451 PARAMETER Experiment Name: At_CS6879_Shoots-Roots_P Parameter: Tissue Value: Roots

SEQ ID NO: 92203 - protein, 369 aa, Arabidopsis thaliana; identical to SEQ ID NO: 88447
  peptide (1)..(369): Ceres Seq. ID no. 12709041
  misc_feature (1)..(351): Homolog of NCBI NO: 30683232 NR Description: cytochrome P450 -related [Arabidopsis thaliana] unknown protein [Arabidopsis thaliana]
  misc_feature (1)..(351): Homolog of NCBI NO: 30683237 NR Description: cytochrome P450 -related [Arabidopsis thaliana]
  misc_feature (38)..(351): Homolog of NCBI NO: 18700149 NR Description: At4g15396 [Arabidopsis thaliana]
  misc_feature (1)..(340): Homolog of NCBI NO: 6686409 NR Description: F1E22.5 [Arabidopsis thaliana]
  misc_feature (1)..(340): Homolog of NCBI NO: 15218776 NR Description: cytochrome P450, putative; protein id:
  misc_feature (11)..(340): Homolog of NCBI NO: 2190554 NR Description: Similar to Arabidopsis cytochrome P450 CYP90
  misc_feature (1)..(348): Homolog of NCBI NO: 9294334 NR Description: cytochrome P450-like protein [Arabidopsis
  misc_feature (11)..(347): Homolog of NCBI NO: 15233767 NR Description: steroid 22-alpha-hydroxylase(cytochrome p450), protein id: At4g15300.1 [Arabidopsis thaliana]
  misc_feature (75)..(348): Homolog of NCBI NO: 15230741 NR Description: cytochrome P450, putative; protein id:
  misc_feature (94)..(338): Homolog of NCBI NO: 15233770 NR Description: cytochrome P450 like protein; protein id:

SEQ ID NO: 92204 - protein, 330 aa, Arabidopsis thaliana; identical to SEQ ID NO: 88448
  peptide (1)..(330): Ceres Seq. ID no. 12709042
  misc_feature (1)..(312): Homolog of NCBI NO: 30683232 NR Description: cytochrome P450 -related [Arabidopsis thaliana] unknown protein [Arabidopsis thaliana]
  misc_feature (1)..(312): Homolog of NCBI NO: 30683237 NR Description: cytochrome P450 -related [Arabidopsis thaliana]
  misc_feature (1)..(312): Homolog of NCBI NO: 18700149 NR Description: At4g15396 [Arabidopsis thaliana]
  misc_feature (1)..(301): Homolog of NCBI NO: 6686409 NR Description: F1E22.5 [Arabidopsis thaliana]
  misc_feature (1)..(301): Homolog of NCBI NO: 15218776 NR Description: cytochrome P450, putative; protein id:
  misc_feature (1)..(301): Homolog of NCBI NO: 2190554 NR Description: Similar to Arabidopsis cytochrome P450 CYP90
  misc_feature (1)..(309): Homolog of NCBI NO: 9294334 NR Description: cytochrome P450-like protein [Arabidopsis
  misc_feature (1)..(308): Homolog of NCBI NO: 15233767 NR Description: steroid 22-alpha-hydroxylase(cytochrome p450), protein id: At4g15300.1 [Arabidopsis thaliana]
  misc_feature (36)..(309): Homolog of NCBI NO: 15230741 NR Description: cytochrome P450, putative; protein id:
  misc_feature (55)..(299): Homolog of NCBI NO: 15233770 NR Description: cytochrome P450 like protein; protein id:

SEQ ID NO: 92205 - protein, 318 aa, Arabidopsis thaliana; identical to SEQ ID NO: 88449
  peptide (1)..(318): Ceres Seq. ID no. 12709043
  misc_feature (1)..(300): Homolog of NCBI NO: 30683232 NR Description: cytochrome P450 -related [Arabidopsis thaliana] unknown protein [Arabidopsis thaliana]
  misc_feature (1)..(300): Homolog of NCBI NO: 30683237 NR Description: cytochrome P450 -related [Arabidopsis thaliana]
  misc_feature (1)..(300): Homolog of NCBI NO: 18700149 NR Description: At4g15396 [Arabidopsis thaliana]
  misc_feature (1)..(289): Homolog of NCBI NO: 6686409 NR Description: F1E22.5 [Arabidopsis thaliana]
  misc_feature (1)..(289): Homolog of NCBI NO: 15218776 NR Description: cytochrome P450, putative; protein id:
  misc_feature (1)..(289): Homolog of NCBI NO: 2190554 NR Description: Similar to Arabidopsis cytochrome P450 CYP90
  misc_feature (1)..(297): Homolog of NCBI NO: 9294334 NR Description: cytochrome P450-like protein [Arabidopsis
  misc_feature (1)..(296): Homolog of NCBI NO: 15233767 NR Description: steroid 22-alpha-hydroxylase(cytochrome p450), protein id: At4g15300.1 [Arabidopsis thaliana]
  misc_feature (24)..(297): Homolog of NCBI NO: 15230741 NR Description: cytochrome P450, putative; protein id:
  misc_feature (43)..(287): Homolog of NCBI NO: 15233770 NR Description: cytochrome P450 like protein; protein id:

SEQ ID NO: 92206 - DNA, 1533 bp, Arabidopsis thaliana; identical to SEQ ID NO: 88450
  misc_feature (1)..(1533): Ceres Seq. ID no. 12709069
  misc_feature: MA Experiment ID: 108462 Result: Up-regulated in Transcription
  misc_feature: MA Experiment 108462 PARAMETER Experiment Name: At_Germinating_Seeds_cDNA_P Parameter: Age (day) Value: 2 vs. 0
  misc_feature: MA Experiment 108462 PARAMETER Experiment Name: At_Germinating_Seeds_cDNA_P Parameter: Tissue Value: Germinating Seeds
  misc_feature: MA Experiment ID: 108464 Result: Up-regulated in Transcription
  misc_feature: MA Experiment 108464 PARAMETER Experiment Name: At_Germinating_Seeds_cDNA_P Parameter: Age (day) Value: 4 vs. 0
  misc_feature: MA Experiment 108464 PARAMETER Experiment Name: At_Germinating_Seeds_cDNA_P Parameter: Tissue Value: Germinating Seeds
  misc_feature: MA Experiment ID: 108561 Result: Up-regulated in Transcription
  misc_feature: MA Experiment 108561 PARAMETER Experiment Name: At_100uM_ABA_cDNA_P Parameter: Timepoint (hr) Value: 6
  misc_feature: MA Experiment 108561 PARAMETER Experiment Name: At_100uM_ABA_cDNA_P Parameter: Tissue Value: Aerial
  misc_feature: MA Experiment 108561 PARAMETER Experiment Name: At_100uM_ABA_cDNA_P Parameter: Treatment Value: 100uM ABA vs. No Treatment
  misc_feature: MA Experiment ID: 108573 Result: Up-regulated in Transcription
  misc_feature: MA Experiment 108573 PARAMETER Experiment Name: At_Drought_cDNA_P Parameter: Timepoint (hr) Value: 6
  misc_feature: MA Experiment 108573 PARAMETER Experiment Name: At_Drought_cDNA_P Parameter: Tissue Value: Aerial
  misc_feature: MA Experiment 108573 PARAMETER Experiment Name: At_Drought_cDNA_P Parameter: Treatment Value: Drought vs. No Drought
  misc_feature: MA Experiment ID: 108594 Result: Down-regulated in Transcription
  misc_feature: MA Experiment 108594 PARAMETER Experiment Name: At_Ler-rhl_Root_cDNA_P Parameter: Plant Line Value: null
  misc_feature: MA Experiment ID: 108668 Result: Up-regulated in Transcription
  misc_feature: MA Experiment 108668 PARAMETER Experiment Name: At_2mM_SA_cDNA_P Parameter: Plant Line Value: WS
  misc_feature: MA Experiment 108668 PARAMETER Experiment Name: At_2mM_SA_cDNA_P Parameter: Timepoint (hr) Value: 6
  misc_feature: MA Experiment 108668 PARAMETER Experiment Name: At_2mM_SA_cDNA_P Parameter: Treatment Value: 2mM SA vs. No Treatment
  misc_feature: MA Experiment ID: 20000072 Result: Up-regulated in Transcription
  misc_feature: MA Experiment 20000072 PARAMETER Experiment Name: At_100uM_ABA_Mutants_cDNA_P Parameter: Plant Line Value: CS8105
  misc_feature: MA Experiment 20000072 PARAMETER Experiment Name: At_100uM_ABA_Mutants_cDNA_P Parameter: Timepoint (hr) Value: 6
  misc_feature: MA Experiment 20000072 PARAMETER Experiment Name: At_100uM_ABA_Mutants_cDNA_P Parameter: Tissue Value: Aerial
  misc_feature: MA Experiment 20000072 PARAMETER Experiment Name: At_100uM_ABA_Mutants_cDNA_P Parameter: Treatment Value: 100uM ABA vs. No Treatment
  misc_feature: MA Experiment ID: 20000173 Result: Down-regulated in Transcription
  misc_feature: MA Experiment 20000173 PARAMETER Experiment Name: At_42deg_Heat_P Parameter: Age (day) Value: 14
  misc_feature: MA Experiment 20000173 PARAMETER Experiment Name: At_42deg_Heat_P Parameter: Organism Value: A. thaliana
  misc_feature: MA Experiment 20000173 PARAMETER Experiment Name: At_42deg_Heat_P Parameter: Plant Line Value: WS
  misc_feature: MA Experiment 20000173 PARAMETER Experiment Name: At_42deg_Heat_P Parameter: Temperature (deg C) Value: 42 vs. 22
  misc_feature: MA Experiment 20000173 PARAMETER Experiment Name: At_42deg_Heat_P Parameter: Timepoint (hr) Value: 6
  misc_feature: MA Experiment 20000173 PARAMETER Experiment Name: At_42deg_Heat_P Parameter: Tissue Value: Aerial
  misc_feature: MA Experiment ID: 20000182 Result: Up-regulated in Transcription
  misc_feature: MA Experiment 20000182 PARAMETER Experiment Name: At_2mM_SA_P Parameter: Age (day) Value: 14
  misc_feature: MA Experiment 20000182 PARAMETER Experiment Name: At_2mM_SA_P Parameter: Organism Value: A. thaliana
  misc_feature: MA Experiment 20000182 PARAMETER Experiment Name: At_2mM_SA_P Parameter: Plant Line Value: WS
  misc_feature: MA Experiment 20000182 PARAMETER Experiment Name: At_2mM_SA_P Parameter: Timepoint (hr) Value: 6
  misc_feature: MA Experiment 20000182 PARAMETER Experiment Name: At_2mM_SA_P Parameter: Tissue Value: Aerial
  misc_feature: MA Experiment 20000182 PARAMETER Experiment Name: At_2mM_SA_P Parameter: Treatment Value: 2mM SA vs. No Treatment
  misc_feature: MA Experiment ID: 20000184 Result: Up-regulated in Transcription
  misc_feature: MA Experiment 20000184 PARAMETER Experiment Name: At_Shoots__P Parameter: Age (day) Value: 7
  misc_feature: MA Experiment 20000184 PARAMETER Experiment Name: At_Shoots__P Parameter: Tissue Value: Shoots vs. Whole Plant
  misc_feature: MA Experiment ID: 20000437 Result: Down-regulated in Transcription
  misc_feature: MA Experiment 20000437 PARAMETER Experiment Name: At_Drought_P Parameter: Age (day) Value: 8
  misc_feature: MA Experiment 20000437 PARAMETER Experiment Name: At_Drought_P Parameter: Organism Value: A. thaliana
  misc_feature: MA Experiment 20000437 PARAMETER Experiment Name: At_Drought_P Parameter: Plant Line Value: WS
  misc_feature: MA Experiment 20000437 PARAMETER Experiment Name: At_Drought_P Parameter: Timepoint (hr) Value: 24
  misc_feature: MA Experiment 20000437 PARAMETER Experiment Name: At_Drought_P Parameter: Tissue Value: Whole Plant
  misc_feature: MA Experiment 20000437 PARAMETER Experiment Name: At_Drought_P Parameter: Treatment Value: Drought vs. No Drought
  misc_feature: MA Experiment ID: 20000438 Result: Up-regulated in Transcription
  misc_feature: MA Experiment 20000438 PARAMETER Experiment Name: At_Shoots__P Parameter: Age (day) Value: 14
  misc_feature: MA Experiment 20000438 PARAMETER Experiment Name: At_Shoots__P Parameter: Tissue Value: Shoots vs. Whole Plant
  misc_feature: MA Experiment ID: 20000439 Result: Up-regulated in Transcription
  misc_feature: MA Experiment 20000439 PARAMETER Experiment Name: At_Roots__P Parameter: Age (day) Value: 14 vs. 21
  misc_feature: MA Experiment 20000439 PARAMETER Experiment Name: At_Roots__P Parameter: Organism Value: A. thaliana
  misc_feature: MA Experiment 20000439 PARAMETER Experiment Name: At_Roots__P Parameter: Tissue Value: Roots vs. Whole Plant

SEQ ID NO: 92207 - protein, 475 aa, Arabidopsis thaliana; identical to SEQ ID NO: 88451
  peptide (1)..(475): Ceres Seq. ID no. 12709070
  misc_feature (1)..(475): Homolog of NCBI NO: 15234619 NR Description: indole-3-acetate beta-glucosyltransferase like protein id: At4g15500.1 [Arabidopsis thaliana]
  misc_feature (9)..(473): Homolog of NCBI NO: 21593030 NR Description: indole-3-acetate beta-glucosyltransferase like
  misc_feature (9)..(473): Homolog of NCBI NO: 15234616 NR Description: UDP-glycosyltransferase, putative; protein id: supported by cDNA: 35383., supported by cDNA: gi_16323084,
  misc_feature (1)..(473): Homolog of NCBI NO: 15233091 NR Description: UDP-glucosyltransferase, putative; protein id:
  misc_feature (1)..(473): Homolog of NCBI NO: 20259348 NR Description: putative UDP-glucose:indole-3-acetate beta-D-
  misc_feature (1)..(472): Homolog of NCBI NO: 9794913 NR Description: UDP-glucose:sinapate glucosyltransferase
  misc_feature (9)..(472): Homolog of NCBI NO: 25082972 NR Description: indole-3-acetate beta-glucosyltransferase like
  misc_feature (9)..(472): Homolog of NCBI NO: 7433899 NR Description: probable indole-3-acetate
  misc_feature (9)..(472): Homolog of NCBI NO: 30683281 NR Description: UDP-glycosyltransferase family [Arabidopsis
  misc_feature (6)..(462): Homolog of NCBI NO: 13431605 NR Description: Limonoid UDP-glucosyltransferase (Limonoid

SEQ ID NO: 92208 - protein, 473 aa, Arabidopsis thaliana; identical to SEQ ID NO: 88452
  peptide (1)..(473): Ceres Seq. ID no. 12709071
  misc_feature (1)..(473): Homolog of NCBI NO: 15234619 NR Description: indole-3-acetate beta-glucosyltransferase like protein id: At4g15500.1 [Arabidopsis thaliana]
  misc_feature (7)..(471): Homolog of NCBI NO: 21593030 NR Description: indole-3-acetate beta-glucosyltransferase like
  misc_feature (7)..(471): Homolog of NCBI NO: 15234616 NR Description: UDP-glycosyltransferase, putative; protein id: supported by cDNA: 35383., supported by cDNA: gi_16323084,
  misc_feature (1)..(471): Homolog of NCBI NO: 15233091 NR Description: UDP-glucosyltransferase, putative; protein id:
  misc_feature (1)..(471): Homolog of NCBI NO: 20259348 NR Description: putative UDP-glucose:indole-3-acetate beta-D-
  misc_feature (1)..(470): Homolog of NCBI NO: 9794913 NR Description: UDP-glucose:sinapate glucosyltransferase
  misc_feature (7)..(470): Homolog of NCBI NO: 25082972 NR Description: indole-3-acetate beta-glucosyltransferase like
  misc_feature (7)..(470): Homolog of NCBI NO: 7433899 NR Description: probable indole-3-acetate
  misc_feature (7)..(470): Homolog of NCBI NO: 30683281 NR Description: UDP-glycosyltransferase family [Arabidopsis
  misc_feature (4)..(460): Homolog of NCBI NO: 13431605 NR Description: Limonoid UDP-glucosyltransferase (Limonoid

SEQ ID NO: 92209 - protein, 465 aa, Arabidopsis thaliana; identical to SEQ ID NO: 88453
  peptide (1)..(465): Ceres Seq. ID no. 12709072
  misc_feature (1)..(465): Homolog of NCBI NO: 15234619 NR Description: indole-3-acetate beta-glucosyltransferase like protein id: At4g15500.1 [Arabidopsis thaliana]
  misc_feature (1)..(463): Homolog of NCBI NO: 21593030 NR Description: indole-3-acetate beta-glucosyltransferase like
  misc_feature (1)..(463): Homolog of NCBI NO: 15234616 NR Description: UDP-glycosyltransferase, putative; protein id: supported by cDNA: 35383., supported by cDNA: gi_16323084,
  misc_feature (1)..(463): Homolog of NCBI NO: 15233091 NR Description: UDP-glucosyltransferase, putative; protein id:
  misc_feature (1)..(463): Homolog of NCBI NO: 20259348 NR Description: putative UDP-glucose:indole-3-acetate beta-D-
  misc_feature (1)..(462): Homolog of NCBI NO: 9794913 NR Description: UDP-glucose:sinapate glucosyltransferase
  misc_feature (1)..(462): Homolog of NCBI NO: 25082972 NR Description: indole-3-acetate beta-glucosyltransferase like
  misc_feature (1)..(462): Homolog of NCBI NO: 7433899 NR Description: probable indole-3-acetate
  misc_feature (1)..(462): Homolog of NCBI NO: 30683281 NR Description: UDP-glycosyltransferase family [Arabidopsis
  misc_feature (1)..(452): Homolog of NCBI NO: 13431605 NR Description: Limonoid UDP-glucosyltransferase (Limonoid

SEQ ID NO: 92210 - DNA, 2346 bp, Arabidopsis thaliana; identical to SEQ ID NO: 88454
  misc_feature (1)..(2346): Ceres Seq. ID no. 12709110
  misc_feature: MA Experiment ID: 20000180 Result: Down-regulated in Transcription
  misc_feature: MA Experiment 20000180 PARAMETER Experiment Name: At_Germinating_Seeds_P Parameter: Age (hr) Value: 24 vs. 0
  misc_feature: MA Experiment 20000180 PARAMETER Experiment Name: At_Germinating_Seeds_P Parameter: Tissue Value: Germinating Seeds

SEQ ID NO: 92211 - protein, 781 aa, Arabidopsis thaliana; identical to SEQ ID NO: 88455
  peptide (1)..(781): Ceres Seq. ID no. 12709111
  misc_feature (1)..(555): Homolog of NCBI NO: 30683379 NR Description: expressed protein [Arabidopsis thaliana] unknown protein [Arabidopsis thaliana]
  misc_feature (459)..(781): Homolog of NCBI NO: 30683379 NR Description: expressed protein [Arabidopsis thaliana] unknown protein [Arabidopsis thaliana]
  misc_feature (459)..(552): Homolog of NCBI NO: 7452411 NR Description: hypothetical protein dl3905c - Arabidopsis >gi|2244929|emb|CAB10351.1| hypothetical protein [Arabidopsis >gi|7268321|emb|CAB78615.1| hypothetical protein [Arabidopsis
  misc_feature (494)..(772): Homolog of NCBI NO: 34899330 NR Description: contains ESTs AU056898(S20963)~similar to Arabidopsis thaliana chromosome3,
  misc_feature (4)..(241): Homolog of NCBI NO: 34899330 NR Description: contains ESTs AU056898(S20963)~similar to Arabidopsis thaliana chromosome3,
  misc_feature (504)..(772): Homolog of NCBI NO: 25518543 NR Description: hypothetical protein F22D16.1 - Arabidopsis >gi|6056403|gb|AAF02867.1|AC009525_1 Hypothetical protein
  misc_feature (3)..(185): Homolog of NCBI NO: 25518543 NR Description: hypothetical protein F22D16.1 - Arabidopsis >gi|6056403|gb|AAF02867.1|AC009525_1 Hypothetical protein
  misc_feature (514)..(770): Homolog of NCBI NO: 15229341 NR Description: putative protein; protein id: At3g62900.1
  misc_feature (453)..(541): Homolog of NCBI NO: 15229341 NR Description: putative protein; protein id: At3g62900.1
  misc_feature (384)..(452): Homolog of NCBI NO: 15229341 NR Description: putative protein; protein id: At3g62900.1

SEQ ID NO: 92212 - protein, 770 aa, Arabidopsis thaliana; identical to SEQ ID NO: 88456
  peptide (1)..(770): Ceres Seq. ID no. 12709112
  misc_feature (1)..(544): Homolog of NCBI NO: 30683379 NR Description: expressed protein [Arabidopsis thaliana] unknown protein [Arabidopsis thaliana]
  misc_feature (448)..(770): Homolog of NCBI NO: 30683379 NR Description: expressed protein [Arabidopsis thaliana] unknown protein [Arabidopsis thaliana]
  misc_feature (448)..(541): Homolog of NCBI NO: 7452411 NR Description: hypothetical protein dl3905c - Arabidopsis >gi|2244929|emb|CAB10351.1| hypothetical protein [Arabidopsis >gi|7268321|emb|CAB78615.1| hypothetical protein [Arabidopsis
  misc_feature (483)..(761): Homolog of NCBI NO: 34899330 NR Description: contains ESTs AU056898(S20963)~similar to Arabidopsis thaliana chromosome3,
  misc_feature (1)..(230): Homolog of NCBI NO: 34899330 NR Description: contains ESTs AU056898(S20963)~similar to Arabidopsis thaliana chromosome3,
  misc_feature (493)..(761): Homolog of NCBI NO: 25518543 NR Description: hypothetical protein F22D16.1 - Arabidopsis >gi|6056403|gb|AAF02867.1|AC009525_1 Hypothetical protein
  misc_feature (1)..(174): Homolog of NCBI NO: 25518543 NR Description: hypothetical protein F22D16.1 - Arabidopsis >gi|6056403|gb|AAF02867.1|AC009525_1 Hypothetical protein
  misc_feature (503)..(759): Homolog of NCBI NO: 15229341 NR Description: putative protein; protein id: At3g62900.1
  misc_feature (442)..(530): Homolog of NCBI NO: 15229341 NR Description: putative protein; protein id: At3g62900.1
  misc_feature (373)..(441): Homolog of NCBI NO: 15229341 NR Description: putative protein; protein id: At3g62900.1

SEQ ID NO: 92213 - protein, 621 aa, Arabidopsis thaliana; identical to SEQ ID NO: 88457
  peptide (1)..(621): Ceres Seq. ID no. 12709113
  misc_feature (1)..(395): Homolog of NCBI NO: 30683379 NR Description: expressed protein [Arabidopsis thaliana] unknown protein [Arabidopsis thaliana]
  misc_feature (299)..(621): Homolog of NCBI NO: 30683379 NR Description: expressed protein [Arabidopsis thaliana] unknown protein [Arabidopsis thaliana]
  misc_feature (299)..(392): Homolog of NCBI NO: 7452411 NR Description: hypothetical protein dl3905c - Arabidopsis >gi|2244929|emb|CAB10351.1| hypothetical protein [Arabidopsis >gi|7268321|emb|CAB78615.1| hypothetical protein [Arabidopsis
  misc_feature (334)..(612): Homolog of NCBI NO: 34899330 NR Description: contains ESTs AU056898(S20963)~similar to Arabidopsis thaliana chromosome3,
  misc_feature (1)..(81): Homolog of NCBI NO: 34899330 NR Description: contains ESTs AU056898(S20963)~similar to Arabidopsis thaliana chromosome3,
  misc_feature (344)..(612): Homolog of NCBI NO: 25518543 NR Description: hypothetical protein F22D16.1 - Arabidopsis >gi|6056403|gb|AAF02867.1|AC009525_1 Hypothetical protein
  misc_feature (1)..(25): Homolog of NCBI NO: 25518543 NR Description: hypothetical protein F22D16.1 - Arabidopsis >gi|6056403|gb|AAF02867.1|AC009525_1 Hypothetical protein
  misc_feature (354)..(610): Homolog of NCBI NO: 15229341 NR Description: putative protein; protein id: At3g62900.1
  misc_feature (293)..(381): Homolog of NCBI NO: 15229341 NR Description: putative protein; protein id: At3g62900.1
  misc_feature (224)..(292): Homolog of NCBI NO: 15229341 NR Description: putative protein; protein id: At3g62900.1

SEQ ID NO: 92214 - DNA, 540 bp, Arabidopsis thaliana; identical to SEQ ID NO: 88458
  misc_feature (1)..(540): Ceres Seq. ID no. 12709123
  misc_feature: MA Experiment ID: 20000185 Result: Up-regulated in Transcription
  misc_feature: MA Experiment 20000185 PARAMETER Experiment Name: At_Roots__P Parameter: Age (day) Value: 7 vs. 21
  misc_feature: MA Experiment 20000185 PARAMETER Experiment Name: At_Roots__P Parameter: Organism Value: A. thaliana
  misc_feature: MA Experiment 20000185 PARAMETER Experiment Name: At_Roots__P Parameter: Tissue Value: Roots vs. Whole Plant
  misc_feature: MA Experiment ID: 20000227 Result: Down-regulated in Transcription
  misc_feature: MA Experiment 20000227 PARAMETER Experiment Name: At_Root-Tips-vs-Tops_P Parameter: Tissue Value: Root Tips vs. Root Tops
  misc_feature: MA Experiment ID: 20000269 Result: Down-regulated in Transcription
  misc_feature: MA Experiment 20000269 PARAMETER Experiment Name: At_1mM_KNO3_L-vs-H_Roots_P Parameter: Age (day) Value: 7,10,12
  misc_feature: MA Experiment 20000269 PARAMETER Experiment Name: At_1mM_KNO3_L-vs-H_Roots_P Parameter: Organism Value: A. thaliana
  misc_feature: MA Experiment 20000269 PARAMETER Experiment Name: At_1mM_KNO3_L-vs-H_Roots_P Parameter: Plant Line Value: WS
  misc_feature: MA Experiment 20000269 PARAMETER Experiment Name: At_1mM_KNO3_L-vs-H_Roots_P Parameter: Timepoint (day) Value: 7,10,12
  misc_feature: MA Experiment 20000269 PARAMETER Experiment Name: At_1mM_KNO3_L-vs-H_Roots_P Parameter: Tissue Value: Roots
  misc_feature: MA Experiment 20000269 PARAMETER Experiment Name: At_1mM_KNO3_L-vs-H_Roots_P Parameter: Treatment Value: 1mM KNO3 vs. 50mM KNO3
  misc_feature: MA Experiment ID: 20000286 Result: Down-regulated in Transcription
  misc_feature: MA Experiment 20000286 PARAMETER Experiment Name: At_Open_Flower_P Parameter: Age (day) Value: 21
  misc_feature: MA Experiment 20000286 PARAMETER Experiment Name: At_Open_Flower_P Parameter: Plant Line Value: WS
  misc_feature: MA Experiment 20000286 PARAMETER Experiment Name: At_Open_Flower_P Parameter: Tissue Value: Half Open vs. Whole Plant
  misc_feature: MA Experiment ID: 20000437 Result: Up-regulated in Transcription
  misc_feature: MA Experiment 20000437 PARAMETER Experiment Name: At_Drought_P Parameter: Age (day) Value: 8
  misc_feature: MA Experiment 20000437 PARAMETER Experiment Name: At_Drought_P Parameter: Organism Value: A. thaliana
  misc_feature: MA Experiment 20000437 PARAMETER Experiment Name: At_Drought_P Parameter: Plant Line Value: WS
  misc_feature: MA Experiment 20000437 PARAMETER Experiment Name: At_Drought_P Parameter: Timepoint (hr) Value: 24
  misc_feature: MA Experiment 20000437 PARAMETER Experiment Name: At_Drought_P Parameter: Tissue Value: Whole Plant
  misc_feature: MA Experiment 20000437 PARAMETER Experiment Name: At_Drought_P Parameter: Treatment Value: Drought vs. No Drought
  misc_feature: MA Experiment ID: 20000439 Result: Up-regulated in Transcription
  misc_feature: MA Experiment 20000439 PARAMETER Experiment Name: At_Roots__P Parameter: Age (day) Value: 14 vs. 21
  misc_feature: MA Experiment 20000439 PARAMETER Experiment Name: At_Roots__P Parameter: Organism Value: A. thaliana
  misc_feature: MA Experiment 20000439 PARAMETER Experiment Name: At_Roots__P Parameter: Tissue Value: Roots vs. Whole Plant
  misc_feature: MA Experiment ID: 20000496 Result: Down-regulated in Transcription
  misc_feature: MA Experiment 20000496 PARAMETER Experiment Name: At_Guard_Cells_P Parameter: Harvest Date Value: 7/19/2002
  misc_feature: MA Experiment 20000496 PARAMETER Experiment Name: At_Guard_Cells_P Parameter: Organism Value: Canola
  misc_feature: MA Experiment 20000496 PARAMETER Experiment Name: At_Guard_Cells_P Parameter: Tissue Value: Guard Cells vs. Leaves
  misc_feature: MA Experiment ID: 20000794 Result: Down-regulated in Transcription
  misc_feature: MA Experiment 20000794 PARAMETER Experiment Name: At_Petals_P Parameter: Age (day) Value: 23-25 days
  misc_feature: MA Experiment 20000794 PARAMETER Experiment Name: At_Petals_P Parameter: Plant Line Value: WS
  misc_feature: MA Experiment 20000794 PARAMETER Experiment Name: At_Petals_P Parameter: Tissue Value: Petals vs. Whole plant

SEQ ID NO: 92215 - protein, 179 aa, Arabidopsis thaliana; identical to SEQ ID NO: 71301
  peptide (1)..(179): Ceres Seq. ID no. 12709124
  misc_feature (113)..(173): Pfam Name: Synaptobrevin Pfam Description: Synaptobrevin
  misc_feature (1)..(179): Homolog of NCBI NO: 22328683 NR Description: SYBL1 like protein; protein id: At4g15780.1
  misc_feature (1)..(173): Homolog of NCBI NO: 27805752 NR Description: Vesicle-associated membrane protein 724
  misc_feature (1)..(173): Homolog of NCBI NO: 15220943 NR Description: synaptobrevin 7B, putative; protein id:
  misc_feature (1)..(173): Homolog of NCBI NO: 15225796 NR Description: putative synaptobrevin; protein id: At2g33120.1, by cDNA: 2443., supported by cDNA: gi_16930420, supported by
  misc_feature (1)..(173): Homolog of NCBI NO: 33347409 NR Description: synptobrevin-related protein [Pyrus pyrifolia]
  misc_feature (1)..(173): Homolog of NCBI NO: 27805753 NR Description: Vesicle-associated membrane protein 725
  misc_feature (1)..(173): Homolog of NCBI NO: 30685375 NR Description: synaptobrevin -related [Arabidopsis thaliana] putative synaptobrevin [Arabidopsis thaliana]
  misc_feature (2)..(173): Homolog of NCBI NO: 34900770 NR Description: putative synaptobrevin [Oryza sativa (japonica
  misc_feature (1)..(173): Homolog of NCBI NO: 15220315 NR Description: synaptobrevin 7B, putative; protein id:
  misc_feature (1)..(173): Homolog of NCBI NO: 29150380 NR Description: synaptobrevin-like protein [Oryza sativa

SEQ ID NO: 92216 - DNA, 675 bp, Arabidopsis thaliana; identical to SEQ ID NO: 88460
  misc_feature (1)..(675): Ceres Seq. ID no. 12709166
  misc_feature: MA Experiment ID: 20000173 Result: Down-regulated in Transcription
  misc_feature: MA Experiment 20000173 PARAMETER Experiment Name: At_42deg_Heat_P Parameter: Age (day) Value: 14
  misc_feature: MA Experiment 20000173 PARAMETER Experiment Name: At_42deg_Heat_P Parameter: Organism Value: A. thaliana
  misc_feature: MA Experiment 20000173 PARAMETER Experiment Name: At_42deg_Heat_P Parameter: Plant Line Value: WS
  misc_feature: MA Experiment 20000173 PARAMETER Experiment Name: At_42deg_Heat_P Parameter: Temperature (deg C) Value: 42 vs. 22
  misc_feature: MA Experiment 20000173 PARAMETER Experiment Name: At_42deg_Heat_P Parameter: Timepoint (hr) Value: 6
  misc_feature: MA Experiment 20000173 PARAMETER Experiment Name: At_42deg_Heat_P Parameter: Tissue Value: Aerial
  misc_feature: MA Experiment ID: 20000179 Result: Up-regulated in Transcription
  misc_feature: MA Experiment 20000179 PARAMETER Experiment Name: At_Germinating_Seeds_P Parameter: Age (hr) Value: 6 vs. 0
  misc_feature: MA Experiment 20000179 PARAMETER Experiment Name: At_Germinating_Seeds_P Parameter: Tissue Value: Germinating Seeds
  misc_feature: MA Experiment ID: 20000180 Result: Up-regulated in Transcription
  misc_feature: MA Experiment 20000180 PARAMETER Experiment Name: At_Germinating_Seeds_P Parameter: Age (hr) Value: 24 vs. 0
  misc_feature: MA Experiment 20000180 PARAMETER Experiment Name: At_Germinating_Seeds_P Parameter: Tissue Value: Germinating Seeds

SEQ ID NO: 92217 - protein, 224 aa, Arabidopsis thaliana; identical to SEQ ID NO: 88461
  peptide (1)..(224): Ceres Seq. ID no. 12709167
  misc_feature (9)..(127): Pfam Name: alpha/beta hydrolase fold Pfam Description: alpha/beta hydrolase fold
  misc_feature (1)..(125): Homolog of NCBI NO: 30683476 NR Description: epoxide hydrolase, putative [Arabidopsis thaliana]
  misc_feature (118)..(224): Homolog of NCBI NO: 30683476 NR Description: epoxide hydrolase, putative [Arabidopsis thaliana]
  misc_feature (1)..(127): Homolog of NCBI NO: 18411917 NR Description: coded for by A. thaliana cDNA T04215; protein id:
  misc_feature (125)..(224): Homolog of NCBI NO: 18411917 NR Description: coded for by A. thaliana cDNA T04215; protein id:
  misc_feature (1)..(125): Homolog of NCBI NO: 25407540 NR Description: probable epoxide hydrolase [imported] - thaliana >gi|5302785|emb|CAB46034.1| putative epoxide hydrolase thaliana] >gi|7268344|emb|CAB78638.1| putative epoxide hydrolase
  misc_feature (118)..(211): Homolog of NCBI NO: 25407540 NR Description: probable epoxide hydrolase [imported] - thaliana >gi|5302785|emb|CAB46034.1| putative epoxide hydrolase thaliana] >gi|7268344|emb|CAB78638.1| putative epoxide hydrolase
  misc_feature (4)..(133): Homolog of NCBI NO: 15230018 NR Description: putative epoxide hydrolase; protein id: supported by cDNA: 1355., supported by cDNA: gi_17979164 thaliana] >gi|6714450|gb|AAF26137.1|AC011620_13 putative epoxide
  misc_feature (118)..(221): Homolog of NCBI NO: 15230018 NR Description: putative epoxide hydrolase; protein id: supported by cDNA: 1355., supported by cDNA: gi_17979164 thaliana] >gi|6714450|gb|AAF26137.1|AC011620_13 putative epoxide
  misc_feature (4)..(125): Homolog of NCBI NO: 15225781 NR Description: epoxide hydrolase (ATsEH); protein id: supported by cDNA: gi_1109599, supported by cDNA: gi_11935192, by cDNA: gi_12642901, supported by cDNA: gi_16226395, supported
  misc_feature (124)..(224): Homolog of NCBI NO: 15225781 NR Description: epoxide hydrolase (ATsEH); protein id: supported by cDNA: gi_1109599, supported by cDNA: gi_11935192, by cDNA: gi_12642901, supported by cDNA: gi_16226395, supported

SEQ ID NO: 92218 - protein, 142 aa, Arabidopsis thaliana; identical to SEQ ID NO: 88462
  peptide (1)..(142): Ceres Seq. ID no. 12709168
  misc_feature (43)..(136): Pfam Name: alpha/beta hydrolase fold Pfam Description: alpha/beta hydrolase fold
  misc_feature (1)..(43): Homolog of NCBI NO: 30683476 NR Description: epoxide hydrolase, putative [Arabidopsis thaliana]
  misc_feature (36)..(142): Homolog of NCBI NO: 30683476 NR Description: epoxide hydrolase, putative [Arabidopsis thaliana]
  misc_feature (1)..(45): Homolog of NCBI NO: 18411917 NR Description: coded for by A. thaliana cDNA T04215; protein id:
  misc_feature (43)..(142): Homolog of NCBI NO: 18411917 NR Description: coded for by A. thaliana cDNA T04215; protein id:
  misc_feature (1)..(43): Homolog of NCBI NO: 25407540 NR Description: probable epoxide hydrolase [imported] - thaliana >gi|5302785|emb|CAB46034.1| putative epoxide hydrolase thaliana] >gi|7268344|emb|CAB78638.1| putative epoxide hydrolase
  misc_feature (36)..(129): Homolog of NCBI NO: 25407540 NR Description: probable epoxide hydrolase [imported] - thaliana >gi|5302785|emb|CAB46034.1| putative epoxide hydrolase thaliana] >gi|7268344|emb|CAB78638.1| putative epoxide hydrolase
  misc_feature (1)..(51): Homolog of NCBI NO: 15230018 NR Description: putative epoxide hydrolase; protein id: supported by cDNA: 1355., supported by cDNA: gi_17979164 thaliana] >gi|6714450|gb|AAF26137.1|AC011620_13 putative epoxide
  misc_feature (36)..(139): Homolog of NCBI NO: 15230018 NR Description: putative epoxide hydrolase; protein id: supported by cDNA: 1355., supported by cDNA: gi_17979164 thaliana] >gi|6714450|gb|AAF26137.1|AC011620_13 putative epoxide
  misc_feature (1)..(43): Homolog of NCBI NO: 15225781 NR Description: epoxide hydrolase (ATsEH); protein id: supported by cDNA: gi_1109599, supported by cDNA: gi_11935192, by cDNA: gi_12642901, supported by cDNA: gi_16226395, supported
  misc_feature (42)..(142): Homolog of NCBI NO: 15225781 NR Description: epoxide hydrolase (ATsEH); protein id: supported by cDNA: gi_1109599, supported by cDNA: gi_11935192, by cDNA: gi_12642901, supported by cDNA: gi_16226395, supported

SEQ ID NO: 92219 - DNA, 3576 bp, Arabidopsis thaliana; identical to SEQ ID NO: 88463
  misc_feature (1)..(3576): Ceres Seq. ID no. 12709336
  misc_feature: MA Experiment ID: 20000179 Result: Up-regulated in Transcription
  misc_feature: MA Experiment 20000179 PARAMETER Experiment Name: At_Germinating_Seeds_P Parameter: Age (hr) Value: 6 vs. 0
  misc_feature: MA Experiment 20000179 PARAMETER Experiment Name: At_Germinating_Seeds_P Parameter: Tissue Value: Germinating Seeds

SEQ ID NO: 92220 - protein, 1191 aa, Arabidopsis thaliana; identical to SEQ ID NO: 88464
  peptide (1)..(1191): Ceres Seq. ID no. 12709337
  misc_feature (1132)..(1191): Pfam Name: SH3 domain Pfam Description: SH3 domain
  misc_feature (1)..(362): Homolog of NCBI NO: 15225713 NR Description: unknown protein; protein id: At2g07370.1
  misc_feature (484)..(661): Homolog of NCBI NO: 15225713 NR Description: unknown protein; protein id: At2g07370.1
  misc_feature (721)..(1132): Homolog of NCBI NO: 15225702 NR Description: unknown protein; protein id: At2g07360.1
  misc_feature (953)..(1191): Homolog of NCBI NO: 15225702 NR Description: unknown protein; protein id: At2g07360.1

SEQ ID NO: 92221 - protein, 1182 aa, Arabidopsis thaliana; identical to SEQ ID NO: 88465
  peptide (1)..(1182): Ceres Seq. ID no. 12709338
  misc_feature (1123)..(1182): Pfam Name: SH3 domain Pfam Description: SH3 domain
  misc_feature (1)..(353): Homolog of NCBI NO: 15225713 NR Description: unknown protein; protein id: At2g07370.1
  misc_feature (475)..(652): Homolog of NCBI NO: 15225713 NR Description: unknown protein; protein id: At2g07370.1
  misc_feature (712)..(1123): Homolog of NCBI NO: 15225702 NR Description: unknown protein; protein id: At2g07360.1
  misc_feature (944)..(1182): Homolog of NCBI NO: 15225702 NR Description: unknown protein; protein id: At2g07360.1

SEQ ID NO: 92222 - protein, 1141 aa, Arabidopsis thaliana; identical to SEQ ID NO: 88466
  peptide (1)..(1141): Ceres Seq. ID no. 12709339
  misc_feature (1082)..(1141): Pfam Name: SH3 domain Pfam Description: SH3 domain
  misc_feature (1)..(312): Homolog of NCBI NO: 15225713 NR Description: unknown protein; protein id: At2g07370.1
  misc_feature (434)..(611): Homolog of NCBI NO: 15225713 NR Description: unknown protein; protein id: At2g07370.1
  misc_feature (671)..(1082): Homolog of NCBI NO: 15225702 NR Description: unknown protein; protein id: At2g07360.1
  misc_feature (903)..(1141): Homolog of NCBI NO: 15225702 NR Description: unknown protein; protein id: At2g07360.1

SEQ ID NO: 92223 - DNA, 3185 bp, Arabidopsis thaliana; identical to SEQ ID NO: 88467
  misc_feature (1)..(3185): Ceres Seq. ID no. 12709411
  misc_feature: MA Experiment ID: 108474 Result: Down-regulated in Transcription
  misc_feature: MA Experiment 108474 PARAMETER Experiment Name: At_Drought_Flowers_cDNA_P Parameter: Timepoint (hr) Value: null
  misc_feature: MA Experiment 108474 PARAMETER Experiment Name: At_Drought_Flowers_cDNA_P Parameter: Treatment Value: Drought vs. No Drought
  misc_feature: MA Experiment ID: 20000286 Result: Up-regulated in Transcription
  misc_feature: MA Experiment 20000286 PARAMETER Experiment Name: At_Open_Flower_P Parameter: Age (day) Value: 21
  misc_feature: MA Experiment 20000286 PARAMETER Experiment Name: At_Open_Flower_P Parameter: Plant Line Value: WS
  misc_feature: MA Experiment 20000286 PARAMETER Experiment Name: At_Open_Flower_P Parameter: Tissue Value: Half Open vs. Whole Plant
  misc_feature: MA Experiment ID: 20000443 Result: Up-regulated in Transcription
  misc_feature: MA Experiment 20000443 PARAMETER Experiment Name: At_1uM_BR-BRZ__P Parameter: Tissue Value: Shoot Apices
  misc_feature: MA Experiment 20000443 PARAMETER Experiment Name: At_1uM_BR-BRZ__P Parameter: Treatment Value: 1uM BRZ vs. No Treatment

SEQ ID NO: 92224 - protein, 949 aa, Arabidopsis thaliana; identical to SEQ ID NO: 88468
  peptide (1)..(949): Ceres Seq. ID no. 12709412
  misc_feature (326)..(611): Pfam Name: haloacid dehalogenase-like hydrolase Pfam Description: haloacid dehalogenase-like hydrolase
  misc_feature (2)..(847): Homolog of NCBI NO: 6691153 NR Description: plasma membrane H(+)-ATPase [Filobasidiella
  misc_feature (2)..(847): Homolog of NCBI NO: 3348073 NR Description: plasma membrane H(+)-ATPase 1 [Filobasidiella
  misc_feature (8)..(841): Homolog of NCBI NO: 2652922 NR Description: plasma membrane (H+) ATPase [Uromyces fabae]
  misc_feature (21)..(850): Homolog of NCBI NO: 1709664 NR Description: Probable plasma membrane ATPase (Proton pump)
  misc_feature (13)..(748): Homolog of NCBI NO: 1709666 NR Description: Plasma membrane ATPase (Proton pump)
  misc_feature (757)..(806): Homolog of NCBI NO: 1709666 NR Description: Plasma membrane ATPase (Proton pump)
  misc_feature (13)..(757): Homolog of NCBI NO: 1709665 NR Description: Plasma membrane ATPase (Proton pump)
  misc_feature (757)..(806): Homolog of NCBI NO: 1709665 NR Description: Plasma membrane ATPase (Proton pump)
  misc_feature (13)..(751): Homolog of NCBI NO: 16751320 NR Description: putative plasma membrane-type proton ATPase
  misc_feature (755)..(806): Homolog of NCBI NO: 16751320 NR Description: putative plasma membrane-type proton ATPase

SEQ ID NO: 92225 - protein, 882 aa, Arabidopsis thaliana; identical to SEQ ID NO: 88469
  peptide (1)..(882): Ceres Seq. ID no. 12709413
  misc_feature (259)..(544): Pfam Name: haloacid dehalogenase-like hydrolase Pfam Description: haloacid dehalogenase-like hydrolase
  misc_feature (1)..(780): Homolog of NCBI NO: 6691153 NR Description: plasma membrane H(+)-ATPase [Filobasidiella
  misc_feature (1)..(780): Homolog of NCBI NO: 3348073 NR Description: plasma membrane H(+)-ATPase 1 [Filobasidiella
  misc_feature (1)..(774): Homolog of NCBI NO: 2652922 NR Description: plasma membrane (H+) ATPase [Uromyces fabae]
  misc_feature (1)..(783): Homolog of NCBI NO: 1709664 NR Description: Probable plasma membrane ATPase (Proton pump)
  misc_feature (1)..(681): Homolog of NCBI NO: 1709666 NR Description: Plasma membrane ATPase (Proton pump)
  misc_feature (690)..(739): Homolog of NCBI NO: 1709666 NR Description: Plasma membrane ATPase (Proton pump)
  misc_feature (1)..(690): Homolog of NCBI NO: 1709665 NR Description: Plasma membrane ATPase (Proton pump)
  misc_feature (690)..(739): Homolog of NCBI NO: 1709665 NR Description: Plasma membrane ATPase (Proton pump)
  misc_feature (1)..(684): Homolog of NCBI NO: 16751320 NR Description: putative plasma membrane-type proton ATPase
  misc_feature (688)..(739): Homolog of NCBI NO: 16751320 NR Description: putative plasma membrane-type proton ATPase

SEQ ID NO: 92226 - protein, 874 aa, Arabidopsis thaliana; identical to SEQ ID NO: 88470
  peptide (1)..(874): Ceres Seq. ID no. 12709414
  misc_feature (251)..(536): Pfam Name: haloacid dehalogenase-like hydrolase Pfam Description: haloacid dehalogenase-like hydrolase
  misc_feature (1)..(772): Homolog of NCBI NO: 6691153 NR Description: plasma membrane H(+)-ATPase [Filobasidiella
  misc_feature (1)..(772): Homolog of NCBI NO: 3348073 NR Description: plasma membrane H(+)-ATPase 1 [Filobasidiella
  misc_feature (1)..(766): Homolog of NCBI NO: 2652922 NR Description: plasma membrane (H+) ATPase [Uromyces fabae]
  misc_feature (1)..(775): Homolog of NCBI NO: 1709664 NR Description: Probable plasma membrane ATPase (Proton pump)
  misc_feature (1)..(673): Homolog of NCBI NO: 1709666 NR Description: Plasma membrane ATPase (Proton pump)
  misc_feature (682)..(731): Homolog of NCBI NO: 1709666 NR Description: Plasma membrane ATPase (Proton pump)
  misc_feature (1)..(682): Homolog of NCBI NO: 1709665 NR Description: Plasma membrane ATPase (Proton pump)
  misc_feature (682)..(731): Homolog of NCBI NO: 1709665 NR Description: Plasma membrane ATPase (Proton pump)
  misc_feature (1)..(676): Homolog of NCBI NO: 16751320 NR Description: putative plasma membrane-type proton ATPase
  misc_feature (680)..(731): Homolog of NCBI NO: 16751320 NR Description: putative plasma membrane-type proton ATPase

SEQ ID NO: 92227 - DNA, 1041 bp, Arabidopsis thaliana; identical to SEQ ID NO: 88471
  misc_feature (1)..(1041): Ceres Seq. ID no. 12709624
  misc_feature: MA Experiment ID: 20000173 Result: Down-regulated in Transcription
  misc_feature: MA Experiment 20000173 PARAMETER Experiment Name: At_42deg_Heat_P Parameter: Age (day) Value: 14
  misc_feature: MA Experiment 20000173 PARAMETER Experiment Name: At_42deg_Heat_P Parameter: Organism Value: A. thaliana
  misc_feature: MA Experiment 20000173 PARAMETER Experiment Name: At_42deg_Heat_P Parameter: Plant Line Value: WS
  misc_feature: MA Experiment 20000173 PARAMETER Experiment Name: At_42deg_Heat_P Parameter: Temperature (deg C) Value: 42 vs. 22
  misc_feature: MA Experiment 20000173 PARAMETER Experiment Name: At_42deg_Heat_P Parameter: Timepoint (hr) Value: 6
  misc_feature: MA Experiment 20000173 PARAMETER Experiment Name: At_42deg_Heat_P Parameter: Tissue Value: Aerial
  misc_feature: MA Experiment ID: 20000182 Result: Up-regulated in Transcription
  misc_feature: MA Experiment 20000182 PARAMETER Experiment Name: At_2mM_SA_P Parameter: Age (day) Value: 14
  misc_feature: MA Experiment 20000182 PARAMETER Experiment Name: At_2mM_SA_P Parameter: Organism Value: A. thaliana
  misc_feature: MA Experiment 20000182 PARAMETER Experiment Name: At_2mM_SA_P Parameter: Plant Line Value: WS
  misc_feature: MA Experiment 20000182 PARAMETER Experiment Name: At_2mM_SA_P Parameter: Timepoint (hr) Value: 6
  misc_feature: MA Experiment 20000182 PARAMETER Experiment Name: At_2mM_SA_P Parameter: Tissue Value: Aerial
  misc_feature: MA Experiment 20000182 PARAMETER Experiment Name: At_2mM_SA_P Parameter: Treatment Value: 2mM SA vs. No Treatment
  misc_feature: MA Experiment ID: 20000184 Result: Down-regulated in Transcription
  misc_feature: MA Experiment 20000184 PARAMETER Experiment Name: At_Shoots__P Parameter: Age (day) Value: 7
  misc_feature: MA Experiment 20000184 PARAMETER Experiment Name: At_Shoots__P Parameter: Tissue Value: Shoots vs. Whole Plant
  misc_feature: MA Experiment ID: 20000185 Result: Down-regulated in Transcription
  misc_feature: MA Experiment 20000185 PARAMETER Experiment Name: At_Roots__P Parameter: Age (day) Value: 7 vs. 21
  misc_feature: MA Experiment 20000185 PARAMETER Experiment Name: At_Roots__P Parameter: Organism Value: A. thaliana
  misc_feature: MA Experiment 20000185 PARAMETER Experiment Name: At_Roots__P Parameter: Tissue Value: Roots vs. Whole Plant
  misc_feature: MA Experiment ID: 20000235 Result: Down-regulated in Transcription
  misc_feature: MA Experiment 20000235 PARAMETER Experiment Name: At_Siliques_P Parameter: Age (day) Value: 21
  misc_feature: MA Experiment 20000235 PARAMETER Experiment Name: At_Siliques_P Parameter: Organism Value: A. thaliana
  misc_feature: MA Experiment 20000235 PARAMETER Experiment Name: At_Siliques_P Parameter: Plant Line Value: WS
  misc_feature: MA Experiment 20000235 PARAMETER Experiment Name: At_Siliques_P Parameter: Tissue Value: 5-10mm Siliques vs. Whole Plant
  misc_feature: MA Experiment ID: 20000264 Result: Down-regulated in Transcription
  misc_feature: MA Experiment 20000264 PARAMETER Experiment Name: At_Open_Flower_P Parameter: Age (day) Value: 21
  misc_feature: MA Experiment 20000264 PARAMETER Experiment Name: At_Open_Flower_P Parameter: Plant Line Value: WS
  misc_feature: MA Experiment 20000264 PARAMETER Experiment Name: At_Open_Flower_P Parameter: Tissue Value: Open Flower vs. Whole Plant
  misc_feature: MA Experiment ID: 20000265 Result: Down-regulated in Transcription
  misc_feature: MA Experiment 20000265 PARAMETER Experiment Name: At_Open_Flower_P Parameter: Age (day) Value: 21
  misc_feature: MA Experiment 20000265 PARAMETER Experiment Name: At_Open_Flower_P Parameter: Plant Line Value: WS
  misc_feature: MA Experiment 20000265 PARAMETER Experiment Name: At_Open_Flower_P Parameter: Tissue Value: Closed Flower vs. Whole Plant
  misc_feature: MA Experiment ID: 20000286 Result: Down-regulated in Transcription
  misc_feature: MA Experiment 20000286 PARAMETER Experiment Name: At_Open_Flower_P Parameter: Age (day) Value: 21
  misc_feature: MA Experiment 20000286 PARAMETER Experiment Name: At_Open_Flower_P Parameter: Plant Line Value: WS
  misc_feature: MA Experiment 20000286 PARAMETER Experiment Name: At_Open_Flower_P Parameter: Tissue Value: Half Open vs. Whole Plant
  misc_feature: MA Experiment ID: 20000439 Result: Down-regulated in Transcription
  misc_feature: MA Experiment 20000439 PARAMETER Experiment Name: At_Roots__P Parameter: Age (day) Value: 14 vs. 21
  misc_feature: MA Experiment 20000439 PARAMETER Experiment Name: At_Roots__P Parameter: Organism Value: A. thaliana
  misc_feature: MA Experiment 20000439 PARAMETER Experiment Name: At_Roots__P Parameter: Tissue Value: Roots vs. Whole Plant
  misc_feature: MA Experiment ID: 20000573 Result: Up-regulated in Transcription
  misc_feature: MA Experiment 20000573 PARAMETER Experiment Name: At_100uM_ABA_Mutants__P Parameter: Organism Value: A. thaliana
  misc_feature: MA Experiment 20000573 PARAMETER Experiment Name: At_100uM_ABA_Mutants__P Parameter: Plant Line Value: CS22 vs. Ler wt
  misc_feature: MA Experiment 20000573 PARAMETER Experiment Name: At_100uM_ABA_Mutants__P Parameter: Timepoint (hr) Value: N/A
  misc_feature: MA Experiment 20000573 PARAMETER Experiment Name: At_100uM_ABA_Mutants__P Parameter: Tissue Value: Whole Plant
  misc_feature: MA Experiment 20000573 PARAMETER Experiment Name: At_100uM_ABA_Mutants__P Parameter: Treatment Value: None
  misc_feature: MA Experiment ID: 20000574 Result: Up-regulated in Transcription
  misc_feature: MA Experiment 20000574 PARAMETER Experiment Name: At_100uM_ABA_Mutants__P Parameter: Organism Value: A. thaliana
  misc_feature: MA Experiment 20000574 PARAMETER Experiment Name: At_100uM_ABA_Mutants__P Parameter: Plant Line Value: CS23 vs. Ler wt
  misc_feature: MA Experiment 20000574 PARAMETER Experiment Name: At_100uM_ABA_Mutants__P Parameter: Timepoint (hr) Value: N/A
  misc_feature: MA Experiment 20000574 PARAMETER Experiment Name: At_100uM_ABA_Mutants__P Parameter: Tissue Value: Whole Plant
  misc_feature: MA Experiment 20000574 PARAMETER Experiment Name: At_100uM_ABA_Mutants__P Parameter: Treatment Value: None
  misc_feature: MA Experiment ID: 20000576 Result: Down-regulated in Transcription
  misc_feature: MA Experiment 20000576 PARAMETER Experiment Name: At_100uM_ABA_Mutants__P Parameter: Organism Value: A. thaliana
  misc_feature: MA Experiment 20000576 PARAMETER Experiment Name: At_100uM_ABA_Mutants__P Parameter: Plant Line Value: CS23
  misc_feature: MA Experiment 20000576 PARAMETER Experiment Name: At_100uM_ABA_Mutants__P Parameter: Timepoint (hr) Value: 6
  misc_feature: MA Experiment 20000576 PARAMETER Experiment Name: At_100uM_ABA_Mutants__P Parameter: Tissue Value: Whole Plant
  misc_feature: MA Experiment 20000576 PARAMETER Experiment Name: At_100uM_ABA_Mutants__P Parameter: Treatment Value: 1uM ABA vs. No Treatment
  misc_feature: MA Experiment ID: 20000606 Result: Up-regulated in Transcription
  misc_feature: MA Experiment 20000606 PARAMETER Experiment Name: At_CS8548_Mutant_P Parameter: Age (day) Value: 14
  misc_feature: MA Experiment 20000606 PARAMETER Experiment Name: At_CS8548_Mutant_P Parameter: Plant Line Value: CS8548 vs. wt
  misc_feature: MA Experiment 20000606 PARAMETER Experiment Name: At_CS8548_Mutant_P Parameter: Tissue Value: Whole Plant
  misc_feature: MA Experiment ID: 20000709 Result: Down-regulated in Transcription
  misc_feature: MA Experiment 20000709 PARAMETER Experiment Name: At_15mM_NH4NO3_L-to-H_P Parameter: Age (hr) Value: 14
  misc_feature: MA Experiment 20000709 PARAMETER Experiment Name: At_15mM_NH4NO3_L-to-H_P Parameter: Organism Value: A. thaliana
  misc_feature: MA Experiment 20000709 PARAMETER Experiment Name: At_15mM_NH4NO3_L-to-H_P Parameter: Plant Line Value: WS
  misc_feature: MA Experiment 20000709 PARAMETER Experiment Name: At_15mM_NH4NO3_L-to-H_P Parameter: Timepoint (hr) Value: 4
  misc_feature: MA Experiment 20000709 PARAMETER Experiment Name: At_15mM_NH4NO3_L-to-H_P Parameter: Tissue Value: Aerial
  misc_feature: MA Experiment 20000709 PARAMETER Experiment Name: At_15mM_NH4NO3_L-to-H_P Parameter: Treatment Value: 15mM NH4NO3 vs. 30mM Mannitol
  misc_feature: MA Experiment ID: 20000794 Result: Down-regulated in Transcription
  misc_feature: MA Experiment 20000794 PARAMETER Experiment Name: At_Petals_P Parameter: Age (day) Value: 23-25 days
  misc_feature: MA Experiment 20000794 PARAMETER Experiment Name: At_Petals_P Parameter: Plant Line Value: WS
  misc_feature: MA Experiment 20000794 PARAMETER Experiment Name: At_Petals_P Parameter: Tissue Value: Petals vs. Whole plant
  misc_feature: MA Experiment ID: 20001554 Result: Down-regulated in Transcription
  misc_feature: MA Experiment 20001554 PARAMETER Experiment Name: At_Drought_Soil_Dry_P Parameter: Age (day) Value: 21
  misc_feature: MA Experiment 20001554 PARAMETER Experiment Name: At_Drought_Soil_Dry_P Parameter: Organism Value: A. thaliana
  misc_feature: MA Experiment 20001554 PARAMETER Experiment Name: At_Drought_Soil_Dry_P Parameter: Plant Line Value: WS
  misc_feature: MA Experiment 20001554 PARAMETER Experiment Name: At_Drought_Soil_Dry_P Parameter: Post Timepoint (hr) Value: None
  misc_feature: MA Experiment 20001554 PARAMETER Experiment Name: At_Drought_Soil_Dry_P Parameter: Post-Treatment Value: None
  misc_feature: MA Experiment 20001554 PARAMETER Experiment Name: At_Drought_Soil_Dry_P Parameter: Timepoint (day) Value: 7
  misc_feature: MA Experiment 20001554 PARAMETER Experiment Name: At_Drought_Soil_Dry_P Parameter: Treatment Value: Drought vs. No Drought
  misc_feature: MA Experiment ID: 20001555 Result: Down-regulated in Transcription
  misc_feature: MA Experiment 20001555 PARAMETER Experiment Name: At_Drought_Soil_Dry_P Parameter: Age (day) Value: 24
  misc_feature: MA Experiment 20001555 PARAMETER Experiment Name: At_Drought_Soil_Dry_P Parameter: Organism Value: A. thaliana
  misc_feature: MA Experiment 20001555 PARAMETER Experiment Name: At_Drought_Soil_Dry_P Parameter: Plant Line Value: WS
  misc_feature: MA Experiment 20001555 PARAMETER Experiment Name: At_Drought_Soil_Dry_P Parameter: Post Timepoint (hr) Value: None
  misc_feature: MA Experiment 20001555 PARAMETER Experiment Name: At_Drought_Soil_Dry_P Parameter: Post-Treatment Value: None
  misc_feature: MA Experiment 20001555 PARAMETER Experiment Name: At_Drought_Soil_Dry_P Parameter: Timepoint (day) Value: 10
  misc_feature: MA Experiment 20001555 PARAMETER Experiment Name: At_Drought_Soil_Dry_P Parameter: Treatment Value: Drought vs. No Drought
  misc_feature: MA Experiment ID: 20001556 Result: Down-regulated in Transcription
  misc_feature: MA Experiment 20001556 PARAMETER Experiment Name: At_Drought_Soil_Dry_P Parameter: Age (day) Value: 26
  misc_feature: MA Experiment 20001556 PARAMETER Experiment Name: At_Drought_Soil_Dry_P Parameter: Organism Value: A. thaliana
  misc_feature: MA Experiment 20001556 PARAMETER Experiment Name: At_Drought_Soil_Dry_P Parameter: Plant Line Value: WS
  misc_feature: MA Experiment 20001556 PARAMETER Experiment Name: At_Drought_Soil_Dry_P Parameter: Post Timepoint (hr) Value: None
  misc_feature: MA Experiment 20001556 PARAMETER Experiment Name: At_Drought_Soil_Dry_P Parameter: Post-Treatment Value: None
  misc_feature: MA Experiment 20001556 PARAMETER Experiment Name: At_Drought_Soil_Dry_P Parameter: Timepoint (day) Value: 12
  misc_feature: MA Experiment 20001556 PARAMETER Experiment Name: At_Drought_Soil_Dry_P Parameter: Treatment Value: Drought vs. No Drought
  misc_feature: MA Experiment ID: 20001557 Result: Down-regulated in Transcription
  misc_feature: MA Experiment 20001557 PARAMETER Experiment Name: At_Drought_Soil_Dry_P Parameter: Age (day) Value: 27
  misc_feature: MA Experiment 20001557 PARAMETER Experiment Name: At_Drought_Soil_Dry_P Parameter: Organism Value: A. thaliana
  misc_feature: MA Experiment 20001557 PARAMETER Experiment Name: At_Drought_Soil_Dry_P Parameter: Plant Line Value: WS
  misc_feature: MA Experiment 20001557 PARAMETER Experiment Name: At_Drought_Soil_Dry_P Parameter: Post Timepoint (hr) Value: 3
  misc_feature: MA Experiment 20001557 PARAMETER Experiment Name: At_Drought_Soil_Dry_P Parameter: Post-Treatment Value: Re-Water vs. No Drought
  misc_feature: MA Experiment 20001557 PARAMETER Experiment Name: At_Drought_Soil_Dry_P Parameter: Timepoint (day) Value: 13
  misc_feature: MA Experiment 20001557 PARAMETER Experiment Name: At_Drought_Soil_Dry_P Parameter: Treatment Value: Drought vs. No Drought
  misc_feature: MA Experiment ID: 20001558 Result: Down-regulated in Transcription
  misc_feature: MA Experiment 20001558 PARAMETER Experiment Name: At_Drought_Soil_Dry_P Parameter: Age (day) Value: 27
  misc_feature: MA Experiment 20001558 PARAMETER Experiment Name: At_Drought_Soil_Dry_P Parameter: Organism Value: A. thaliana
  misc_feature: MA Experiment 20001558 PARAMETER Experiment Name: At_Drought_Soil_Dry_P Parameter: Plant Line Value: WS
  misc_feature: MA Experiment 20001558 PARAMETER Experiment Name: At_Drought_Soil_Dry_P Parameter: Post Timepoint (hr) Value: 6
  misc_feature: MA Experiment 20001558 PARAMETER Experiment Name: At_Drought_Soil_Dry_P Parameter: Post-Treatment Value: Re-Water vs. No Drought
  misc_feature: MA Experiment 20001558 PARAMETER Experiment Name: At_Drought_Soil_Dry_P Parameter: Timepoint (day) Value: 13
  misc_feature: MA Experiment 20001558 PARAMETER Experiment Name: At_Drought_Soil_Dry_P Parameter: Treatment Value: Drought vs. No Drought
  misc_feature: MA Experiment ID: 20001559 Result: Down-regulated in Transcription
  misc_feature: MA Experiment 20001559 PARAMETER Experiment Name: At_Drought_Soil_Dry_P Parameter: Age (day) Value: 28
  misc_feature: MA Experiment 20001559 PARAMETER Experiment Name: At_Drought_Soil_Dry_P Parameter: Organism Value: A. thaliana
  misc_feature: MA Experiment 20001559 PARAMETER Experiment Name: At_Drought_Soil_Dry_P Parameter: Plant Line Value: WS
  misc_feature: MA Experiment 20001559 PARAMETER Experiment Name: At_Drought_Soil_Dry_P Parameter: Post Timepoint (hr) Value: 29
  misc_feature: MA Experiment 20001559 PARAMETER Experiment Name: At_Drought_Soil_Dry_P Parameter: Post-Treatment Value: Re-Water vs. No Drought
  misc_feature: MA Experiment 20001559 PARAMETER Experiment Name: At_Drought_Soil_Dry_P Parameter: Timepoint (day) Value: 14
  misc_feature: MA Experiment 20001559 PARAMETER Experiment Name: At_Drought_Soil_Dry_P Parameter: Treatment Value: Drought vs. No Drought
  misc_feature: MA Experiment ID: 20001560 Result: Down-regulated in Transcription
  misc_feature: MA Experiment 20001560 PARAMETER Experiment Name: At_Drought_Soil_Dry_P Parameter: Age (day) Value: 28
  misc_feature: MA Experiment 20001560 PARAMETER Experiment Name: At_Drought_Soil_Dry_P Parameter: Organism Value: A. thaliana
  misc_feature: MA Experiment 20001560 PARAMETER Experiment Name: At_Drought_Soil_Dry_P Parameter: Plant Line Value: WS
  misc_feature: MA Experiment 20001560 PARAMETER Experiment Name: At_Drought_Soil_Dry_P Parameter: Post Timepoint (hr) Value: None
  misc_feature: MA Experiment 20001560 PARAMETER Experiment Name: At_Drought_Soil_Dry_P Parameter: Post-Treatment Value: None
  misc_feature: MA Experiment 20001560 PARAMETER Experiment Name: At_Drought_Soil_Dry_P Parameter: Timepoint (day) Value: 14
  misc_feature: MA Experiment 20001560 PARAMETER Experiment Name: At_Drought_Soil_Dry_P Parameter: Treatment Value: Drought vs. No Drought
  misc_feature: MA Experiment ID: 20001757 Result: Up-regulated in Transcription
  misc_feature: MA Experiment 20001757 PARAMETER Experiment Name: At_50mM_NH4NO3_L-to-H_P Parameter: Timepoint (hr) Value: 6
  misc_feature: MA Experiment 20001757 PARAMETER Experiment Name: At_50mM_NH4NO3_L-to-H_P Parameter: Tissue Value: Leaf
  misc_feature: MA Experiment 20001757 PARAMETER Experiment Name: At_50mM_NH4NO3_L-to-H_P Parameter: Treatment Value: 50mM NH4NO3 vs 100mM Mannitol
  misc_feature: MA Experiment ID: 20001904 Result: Down-regulated in Transcription
  misc_feature: MA Experiment 20001904 PARAMETER Experiment Name: At_Drought_Reproduction_P Parameter: Age (day) Value: 37
  misc_feature: MA Experiment 20001904 PARAMETER Experiment Name: At_Drought_Reproduction_P Parameter: Organism Value: A. thaliana
  misc_feature: MA Experiment 20001904 PARAMETER Experiment Name: At_Drought_Reproduction_P Parameter: Plant Line Value: WS
  misc_feature: MA Experiment 20001904 PARAMETER Experiment Name: At_Drought_Reproduction_P Parameter: Timepoint (day) Value: 7
  misc_feature: MA Experiment 20001904 PARAMETER Experiment Name: At_Drought_Reproduction_P Parameter: Tissue Value: Rosettes
  misc_feature: MA Experiment 20001904 PARAMETER Experiment Name: At_Drought_Reproduction_P Parameter: Treatment Value: Drought vs. No Drought

SEQ ID NO: 92228 - protein, 346 aa, Arabidopsis thaliana; identical to SEQ ID NO: 88472
  peptide (1)..(346): Ceres Seq. ID no. 12709625
  misc_feature (102)..(237): Pfam Name: NUDIX domain Pfam Description: NUDIX domain
  misc_feature (1)..(275): Homolog of NCBI NO: 15228147 NR Description: putative mutT domain protein; protein id: [Arabidopsis thaliana] >gi|25387471|pir||G84457 probable mutT
  misc_feature (1)..(275): Homolog of NCBI NO: 15235458 NR Description: growth factor like protein; protein id: supported by cDNA: 148575., supported by cDNA: gi_13272466, by cDNA: gi_13877892, supported by cDNA: gi_15810610 [Arabidopsis
  misc_feature (10)..(275): Homolog of NCBI NO: 21553511 NR Description: growth factor like protein [Arabidopsis thaliana]
  misc_feature (1)..(275): Homolog of NCBI NO: 15228145 NR Description: putative mutT domain protein; protein id: [Arabidopsis thaliana] >gi|25387501|pir||E84457 probable mutT
  misc_feature (1)..(275): Homolog of NCBI NO: 38564302 NR Description: At2g04430 [Arabidopsis thaliana]
  misc_feature (1)..(266): Homolog of NCBI NO: 9758793 NR Description: MutT domain protein-like [Arabidopsis thaliana]
  misc_feature (1)..(266): Homolog of NCBI NO: 18422823 NR Description: MutT domain protein-like; protein id: supported by cDNA: gi_14596036, supported by cDNA: gi_17978726
  misc_feature (10)..(265): Homolog of NCBI NO: 38564312 NR Description: At4g25434 [Arabidopsis thaliana]
  misc_feature (10)..(162): Homolog of NCBI NO: 30686884 NR Description: MutT/nudix family protein [Arabidopsis thaliana]
  misc_feature (161)..(265): Homolog of NCBI NO: 30686884 NR Description: MutT/nudix family protein [Arabidopsis thaliana]

SEQ ID NO: 92229 - protein, 318 aa, Arabidopsis thaliana; identical to SEQ ID NO: 88473
  peptide (1)..(318): Ceres Seq. ID no. 12709626
  misc_feature (74)..(209): Pfam Name: NUDIX domain Pfam Description: NUDIX domain
  misc_feature (1)..(247): Homolog of NCBI NO: 15228147 NR Description: putative mutT domain protein; protein id: [Arabidopsis thaliana] >gi|25387471|pir||G84457 probable mutT
  misc_feature (1)..(247): Homolog of NCBI NO: 15235458 NR Description: growth factor like protein; protein id: supported by cDNA: 148575., supported by cDNA: gi_13272466, by cDNA: gi_13877892, supported by cDNA: gi_15810610 [Arabidopsis
  misc_feature (1)..(247): Homolog of NCBI NO: 21553511 NR Description: growth factor like protein [Arabidopsis thaliana]
  misc_feature (1)..(247): Homolog of NCBI NO: 15228145 NR Description: putative mutT domain protein; protein id: [Arabidopsis thaliana] >gi|25387501|pir||E84457 probable mutT
  misc_feature (1)..(247): Homolog of NCBI NO: 38564302 NR Description: At2g04430 [Arabidopsis thaliana]
  misc_feature (1)..(238): Homolog of NCBI NO: 9758793 NR Description: MutT domain protein-like [Arabidopsis thaliana]
  misc_feature (1)..(238): Homolog of NCBI NO: 18422823 NR Description: MutT domain protein-like; protein id: supported by cDNA: gi_14596036, supported by cDNA: gi_17978726
  misc_feature (1)..(237): Homolog of NCBI NO: 38564312 NR Description: At4g25434 [Arabidopsis thaliana]
  misc_feature (1)..(134): Homolog of NCBI NO: 30686884 NR Description: MutT/nudix family protein [Arabidopsis thaliana]
  misc_feature (133)..(237): Homolog of NCBI NO: 30686884 NR Description: MutT/nudix family protein [Arabidopsis thaliana]

SEQ ID NO: 92230 - protein, 263 aa, Arabidopsis thaliana; identical to SEQ ID NO: 88474
  peptide (1)..(263): Ceres Seq. ID no. 12709627
  misc_feature (19)..(154): Pfam Name: NUDIX domain Pfam Description: NUDIX domain
  misc_feature (1)..(192): Homolog of NCBI NO: 15228147 NR Description: putative mutT domain protein; protein id: [Arabidopsis thaliana] >gi|25387471|pir||G84457 probable mutT
  misc_feature (1)..(192): Homolog of NCBI NO: 15235458 NR Description: growth factor like protein; protein id: supported by cDNA: 148575., supported by cDNA: gi_13272466, by cDNA: gi_13877892, supported by cDNA: gi_15810610 [Arabidopsis
  misc_feature (1)..(192): Homolog of NCBI NO: 21553511 NR Description: growth factor like protein [Arabidopsis thaliana]
  misc_feature (1)..(192): Homolog of NCBI NO: 15228145 NR Description: putative mutT domain protein; protein id: [Arabidopsis thaliana] >gi|25387501|pir||E84457 probable mutT
  misc_feature (1)..(192): Homolog of NCBI NO: 38564302 NR Description: At2g04430 [Arabidopsis thaliana]
  misc_feature (1)..(183): Homolog of NCBI NO: 9758793 NR Description: MutT domain protein-like [Arabidopsis thaliana]
  misc_feature (1)..(183): Homolog of NCBI NO: 18422823 NR Description: MutT domain protein-like; protein id: supported by cDNA: gi_14596036, supported by cDNA: gi_17978726
  misc_feature (1)..(182): Homolog of NCBI NO: 38564312 NR Description: At4g25434 [Arabidopsis thaliana]
  misc_feature (1)..(79): Homolog of NCBI NO: 30686884 NR Description: MutT/nudix family protein [Arabidopsis thaliana]
  misc_feature (78)..(182): Homolog of NCBI NO: 30686884 NR Description: MutT/nudix family protein [Arabidopsis thaliana]

SEQ ID NO: 92231 - DNA, 1221 bp, Arabidopsis thaliana; identical to SEQ ID NO: 88475
  misc_feature (1)..(1221): Ceres Seq. ID no. 12709659
  misc_feature: MA Experiment ID: 20000173 Result: Down-regulated in Transcription
  misc_feature: MA Experiment 20000173 PARAMETER Experiment Name: At_42deg_Heat_P Parameter: Age (day) Value: 14
  misc_feature: MA Experiment 20000173 PARAMETER Experiment Name: At_42deg_Heat_P Parameter: Organism Value: A. thaliana
  misc_feature: MA Experiment 20000173 PARAMETER Experiment Name: At_42deg_Heat_P Parameter: Plant Line Value: WS
  misc_feature: MA Experiment 20000173 PARAMETER Experiment Name: At_42deg_Heat_P Parameter: Temperature (deg C) Value: 42 vs. 22
  misc_feature: MA Experiment 20000173 PARAMETER Experiment Name: At_42deg_Heat_P Parameter: Timepoint (hr) Value: 6
  misc_feature: MA Experiment 20000173 PARAMETER Experiment Name: At_42deg_Heat_P Parameter: Tissue Value: Aerial
  misc_feature: MA Experiment ID: 20000180 Result: Up-regulated in Transcription
  misc_feature: MA Experiment 20000180 PARAMETER Experiment Name: At_Germinating_Seeds_P Parameter: Age (hr) Value: 24 vs. 0
  misc_feature: MA Experiment 20000180 PARAMETER Experiment Name: At_Germinating_Seeds_P Parameter: Tissue Value: Germinating Seeds
  misc_feature: MA Experiment ID: 20000185 Result: Up-regulated in Transcription
  misc_feature: MA Experiment 20000185 PARAMETER Experiment Name: At_Roots__P Parameter: Age (day) Value: 7 vs. 21
  misc_feature: MA Experiment 20000185 PARAMETER Experiment Name: At_Roots__P Parameter: Organism Value: A. thaliana
  misc_feature: MA Experiment 20000185 PARAMETER Experiment Name: At_Roots__P Parameter: Tissue Value: Roots vs. Whole Plant
  misc_feature: MA Experiment ID: 20000265 Result: Up-regulated in Transcription
  misc_feature: MA Experiment 20000265 PARAMETER Experiment Name: At_Open_Flower_P Parameter: Age (day) Value: 21
  misc_feature: MA Experiment 20000265 PARAMETER Experiment Name: At_Open_Flower_P Parameter: Plant Line Value: WS
  misc_feature: MA Experiment 20000265 PARAMETER Experiment Name: At_Open_Flower_P Parameter: Tissue Value: Closed Flower vs. Whole Plant
  misc_feature: MA Experiment ID: 20000439 Result: Up-regulated in Transcription
  misc_feature: MA Experiment 20000439 PARAMETER Experiment Name: At_Roots__P Parameter: Age (day) Value: 14 vs. 21
  misc_feature: MA Experiment 20000439 PARAMETER Experiment Name: At_Roots__P Parameter: Organism Value: A. thaliana
  misc_feature: MA Experiment 20000439 PARAMETER Experiment Name: At_Roots__P Parameter: Tissue Value: Roots vs. Whole Plant

SEQ ID NO: 92232 - protein, 406 aa, Arabidopsis thaliana; identical to SEQ ID NO: 76958
  peptide (1)..(406): Ceres Seq. ID no. 12709660
  misc_feature (7)..(236): Pfam Name: Nucleotidyl transferase Pfam Description: Nucleotidyl transferase
  misc_feature (1)..(406): Homolog of NCBI NO: 22325477 NR Description: putative GDP-mannose pyrophosphorylase; protein At2g04650.1, supported by cDNA: gi_17064889 [Arabidopsis
  misc_feature (1)..(406): Homolog of NCBI NO: 17064890 NR Description: putative GDP-mannose pyrophosphorylase
  misc_feature (1)..(383): Homolog of NCBI NO: 25411099 NR Description: probable GDP-mannose pyrophosphorylase [imported]
  misc_feature (3)..(406): Homolog of NCBI NO: 5882732 NR Description: Similar to gb|AF135422 GDP-mannose A (GMPPA) from Homo sapiens. ESTs gb|AA712990, gb|N65247, gb|T04179, gb|Z38092, gb|T76473, gb|N96403, gb|AA394551 and
  misc_feature (3)..(406): Homolog of NCBI NO: 15222037 NR Description: putative GDP-mannose pyrophosphorylase; protein At1g74910.1, supported by cDNA: gi_13937223 [Arabidopsis
  misc_feature (3)..(360): Homolog of NCBI NO: 30699056 NR Description: ADP-glucose pyrophosphorylase family [Arabidopsis
  misc_feature (2)..(335): Homolog of NCBI NO: 26006499 NR Description: Putative GDP-mannose pyrophosphorylase [Oryza
  misc_feature (1)..(406): Homolog of NCBI NO: 28830182 NR Description: similar to Homo sapiens (Human). GDP-mannose
  misc_feature (8)..(406): Homolog of NCBI NO: 33416563 NR Description: Unknown (protein for MGC:66135) [Danio rerio]
  misc_feature (8)..(366): Homolog of NCBI NO: 19526884 NR Description: RIKEN cDNA 1810012N01 [Mus musculus]

SEQ ID NO: 92233 - protein, 396 aa, Arabidopsis thaliana; identical to SEQ ID NO: 76959
  peptide (1)..(396): Ceres Seq. ID no. 12709661
  misc_feature (1)..(226): Pfam Name: Nucleotidyl transferase Pfam Description: Nucleotidyl transferase
  misc_feature (1)..(396): Homolog of NCBI NO: 22325477 NR Description: putative GDP-mannose pyrophosphorylase; protein At2g04650.1, supported by cDNA: gi_17064889 [Arabidopsis
  misc_feature (1)..(396): Homolog of NCBI NO: 17064890 NR Description: putative GDP-mannose pyrophosphorylase
  misc_feature (1)..(373): Homolog of NCBI NO: 25411099 NR Description: probable GDP-mannose pyrophosphorylase [imported]
  misc_feature (1)..(396): Homolog of NCBI NO: 5882732 NR Description: Similar to gb|AF135422 GDP-mannose A (GMPPA) from Homo sapiens. ESTs gb|AA712990, gb|N65247, gb|T04179, gb|Z38092, gb|T76473, gb|N96403, gb|AA394551 and
  misc_feature (1)..(396): Homolog of NCBI NO: 15222037 NR Description: putative GDP-mannose pyrophosphorylase; protein At1g74910.1, supported by cDNA: gi_13937223 [Arabidopsis
  misc_feature (1)..(350): Homolog of NCBI NO: 30699056 NR Description: ADP-glucose pyrophosphorylase family [Arabidopsis
  misc_feature (1)..(325): Homolog of NCBI NO: 26006499 NR Description: Putative GDP-mannose pyrophosphorylase [Oryza
  misc_feature (1)..(396): Homolog of NCBI NO: 28830182 NR Description: similar to Homo sapiens (Human). GDP-mannose
  misc_feature (1)..(396): Homolog of NCBI NO: 33416563 NR Description: Unknown (protein for MGC:66135) [Danio rerio]
  misc_feature (1)..(356): Homolog of NCBI NO: 19526884 NR Description: RIKEN cDNA 1810012N01 [Mus musculus]

SEQ ID NO: 92234 - protein, 367 aa, Arabidopsis thaliana; identical to SEQ ID NO: 76960
  peptide (1)..(367): Ceres Seq. ID no. 12709662
  misc_feature (1)..(197): Pfam Name: Nucleotidyl transferase Pfam Description: Nucleotidyl transferase
  misc_feature (1)..(367): Homolog of NCBI NO: 22325477 NR Description: putative GDP-mannose pyrophosphorylase; protein At2g04650.1, supported by cDNA: gi_17064889 [Arabidopsis
  misc_feature (1)..(367): Homolog of NCBI NO: 17064890 NR Description: putative GDP-mannose pyrophosphorylase
  misc_feature (1)..(344): Homolog of NCBI NO: 25411099 NR Description: probable GDP-mannose pyrophosphorylase [imported]
  misc_feature (1)..(367): Homolog of NCBI NO: 5882732 NR Description: Similar to gb|AF135422 GDP-mannose A (GMPPA) from Homo sapiens. ESTs gb|AA712990, gb|N65247, gb|T04179, gb|Z38092, gb|T76473, gb|N96403, gb|AA394551 and
  misc_feature (1)..(367): Homolog of NCBI NO: 15222037 NR Description: putative GDP-mannose pyrophosphorylase; protein At1g74910.1, supported by cDNA: gi_13937223 [Arabidopsis
  misc_feature (1)..(321): Homolog of NCBI NO: 30699056 NR Description: ADP-glucose pyrophosphorylase family [Arabidopsis
  misc_feature (1)..(296): Homolog of NCBI NO: 26006499 NR Description: Putative GDP-mannose pyrophosphorylase [Oryza
  misc_feature (1)..(367): Homolog of NCBI NO: 28830182 NR Description: similar to Homo sapiens (Human). GDP-mannose
  misc_feature (1)..(367): Homolog of NCBI NO: 33416563 NR Description: Unknown (protein for MGC:66135) [Danio rerio]
  misc_feature (1)..(327): Homolog of NCBI NO: 19526884 NR Description: RIKEN cDNA 1810012N01 [Mus musculus]

SEQ ID NO: 92235 - DNA, 1284 bp, Arabidopsis thaliana; identical to SEQ ID NO: 88479
  misc_feature (1)..(1284): Ceres Seq. ID no. 12709704
  misc_feature: MA Experiment ID: 20000185 Result: Down-regulated in Transcription
  misc_feature: MA Experiment 20000185 PARAMETER Experiment Name: At_Roots__P Parameter: Age (day) Value: 7 vs. 21
  misc_feature: MA Experiment 20000185 PARAMETER Experiment Name: At_Roots__P Parameter: Organism Value: A. thaliana
  misc_feature: MA Experiment 20000185 PARAMETER Experiment Name: At_Roots__P Parameter: Tissue Value: Roots vs. Whole Plant
  misc_feature: MA Experiment ID: 20000438 Result: Down-regulated in Transcription
  misc_feature: MA Experiment 20000438 PARAMETER Experiment Name: At_Shoots__P Parameter: Age (day) Value: 14
  misc_feature: MA Experiment 20000438 PARAMETER Experiment Name: At_Shoots__P Parameter: Tissue Value: Shoots vs. Whole Plant
  misc_feature: MA Experiment ID: 20000439 Result: Down-regulated in Transcription
  misc_feature: MA Experiment 20000439 PARAMETER Experiment Name: At_Roots__P Parameter: Age (day) Value: 14 vs. 21
  misc_feature: MA Experiment 20000439 PARAMETER Experiment Name: At_Roots__P Parameter: Organism Value: A. thaliana
  misc_feature: MA Experiment 20000439 PARAMETER Experiment Name: At_Roots__P Parameter: Tissue Value: Roots vs. Whole Plant
  misc_feature: MA Experiment ID: 20000527 Result: Down-regulated in Transcription
  misc_feature: MA Experiment 20000527 PARAMETER Experiment Name: At_10percent_PEG_P Parameter: Age (day) Value: 20
  misc_feature: MA Experiment 20000527 PARAMETER Experiment Name: At_10percent_PEG_P Parameter: Organism Value: A. thaliana
  misc_feature: MA Experiment 20000527 PARAMETER Experiment Name: At_10percent_PEG_P Parameter: Plant Line Value: WS
  misc_feature: MA Experiment 20000527 PARAMETER Experiment Name: At_10percent_PEG_P Parameter: Timepoint (day) Value: 20
  misc_feature: MA Experiment 20000527 PARAMETER Experiment Name: At_10percent_PEG_P Parameter: Tissue Value: Whole Plant
  misc_feature: MA Experiment 20000527 PARAMETER Experiment Name: At_10percent_PEG_P Parameter: Treatment Value: 10percent PEG vs. No Treatment
  misc_feature: MA Experiment ID: 20001557 Result: Down-regulated in Transcription
  misc_feature: MA Experiment 20001557 PARAMETER Experiment Name: At_Drought_Soil_Dry_P Parameter: Age (day) Value: 27
  misc_feature: MA Experiment 20001557 PARAMETER Experiment Name: At_Drought_Soil_Dry_P Parameter: Organism Value: A. thaliana
  misc_feature: MA Experiment 20001557 PARAMETER Experiment Name: At_Drought_Soil_Dry_P Parameter: Plant Line Value: WS
  misc_feature: MA Experiment 20001557 PARAMETER Experiment Name: At_Drought_Soil_Dry_P Parameter: Post Timepoint (hr) Value: 3
  misc_feature: MA Experiment 20001557 PARAMETER Experiment Name: At_Drought_Soil_Dry_P Parameter: Post-Treatment Value: Re-Water vs. No Drought
  misc_feature: MA Experiment 20001557 PARAMETER Experiment Name: At_Drought_Soil_Dry_P Parameter: Timepoint (day) Value: 13
  misc_feature: MA Experiment 20001557 PARAMETER Experiment Name: At_Drought_Soil_Dry_P Parameter: Treatment Value: Drought vs. No Drought
  misc_feature: MA Experiment ID: 20001904 Result: Down-regulated in Transcription
  misc_feature: MA Experiment 20001904 PARAMETER Experiment Name: At_Drought_Reproduction_P Parameter: Age (day) Value: 37
  misc_feature: MA Experiment 20001904 PARAMETER Experiment Name: At_Drought_Reproduction_P Parameter: Organism Value: A. thaliana
  misc_feature: MA Experiment 20001904 PARAMETER Experiment Name: At_Drought_Reproduction_P Parameter: Plant Line Value: WS
  misc_feature: MA Experiment 20001904 PARAMETER Experiment Name: At_Drought_Reproduction_P Parameter: Timepoint (day) Value: 7
  misc_feature: MA Experiment 20001904 PARAMETER Experiment Name: At_Drought_Reproduction_P Parameter: Tissue Value: Rosettes
  misc_feature: MA Experiment 20001904 PARAMETER Experiment Name: At_Drought_Reproduction_P Parameter: Treatment Value: Drought vs. No Drought

SEQ ID NO: 92236 - protein, 427 aa, Arabidopsis thaliana; identical to SEQ ID NO: 88480
  peptide (1)..(427): Ceres Seq. ID no. 12709705
  misc_feature (206)..(228): Pfam Name: MORN repeat Pfam Description: MORN repeat
  misc_feature (1)..(417): Homolog of NCBI NO: 15217439 NR Description: unknown protein; protein id: At1g77660.1
  misc_feature (3)..(417): Homolog of NCBI NO: 15219142 NR Description: phosphatidylinositol-4-phosphate 5-kinase, protein id: At1g21920.1, supported by cDNA: 37462., supported by gi_13878044 [Arabidopsis thaliana]
  misc_feature (3)..(417): Homolog of NCBI NO: 21593251 NR Description: phosphatidylinositol-4-phosphate 5-kinase,
  misc_feature (148)..(414): Homolog of NCBI NO: 37536922 NR Description: putative phosphatidylinositol-4-phosphate
  misc_feature (76)..(413): Homolog of NCBI NO: 18403768 NR Description: expressed protein; protein id: At2g35170.1, by cDNA: gi_16604413, supported by cDNA: gi_19699213 [Arabidopsis >gi|25370691|pir||E84765 hypothetical protein At2g35170
  misc_feature (86)..(413): Homolog of NCBI NO: 21928129 NR Description: AT4g17080/dl4570w [Arabidopsis thaliana]
  misc_feature (84)..(413): Homolog of NCBI NO: 15235967 NR Description: hypothetical protein; protein id: At4g17080.1
  misc_feature (172)..(350): Homolog of NCBI NO: 40062709 NR Description: MORN repeat protein [uncultured bacterium 314]
  misc_feature (172)..(354): Homolog of NCBI NO: 40062709 NR Description: MORN repeat protein [uncultured bacterium 314]
  misc_feature (172)..(351): Homolog of NCBI NO: 40062709 NR Description: MORN repeat protein [uncultured bacterium 314]

SEQ ID NO: 92237 - protein, 359 aa, Arabidopsis thaliana; identical to SEQ ID NO: 88481
  peptide (1)..(359): Ceres Seq. ID no. 12709706
  misc_feature (138)..(160): Pfam Name: MORN repeat Pfam Description: MORN repeat
  misc_feature (1)..(349): Homolog of NCBI NO: 15217439 NR Description: unknown protein; protein id: At1g77660.1
  misc_feature (1)..(349): Homolog of NCBI NO: 15219142 NR Description: phosphatidylinositol-4-phosphate 5-kinase, protein id: At1g21920.1, supported by cDNA: 37462., supported by gi_13878044 [Arabidopsis thaliana]
  misc_feature (1)..(349): Homolog of NCBI NO: 21593251 NR Description: phosphatidylinositol-4-phosphate 5-kinase,
  misc_feature (80)..(346): Homolog of NCBI NO: 37536922 NR Description: putative phosphatidylinositol-4-phosphate
  misc_feature (8)..(345): Homolog of NCBI NO: 18403768 NR Description: expressed protein; protein id: At2g35170.1, by cDNA: gi_16604413, supported by cDNA: gi_19699213 [Arabidopsis >gi|25370691|pir||E84765 hypothetical protein At2g35170
  misc_feature (18)..(345): Homolog of NCBI NO: 21928129 NR Description: AT4g17080/dl4570w [Arabidopsis thaliana]
  misc_feature (16)..(345): Homolog of NCBI NO: 15235967 NR Description: hypothetical protein; protein id: At4g17080.1
  misc_feature (104)..(282): Homolog of NCBI NO: 40062709 NR Description: MORN repeat protein [uncultured bacterium 314]
  misc_feature (104)..(286): Homolog of NCBI NO: 40062709 NR Description: MORN repeat protein [uncultured bacterium 314]
  misc_feature (104)..(283): Homolog of NCBI NO: 40062709 NR Description: MORN repeat protein [uncultured bacterium 314]

SEQ ID NO: 92238 - protein, 305 aa, Arabidopsis thaliana; identical to SEQ ID NO: 88482
  peptide (1)..(305): Ceres Seq. ID no. 12709707
  misc_feature (84)..(106): Pfam Name: MORN repeat Pfam Description: MORN repeat
  misc_feature (1)..(295): Homolog of NCBI NO: 15217439 NR Description: unknown protein; protein id: At1g77660.1
  misc_feature (1)..(295): Homolog of NCBI NO: 15219142 NR Description: phosphatidylinositol-4-phosphate 5-kinase, protein id: At1g21920.1, supported by cDNA: 37462., supported by gi_13878044 [Arabidopsis thaliana]
  misc_feature (1)..(295): Homolog of NCBI NO: 21593251 NR Description: phosphatidylinositol-4-phosphate 5-kinase,
  misc_feature (26)..(292): Homolog of NCBI NO: 37536922 NR Description: putative phosphatidylinositol-4-phosphate
  misc_feature (1)..(291): Homolog of NCBI NO: 18403768 NR Description: expressed protein; protein id: At2g35170.1, by cDNA: gi_16604413, supported by cDNA: gi_19699213 [Arabidopsis >gi|25370691|pir||E84765 hypothetical protein At2g35170
  misc_feature (1)..(291): Homolog of NCBI NO: 21928129 NR Description: AT4g17080/dl4570w [Arabidopsis thaliana]
  misc_feature (1)..(291): Homolog of NCBI NO: 15235967 NR Description: hypothetical protein; protein id: At4g17080.1
  misc_feature (50)..(228): Homolog of NCBI NO: 40062709 NR Description: MORN repeat protein [uncultured bacterium 314]
  misc_feature (50)..(232): Homolog of NCBI NO: 40062709 NR Description: MORN repeat protein [uncultured bacterium 314]
  misc_feature (50)..(229): Homolog of NCBI NO: 40062709 NR Description: MORN repeat protein [uncultured bacterium 314]

SEQ ID NO: 92239 - DNA, 969 bp, Arabidopsis thaliana; identical to SEQ ID NO: 88483
  misc_feature (1)..(969): Ceres Seq. ID no. 12709712

SEQ ID NO: 92240 - protein, 322 aa, Arabidopsis thaliana; identical to SEQ ID NO: 88484
  peptide (1)..(322): Ceres Seq. ID no. 12709713
  misc_feature (74)..(279): Pfam Name: Thaumatin family Pfam Description: Thaumatin family
  misc_feature (24)..(281): Homolog of NCBI NO: 15217445 NR Description: thaumatin-like protein; protein id: At1g77700.1
  misc_feature (1)..(25): Homolog of NCBI NO: 15217445 NR Description: thaumatin-like protein; protein id: At1g77700.1
  misc_feature (65)..(316): Homolog of NCBI NO: 5777618 NR Description: CAA30376.1 protein [Oryza sativa]
  misc_feature (65)..(316): Homolog of NCBI NO: 38345519 NR Description: OSJNBa0039K24.22 [Oryza sativa (japonica
  misc_feature (64)..(281): Homolog of NCBI NO: 15222088 NR Description: thaumatin-like protein (PR-5); protein id: supported by cDNA: gi_2435405 [Arabidopsis thaliana]
  misc_feature (64)..(281): Homolog of NCBI NO: 2435406 NR Description: thaumatin-like protein [Arabidopsis thaliana]
  misc_feature (66)..(278): Homolog of NCBI NO: 6273385 NR Description: SCUTL2 [Vitis vinifera]
  misc_feature (42)..(281): Homolog of NCBI NO: 15222090 NR Description: thaumatin-like protein; protein id: At1g75050.1
  misc_feature (64)..(279): Homolog of NCBI NO: 30686314 NR Description: thaumatin family [Arabidopsis thaliana]
  misc_feature (66)..(283): Homolog of NCBI NO: 7442175 NR Description: thaumatin-like protein - turnip

SEQ ID NO: 92241 - DNA, 2166 bp, Arabidopsis thaliana; identical to SEQ ID NO: 88485
  misc_feature (1)..(2166): Ceres Seq. ID no. 12709759
  misc_feature: MA Experiment ID: 20000184 Result: Up-regulated in Transcription
  misc_feature: MA Experiment 20000184 PARAMETER Experiment Name: At_Shoots__P Parameter: Age (day) Value: 7
  misc_feature: MA Experiment 20000184 PARAMETER Experiment Name: At_Shoots__P Parameter: Tissue Value: Shoots vs. Whole Plant
  misc_feature: MA Experiment ID: 20000185 Result: Up-regulated in Transcription
  misc_feature: MA Experiment 20000185 PARAMETER Experiment Name: At_Roots__P Parameter: Age (day) Value: 7 vs. 21
  misc_feature: MA Experiment 20000185 PARAMETER Experiment Name: At_Roots__P Parameter: Organism Value: A. thaliana
  misc_feature: MA Experiment 20000185 PARAMETER Experiment Name: At_Roots__P Parameter: Tissue Value: Roots vs. Whole Plant
  misc_feature: MA Experiment ID: 20000227 Result: Down-regulated in Transcription
  misc_feature: MA Experiment 20000227 PARAMETER Experiment Name: At_Root-Tips-vs-Tops_P Parameter: Tissue Value: Root Tips vs. Root Tops
  misc_feature: MA Experiment ID: 20000267 Result: Down-regulated in Transcription
  misc_feature: MA Experiment 20000267 PARAMETER Experiment Name: At_Drought_P Parameter: Age (day) Value: 7
  misc_feature: MA Experiment 20000267 PARAMETER Experiment Name: At_Drought_P Parameter: Organism Value: A. thaliana
  misc_feature: MA Experiment 20000267 PARAMETER Experiment Name: At_Drought_P Parameter: Plant Line Value: WS
  misc_feature: MA Experiment 20000267 PARAMETER Experiment Name: At_Drought_P Parameter: Timepoint (hr) Value: 6
  misc_feature: MA Experiment 20000267 PARAMETER Experiment Name: At_Drought_P Parameter: Tissue Value: Whole Plant
  misc_feature: MA Experiment 20000267 PARAMETER Experiment Name: At_Drought_P Parameter: Treatment Value: Drought vs. No Drought
  misc_feature: MA Experiment ID: 20000269 Result: Down-regulated in Transcription
  misc_feature: MA Experiment 20000269 PARAMETER Experiment Name: At_1mM_KNO3_L-vs-H_Roots_P Parameter: Age (day) Value: 7,10,12
  misc_feature: MA Experiment 20000269 PARAMETER Experiment Name: At_1mM_KNO3_L-vs-H_Roots_P Parameter: Organism Value: A. thaliana
  misc_feature: MA Experiment 20000269 PARAMETER Experiment Name: At_1mM_KNO3_L-vs-H_Roots_P Parameter: Plant Line Value: WS
  misc_feature: MA Experiment 20000269 PARAMETER Experiment Name: At_1mM_KNO3_L-vs-H_Roots_P Parameter: Timepoint (day) Value: 7,10,12
  misc_feature: MA Experiment 20000269 PARAMETER Experiment Name: At_1mM_KNO3_L-vs-H_Roots_P Parameter: Tissue Value: Roots
  misc_feature: MA Experiment 20000269 PARAMETER Experiment Name: At_1mM_KNO3_L-vs-H_Roots_P Parameter: Treatment Value: 1mM KNO3 vs. 50mM KNO3
  misc_feature: MA Experiment ID: 20000286 Result: Up-regulated in Transcription
  misc_feature: MA Experiment 20000286 PARAMETER Experiment Name: At_Open_Flower_P Parameter: Age (day) Value: 21
  misc_feature: MA Experiment 20000286 PARAMETER Experiment Name: At_Open_Flower_P Parameter: Plant Line Value: WS
  misc_feature: MA Experiment 20000286 PARAMETER Experiment Name: At_Open_Flower_P Parameter: Tissue Value: Half Open vs. Whole Plant
  misc_feature: MA Experiment ID: 20000437 Result: Down-regulated in Transcription
  misc_feature: MA Experiment 20000437 PARAMETER Experiment Name: At_Drought_P Parameter: Age (day) Value: 8
  misc_feature: MA Experiment 20000437 PARAMETER Experiment Name: At_Drought_P Parameter: Organism Value: A. thaliana
  misc_feature: MA Experiment 20000437 PARAMETER Experiment Name: At_Drought_P Parameter: Plant Line Value: WS
  misc_feature: MA Experiment 20000437 PARAMETER Experiment Name: At_Drought_P Parameter: Timepoint (hr) Value: 24
  misc_feature: MA Experiment 20000437 PARAMETER Experiment Name: At_Drought_P Parameter: Tissue Value: Whole Plant
  misc_feature: MA Experiment 20000437 PARAMETER Experiment Name: At_Drought_P Parameter: Treatment Value: Drought vs. No Drought
  misc_feature: MA Experiment ID: 20000438 Result: Up-regulated in Transcription
  misc_feature: MA Experiment 20000438 PARAMETER Experiment Name: At_Shoots__P Parameter: Age (day) Value: 14
  misc_feature: MA Experiment 20000438 PARAMETER Experiment Name: At_Shoots__P Parameter: Tissue Value: Shoots vs. Whole Plant
  misc_feature: MA Experiment ID: 20000439 Result: Up-regulated in Transcription
  misc_feature: MA Experiment 20000439 PARAMETER Experiment Name: At_Roots__P Parameter: Age (day) Value: 14 vs. 21
  misc_feature: MA Experiment 20000439 PARAMETER Experiment Name: At_Roots__P Parameter: Organism Value: A. thaliana
  misc_feature: MA Experiment 20000439 PARAMETER Experiment Name: At_Roots__P Parameter: Tissue Value: Roots vs. Whole Plant
  misc_feature: MA Experiment ID: 20000527 Result: Down-regulated in Transcription
  misc_feature: MA Experiment 20000527 PARAMETER Experiment Name: At_10percent_PEG_P Parameter: Age (day) Value: 20
  misc_feature: MA Experiment 20000527 PARAMETER Experiment Name: At_10percent_PEG_P Parameter: Organism Value: A. thaliana
  misc_feature: MA Experiment 20000527 PARAMETER Experiment Name: At_10percent_PEG_P Parameter: Plant Line Value: WS
  misc_feature: MA Experiment 20000527 PARAMETER Experiment Name: At_10percent_PEG_P Parameter: Timepoint (day) Value: 20
  misc_feature: MA Experiment 20000527 PARAMETER Experiment Name: At_10percent_PEG_P Parameter: Tissue Value: Whole Plant
  misc_feature: MA Experiment 20000527 PARAMETER Experiment Name: At_10percent_PEG_P Parameter: Treatment Value: 10percent PEG vs. No Treatment
  misc_feature: MA Experiment ID: 20001248 Result: Down-regulated in Transcription
  misc_feature: MA Experiment 20001248 PARAMETER Experiment Name: At_Far-red-induction_P Parameter: Age (day) Value: 7
  misc_feature: MA Experiment 20001248 PARAMETER Experiment Name: At_Far-red-induction_P Parameter: Light Value: Far-red vs. White
  misc_feature: MA Experiment 20001248 PARAMETER Experiment Name: At_Far-red-induction_P Parameter: Organism Value: A. thaliana
  misc_feature: MA Experiment 20001248 PARAMETER Experiment Name: At_Far-red-induction_P Parameter: Plant Line Value: Columbia
  misc_feature: MA Experiment 20001248 PARAMETER Experiment Name: At_Far-red-induction_P Parameter: Timepoint (hr) Value: 4
  misc_feature: MA Experiment 20001248 PARAMETER Experiment Name: At_Far-red-induction_P Parameter: Tissue Value: Whole Plant
  misc_feature: MA Experiment ID: 20001450 Result: Down-regulated in Transcription
  misc_feature: MA Experiment 20001450 PARAMETER Experiment Name: At_Far-red-induction_P Parameter: Age (day) Value: 7
  misc_feature: MA Experiment 20001450 PARAMETER Experiment Name: At_Far-red-induction_P Parameter: Light Value: Far-red vs. White
  misc_feature: MA Experiment 20001450 PARAMETER Experiment Name: At_Far-red-induction_P Parameter: Organism Value: A. thaliana
  misc_feature: MA Experiment 20001450 PARAMETER Experiment Name: At_Far-red-induction_P Parameter: Plant Line Value: Columbia
  misc_feature: MA Experiment 20001450 PARAMETER Experiment Name: At_Far-red-induction_P Parameter: Timepoint (hr) Value: 8
  misc_feature: MA Experiment 20001450 PARAMETER Experiment Name: At_Far-red-induction_P Parameter: Tissue Value: Whole Plant
  misc_feature: MA Experiment ID: 20001556 Result: Up-regulated in Transcription
  misc_feature: MA Experiment 20001556 PARAMETER Experiment Name: At_Drought_Soil_Dry_P Parameter: Age (day) Value: 26
  misc_feature: MA Experiment 20001556 PARAMETER Experiment Name: At_Drought_Soil_Dry_P Parameter: Organism Value: A. thaliana
  misc_feature: MA Experiment 20001556 PARAMETER Experiment Name: At_Drought_Soil_Dry_P Parameter: Plant Line Value: WS
  misc_feature: MA Experiment 20001556 PARAMETER Experiment Name: At_Drought_Soil_Dry_P Parameter: Post Timepoint (hr) Value: None
  misc_feature: MA Experiment 20001556 PARAMETER Experiment Name: At_Drought_Soil_Dry_P Parameter: Post-Treatment Value: None
  misc_feature: MA Experiment 20001556 PARAMETER Experiment Name: At_Drought_Soil_Dry_P Parameter: Timepoint (day) Value: 12
  misc_feature: MA Experiment 20001556 PARAMETER Experiment Name: At_Drought_Soil_Dry_P Parameter: Treatment Value: Drought vs. No Drought
  misc_feature: MA Experiment ID: 20001557 Result: Up-regulated in Transcription
  misc_feature: MA Experiment 20001557 PARAMETER Experiment Name: At_Drought_Soil_Dry_P Parameter: Age (day) Value: 27
  misc_feature: MA Experiment 20001557 PARAMETER Experiment Name: At_Drought_Soil_Dry_P Parameter: Organism Value: A. thaliana
  misc_feature: MA Experiment 20001557 PARAMETER Experiment Name: At_Drought_Soil_Dry_P Parameter: Plant Line Value: WS
  misc_feature: MA Experiment 20001557 PARAMETER Experiment Name: At_Drought_Soil_Dry_P Parameter: Post Timepoint (hr) Value: 3
  misc_feature: MA Experiment 20001557 PARAMETER Experiment Name: At_Drought_Soil_Dry_P Parameter: Post-Treatment Value: Re-Water vs. No Drought
  misc_feature: MA Experiment 20001557 PARAMETER Experiment Name: At_Drought_Soil_Dry_P Parameter: Timepoint (day) Value: 13
  misc_feature: MA Experiment 20001557 PARAMETER Experiment Name: At_Drought_Soil_Dry_P Parameter: Treatment Value: Drought vs. No Drought

SEQ ID NO: 92242 - protein, 721 aa, Arabidopsis thaliana; identical to SEQ ID NO: 88486
  peptide (1)..(721): Ceres Seq. ID no. 12709760
  misc_feature (374)..(721): Homolog of NCBI NO: 14270243 NR Description: sulfate transporter [Brassica napus]
  misc_feature (123)..(293): Homolog of NCBI NO: 14270243 NR Description: sulfate transporter [Brassica napus]
  misc_feature (1)..(107): Homolog of NCBI NO: 14270243 NR Description: sulfate transporter [Brassica napus]
  misc_feature (374)..(721): Homolog of NCBI NO: 18395079 NR Description: high affinity sulphate transporter, putative; id: At1g22150.1, supported by cDNA: gi_10716804 [Arabidopsis >gi|10716805|dbj|BAB16410.1| sulfate tansporter Sultr1;3
  misc_feature (123)..(293): Homolog of NCBI NO: 18395079 NR Description: high affinity sulphate transporter, putative; id: At1g22150.1, supported by cDNA: gi_10716804 [Arabidopsis >gi|10716805|dbj|BAB16410.1| sulfate tansporter Sultr1;3
  misc_feature (1)..(107): Homolog of NCBI NO: 18395079 NR Description: high affinity sulphate transporter, putative; id: At1g22150.1, supported by cDNA: gi_10716804 [Arabidopsis >gi|10716805|dbj|BAB16410.1| sulfate tansporter Sultr1;3
  misc_feature (374)..(721): Homolog of NCBI NO: 13487717 NR Description: sulfate transporter 2 [Lycopersicon esculentum]
  misc_feature (123)..(293): Homolog of NCBI NO: 13487717 NR Description: sulfate transporter 2 [Lycopersicon esculentum]
  misc_feature (24)..(107): Homolog of NCBI NO: 13487717 NR Description: sulfate transporter 2 [Lycopersicon esculentum]
  misc_feature (312)..(361): Homolog of NCBI NO: 13487717 NR Description: sulfate transporter 2 [Lycopersicon esculentum]

SEQ ID NO: 92243 - protein, 701 aa, Arabidopsis thaliana; identical to SEQ ID NO: 88487
  peptide (1)..(701): Ceres Seq. ID no. 12709761
  misc_feature (354)..(701): Homolog of NCBI NO: 14270243 NR Description: sulfate transporter [Brassica napus]
  misc_feature (103)..(273): Homolog of NCBI NO: 14270243 NR Description: sulfate transporter [Brassica napus]
  misc_feature (1)..(87): Homolog of NCBI NO: 14270243 NR Description: sulfate transporter [Brassica napus]
  misc_feature (354)..(701): Homolog of NCBI NO: 18395079 NR Description: high affinity sulphate transporter, putative; id: At1g22150.1, supported by cDNA: gi_10716804 [Arabidopsis >gi|10716805|dbj|BAB16410.1| sulfate tansporter Sultr1;3
  misc_feature (103)..(273): Homolog of NCBI NO: 18395079 NR Description: high affinity sulphate transporter, putative; id: At1g22150.1, supported by cDNA: gi_10716804 [Arabidopsis >gi|10716805|dbj|BAB16410.1| sulfate tansporter Sultr1;3
  misc_feature (1)..(87): Homolog of NCBI NO: 18395079 NR Description: high affinity sulphate transporter, putative; id: At1g22150.1, supported by cDNA: gi_10716804 [Arabidopsis >gi|10716805|dbj|BAB16410.1| sulfate tansporter Sultr1;3
  misc_feature (354)..(701): Homolog of NCBI NO: 13487717 NR Description: sulfate transporter 2 [Lycopersicon esculentum]
  misc_feature (103)..(273): Homolog of NCBI NO: 13487717 NR Description: sulfate transporter 2 [Lycopersicon esculentum]
  misc_feature (4)..(87): Homolog of NCBI NO: 13487717 NR Description: sulfate transporter 2 [Lycopersicon esculentum]
  misc_feature (292)..(341): Homolog of NCBI NO: 13487717 NR Description: sulfate transporter 2 [Lycopersicon esculentum]

SEQ ID NO: 92244 - protein, 684 aa, Arabidopsis thaliana; identical to SEQ ID NO: 88488
  peptide (1)..(684): Ceres Seq. ID no. 12709762
  misc_feature (337)..(684): Homolog of NCBI NO: 14270243 NR Description: sulfate transporter [Brassica napus]
  misc_feature (86)..(256): Homolog of NCBI NO: 14270243 NR Description: sulfate transporter [Brassica napus]
  misc_feature (1)..(70): Homolog of NCBI NO: 14270243 NR Description: sulfate transporter [Brassica napus]
  misc_feature (337)..(684): Homolog of NCBI NO: 18395079 NR Description: high affinity sulphate transporter, putative; id: At1g22150.1, supported by cDNA: gi_10716804 [Arabidopsis >gi|10716805|dbj|BAB16410.1| sulfate tansporter Sultr1;3
  misc_feature (86)..(256): Homolog of NCBI NO: 18395079 NR Description: high affinity sulphate transporter, putative; id: At1g22150.1, supported by cDNA: gi_10716804 [Arabidopsis >gi|10716805|dbj|BAB16410.1| sulfate tansporter Sultr1;3
  misc_feature (1)..(70): Homolog of NCBI NO: 18395079 NR Description: high affinity sulphate transporter, putative; id: At1g22150.1, supported by cDNA: gi_10716804 [Arabidopsis >gi|10716805|dbj|BAB16410.1| sulfate tansporter Sultr1;3
  misc_feature (337)..(684): Homolog of NCBI NO: 13487717 NR Description: sulfate transporter 2 [Lycopersicon esculentum]
  misc_feature (86)..(256): Homolog of NCBI NO: 13487717 NR Description: sulfate transporter 2 [Lycopersicon esculentum]
  misc_feature (1)..(70): Homolog of NCBI NO: 13487717 NR Description: sulfate transporter 2 [Lycopersicon esculentum]
  misc_feature (275)..(324): Homolog of NCBI NO: 13487717 NR Description: sulfate transporter 2 [Lycopersicon esculentum]

SEQ ID NO: 92245 - DNA, 3201 bp, Arabidopsis thaliana; identical to SEQ ID NO: 88489
  misc_feature (1)..(3201): Ceres Seq. ID no. 12709802
  misc_feature: MA Experiment ID: 20000184 Result: Up-regulated in Transcription
  misc_feature: MA Experiment 20000184 PARAMETER Experiment Name: At_Shoots__P Parameter: Age (day) Value: 7
  misc_feature: MA Experiment 20000184 PARAMETER Experiment Name: At_Shoots__P Parameter: Tissue Value: Shoots vs. Whole Plant
  misc_feature: MA Experiment ID: 20000185 Result: Up-regulated in Transcription
  misc_feature: MA Experiment 20000185 PARAMETER Experiment Name: At_Roots__P Parameter: Age (day) Value: 7 vs. 21
  misc_feature: MA Experiment 20000185 PARAMETER Experiment Name: At_Roots__P Parameter: Organism Value: A. thaliana
  misc_feature: MA Experiment 20000185 PARAMETER Experiment Name: At_Roots__P Parameter: Tissue Value: Roots vs. Whole Plant
  misc_feature: MA Experiment ID: 20000438 Result: Up-regulated in Transcription
  misc_feature: MA Experiment 20000438 PARAMETER Experiment Name: At_Shoots__P Parameter: Age (day) Value: 14
  misc_feature: MA Experiment 20000438 PARAMETER Experiment Name: At_Shoots__P Parameter: Tissue Value: Shoots vs. Whole Plant
  misc_feature: MA Experiment ID: 20000439 Result: Up-regulated in Transcription
  misc_feature: MA Experiment 20000439 PARAMETER Experiment Name: At_Roots__P Parameter: Age (day) Value: 14 vs. 21
  misc_feature: MA Experiment 20000439 PARAMETER Experiment Name: At_Roots__P Parameter: Organism Value: A. thaliana
  misc_feature: MA Experiment 20000439 PARAMETER Experiment Name: At_Roots__P Parameter: Tissue Value: Roots vs. Whole Plant
  misc_feature: MA Experiment ID: 20000527 Result: Down-regulated in Transcription
  misc_feature: MA Experiment 20000527 PARAMETER Experiment Name: At_10percent_PEG_P Parameter: Age (day) Value: 20
  misc_feature: MA Experiment 20000527 PARAMETER Experiment Name: At_10percent_PEG_P Parameter: Organism Value: A. thaliana
  misc_feature: MA Experiment 20000527 PARAMETER Experiment Name: At_10percent_PEG_P Parameter: Plant Line Value: WS
  misc_feature: MA Experiment 20000527 PARAMETER Experiment Name: At_10percent_PEG_P Parameter: Timepoint (day) Value: 20
  misc_feature: MA Experiment 20000527 PARAMETER Experiment Name: At_10percent_PEG_P Parameter: Tissue Value: Whole Plant
  misc_feature: MA Experiment 20000527 PARAMETER Experiment Name: At_10percent_PEG_P Parameter: Treatment Value: 10percent PEG vs. No Treatment
  misc_feature: MA Experiment ID: 20001247 Result: Up-regulated in Transcription
  misc_feature: MA Experiment 20001247 PARAMETER Experiment Name: At_Far-red-induction_P Parameter: Age (day) Value: 7
  misc_feature: MA Experiment 20001247 PARAMETER Experiment Name: At_Far-red-induction_P Parameter: Light Value: Far-red vs. White
  misc_feature: MA Experiment 20001247 PARAMETER Experiment Name: At_Far-red-induction_P Parameter: Organism Value: A. thaliana
  misc_feature: MA Experiment 20001247 PARAMETER Experiment Name: At_Far-red-induction_P Parameter: Plant Line Value: Columbia
  misc_feature: MA Experiment 20001247 PARAMETER Experiment Name: At_Far-red-induction_P Parameter: Timepoint (hr) Value: 1
  misc_feature: MA Experiment 20001247 PARAMETER Experiment Name: At_Far-red-induction_P Parameter: Tissue Value: Whole Plant

SEQ ID NO: 92246 - protein, 1066 aa, Arabidopsis thaliana; identical to SEQ ID NO: 88490
  peptide (1)..(1066): Ceres Seq. ID no. 12709803
  misc_feature (97)..(469): Pfam Name: POT family Pfam Description: POT family
  misc_feature (1)..(530): Homolog of NCBI NO: 22330582 NR Description: oligopeptide transporter, putative; protein id: supported by cDNA: gi_19699295 [Arabidopsis thaliana] At1g72130/F28P5.1 [Arabidopsis thaliana]
  misc_feature (19)..(1062): Homolog of NCBI NO: 15218352 NR Description: oligopeptide transporter, putative; protein id: [Arabidopsis thaliana] >gi|25406146|pir||E96744 probable
  misc_feature (40)..(530): Homolog of NCBI NO: 26450432 NR Description: putative peptide transporter PTR2-B [Arabidopsis
  misc_feature (545)..(1066): Homolog of NCBI NO: 15218381 NR Description: peptide transporter PTR2-B, putative; protein id:
  misc_feature (574)..(1063): Homolog of NCBI NO: 22330582 NR Description: oligopeptide transporter, putative; protein id: supported by cDNA: gi_19699295 [Arabidopsis thaliana] At1g72130/F28P5.1 [Arabidopsis thaliana]
  misc_feature (574)..(1060): Homolog of NCBI NO: 25406147 NR Description: probable peptide transporter PTR2-B T9N14.15 - Arabidopsis thaliana >gi|12323655|gb|AAG51788.1|AC067754_4
  misc_feature (584)..(1063): Homolog of NCBI NO: 26450432 NR Description: putative peptide transporter PTR2-B [Arabidopsis
  misc_feature (574)..(1045): Homolog of NCBI NO: 12322195 NR Description: oligopeptide transporter, putative [Arabidopsis
  misc_feature (23)..(535): Homolog of NCBI NO: 30687920 NR Description: oligopeptide transporter -related [Arabidopsis
  misc_feature (110)..(535): Homolog of NCBI NO: 25402970 NR Description: Similar to peptide transporter [imported] - thaliana >gi|6587835|gb|AAF18524.1|AC006551_10 Similar to peptide

SEQ ID NO: 92247 - protein, 1027 aa, Arabidopsis thaliana; identical to SEQ ID NO: 88491
  peptide (1)..(1027): Ceres Seq. ID no. 12709804
  misc_feature (58)..(430): Pfam Name: POT family Pfam Description: POT family
  misc_feature (1)..(491): Homolog of NCBI NO: 22330582 NR Description: oligopeptide transporter, putative; protein id: supported by cDNA: gi_19699295 [Arabidopsis thaliana] At1g72130/F28P5.1 [Arabidopsis thaliana]
  misc_feature (1)..(1023): Homolog of NCBI NO: 15218352 NR Description: oligopeptide transporter, putative; protein id: [Arabidopsis thaliana] >gi|25406146|pir||E96744 probable
  misc_feature (1)..(491): Homolog of NCBI NO: 26450432 NR Description: putative peptide transporter PTR2-B [Arabidopsis
  misc_feature (506)..(1027): Homolog of NCBI NO: 15218381 NR Description: peptide transporter PTR2-B, putative; protein id:
  misc_feature (535)..(1024): Homolog of NCBI NO: 22330582 NR Description: oligopeptide transporter, putative; protein id: supported by cDNA: gi_19699295 [Arabidopsis thaliana] At1g72130/F28P5.1 [Arabidopsis thaliana]
  misc_feature (535)..(1021): Homolog of NCBI NO: 25406147 NR Description: probable peptide transporter PTR2-B T9N14.15 - Arabidopsis thaliana >gi|12323655|gb|AAG51788.1|AC067754_4
  misc_feature (545)..(1024): Homolog of NCBI NO: 26450432 NR Description: putative peptide transporter PTR2-B [Arabidopsis
  misc_feature (535)..(1006): Homolog of NCBI NO: 12322195 NR Description: oligopeptide transporter, putative [Arabidopsis
  misc_feature (1)..(496): Homolog of NCBI NO: 30687920 NR Description: oligopeptide transporter -related [Arabidopsis
  misc_feature (71)..(496): Homolog of NCBI NO: 25402970 NR Description: Similar to peptide transporter [imported] - thaliana >gi|6587835|gb|AAF18524.1|AC006551_10 Similar to peptide

SEQ ID NO: 92248 - protein, 1012 aa, Arabidopsis thaliana; identical to SEQ ID NO: 88492
  peptide (1)..(1012): Ceres Seq. ID no. 12709805
  misc_feature (43)..(415): Pfam Name: POT family Pfam Description: POT family
  misc_feature (1)..(476): Homolog of NCBI NO: 22330582 NR Description: oligopeptide transporter, putative; protein id: supported by cDNA: gi_19699295 [Arabidopsis thaliana] At1g72130/F28P5.1 [Arabidopsis thaliana]
  misc_feature (1)..(1008): Homolog of NCBI NO: 15218352 NR Description: oligopeptide transporter, putative; protein id: [Arabidopsis thaliana] >gi|25406146|pir||E96744 probable
  misc_feature (1)..(476): Homolog of NCBI NO: 26450432 NR Description: putative peptide transporter PTR2-B [Arabidopsis
  misc_feature (491)..(1012): Homolog of NCBI NO: 15218381 NR Description: peptide transporter PTR2-B, putative; protein id:
  misc_feature (520)..(1009): Homolog of NCBI NO: 22330582 NR Description: oligopeptide transporter, putative; protein id: supported by cDNA: gi_19699295 [Arabidopsis thaliana] At1g72130/F28P5.1 [Arabidopsis thaliana]
  misc_feature (520)..(1006): Homolog of NCBI NO: 25406147 NR Description: probable peptide transporter PTR2-B T9N14.15 - Arabidopsis thaliana >gi|12323655|gb|AAG51788.1|AC067754_4
  misc_feature (530)..(1009): Homolog of NCBI NO: 26450432 NR Description: putative peptide transporter PTR2-B [Arabidopsis
  misc_feature (520)..(991): Homolog of NCBI NO: 12322195 NR Description: oligopeptide transporter, putative [Arabidopsis
  misc_feature (1)..(481): Homolog of NCBI NO: 30687920 NR Description: oligopeptide transporter -related [Arabidopsis
  misc_feature (56)..(481): Homolog of NCBI NO: 25402970 NR Description: Similar to peptide transporter [imported] - thaliana >gi|6587835|gb|AAF18524.1|AC006551_10 Similar to peptide

SEQ ID NO: 92249 - DNA, 3591 bp, Arabidopsis thaliana; identical to SEQ ID NO: 88493
  misc_feature (1)..(3591): Ceres Seq. ID no. 12709809
  misc_feature: MA Experiment ID: 20000180 Result: Up-regulated in Transcription
  misc_feature: MA Experiment 20000180 PARAMETER Experiment Name: At_Germinating_Seeds_P Parameter: Age (hr) Value: 24 vs. 0
  misc_feature: MA Experiment 20000180 PARAMETER Experiment Name: At_Germinating_Seeds_P Parameter: Tissue Value: Germinating Seeds
  misc_feature: MA Experiment ID: 20000227 Result: Up-regulated in Transcription
  misc_feature: MA Experiment 20000227 PARAMETER Experiment Name: At_Root-Tips-vs-Tops_P Parameter: Tissue Value: Root Tips vs. Root Tops
  misc_feature: MA Experiment ID: 20000234 Result: Up-regulated in Transcription
  misc_feature: MA Experiment 20000234 PARAMETER Experiment Name: At_Siliques_P Parameter: Age (day) Value: 21
  misc_feature: MA Experiment 20000234 PARAMETER Experiment Name: At_Siliques_P Parameter: Organism Value: A. thaliana
  misc_feature: MA Experiment 20000234 PARAMETER Experiment Name: At_Siliques_P Parameter: Plant Line Value: WS
  misc_feature: MA Experiment 20000234 PARAMETER Experiment Name: At_Siliques_P Parameter: Tissue Value: Less Than 5mm Siliques vs. Whole Plant
  misc_feature: MA Experiment ID: 20000286 Result: Up-regulated in Transcription
  misc_feature: MA Experiment 20000286 PARAMETER Experiment Name: At_Open_Flower_P Parameter: Age (day) Value: 21
  misc_feature: MA Experiment 20000286 PARAMETER Experiment Name: At_Open_Flower_P Parameter: Plant Line Value: WS
  misc_feature: MA Experiment 20000286 PARAMETER Experiment Name: At_Open_Flower_P Parameter: Tissue Value: Half Open vs. Whole Plant
  misc_feature: MA Experiment ID: 20000437 Result: Down-regulated in Transcription
  misc_feature: MA Experiment 20000437 PARAMETER Experiment Name: At_Drought_P Parameter: Age (day) Value: 8
  misc_feature: MA Experiment 20000437 PARAMETER Experiment Name: At_Drought_P Parameter: Organism Value: A. thaliana
  misc_feature: MA Experiment 20000437 PARAMETER Experiment Name: At_Drought_P Parameter: Plant Line Value: WS
  misc_feature: MA Experiment 20000437 PARAMETER Experiment Name: At_Drought_P Parameter: Timepoint (hr) Value: 24
  misc_feature: MA Experiment 20000437 PARAMETER Experiment Name: At_Drought_P Parameter: Tissue Value: Whole Plant
  misc_feature: MA Experiment 20000437 PARAMETER Experiment Name: At_Drought_P Parameter: Treatment Value: Drought vs. No Drought

SEQ ID NO: 92250 - protein, 1196 aa, Arabidopsis thaliana; identical to SEQ ID NO: 88494
  peptide (1)..(1196): Ceres Seq. ID no. 12709810
  misc_feature (321)..(913): Pfam Name: Myosin tail Pfam Description: Myosin tail
  misc_feature (257)..(919): Homolog of NCBI NO: 27476088 NR Description: Hypothetical protein [Oryza sativa (japonica
  misc_feature (457)..(884): Homolog of NCBI NO: 15240982 NR Description: kinesin-related protein; protein id: At5g27550.1
  misc_feature (262)..(943): Homolog of NCBI NO: 15227252 NR Description: kinesin-related protein; protein id: At2g22610.1
  misc_feature (335)..(942): Homolog of NCBI NO: 12324217 NR Description: kinesin-related protein; 103921-99132
  misc_feature (335)..(942): Homolog of NCBI NO: 22330608 NR Description: kinesin-related protein; protein id: At1g73860.1
  misc_feature (335)..(923): Homolog of NCBI NO: 25406299 NR Description: protein kinesin F2P9.27 [imported] - Arabidopsis
  misc_feature (427)..(856): Homolog of NCBI NO: 30692267 NR Description: kinesin-related protein [Arabidopsis thaliana]
  misc_feature (477)..(883): Homolog of NCBI NO: 28393382 NR Description: putative kinesin [Arabidopsis thaliana]
  misc_feature (427)..(856): Homolog of NCBI NO: 18201934 NR Description: kinesin-like protein heavy chain [Arabidopsis
  misc_feature (477)..(881): Homolog of NCBI NO: 18421069 NR Description: kinesin-related protein; protein id: At5g27000.1

SEQ ID NO: 92251 - protein, 1160 aa, Arabidopsis thaliana; identical to SEQ ID NO: 71693
  peptide (1)..(1160): Ceres Seq. ID no. 12709811
  misc_feature (285)..(877): Pfam Name: Myosin tail Pfam Description: Myosin tail
  misc_feature (221)..(883): Homolog of NCBI NO: 27476088 NR Description: Hypothetical protein [Oryza sativa (japonica
  misc_feature (421)..(848): Homolog of NCBI NO: 15240982 NR Description: kinesin-related protein; protein id: At5g27550.1
  misc_feature (226)..(907): Homolog of NCBI NO: 15227252 NR Description: kinesin-related protein; protein id: At2g22610.1
  misc_feature (299)..(906): Homolog of NCBI NO: 12324217 NR Description: kinesin-related protein; 103921-99132
  misc_feature (299)..(906): Homolog of NCBI NO: 22330608 NR Description: kinesin-related protein; protein id: At1g73860.1
  misc_feature (299)..(887): Homolog of NCBI NO: 25406299 NR Description: protein kinesin F2P9.27 [imported] - Arabidopsis
  misc_feature (391)..(820): Homolog of NCBI NO: 30692267 NR Description: kinesin-related protein [Arabidopsis thaliana]
  misc_feature (441)..(847): Homolog of NCBI NO: 28393382 NR Description: putative kinesin [Arabidopsis thaliana]
  misc_feature (391)..(820): Homolog of NCBI NO: 18201934 NR Description: kinesin-like protein heavy chain [Arabidopsis
  misc_feature (441)..(845): Homolog of NCBI NO: 18421069 NR Description: kinesin-related protein; protein id: At5g27000.1

SEQ ID NO: 92252 - protein, 1145 aa, Arabidopsis thaliana; identical to SEQ ID NO: 71694
  peptide (1)..(1145): Ceres Seq. ID no. 12709812
  misc_feature (270)..(862): Pfam Name: Myosin tail Pfam Description: Myosin tail
  misc_feature (206)..(868): Homolog of NCBI NO: 27476088 NR Description: Hypothetical protein [Oryza sativa (japonica
  misc_feature (406)..(833): Homolog of NCBI NO: 15240982 NR Description: kinesin-related protein; protein id: At5g27550.1
  misc_feature (211)..(892): Homolog of NCBI NO: 15227252 NR Description: kinesin-related protein; protein id: At2g22610.1
  misc_feature (284)..(891): Homolog of NCBI NO: 12324217 NR Description: kinesin-related protein; 103921-99132
  misc_feature (284)..(891): Homolog of NCBI NO: 22330608 NR Description: kinesin-related protein; protein id: At1g73860.1
  misc_feature (284)..(872): Homolog of NCBI NO: 25406299 NR Description: protein kinesin F2P9.27 [imported] - Arabidopsis
  misc_feature (376)..(805): Homolog of NCBI NO: 30692267 NR Description: kinesin-related protein [Arabidopsis thaliana]
  misc_feature (426)..(832): Homolog of NCBI NO: 28393382 NR Description: putative kinesin [Arabidopsis thaliana]
  misc_feature (376)..(805): Homolog of NCBI NO: 18201934 NR Description: kinesin-like protein heavy chain [Arabidopsis
  misc_feature (426)..(830): Homolog of NCBI NO: 18421069 NR Description: kinesin-related protein; protein id: At5g27000.1

SEQ ID NO: 92253 - DNA, 1212 bp, Arabidopsis thaliana; identical to SEQ ID NO: 88497
  misc_feature (1)..(1212): Ceres Seq. ID no. 12709921
  misc_feature: MA Experiment ID: 20000314 Result: Up-regulated in Transcription
  misc_feature: MA Experiment 20000314 PARAMETER Experiment Name: At_14day_Shoots-Roots_Sub_P Parameter: Age (day) Value: 14
  misc_feature: MA Experiment 20000314 PARAMETER Experiment Name: At_14day_Shoots-Roots_Sub_P Parameter: Organism Value: A. thaliana
  misc_feature: MA Experiment 20000314 PARAMETER Experiment Name: At_14day_Shoots-Roots_Sub_P Parameter: Plant Line Value: WS
  misc_feature: MA Experiment 20000314 PARAMETER Experiment Name: At_14day_Shoots-Roots_Sub_P Parameter: Tissue Value: Roots vs. Whole Plant
  misc_feature: MA Experiment ID: 20000315 Result: Down-regulated in Transcription
  misc_feature: MA Experiment 20000315 PARAMETER Experiment Name: At_14day_Shoots-Roots_Sub_P Parameter: Age (day) Value: 14
  misc_feature: MA Experiment 20000315 PARAMETER Experiment Name: At_14day_Shoots-Roots_Sub_P Parameter: Organism Value: A. thaliana
  misc_feature: MA Experiment 20000315 PARAMETER Experiment Name: At_14day_Shoots-Roots_Sub_P Parameter: Plant Line Value: WS
  misc_feature: MA Experiment 20000315 PARAMETER Experiment Name: At_14day_Shoots-Roots_Sub_P Parameter: Tissue Value: Shoots vs. Whole Plant
  misc_feature: MA Experiment ID: 20000327 Result: Down-regulated in Transcription
  misc_feature: MA Experiment 20000327 PARAMETER Experiment Name: At_42deg_Heat_Sub_P Parameter: Age (day) Value: 14
  misc_feature: MA Experiment 20000327 PARAMETER Experiment Name: At_42deg_Heat_Sub_P Parameter: Organism Value: A. thaliana
  misc_feature: MA Experiment 20000327 PARAMETER Experiment Name: At_42deg_Heat_Sub_P Parameter: Plant Line Value: WS
  misc_feature: MA Experiment 20000327 PARAMETER Experiment Name: At_42deg_Heat_Sub_P Parameter: Temperature (deg C) Value: 42 vs. 22
  misc_feature: MA Experiment 20000327 PARAMETER Experiment Name: At_42deg_Heat_Sub_P Parameter: Timepoint (hr) Value: 1
  misc_feature: MA Experiment 20000327 PARAMETER Experiment Name: At_42deg_Heat_Sub_P Parameter: Tissue Value: Aerial

SEQ ID NO: 92254 - protein, 403 aa, Arabidopsis thaliana; identical to SEQ ID NO: 88498
  peptide (1)..(403): Ceres Seq. ID no. 12709922
  misc_feature (1)..(403): Homolog of NCBI NO: 15219382 NR Description: hypothetical protein; protein id: At1g73140.1
  misc_feature (1)..(403): Homolog of NCBI NO: 25366729 NR Description: hypothetical protein T18K17.20 [imported] -
  misc_feature (1)..(403): Homolog of NCBI NO: 5903103 NR Description: Hypothetical protein [Arabidopsis thaliana]
  misc_feature (40)..(395): Homolog of NCBI NO: 18412850 NR Description: putative protein; protein id: At5g01360.1, by cDNA: 153592. [Arabidopsis thaliana]
  misc_feature (47)..(395): Homolog of NCBI NO: 11291876 NR Description: hypothetical protein F7A7.140 - Arabidopsis >gi|7327821|emb|CAB82278.1| putative protein [Arabidopsis
  misc_feature (47)..(395): Homolog of NCBI NO: 18413698 NR Description: putative protein; protein id: At5g01620.1, by cDNA: 108209., supported by cDNA: gi_19347853 [Arabidopsis >gi|19347854|gb|AAL86006.1| unknown protein [Arabidopsis
  misc_feature (47)..(395): Homolog of NCBI NO: 21536676 NR Description: unknown [Arabidopsis thaliana]
  misc_feature (22)..(396): Homolog of NCBI NO: 15228789 NR Description: putative protein; protein id: At3g55990.1
  misc_feature (22)..(396): Homolog of NCBI NO: 26452343 NR Description: unknown protein [Arabidopsis thaliana]
  misc_feature (54)..(395): Homolog of NCBI NO: 28393743 NR Description: unknown protein [Arabidopsis thaliana]

SEQ ID NO: 92255 - protein, 276 aa, Arabidopsis thaliana; identical to SEQ ID NO: 88499
  peptide (1)..(276): Ceres Seq. ID no. 12709923
  misc_feature (1)..(276): Homolog of NCBI NO: 15219382 NR Description: hypothetical protein; protein id: At1g73140.1
  misc_feature (1)..(276): Homolog of NCBI NO: 25366729 NR Description: hypothetical protein T18K17.20 [imported] -
  misc_feature (1)..(276): Homolog of NCBI NO: 5903103 NR Description: Hypothetical protein [Arabidopsis thaliana]
  misc_feature (1)..(268): Homolog of NCBI NO: 18412850 NR Description: putative protein; protein id: At5g01360.1, by cDNA: 153592. [Arabidopsis thaliana]
  misc_feature (1)..(268): Homolog of NCBI NO: 11291876 NR Description: hypothetical protein F7A7.140 - Arabidopsis >gi|7327821|emb|CAB82278.1| putative protein [Arabidopsis
  misc_feature (1)..(268): Homolog of NCBI NO: 18413698 NR Description: putative protein; protein id: At5g01620.1, by cDNA: 108209., supported by cDNA: gi_19347853 [Arabidopsis >gi|19347854|gb|AAL86006.1| unknown protein [Arabidopsis
  misc_feature (1)..(268): Homolog of NCBI NO: 21536676 NR Description: unknown [Arabidopsis thaliana]
  misc_feature (1)..(269): Homolog of NCBI NO: 15228789 NR Description: putative protein; protein id: At3g55990.1
  misc_feature (1)..(269): Homolog of NCBI NO: 26452343 NR Description: unknown protein [Arabidopsis thaliana]
  misc_feature (1)..(268): Homolog of NCBI NO: 28393743 NR Description: unknown protein [Arabidopsis thaliana]

SEQ ID NO: 92256 - protein, 262 aa, Arabidopsis thaliana; identical to SEQ ID NO: 88500
  peptide (1)..(262): Ceres Seq. ID no. 12709924
  misc_feature (1)..(262): Homolog of NCBI NO: 15219382 NR Description: hypothetical protein; protein id: At1g73140.1
  misc_feature (1)..(262): Homolog of NCBI NO: 25366729 NR Description: hypothetical protein T18K17.20 [imported] -
  misc_feature (1)..(262): Homolog of NCBI NO: 5903103 NR Description: Hypothetical protein [Arabidopsis thaliana]
  misc_feature (1)..(254): Homolog of NCBI NO: 18412850 NR Description: putative protein; protein id: At5g01360.1, by cDNA: 153592. [Arabidopsis thaliana]
  misc_feature (1)..(254): Homolog of NCBI NO: 11291876 NR Description: hypothetical protein F7A7.140 - Arabidopsis >gi|7327821|emb|CAB82278.1| putative protein [Arabidopsis
  misc_feature (1)..(254): Homolog of NCBI NO: 18413698 NR Description: putative protein; protein id: At5g01620.1, by cDNA: 108209., supported by cDNA: gi_19347853 [Arabidopsis >gi|19347854|gb|AAL86006.1| unknown protein [Arabidopsis
  misc_feature (1)..(254): Homolog of NCBI NO: 21536676 NR Description: unknown [Arabidopsis thaliana]
  misc_feature (1)..(255): Homolog of NCBI NO: 15228789 NR Description: putative protein; protein id: At3g55990.1
  misc_feature (1)..(255): Homolog of NCBI NO: 26452343 NR Description: unknown protein [Arabidopsis thaliana]
  misc_feature (1)..(254): Homolog of NCBI NO: 28393743 NR Description: unknown protein [Arabidopsis thaliana]

SEQ ID NO: 92257 - DNA, 652 bp, Arabidopsis thaliana; identical to SEQ ID NO: 88501
  misc_feature (1)..(652): Ceres Seq. ID no. 12709940
  misc_feature: MA Experiment ID: 108595 Result: Up-regulated in Transcription
  misc_feature: MA Experiment 108595 PARAMETER Experiment Name: At_Ler-pi_Ovule_cDNA_P Parameter: Plant Line Value: null
  misc_feature: MA Experiment ID: 20000111 Result: Down-regulated in Transcription
  misc_feature: MA Experiment 20000111 PARAMETER Experiment Name: At_42deg_Heat_cDNA_P Parameter: Temperature (deg C) Value: 42 vs. 22
  misc_feature: MA Experiment 20000111 PARAMETER Experiment Name: At_42deg_Heat_cDNA_P Parameter: Timepoint (hr) Value: 6
  misc_feature: MA Experiment 20000111 PARAMETER Experiment Name: At_42deg_Heat_cDNA_P Parameter: Tissue Value: Aerial
  misc_feature: MA Experiment ID: 20000184 Result: Down-regulated in Transcription
  misc_feature: MA Experiment 20000184 PARAMETER Experiment Name: At_Shoots__P Parameter: Age (day) Value: 7
  misc_feature: MA Experiment 20000184 PARAMETER Experiment Name: At_Shoots__P Parameter: Tissue Value: Shoots vs. Whole Plant
  misc_feature: MA Experiment ID: 20001557 Result: Down-regulated in Transcription
  misc_feature: MA Experiment 20001557 PARAMETER Experiment Name: At_Drought_Soil_Dry_P Parameter: Age (day) Value: 27
  misc_feature: MA Experiment 20001557 PARAMETER Experiment Name: At_Drought_Soil_Dry_P Parameter: Organism Value: A. thaliana
  misc_feature: MA Experiment 20001557 PARAMETER Experiment Name: At_Drought_Soil_Dry_P Parameter: Plant Line Value: WS
  misc_feature: MA Experiment 20001557 PARAMETER Experiment Name: At_Drought_Soil_Dry_P Parameter: Post Timepoint (hr) Value: 3
  misc_feature: MA Experiment 20001557 PARAMETER Experiment Name: At_Drought_Soil_Dry_P Parameter: Post-Treatment Value: Re-Water vs. No Drought
  misc_feature: MA Experiment 20001557 PARAMETER Experiment Name: At_Drought_Soil_Dry_P Parameter: Timepoint (day) Value: 13
  misc_feature: MA Experiment 20001557 PARAMETER Experiment Name: At_Drought_Soil_Dry_P Parameter: Treatment Value: Drought vs. No Drought

SEQ ID NO: 92258 - protein, 172 aa, Arabidopsis thaliana; identical to SEQ ID NO: 88502
  peptide (1)..(172): Ceres Seq. ID no. 12709941
  misc_feature (42)..(163): Pfam Name: ML domain Pfam Description: ML domain
  misc_feature (20)..(172): Homolog of NCBI NO: 15240063 NR Description: putative protein; protein id: At5g06480.1, by cDNA: 5127. [Arabidopsis thaliana] contains similarity to unknown
  misc_feature (20)..(172): Homolog of NCBI NO: 21593850 NR Description: unknown [Arabidopsis thaliana]
  misc_feature (20)..(172): Homolog of NCBI NO: 18399355 NR Description: expressed protein; protein id: At3g11780.1, by cDNA: 250294., supported by cDNA: gi_14334429 [Arabidopsis >gi|6671934|gb|AAF23194.1|AC016795_7 unknown protein [Arabidopsis
  misc_feature (20)..(172): Homolog of NCBI NO: 21554315 NR Description: unknown [Arabidopsis thaliana]
  misc_feature (26)..(172): Homolog of NCBI NO: 34899866 NR Description: OJ1714_H10.15 [Oryza sativa (japonica
  misc_feature (28)..(169): Homolog of NCBI NO: 15229872 NR Description: putative protein; protein id: At3g44100.1, by cDNA: 5597. [Arabidopsis thaliana] >gi|11357670|pir||T49126
  misc_feature (46)..(158): Homolog of NCBI NO: 4322563 NR Description: phosphatidylglycerol/phosphatidylinositol protein [Aspergillus oryzae] phosphatidylglycerol/phosphatidylinositol transfer protein
  misc_feature (46)..(157): Homolog of NCBI NO: 6320157 NR Description: Niemann Pick Type C Gene corresponding to group 2. Putative yeast homologue of human NPC2/He1; Npc2p
  misc_feature (32)..(169): Homolog of NCBI NO: 21618166 NR Description: unknown [Arabidopsis thaliana]
  misc_feature (32)..(169): Homolog of NCBI NO: 18397991 NR Description: Expressed protein; protein id: At2g16005.1, by cDNA: 994., supported by cDNA: gi_13605717, supported by cDNA: [Arabidopsis thaliana] >gi|13605718|gb|AAK32852.1|AF361840_1

SEQ ID NO: 92259 - protein, 153 aa, Arabidopsis thaliana; identical to SEQ ID NO: 88503
  peptide (1)..(153): Ceres Seq. ID no. 12709942
  misc_feature (23)..(144): Pfam Name: ML domain Pfam Description: ML domain
  misc_feature (1)..(153): Homolog of NCBI NO: 15240063 NR Description: putative protein; protein id: At5g06480.1, by cDNA: 5127. [Arabidopsis thaliana] contains similarity to unknown
  misc_feature (1)..(153): Homolog of NCBI NO: 21593850 NR Description: unknown [Arabidopsis thaliana]
  misc_feature (1)..(153): Homolog of NCBI NO: 18399355 NR Description: expressed protein; protein id: At3g11780.1, by cDNA: 250294., supported by cDNA: gi_14334429 [Arabidopsis >gi|6671934|gb|AAF23194.1|AC016795_7 unknown protein [Arabidopsis
  misc_feature (1)..(153): Homolog of NCBI NO: 21554315 NR Description: unknown [Arabidopsis thaliana]
  misc_feature (7)..(153): Homolog of NCBI NO: 34899866 NR Description: OJ1714_H10.15 [Oryza sativa (japonica
  misc_feature (9)..(150): Homolog of NCBI NO: 15229872 NR Description: putative protein; protein id: At3g44100.1, by cDNA: 5597. [Arabidopsis thaliana] >gi|11357670|pir||T49126
  misc_feature (27)..(139): Homolog of NCBI NO: 4322563 NR Description: phosphatidylglycerol/phosphatidylinositol protein [Aspergillus oryzae] phosphatidylglycerol/phosphatidylinositol transfer protein
  misc_feature (27)..(138): Homolog of NCBI NO: 6320157 NR Description: Niemann Pick Type C Gene corresponding to group 2. Putative yeast homologue of human NPC2/He1; Npc2p
  misc_feature (13)..(150): Homolog of NCBI NO: 21618166 NR Description: unknown [Arabidopsis thaliana]
  misc_feature (13)..(150): Homolog of NCBI NO: 18397991 NR Description: Expressed protein; protein id: At2g16005.1, by cDNA: 994., supported by cDNA: gi_13605717, supported by cDNA: [Arabidopsis thaliana] >gi|13605718|gb|AAK32852.1|AF361840_1

SEQ ID NO: 92260 - DNA, 1159 bp, Arabidopsis thaliana; identical to SEQ ID NO: 88504
  misc_feature (1)..(1159): Ceres Seq. ID no. 12710014
  misc_feature: MA Experiment ID: 108433 Result: Up-regulated in Transcription
  misc_feature: MA Experiment 108433 PARAMETER Experiment Name: At_rhl_Mutant2_cDNA_P Parameter: Age (day) Value: 7
  misc_feature: MA Experiment 108433 PARAMETER Experiment Name: At_rhl_Mutant2_cDNA_P Parameter: Organism Value: A. thaliana
  misc_feature: MA Experiment 108433 PARAMETER Experiment Name: At_rhl_Mutant2_cDNA_P Parameter: Plant Line Value: rhl Mutant vs. wt landsburg
  misc_feature: MA Experiment 108433 PARAMETER Experiment Name: At_rhl_Mutant2_cDNA_P Parameter: Tissue Value: Roots
  misc_feature: MA Experiment ID: 108434 Result: Down-regulated in Transcription
  misc_feature: MA Experiment 108434 PARAMETER Experiment Name: At_Root_Tips_cDNA_P Parameter: Tissue Value: Root Tips
  misc_feature: MA Experiment ID: 108462 Result: Up-regulated in Transcription
  misc_feature: MA Experiment 108462 PARAMETER Experiment Name: At_Germinating_Seeds_cDNA_P Parameter: Age (day) Value: 2 vs. 0
  misc_feature: MA Experiment 108462 PARAMETER Experiment Name: At_Germinating_Seeds_cDNA_P Parameter: Tissue Value: Germinating Seeds
  misc_feature: MA Experiment ID: 108463 Result: Up-regulated in Transcription
  misc_feature: MA Experiment 108463 PARAMETER Experiment Name: At_Germinating_Seeds_cDNA_P Parameter: Age (day) Value: 3 vs. 0
  misc_feature: MA Experiment 108463 PARAMETER Experiment Name: At_Germinating_Seeds_cDNA_P Parameter: Tissue Value: Germinating Seeds
  misc_feature: MA Experiment ID: 108464 Result: Up-regulated in Transcription
  misc_feature: MA Experiment 108464 PARAMETER Experiment Name: At_Germinating_Seeds_cDNA_P Parameter: Age (day) Value: 4 vs. 0
  misc_feature: MA Experiment 108464 PARAMETER Experiment Name: At_Germinating_Seeds_cDNA_P Parameter: Tissue Value: Germinating Seeds
  misc_feature: MA Experiment ID: 108569 Result: Up-regulated in Transcription
  misc_feature: MA Experiment 108569 PARAMETER Experiment Name: At_0.001%_MeJA__cDNA_P Parameter: Timepoint (hr) Value: 6
  misc_feature: MA Experiment 108569 PARAMETER Experiment Name: At_0.001%_MeJA__cDNA_P Parameter: Tissue Value: Aerial
  misc_feature: MA Experiment 108569 PARAMETER Experiment Name: At_0.001%_MeJA__cDNA_P Parameter: Treatment Value: 0.001% MeJA vs. No Treatment
  misc_feature: MA Experiment ID: 108574 Result: Up-regulated in Transcription
  misc_feature: MA Experiment 108574 PARAMETER Experiment Name: At_Wounding__cDNA_P Parameter: Timepoint (hr) Value: 1
  misc_feature: MA Experiment 108574 PARAMETER Experiment Name: At_Wounding__cDNA_P Parameter: Tissue Value: Aerial
  misc_feature: MA Experiment 108574 PARAMETER Experiment Name: At_Wounding__cDNA_P Parameter: Treatment Value: Wounding vs. No Wounding
  misc_feature: MA Experiment ID: 108576 Result: Down-regulated in Transcription
  misc_feature: MA Experiment 108576 PARAMETER Experiment Name: At_42deg_Heat_cDNA_P Parameter: Temperature (deg C) Value: 42 vs. 22
  misc_feature: MA Experiment 108576 PARAMETER Experiment Name: At_42deg_Heat_cDNA_P Parameter: Timepoint (hr) Value: 1
  misc_feature: MA Experiment 108576 PARAMETER Experiment Name: At_42deg_Heat_cDNA_P Parameter: Tissue Value: Aerial
  misc_feature: MA Experiment ID: 108579 Result: Down-regulated in Transcription
  misc_feature: MA Experiment 108579 PARAMETER Experiment Name: At_4deg_Cold_cDNA_P Parameter: Temperature (deg C) Value: 4 vs. 22
  misc_feature: MA Experiment 108579 PARAMETER Experiment Name: At_4deg_Cold_cDNA_P Parameter: Timepoint (hr) Value: 6
  misc_feature: MA Experiment 108579 PARAMETER Experiment Name: At_4deg_Cold_cDNA_P Parameter: Tissue Value: Aerial
  misc_feature: MA Experiment ID: 20000112 Result: Down-regulated in Transcription
  misc_feature: MA Experiment 20000112 PARAMETER Experiment Name: At_42deg_Heat_cDNA_P Parameter: Temperature (deg C) Value: 42 vs. 22
  misc_feature: MA Experiment 20000112 PARAMETER Experiment Name: At_42deg_Heat_cDNA_P Parameter: Timepoint (hr) Value: 2
  misc_feature: MA Experiment 20000112 PARAMETER Experiment Name: At_42deg_Heat_cDNA_P Parameter: Tissue Value: Aerial
  misc_feature: MA Experiment ID: 20000144 Result: Down-regulated in Transcription
  misc_feature: MA Experiment 20000144 PARAMETER Experiment Name: At_42deg_Heat_cDNA_P Parameter: Temperature (deg C) Value: 42 vs. 22
  misc_feature: MA Experiment 20000144 PARAMETER Experiment Name: At_42deg_Heat_cDNA_P Parameter: Timepoint (hr) Value: 1
  misc_feature: MA Experiment 20000144 PARAMETER Experiment Name: At_42deg_Heat_cDNA_P Parameter: Tissue Value: Aerial
  misc_feature: MA Experiment ID: 20000171 Result: Down-regulated in Transcription
  misc_feature: MA Experiment 20000171 PARAMETER Experiment Name: At_42deg_Heat_P Parameter: Age (day) Value: 14
  misc_feature: MA Experiment 20000171 PARAMETER Experiment Name: At_42deg_Heat_P Parameter: Organism Value: A. thaliana
  misc_feature: MA Experiment 20000171 PARAMETER Experiment Name: At_42deg_Heat_P Parameter: Plant Line Value: WS
  misc_feature: MA Experiment 20000171 PARAMETER Experiment Name: At_42deg_Heat_P Parameter: Temperature (deg C) Value: 42 vs. 22
  misc_feature: MA Experiment 20000171 PARAMETER Experiment Name: At_42deg_Heat_P Parameter: Timepoint (hr) Value: 1
  misc_feature: MA Experiment 20000171 PARAMETER Experiment Name: At_42deg_Heat_P Parameter: Tissue Value: Aerial
  misc_feature: MA Experiment ID: 20000211 Result: Up-regulated in Transcription
  misc_feature: MA Experiment 20000211 PARAMETER Experiment Name: At_0.001percent_MeJA__P Parameter: Age (day) Value: 14
  misc_feature: MA Experiment 20000211 PARAMETER Experiment Name: At_0.001percent_MeJA__P Parameter: Organism Value: A. thaliana
  misc_feature: MA Experiment 20000211 PARAMETER Experiment Name: At_0.001percent_MeJA__P Parameter: Plant Line Value: WS
  misc_feature: MA Experiment 20000211 PARAMETER Experiment Name: At_0.001percent_MeJA__P Parameter: Timepoint (hr) Value: 1
  misc_feature: MA Experiment 20000211 PARAMETER Experiment Name: At_0.001percent_MeJA__P Parameter: Tissue Value: Aerial
  misc_feature: MA Experiment 20000211 PARAMETER Experiment Name: At_0.001percent_MeJA__P Parameter: Treatment Value: 0.001percent MeJA vs. No Treatment
  misc_feature: MA Experiment ID: 20000268 Result: Down-regulated in Transcription
  misc_feature: MA Experiment 20000268 PARAMETER Experiment Name: At_100mM_NaCl__P Parameter: Age (day) Value: 14
  misc_feature: MA Experiment 20000268 PARAMETER Experiment Name: At_100mM_NaCl__P Parameter: Organism Value: A. thaliana
  misc_feature: MA Experiment 20000268 PARAMETER Experiment Name: At_100mM_NaCl__P Parameter: Plant Line Value: WS
  misc_feature: MA Experiment 20000268 PARAMETER Experiment Name: At_100mM_NaCl__P Parameter: Timepoint (hr) Value: 6
  misc_feature: MA Experiment 20000268 PARAMETER Experiment Name: At_100mM_NaCl__P Parameter: Tissue Value: Whole Plant
  misc_feature: MA Experiment 20000268 PARAMETER Experiment Name: At_100mM_NaCl__P Parameter: Treatment Value: 100mM NaCl vs. No Treatment
  misc_feature: MA Experiment ID: 20000437 Result: Down-regulated in Transcription
  misc_feature: MA Experiment 20000437 PARAMETER Experiment Name: At_Drought_P Parameter: Age (day) Value: 8
  misc_feature: MA Experiment 20000437 PARAMETER Experiment Name: At_Drought_P Parameter: Organism Value: A. thaliana
  misc_feature: MA Experiment 20000437 PARAMETER Experiment Name: At_Drought_P Parameter: Plant Line Value: WS
  misc_feature: MA Experiment 20000437 PARAMETER Experiment Name: At_Drought_P Parameter: Timepoint (hr) Value: 24
  misc_feature: MA Experiment 20000437 PARAMETER Experiment Name: At_Drought_P Parameter: Tissue Value: Whole Plant
  misc_feature: MA Experiment 20000437 PARAMETER Experiment Name: At_Drought_P Parameter: Treatment Value: Drought vs. No Drought
  misc_feature: MA Experiment ID: 20000441 Result: Up-regulated in Transcription
  misc_feature: MA Experiment 20000441 PARAMETER Experiment Name: At_1uM_BR-BRZ__P Parameter: Tissue Value: Shoot Apices
  misc_feature: MA Experiment 20000441 PARAMETER Experiment Name: At_1uM_BR-BRZ__P Parameter: Treatment Value: 1uM BR vs. No Treatment
  misc_feature: MA Experiment ID: 20000573 Result: Up-regulated in Transcription
  misc_feature: MA Experiment 20000573 PARAMETER Experiment Name: At_100uM_ABA_Mutants__P Parameter: Organism Value: A. thaliana
  misc_feature: MA Experiment 20000573 PARAMETER Experiment Name: At_100uM_ABA_Mutants__P Parameter: Plant Line Value: CS22 vs. Ler wt
  misc_feature: MA Experiment 20000573 PARAMETER Experiment Name: At_100uM_ABA_Mutants__P Parameter: Timepoint (hr) Value: N/A
  misc_feature: MA Experiment 20000573 PARAMETER Experiment Name: At_100uM_ABA_Mutants__P Parameter: Tissue Value: Whole Plant
  misc_feature: MA Experiment 20000573 PARAMETER Experiment Name: At_100uM_ABA_Mutants__P Parameter: Treatment Value: None
  misc_feature: MA Experiment ID: 20001247 Result: Up-regulated in Transcription
  misc_feature: MA Experiment 20001247 PARAMETER Experiment Name: At_Far-red-induction_P Parameter: Age (day) Value: 7
  misc_feature: MA Experiment 20001247 PARAMETER Experiment Name: At_Far-red-induction_P Parameter: Light Value: Far-red vs. White
  misc_feature: MA Experiment 20001247 PARAMETER Experiment Name: At_Far-red-induction_P Parameter: Organism Value: A. thaliana
  misc_feature: MA Experiment 20001247 PARAMETER Experiment Name: At_Far-red-induction_P Parameter: Plant Line Value: Columbia
  misc_feature: MA Experiment 20001247 PARAMETER Experiment Name: At_Far-red-induction_P Parameter: Timepoint (hr) Value: 1
  misc_feature: MA Experiment 20001247 PARAMETER Experiment Name: At_Far-red-induction_P Parameter: Tissue Value: Whole Plant
  misc_feature: MA Experiment ID: 20001555 Result: Down-regulated in Transcription
  misc_feature: MA Experiment 20001555 PARAMETER Experiment Name: At_Drought_Soil_Dry_P Parameter: Age (day) Value: 24
  misc_feature: MA Experiment 20001555 PARAMETER Experiment Name: At_Drought_Soil_Dry_P Parameter: Organism Value: A. thaliana
  misc_feature: MA Experiment 20001555 PARAMETER Experiment Name: At_Drought_Soil_Dry_P Parameter: Plant Line Value: WS
  misc_feature: MA Experiment 20001555 PARAMETER Experiment Name: At_Drought_Soil_Dry_P Parameter: Post Timepoint (hr) Value: None
  misc_feature: MA Experiment 20001555 PARAMETER Experiment Name: At_Drought_Soil_Dry_P Parameter: Post-Treatment Value: None
  misc_feature: MA Experiment 20001555 PARAMETER Experiment Name: At_Drought_Soil_Dry_P Parameter: Timepoint (day) Value: 10
  misc_feature: MA Experiment 20001555 PARAMETER Experiment Name: At_Drought_Soil_Dry_P Parameter: Treatment Value: Drought vs. No Drought
  misc_feature: MA Experiment ID: 20001556 Result: Down-regulated in Transcription
  misc_feature: MA Experiment 20001556 PARAMETER Experiment Name: At_Drought_Soil_Dry_P Parameter: Age (day) Value: 26
  misc_feature: MA Experiment 20001556 PARAMETER Experiment Name: At_Drought_Soil_Dry_P Parameter: Organism Value: A. thaliana
  misc_feature: MA Experiment 20001556 PARAMETER Experiment Name: At_Drought_Soil_Dry_P Parameter: Plant Line Value: WS
  misc_feature: MA Experiment 20001556 PARAMETER Experiment Name: At_Drought_Soil_Dry_P Parameter: Post Timepoint (hr) Value: None
  misc_feature: MA Experiment 20001556 PARAMETER Experiment Name: At_Drought_Soil_Dry_P Parameter: Post-Treatment Value: None
  misc_feature: MA Experiment 20001556 PARAMETER Experiment Name: At_Drought_Soil_Dry_P Parameter: Timepoint (day) Value: 12
  misc_feature: MA Experiment 20001556 PARAMETER Experiment Name: At_Drought_Soil_Dry_P Parameter: Treatment Value: Drought vs. No Drought
  misc_feature: MA Experiment ID: 20001557 Result: Down-regulated in Transcription
  misc_feature: MA Experiment 20001557 PARAMETER Experiment Name: At_Drought_Soil_Dry_P Parameter: Age (day) Value: 27
  misc_feature: MA Experiment 20001557 PARAMETER Experiment Name: At_Drought_Soil_Dry_P Parameter: Organism Value: A. thaliana
  misc_feature: MA Experiment 20001557 PARAMETER Experiment Name: At_Drought_Soil_Dry_P Parameter: Plant Line Value: WS
  misc_feature: MA Experiment 20001557 PARAMETER Experiment Name: At_Drought_Soil_Dry_P Parameter: Post Timepoint (hr) Value: 3
  misc_feature: MA Experiment 20001557 PARAMETER Experiment Name: At_Drought_Soil_Dry_P Parameter: Post-Treatment Value: Re-Water vs. No Drought
  misc_feature: MA Experiment 20001557 PARAMETER Experiment Name: At_Drought_Soil_Dry_P Parameter: Timepoint (day) Value: 13
  misc_feature: MA Experiment 20001557 PARAMETER Experiment Name: At_Drought_Soil_Dry_P Parameter: Treatment Value: Drought vs. No Drought
  misc_feature: MA Experiment ID: 20001560 Result: Up-regulated in Transcription
  misc_feature: MA Experiment 20001560 PARAMETER Experiment Name: At_Drought_Soil_Dry_P Parameter: Age (day) Value: 28
  misc_feature: MA Experiment 20001560 PARAMETER Experiment Name: At_Drought_Soil_Dry_P Parameter: Organism Value: A. thaliana
  misc_feature: MA Experiment 20001560 PARAMETER Experiment Name: At_Drought_Soil_Dry_P Parameter: Plant Line Value: WS
  misc_feature: MA Experiment 20001560 PARAMETER Experiment Name: At_Drought_Soil_Dry_P Parameter: Post Timepoint (hr) Value: None
  misc_feature: MA Experiment 20001560 PARAMETER Experiment Name: At_Drought_Soil_Dry_P Parameter: Post-Treatment Value: None
  misc_feature: MA Experiment 20001560 PARAMETER Experiment Name: At_Drought_Soil_Dry_P Parameter: Timepoint (day) Value: 14
  misc_feature: MA Experiment 20001560 PARAMETER Experiment Name: At_Drought_Soil_Dry_P Parameter: Treatment Value: Drought vs. No Drought
  misc_feature: MA Experiment ID: 20001757 Result: Up-regulated in Transcription
  misc_feature: MA Experiment 20001757 PARAMETER Experiment Name: At_50mM_NH4NO3_L-to-H_P Parameter: Timepoint (hr) Value: 6
  misc_feature: MA Experiment 20001757 PARAMETER Experiment Name: At_50mM_NH4NO3_L-to-H_P Parameter: Tissue Value: Leaf
  misc_feature: MA Experiment 20001757 PARAMETER Experiment Name: At_50mM_NH4NO3_L-to-H_P Parameter: Treatment Value: 50mM NH4NO3 vs 100mM Mannitol
  misc_feature: MA Experiment ID: 20001904 Result: Down-regulated in Transcription
  misc_feature: MA Experiment 20001904 PARAMETER Experiment Name: At_Drought_Reproduction_P Parameter: Age (day) Value: 37
  misc_feature: MA Experiment 20001904 PARAMETER Experiment Name: At_Drought_Reproduction_P Parameter: Organism Value: A. thaliana
  misc_feature: MA Experiment 20001904 PARAMETER Experiment Name: At_Drought_Reproduction_P Parameter: Plant Line Value: WS
  misc_feature: MA Experiment 20001904 PARAMETER Experiment Name: At_Drought_Reproduction_P Parameter: Timepoint (day) Value: 7
  misc_feature: MA Experiment 20001904 PARAMETER Experiment Name: At_Drought_Reproduction_P Parameter: Tissue Value: Rosettes
  misc_feature: MA Experiment 20001904 PARAMETER Experiment Name: At_Drought_Reproduction_P Parameter: Treatment Value: Drought vs. No Drought
  misc_feature: MA Experiment ID: 20001910 Result: Down-regulated in Transcription
  misc_feature: MA Experiment 20001910 PARAMETER Experiment Name: At_Drought_Reproduction_P Parameter: Age (day) Value: 37
  misc_feature: MA Experiment 20001910 PARAMETER Experiment Name: At_Drought_Reproduction_P Parameter: Organism Value: A. thaliana
  misc_feature: MA Experiment 20001910 PARAMETER Experiment Name: At_Drought_Reproduction_P Parameter: Plant Line Value: WS
  misc_feature: MA Experiment 20001910 PARAMETER Experiment Name: At_Drought_Reproduction_P Parameter: Timepoint (day) Value: 7
  misc_feature: MA Experiment 20001910 PARAMETER Experiment Name: At_Drought_Reproduction_P Parameter: Tissue Value: Flowers
  misc_feature: MA Experiment 20001910 PARAMETER Experiment Name: At_Drought_Reproduction_P Parameter: Treatment Value: Drought vs. No Drought

SEQ ID NO: 92261 - protein, 337 aa, Arabidopsis thaliana; identical to SEQ ID NO: 23122
  peptide (1)..(337): Ceres Seq. ID no. 12710015
  misc_feature (127)..(150): Pfam Name: Leucine Rich Repeat Pfam Description: Leucine Rich Repeat
  misc_feature (8)..(337): Homolog of NCBI NO: 15240183 NR Description: polygalacturonase inhibiting protein (PGIP2); id: At5g06870.1, supported by cDNA: 35527., supported by cDNA:
  misc_feature (12)..(337): Homolog of NCBI NO: 7800201 NR Description: polygalacturonase inhibiting protein 2; PGIP2 thaliana] >gi|21593044|gb|AAM64993.1| polygalacturonase
  misc_feature (8)..(337): Homolog of NCBI NO: 15240182 NR Description: polygalacturonase inhibiting protein (PGIP1); id: At5g06860.1, supported by cDNA: 5344., supported by cDNA:
  misc_feature (8)..(337): Homolog of NCBI NO: 21593869 NR Description: polygalacturonase inhibiting protein 1
  misc_feature (8)..(337): Homolog of NCBI NO: 26094811 NR Description: polygalacturonase inhibitor protein [Brassica >gi|26094814|gb|AAM94870.2| polygalacturonase inhibitor protein
  misc_feature (10)..(337): Homolog of NCBI NO: 22324851 NR Description: polygalacturonase inhibitory protein [Brassica
  misc_feature (8)..(337): Homolog of NCBI NO: 22256016 NR Description: polygalacturonase inhibitor protein [Brassica >gi|22256018|gb|AAM94868.1| polygalacturonase inhibitor protein
  misc_feature (44)..(337): Homolog of NCBI NO: 22324853 NR Description: polygalacturonase inhibitory protein [Brassica
  misc_feature (12)..(337): Homolog of NCBI NO: 18148925 NR Description: polygalacturonase-inhibitor protein [Citrus sp.
  misc_feature (12)..(337): Homolog of NCBI NO: 18148376 NR Description: polygalacturonase-inhibitor protein [Citrus sp.

SEQ ID NO: 92262 - protein, 330 aa, Arabidopsis thaliana; identical to SEQ ID NO: 23123
  peptide (1)..(330): Ceres Seq. ID no. 12710016
  misc_feature (120)..(143): Pfam Name: Leucine Rich Repeat Pfam Description: Leucine Rich Repeat
  misc_feature (1)..(330): Homolog of NCBI NO: 15240183 NR Description: polygalacturonase inhibiting protein (PGIP2); id: At5g06870.1, supported by cDNA: 35527., supported by cDNA:
  misc_feature (5)..(330): Homolog of NCBI NO: 7800201 NR Description: polygalacturonase inhibiting protein 2; PGIP2 thaliana] >gi|21593044|gb|AAM64993.1| polygalacturonase
  misc_feature (1)..(330): Homolog of NCBI NO: 15240182 NR Description: polygalacturonase inhibiting protein (PGIP1); id: At5g06860.1, supported by cDNA: 5344., supported by cDNA:
  misc_feature (1)..(330): Homolog of NCBI NO: 21593869 NR Description: polygalacturonase inhibiting protein 1
  misc_feature (1)..(330): Homolog of NCBI NO: 26094811 NR Description: polygalacturonase inhibitor protein [Brassica >gi|26094814|gb|AAM94870.2| polygalacturonase inhibitor protein
  misc_feature (3)..(330): Homolog of NCBI NO: 22324851 NR Description: polygalacturonase inhibitory protein [Brassica
  misc_feature (1)..(330): Homolog of NCBI NO: 22256016 NR Description: polygalacturonase inhibitor protein [Brassica >gi|22256018|gb|AAM94868.1| polygalacturonase inhibitor protein
  misc_feature (37)..(330): Homolog of NCBI NO: 22324853 NR Description: polygalacturonase inhibitory protein [Brassica
  misc_feature (5)..(330): Homolog of NCBI NO: 18148925 NR Description: polygalacturonase-inhibitor protein [Citrus sp.
  misc_feature (5)..(330): Homolog of NCBI NO: 18148376 NR Description: polygalacturonase-inhibitor protein [Citrus sp.

SEQ ID NO: 92263 - protein, 326 aa, Arabidopsis thaliana; identical to SEQ ID NO: 23124
  peptide (1)..(326): Ceres Seq. ID no. 12710017
  misc_feature (116)..(139): Pfam Name: Leucine Rich Repeat Pfam Description: Leucine Rich Repeat
  misc_feature (1)..(326): Homolog of NCBI NO: 15240183 NR Description: polygalacturonase inhibiting protein (PGIP2); id: At5g06870.1, supported by cDNA: 35527., supported by cDNA:
  misc_feature (1)..(326): Homolog of NCBI NO: 7800201 NR Description: polygalacturonase inhibiting protein 2; PGIP2 thaliana] >gi|21593044|gb|AAM64993.1| polygalacturonase
  misc_feature (1)..(326): Homolog of NCBI NO: 15240182 NR Description: polygalacturonase inhibiting protein (PGIP1); id: At5g06860.1, supported by cDNA: 5344., supported by cDNA:
  misc_feature (1)..(326): Homolog of NCBI NO: 21593869 NR Description: polygalacturonase inhibiting protein 1
  misc_feature (1)..(326): Homolog of NCBI NO: 26094811 NR Description: polygalacturonase inhibitor protein [Brassica >gi|26094814|gb|AAM94870.2| polygalacturonase inhibitor protein
  misc_feature (1)..(326): Homolog of NCBI NO: 22324851 NR Description: polygalacturonase inhibitory protein [Brassica
  misc_feature (1)..(326): Homolog of NCBI NO: 22256016 NR Description: polygalacturonase inhibitor protein [Brassica >gi|22256018|gb|AAM94868.1| polygalacturonase inhibitor protein
  misc_feature (33)..(326): Homolog of NCBI NO: 22324853 NR Description: polygalacturonase inhibitory protein [Brassica
  misc_feature (1)..(326): Homolog of NCBI NO: 18148925 NR Description: polygalacturonase-inhibitor protein [Citrus sp.
  misc_feature (1)..(326): Homolog of NCBI NO: 18148376 NR Description: polygalacturonase-inhibitor protein [Citrus sp.

SEQ ID NO: 92264 - DNA, 1113 bp, Arabidopsis thaliana; identical to SEQ ID NO: 88508
  misc_feature (1)..(1113): Ceres Seq. ID no. 12710075
  misc_feature: MA Experiment ID: 20000166 Result: Down-regulated in Transcription
  misc_feature: MA Experiment 20000166 PARAMETER Experiment Name: At_100uM_ABA_P Parameter: Age (day) Value: 14
  misc_feature: MA Experiment 20000166 PARAMETER Experiment Name: At_100uM_ABA_P Parameter: Organism Value: A. thaliana
  misc_feature: MA Experiment 20000166 PARAMETER Experiment Name: At_100uM_ABA_P Parameter: Plant Line Value: WS
  misc_feature: MA Experiment 20000166 PARAMETER Experiment Name: At_100uM_ABA_P Parameter: Timepoint (hr) Value: 1
  misc_feature: MA Experiment 20000166 PARAMETER Experiment Name: At_100uM_ABA_P Parameter: Tissue Value: Aerial
  misc_feature: MA Experiment 20000166 PARAMETER Experiment Name: At_100uM_ABA_P Parameter: Treatment Value: 100uM ABA vs. No Treatment
  misc_feature: MA Experiment ID: 20000171 Result: Down-regulated in Transcription
  misc_feature: MA Experiment 20000171 PARAMETER Experiment Name: At_42deg_Heat_P Parameter: Age (day) Value: 14
  misc_feature: MA Experiment 20000171 PARAMETER Experiment Name: At_42deg_Heat_P Parameter: Organism Value: A. thaliana
  misc_feature: MA Experiment 20000171 PARAMETER Experiment Name: At_42deg_Heat_P Parameter: Plant Line Value: WS
  misc_feature: MA Experiment 20000171 PARAMETER Experiment Name: At_42deg_Heat_P Parameter: Temperature (deg C) Value: 42 vs. 22
  misc_feature: MA Experiment 20000171 PARAMETER Experiment Name: At_42deg_Heat_P Parameter: Timepoint (hr) Value: 1
  misc_feature: MA Experiment 20000171 PARAMETER Experiment Name: At_42deg_Heat_P Parameter: Tissue Value: Aerial
  misc_feature: MA Experiment ID: 20000173 Result: Down-regulated in Transcription
  misc_feature: MA Experiment 20000173 PARAMETER Experiment Name: At_42deg_Heat_P Parameter: Age (day) Value: 14
  misc_feature: MA Experiment 20000173 PARAMETER Experiment Name: At_42deg_Heat_P Parameter: Organism Value: A. thaliana
  misc_feature: MA Experiment 20000173 PARAMETER Experiment Name: At_42deg_Heat_P Parameter: Plant Line Value: WS
  misc_feature: MA Experiment 20000173 PARAMETER Experiment Name: At_42deg_Heat_P Parameter: Temperature (deg C) Value: 42 vs. 22
  misc_feature: MA Experiment 20000173 PARAMETER Experiment Name: At_42deg_Heat_P Parameter: Timepoint (hr) Value: 6
  misc_feature: MA Experiment 20000173 PARAMETER Experiment Name: At_42deg_Heat_P Parameter: Tissue Value: Aerial
  misc_feature: MA Experiment ID: 20000179 Result: Up-regulated in Transcription
  misc_feature: MA Experiment 20000179 PARAMETER Experiment Name: At_Germinating_Seeds_P Parameter: Age (hr) Value: 6 vs. 0
  misc_feature: MA Experiment 20000179 PARAMETER Experiment Name: At_Germinating_Seeds_P Parameter: Tissue Value: Germinating Seeds
  misc_feature: MA Experiment ID: 20000180 Result: Up-regulated in Transcription
  misc_feature: MA Experiment 20000180 PARAMETER Experiment Name: At_Germinating_Seeds_P Parameter: Age (hr) Value: 24 vs. 0
  misc_feature: MA Experiment 20000180 PARAMETER Experiment Name: At_Germinating_Seeds_P Parameter: Tissue Value: Germinating Seeds
  misc_feature: MA Experiment ID: 20000182 Result: Down-regulated in Transcription
  misc_feature: MA Experiment 20000182 PARAMETER Experiment Name: At_2mM_SA_P Parameter: Age (day) Value: 14
  misc_feature: MA Experiment 20000182 PARAMETER Experiment Name: At_2mM_SA_P Parameter: Organism Value: A. thaliana
  misc_feature: MA Experiment 20000182 PARAMETER Experiment Name: At_2mM_SA_P Parameter: Plant Line Value: WS
  misc_feature: MA Experiment 20000182 PARAMETER Experiment Name: At_2mM_SA_P Parameter: Timepoint (hr) Value: 6
  misc_feature: MA Experiment 20000182 PARAMETER Experiment Name: At_2mM_SA_P Parameter: Tissue Value: Aerial
  misc_feature: MA Experiment 20000182 PARAMETER Experiment Name: At_2mM_SA_P Parameter: Treatment Value: 2mM SA vs. No Treatment
  misc_feature: MA Experiment ID: 20000184 Result: Up-regulated in Transcription
  misc_feature: MA Experiment 20000184 PARAMETER Experiment Name: At_Shoots__P Parameter: Age (day) Value: 7
  misc_feature: MA Experiment 20000184 PARAMETER Experiment Name: At_Shoots__P Parameter: Tissue Value: Shoots vs. Whole Plant
  misc_feature: MA Experiment ID: 20000185 Result: Down-regulated in Transcription
  misc_feature: MA Experiment 20000185 PARAMETER Experiment Name: At_Roots__P Parameter: Age (day) Value: 7 vs. 21
  misc_feature: MA Experiment 20000185 PARAMETER Experiment Name: At_Roots__P Parameter: Organism Value: A. thaliana
  misc_feature: MA Experiment 20000185 PARAMETER Experiment Name: At_Roots__P Parameter: Tissue Value: Roots vs. Whole Plant
  misc_feature: MA Experiment ID: 20000211 Result: Down-regulated in Transcription
  misc_feature: MA Experiment 20000211 PARAMETER Experiment Name: At_0.001percent_MeJA__P Parameter: Age (day) Value: 14
  misc_feature: MA Experiment 20000211 PARAMETER Experiment Name: At_0.001percent_MeJA__P Parameter: Organism Value: A. thaliana
  misc_feature: MA Experiment 20000211 PARAMETER Experiment Name: At_0.001percent_MeJA__P Parameter: Plant Line Value: WS
  misc_feature: MA Experiment 20000211 PARAMETER Experiment Name: At_0.001percent_MeJA__P Parameter: Timepoint (hr) Value: 1
  misc_feature: MA Experiment 20000211 PARAMETER Experiment Name: At_0.001percent_MeJA__P Parameter: Tissue Value: Aerial
  misc_feature: MA Experiment 20000211 PARAMETER Experiment Name: At_0.001percent_MeJA__P Parameter: Treatment Value: 0.001percent MeJA vs. No Treatment
  misc_feature: MA Experiment ID: 20000227 Result: Up-regulated in Transcription
  misc_feature: MA Experiment 20000227 PARAMETER Experiment Name: At_Root-Tips-vs-Tops_P Parameter: Tissue Value: Root Tips vs. Root Tops
  misc_feature: MA Experiment ID: 20000234 Result: Down-regulated in Transcription
  misc_feature: MA Experiment 20000234 PARAMETER Experiment Name: At_Siliques_P Parameter: Age (day) Value: 21
  misc_feature: MA Experiment 20000234 PARAMETER Experiment Name: At_Siliques_P Parameter: Organism Value: A. thaliana
  misc_feature: MA Experiment 20000234 PARAMETER Experiment Name: At_Siliques_P Parameter: Plant Line Value: WS
  misc_feature: MA Experiment 20000234 PARAMETER Experiment Name: At_Siliques_P Parameter: Tissue Value: Less Than 5mm Siliques vs. Whole Plant
  misc_feature: MA Experiment ID: 20000235 Result: Down-regulated in Transcription
  misc_feature: MA Experiment 20000235 PARAMETER Experiment Name: At_Siliques_P Parameter: Age (day) Value: 21
  misc_feature: MA Experiment 20000235 PARAMETER Experiment Name: At_Siliques_P Parameter: Organism Value: A. thaliana
  misc_feature: MA Experiment 20000235 PARAMETER Experiment Name: At_Siliques_P Parameter: Plant Line Value: WS
  misc_feature: MA Experiment 20000235 PARAMETER Experiment Name: At_Siliques_P Parameter: Tissue Value: 5-10mm Siliques vs. Whole Plant
  misc_feature: MA Experiment ID: 20000264 Result: Down-regulated in Transcription
  misc_feature: MA Experiment 20000264 PARAMETER Experiment Name: At_Open_Flower_P Parameter: Age (day) Value: 21
  misc_feature: MA Experiment 20000264 PARAMETER Experiment Name: At_Open_Flower_P Parameter: Plant Line Value: WS
  misc_feature: MA Experiment 20000264 PARAMETER Experiment Name: At_Open_Flower_P Parameter: Tissue Value: Open Flower vs. Whole Plant
  misc_feature: MA Experiment ID: 20000265 Result: Down-regulated in Transcription
  misc_feature: MA Experiment 20000265 PARAMETER Experiment Name: At_Open_Flower_P Parameter: Age (day) Value: 21
  misc_feature: MA Experiment 20000265 PARAMETER Experiment Name: At_Open_Flower_P Parameter: Plant Line Value: WS
  misc_feature: MA Experiment 20000265 PARAMETER Experiment Name: At_Open_Flower_P Parameter: Tissue Value: Closed Flower vs. Whole Plant
  misc_feature: MA Experiment ID: 20000267 Result: Down-regulated in Transcription
  misc_feature: MA Experiment 20000267 PARAMETER Experiment Name: At_Drought_P Parameter: Age (day) Value: 7
  misc_feature: MA Experiment 20000267 PARAMETER Experiment Name: At_Drought_P Parameter: Organism Value: A. thaliana
  misc_feature: MA Experiment 20000267 PARAMETER Experiment Name: At_Drought_P Parameter: Plant Line Value: WS
  misc_feature: MA Experiment 20000267 PARAMETER Experiment Name: At_Drought_P Parameter: Timepoint (hr) Value: 6
  misc_feature: MA Experiment 20000267 PARAMETER Experiment Name: At_Drought_P Parameter: Tissue Value: Whole Plant
  misc_feature: MA Experiment 20000267 PARAMETER Experiment Name: At_Drought_P Parameter: Treatment Value: Drought vs. No Drought
  misc_feature: MA Experiment ID: 20000286 Result: Down-regulated in Transcription
  misc_feature: MA Experiment 20000286 PARAMETER Experiment Name: At_Open_Flower_P Parameter: Age (day) Value: 21
  misc_feature: MA Experiment 20000286 PARAMETER Experiment Name: At_Open_Flower_P Parameter: Plant Line Value: WS
  misc_feature: MA Experiment 20000286 PARAMETER Experiment Name: At_Open_Flower_P Parameter: Tissue Value: Half Open vs. Whole Plant
  misc_feature: MA Experiment ID: 20000436 Result: Down-regulated in Transcription
  misc_feature: MA Experiment 20000436 PARAMETER Experiment Name: At_Drought_P Parameter: Age (day) Value: 7
  misc_feature: MA Experiment 20000436 PARAMETER Experiment Name: At_Drought_P Parameter: Organism Value: A. thaliana
  misc_feature: MA Experiment 20000436 PARAMETER Experiment Name: At_Drought_P Parameter: Plant Line Value: WS
  misc_feature: MA Experiment 20000436 PARAMETER Experiment Name: At_Drought_P Parameter: Timepoint (hr) Value: 12
  misc_feature: MA Experiment 20000436 PARAMETER Experiment Name: At_Drought_P Parameter: Tissue Value: Whole Plant
  misc_feature: MA Experiment 20000436 PARAMETER Experiment Name: At_Drought_P Parameter: Treatment Value: Drought vs. No Drought
  misc_feature: MA Experiment ID: 20000437 Result: Down-regulated in Transcription
  misc_feature: MA Experiment 20000437 PARAMETER Experiment Name: At_Drought_P Parameter: Age (day) Value: 8
  misc_feature: MA Experiment 20000437 PARAMETER Experiment Name: At_Drought_P Parameter: Organism Value: A. thaliana
  misc_feature: MA Experiment 20000437 PARAMETER Experiment Name: At_Drought_P Parameter: Plant Line Value: WS
  misc_feature: MA Experiment 20000437 PARAMETER Experiment Name: At_Drought_P Parameter: Timepoint (hr) Value: 24
  misc_feature: MA Experiment 20000437 PARAMETER Experiment Name: At_Drought_P Parameter: Tissue Value: Whole Plant
  misc_feature: MA Experiment 20000437 PARAMETER Experiment Name: At_Drought_P Parameter: Treatment Value: Drought vs. No Drought
  misc_feature: MA Experiment ID: 20000438 Result: Up-regulated in Transcription
  misc_feature: MA Experiment 20000438 PARAMETER Experiment Name: At_Shoots__P Parameter: Age (day) Value: 14
  misc_feature: MA Experiment 20000438 PARAMETER Experiment Name: At_Shoots__P Parameter: Tissue Value: Shoots vs. Whole Plant
  misc_feature: MA Experiment ID: 20000439 Result: Down-regulated in Transcription
  misc_feature: MA Experiment 20000439 PARAMETER Experiment Name: At_Roots__P Parameter: Age (day) Value: 14 vs. 21
  misc_feature: MA Experiment 20000439 PARAMETER Experiment Name: At_Roots__P Parameter: Organism Value: A. thaliana
  misc_feature: MA Experiment 20000439 PARAMETER Experiment Name: At_Roots__P Parameter: Tissue Value: Roots vs. Whole Plant
  misc_feature: MA Experiment ID: 20000441 Result: Up-regulated in Transcription
  misc_feature: MA Experiment 20000441 PARAMETER Experiment Name: At_1uM_BR-BRZ__P Parameter: Tissue Value: Shoot Apices
  misc_feature: MA Experiment 20000441 PARAMETER Experiment Name: At_1uM_BR-BRZ__P Parameter: Treatment Value: 1uM BR vs. No Treatment
  misc_feature: MA Experiment ID: 20000443 Result: Up-regulated in Transcription
  misc_feature: MA Experiment 20000443 PARAMETER Experiment Name: At_1uM_BR-BRZ__P Parameter: Tissue Value: Shoot Apices
  misc_feature: MA Experiment 20000443 PARAMETER Experiment Name: At_1uM_BR-BRZ__P Parameter: Treatment Value: 1uM BRZ vs. No Treatment
  misc_feature: MA Experiment ID: 20000444 Result: Up-regulated in Transcription
  misc_feature: MA Experiment 20000444 PARAMETER Experiment Name: At_100uM_NAA__P Parameter: Age (day) Value: 14
  misc_feature: MA Experiment 20000444 PARAMETER Experiment Name: At_100uM_NAA__P Parameter: Organism Value: A. thaliana
  misc_feature: MA Experiment 20000444 PARAMETER Experiment Name: At_100uM_NAA__P Parameter: Plant Line Value: WS
  misc_feature: MA Experiment 20000444 PARAMETER Experiment Name: At_100uM_NAA__P Parameter: Timepoint (hr) Value: 1
  misc_feature: MA Experiment 20000444 PARAMETER Experiment Name: At_100uM_NAA__P Parameter: Tissue Value: Aerial
  misc_feature: MA Experiment 20000444 PARAMETER Experiment Name: At_100uM_NAA__P Parameter: Treatment Value: 100uM NAA vs. No Treatment
  misc_feature: MA Experiment ID: 20000445 Result: Up-regulated in Transcription
  misc_feature: MA Experiment 20000445 PARAMETER Experiment Name: At_100uM_NAA__P Parameter: Age (day) Value: 14
  misc_feature: MA Experiment 20000445 PARAMETER Experiment Name: At_100uM_NAA__P Parameter: Organism Value: A. thaliana
  misc_feature: MA Experiment 20000445 PARAMETER Experiment Name: At_100uM_NAA__P Parameter: Plant Line Value: WS
  misc_feature: MA Experiment 20000445 PARAMETER Experiment Name: At_100uM_NAA__P Parameter: Timepoint (hr) Value: 6
  misc_feature: MA Experiment 20000445 PARAMETER Experiment Name: At_100uM_NAA__P Parameter: Tissue Value: Aerial
  misc_feature: MA Experiment 20000445 PARAMETER Experiment Name: At_100uM_NAA__P Parameter: Treatment Value: 100uM NAA vs. No Treatment
  misc_feature: MA Experiment ID: 20000453 Result: Down-regulated in Transcription
  misc_feature: MA Experiment 20000453 PARAMETER Experiment Name: At_100uM_ABA_P Parameter: Age (day) Value: 15
  misc_feature: MA Experiment 20000453 PARAMETER Experiment Name: At_100uM_ABA_P Parameter: Organism Value: A. thaliana
  misc_feature: MA Experiment 20000453 PARAMETER Experiment Name: At_100uM_ABA_P Parameter: Plant Line Value: WS
  misc_feature: MA Experiment 20000453 PARAMETER Experiment Name: At_100uM_ABA_P Parameter: Timepoint (hr) Value: 24
  misc_feature: MA Experiment 20000453 PARAMETER Experiment Name: At_100uM_ABA_P Parameter: Tissue Value: Aerial
  misc_feature: MA Experiment 20000453 PARAMETER Experiment Name: At_100uM_ABA_P Parameter: Treatment Value: 100uM ABA vs. No Treatment
  misc_feature: MA Experiment ID: 20000527 Result: Down-regulated in Transcription
  misc_feature: MA Experiment 20000527 PARAMETER Experiment Name: At_10percent_PEG_P Parameter: Age (day) Value: 20
  misc_feature: MA Experiment 20000527 PARAMETER Experiment Name: At_10percent_PEG_P Parameter: Organism Value: A. thaliana
  misc_feature: MA Experiment 20000527 PARAMETER Experiment Name: At_10percent_PEG_P Parameter: Plant Line Value: WS
  misc_feature: MA Experiment 20000527 PARAMETER Experiment Name: At_10percent_PEG_P Parameter: Timepoint (day) Value: 20
  misc_feature: MA Experiment 20000527 PARAMETER Experiment Name: At_10percent_PEG_P Parameter: Tissue Value: Whole Plant
  misc_feature: MA Experiment 20000527 PARAMETER Experiment Name: At_10percent_PEG_P Parameter: Treatment Value: 10percent PEG vs. No Treatment
  misc_feature: MA Experiment ID: 20000575 Result: Up-regulated in Transcription
  misc_feature: MA Experiment 20000575 PARAMETER Experiment Name: At_100uM_ABA_Mutants__P Parameter: Organism Value: A. thaliana
  misc_feature: MA Experiment 20000575 PARAMETER Experiment Name: At_100uM_ABA_Mutants__P Parameter: Plant Line Value: CS22
  misc_feature: MA Experiment 20000575 PARAMETER Experiment Name: At_100uM_ABA_Mutants__P Parameter: Timepoint (hr) Value: 6
  misc_feature: MA Experiment 20000575 PARAMETER Experiment Name: At_100uM_ABA_Mutants__P Parameter: Tissue Value: Whole Plant
  misc_feature: MA Experiment 20000575 PARAMETER Experiment Name: At_100uM_ABA_Mutants__P Parameter: Treatment Value: 1uM ABA vs. No Treatment
  misc_feature: MA Experiment ID: 20000576 Result: Up-regulated in Transcription
  misc_feature: MA Experiment 20000576 PARAMETER Experiment Name: At_100uM_ABA_Mutants__P Parameter: Organism Value: A. thaliana
  misc_feature: MA Experiment 20000576 PARAMETER Experiment Name: At_100uM_ABA_Mutants__P Parameter: Plant Line Value: CS23
  misc_feature: MA Experiment 20000576 PARAMETER Experiment Name: At_100uM_ABA_Mutants__P Parameter: Timepoint (hr) Value: 6
  misc_feature: MA Experiment 20000576 PARAMETER Experiment Name: At_100uM_ABA_Mutants__P Parameter: Tissue Value: Whole Plant
  misc_feature: MA Experiment 20000576 PARAMETER Experiment Name: At_100uM_ABA_Mutants__P Parameter: Treatment Value: 1uM ABA vs. No Treatment
  misc_feature: MA Experiment ID: 20001247 Result: Up-regulated in Transcription
  misc_feature: MA Experiment 20001247 PARAMETER Experiment Name: At_Far-red-induction_P Parameter: Age (day) Value: 7
  misc_feature: MA Experiment 20001247 PARAMETER Experiment Name: At_Far-red-induction_P Parameter: Light Value: Far-red vs. White
  misc_feature: MA Experiment 20001247 PARAMETER Experiment Name: At_Far-red-induction_P Parameter: Organism Value: A. thaliana
  misc_feature: MA Experiment 20001247 PARAMETER Experiment Name: At_Far-red-induction_P Parameter: Plant Line Value: Columbia
  misc_feature: MA Experiment 20001247 PARAMETER Experiment Name: At_Far-red-induction_P Parameter: Timepoint (hr) Value: 1
  misc_feature: MA Experiment 20001247 PARAMETER Experiment Name: At_Far-red-induction_P Parameter: Tissue Value: Whole Plant
  misc_feature: MA Experiment ID: 20001248 Result: Up-regulated in Transcription
  misc_feature: MA Experiment 20001248 PARAMETER Experiment Name: At_Far-red-induction_P Parameter: Age (day) Value: 7
  misc_feature: MA Experiment 20001248 PARAMETER Experiment Name: At_Far-red-induction_P Parameter: Light Value: Far-red vs. White
  misc_feature: MA Experiment 20001248 PARAMETER Experiment Name: At_Far-red-induction_P Parameter: Organism Value: A. thaliana
  misc_feature: MA Experiment 20001248 PARAMETER Experiment Name: At_Far-red-induction_P Parameter: Plant Line Value: Columbia
  misc_feature: MA Experiment 20001248 PARAMETER Experiment Name: At_Far-red-induction_P Parameter: Timepoint (hr) Value: 4
  misc_feature: MA Experiment 20001248 PARAMETER Experiment Name: At_Far-red-induction_P Parameter: Tissue Value: Whole Plant
  misc_feature: MA Experiment ID: 20001450 Result: Up-regulated in Transcription
  misc_feature: MA Experiment 20001450 PARAMETER Experiment Name: At_Far-red-induction_P Parameter: Age (day) Value: 7
  misc_feature: MA Experiment 20001450 PARAMETER Experiment Name: At_Far-red-induction_P Parameter: Light Value: Far-red vs. White
  misc_feature: MA Experiment 20001450 PARAMETER Experiment Name: At_Far-red-induction_P Parameter: Organism Value: A. thaliana
  misc_feature: MA Experiment 20001450 PARAMETER Experiment Name: At_Far-red-induction_P Parameter: Plant Line Value: Columbia
  misc_feature: MA Experiment 20001450 PARAMETER Experiment Name: At_Far-red-induction_P Parameter: Timepoint (hr) Value: 8
  misc_feature: MA Experiment 20001450 PARAMETER Experiment Name: At_Far-red-induction_P Parameter: Tissue Value: Whole Plant
  misc_feature: MA Experiment ID: 20001554 Result: Down-regulated in Transcription
  misc_feature: MA Experiment 20001554 PARAMETER Experiment Name: At_Drought_Soil_Dry_P Parameter: Age (day) Value: 21
  misc_feature: MA Experiment 20001554 PARAMETER Experiment Name: At_Drought_Soil_Dry_P Parameter: Organism Value: A. thaliana
  misc_feature: MA Experiment 20001554 PARAMETER Experiment Name: At_Drought_Soil_Dry_P Parameter: Plant Line Value: WS
  misc_feature: MA Experiment 20001554 PARAMETER Experiment Name: At_Drought_Soil_Dry_P Parameter: Post Timepoint (hr) Value: None
  misc_feature: MA Experiment 20001554 PARAMETER Experiment Name: At_Drought_Soil_Dry_P Parameter: Post-Treatment Value: None
  misc_feature: MA Experiment 20001554 PARAMETER Experiment Name: At_Drought_Soil_Dry_P Parameter: Timepoint (day) Value: 7
  misc_feature: MA Experiment 20001554 PARAMETER Experiment Name: At_Drought_Soil_Dry_P Parameter: Treatment Value: Drought vs. No Drought
  misc_feature: MA Experiment ID: 20001555 Result: Down-regulated in Transcription
  misc_feature: MA Experiment 20001555 PARAMETER Experiment Name: At_Drought_Soil_Dry_P Parameter: Age (day) Value: 24
  misc_feature: MA Experiment 20001555 PARAMETER Experiment Name: At_Drought_Soil_Dry_P Parameter: Organism Value: A. thaliana
  misc_feature: MA Experiment 20001555 PARAMETER Experiment Name: At_Drought_Soil_Dry_P Parameter: Plant Line Value: WS
  misc_feature: MA Experiment 20001555 PARAMETER Experiment Name: At_Drought_Soil_Dry_P Parameter: Post Timepoint (hr) Value: None
  misc_feature: MA Experiment 20001555 PARAMETER Experiment Name: At_Drought_Soil_Dry_P Parameter: Post-Treatment Value: None
  misc_feature: MA Experiment 20001555 PARAMETER Experiment Name: At_Drought_Soil_Dry_P Parameter: Timepoint (day) Value: 10
  misc_feature: MA Experiment 20001555 PARAMETER Experiment Name: At_Drought_Soil_Dry_P Parameter: Treatment Value: Drought vs. No Drought
  misc_feature: MA Experiment ID: 20001556 Result: Down-regulated in Transcription
  misc_feature: MA Experiment 20001556 PARAMETER Experiment Name: At_Drought_Soil_Dry_P Parameter: Age (day) Value: 26
  misc_feature: MA Experiment 20001556 PARAMETER Experiment Name: At_Drought_Soil_Dry_P Parameter: Organism Value: A. thaliana
  misc_feature: MA Experiment 20001556 PARAMETER Experiment Name: At_Drought_Soil_Dry_P Parameter: Plant Line Value: WS
  misc_feature: MA Experiment 20001556 PARAMETER Experiment Name: At_Drought_Soil_Dry_P Parameter: Post Timepoint (hr) Value: None
  misc_feature: MA Experiment 20001556 PARAMETER Experiment Name: At_Drought_Soil_Dry_P Parameter: Post-Treatment Value: None
  misc_feature: MA Experiment 20001556 PARAMETER Experiment Name: At_Drought_Soil_Dry_P Parameter: Timepoint (day) Value: 12
  misc_feature: MA Experiment 20001556 PARAMETER Experiment Name: At_Drought_Soil_Dry_P Parameter: Treatment Value: Drought vs. No Drought
  misc_feature: MA Experiment ID: 20001768 Result: Up-regulated in Transcription
  misc_feature: MA Experiment 20001768 PARAMETER Experiment Name: At_Far-red-enriched-adult_P Parameter: Age (day) Value: 28
  misc_feature: MA Experiment 20001768 PARAMETER Experiment Name: At_Far-red-enriched-adult_P Parameter: Light Value: Far-red enriched vs. White
  misc_feature: MA Experiment 20001768 PARAMETER Experiment Name: At_Far-red-enriched-adult_P Parameter: Organism Value: A. thaliana
  misc_feature: MA Experiment 20001768 PARAMETER Experiment Name: At_Far-red-enriched-adult_P Parameter: Plant Line Value: Columbia
  misc_feature: MA Experiment 20001768 PARAMETER Experiment Name: At_Far-red-enriched-adult_P Parameter: Timepoint (hr) Value: 1
  misc_feature: MA Experiment 20001768 PARAMETER Experiment Name: At_Far-red-enriched-adult_P Parameter: Tissue Value: Aerial
  misc_feature: MA Experiment ID: 20001769 Result: Up-regulated in Transcription
  misc_feature: MA Experiment 20001769 PARAMETER Experiment Name: At_Far-red-enriched-adult_P Parameter: Age (day) Value: 28
  misc_feature: MA Experiment 20001769 PARAMETER Experiment Name: At_Far-red-enriched-adult_P Parameter: Light Value: Far-red enriched vs. White
  misc_feature: MA Experiment 20001769 PARAMETER Experiment Name: At_Far-red-enriched-adult_P Parameter: Organism Value: A. thaliana
  misc_feature: MA Experiment 20001769 PARAMETER Experiment Name: At_Far-red-enriched-adult_P Parameter: Plant Line Value: Columbia
  misc_feature: MA Experiment 20001769 PARAMETER Experiment Name: At_Far-red-enriched-adult_P Parameter: Timepoint (hr) Value: 4
  misc_feature: MA Experiment 20001769 PARAMETER Experiment Name: At_Far-red-enriched-adult_P Parameter: Tissue Value: Aerial
  misc_feature: MA Experiment ID: 20001770 Result: Up-regulated in Transcription
  misc_feature: MA Experiment 20001770 PARAMETER Experiment Name: At_Far-red-enriched-adult_P Parameter: Age (day) Value: 28
  misc_feature: MA Experiment 20001770 PARAMETER Experiment Name: At_Far-red-enriched-adult_P Parameter: Light Value: Far-red enriched vs. White
  misc_feature: MA Experiment 20001770 PARAMETER Experiment Name: At_Far-red-enriched-adult_P Parameter: Organism Value: A. thaliana
  misc_feature: MA Experiment 20001770 PARAMETER Experiment Name: At_Far-red-enriched-adult_P Parameter: Plant Line Value: Columbia
  misc_feature: MA Experiment 20001770 PARAMETER Experiment Name: At_Far-red-enriched-adult_P Parameter: Timepoint (hr) Value: 8
  misc_feature: MA Experiment 20001770 PARAMETER Experiment Name: At_Far-red-enriched-adult_P Parameter: Tissue Value: Aerial
  misc_feature: MA Experiment ID: 20001904 Result: Down-regulated in Transcription
  misc_feature: MA Experiment 20001904 PARAMETER Experiment Name: At_Drought_Reproduction_P Parameter: Age (day) Value: 37
  misc_feature: MA Experiment 20001904 PARAMETER Experiment Name: At_Drought_Reproduction_P Parameter: Organism Value: A. thaliana
  misc_feature: MA Experiment 20001904 PARAMETER Experiment Name: At_Drought_Reproduction_P Parameter: Plant Line Value: WS
  misc_feature: MA Experiment 20001904 PARAMETER Experiment Name: At_Drought_Reproduction_P Parameter: Timepoint (day) Value: 7
  misc_feature: MA Experiment 20001904 PARAMETER Experiment Name: At_Drought_Reproduction_P Parameter: Tissue Value: Rosettes
  misc_feature: MA Experiment 20001904 PARAMETER Experiment Name: At_Drought_Reproduction_P Parameter: Treatment Value: Drought vs. No Drought

SEQ ID NO: 92265 - protein, 370 aa, Arabidopsis thaliana; identical to SEQ ID NO: 88509
  peptide (1)..(370): Ceres Seq. ID no. 12710076
  misc_feature (36)..(323): Pfam Name: Protein phosphatase 2C Pfam Description: Protein phosphatase 2C
  misc_feature (1)..(370): Homolog of NCBI NO: 30679755 NR Description: protein phosphatase - like protein [Arabidopsis
  misc_feature (1)..(370): Homolog of NCBI NO: 11282005 NR Description: protein phosphatase-like protein - Arabidopsis
  misc_feature (1)..(363): Homolog of NCBI NO: 9294356 NR Description: protein phosphatase 2C [Arabidopsis thaliana]
  misc_feature (1)..(363): Homolog of NCBI NO: 15230540 NR Description: protein phosphatase 2C, putative; protein id: [Arabidopsis thaliana] >gi|12321955|gb|AAG51012.1|AC069474_11
  misc_feature (1)..(363): Homolog of NCBI NO: 30694180 NR Description: protein phosphatase 2C - like protein thaliana] >gi|15020818|emb|CAC44619.1| Ser/Thr protein
  misc_feature (1)..(363): Homolog of NCBI NO: 18855039 NR Description: putative protein phosphatase [Oryza sativa]
  misc_feature (21)..(363): Homolog of NCBI NO: 11282002 NR Description: protein phosphatase 2C-like protein - Arabidopsis
  misc_feature (1)..(363): Homolog of NCBI NO: 11282001 NR Description: protein phosphatase 2C-like protein - Arabidopsis
  misc_feature (2)..(363): Homolog of NCBI NO: 11282004 NR Description: protein phosphatase 2C homolog [imported] - ice plant >gi|4206122|gb|AAD11430.1| protein phosphatase 2C
  misc_feature (23)..(363): Homolog of NCBI NO: 7768153 NR Description: protein phosphatase 2C (PP2C) [Fagus sylvatica]

SEQ ID NO: 92266 - protein, 359 aa, Arabidopsis thaliana; identical to SEQ ID NO: 88510
  peptide (1)..(359): Ceres Seq. ID no. 12710077
  misc_feature (25)..(312): Pfam Name: Protein phosphatase 2C Pfam Description: Protein phosphatase 2C
  misc_feature (1)..(359): Homolog of NCBI NO: 30679755 NR Description: protein phosphatase - like protein [Arabidopsis
  misc_feature (1)..(359): Homolog of NCBI NO: 11282005 NR Description: protein phosphatase-like protein - Arabidopsis
  misc_feature (1)..(352): Homolog of NCBI NO: 9294356 NR Description: protein phosphatase 2C [Arabidopsis thaliana]
  misc_feature (1)..(352): Homolog of NCBI NO: 15230540 NR Description: protein phosphatase 2C, putative; protein id: [Arabidopsis thaliana] >gi|12321955|gb|AAG51012.1|AC069474_11
  misc_feature (1)..(352): Homolog of NCBI NO: 30694180 NR Description: protein phosphatase 2C - like protein thaliana] >gi|15020818|emb|CAC44619.1| Ser/Thr protein
  misc_feature (1)..(352): Homolog of NCBI NO: 18855039 NR Description: putative protein phosphatase [Oryza sativa]
  misc_feature (10)..(352): Homolog of NCBI NO: 11282002 NR Description: protein phosphatase 2C-like protein - Arabidopsis
  misc_feature (1)..(352): Homolog of NCBI NO: 11282001 NR Description: protein phosphatase 2C-like protein - Arabidopsis
  misc_feature (1)..(352): Homolog of NCBI NO: 11282004 NR Description: protein phosphatase 2C homolog [imported] - ice plant >gi|4206122|gb|AAD11430.1| protein phosphatase 2C
  misc_feature (12)..(352): Homolog of NCBI NO: 7768153 NR Description: protein phosphatase 2C (PP2C) [Fagus sylvatica]

SEQ ID NO: 92267 - protein, 330 aa, Arabidopsis thaliana; identical to SEQ ID NO: 88511
  peptide (1)..(330): Ceres Seq. ID no. 12710078
  misc_feature (1)..(283): Pfam Name: Protein phosphatase 2C Pfam Description: Protein phosphatase 2C
  misc_feature (1)..(330): Homolog of NCBI NO: 30679755 NR Description: protein phosphatase - like protein [Arabidopsis
  misc_feature (1)..(330): Homolog of NCBI NO: 11282005 NR Description: protein phosphatase-like protein - Arabidopsis
  misc_feature (1)..(323): Homolog of NCBI NO: 9294356 NR Description: protein phosphatase 2C [Arabidopsis thaliana]
  misc_feature (1)..(323): Homolog of NCBI NO: 15230540 NR Description: protein phosphatase 2C, putative; protein id: [Arabidopsis thaliana] >gi|12321955|gb|AAG51012.1|AC069474_11
  misc_feature (1)..(323): Homolog of NCBI NO: 30694180 NR Description: protein phosphatase 2C - like protein thaliana] >gi|15020818|emb|CAC44619.1| Ser/Thr protein
  misc_feature (1)..(323): Homolog of NCBI NO: 18855039 NR Description: putative protein phosphatase [Oryza sativa]
  misc_feature (1)..(323): Homolog of NCBI NO: 11282002 NR Description: protein phosphatase 2C-like protein - Arabidopsis
  misc_feature (1)..(323): Homolog of NCBI NO: 11282001 NR Description: protein phosphatase 2C-like protein - Arabidopsis
  misc_feature (1)..(323): Homolog of NCBI NO: 11282004 NR Description: protein phosphatase 2C homolog [imported] - ice plant >gi|4206122|gb|AAD11430.1| protein phosphatase 2C
  misc_feature (1)..(323): Homolog of NCBI NO: 7768153 NR Description: protein phosphatase 2C (PP2C) [Fagus sylvatica]

SEQ ID NO: 92268 - DNA, 852 bp, Arabidopsis thaliana; identical to SEQ ID NO: 88512
  misc_feature (1)..(852): Ceres Seq. ID no. 12710123
  misc_feature: MA Experiment ID: 20000171 Result: Down-regulated in Transcription
  misc_feature: MA Experiment 20000171 PARAMETER Experiment Name: At_42deg_Heat_P Parameter: Age (day) Value: 14
  misc_feature: MA Experiment 20000171 PARAMETER Experiment Name: At_42deg_Heat_P Parameter: Organism Value: A. thaliana
  misc_feature: MA Experiment 20000171 PARAMETER Experiment Name: At_42deg_Heat_P Parameter: Plant Line Value: WS
  misc_feature: MA Experiment 20000171 PARAMETER Experiment Name: At_42deg_Heat_P Parameter: Temperature (deg C) Value: 42 vs. 22
  misc_feature: MA Experiment 20000171 PARAMETER Experiment Name: At_42deg_Heat_P Parameter: Timepoint (hr) Value: 1
  misc_feature: MA Experiment 20000171 PARAMETER Experiment Name: At_42deg_Heat_P Parameter: Tissue Value: Aerial
  misc_feature: MA Experiment ID: 20000184 Result: Down-regulated in Transcription
  misc_feature: MA Experiment 20000184 PARAMETER Experiment Name: At_Shoots__P Parameter: Age (day) Value: 7
  misc_feature: MA Experiment 20000184 PARAMETER Experiment Name: At_Shoots__P Parameter: Tissue Value: Shoots vs. Whole Plant
  misc_feature: MA Experiment ID: 20000234 Result: Down-regulated in Transcription
  misc_feature: MA Experiment 20000234 PARAMETER Experiment Name: At_Siliques_P Parameter: Age (day) Value: 21
  misc_feature: MA Experiment 20000234 PARAMETER Experiment Name: At_Siliques_P Parameter: Organism Value: A. thaliana
  misc_feature: MA Experiment 20000234 PARAMETER Experiment Name: At_Siliques_P Parameter: Plant Line Value: WS
  misc_feature: MA Experiment 20000234 PARAMETER Experiment Name: At_Siliques_P Parameter: Tissue Value: Less Than 5mm Siliques vs. Whole Plant
  misc_feature: MA Experiment ID: 20000264 Result: Down-regulated in Transcription
  misc_feature: MA Experiment 20000264 PARAMETER Experiment Name: At_Open_Flower_P Parameter: Age (day) Value: 21
  misc_feature: MA Experiment 20000264 PARAMETER Experiment Name: At_Open_Flower_P Parameter: Plant Line Value: WS
  misc_feature: MA Experiment 20000264 PARAMETER Experiment Name: At_Open_Flower_P Parameter: Tissue Value: Open Flower vs. Whole Plant
  misc_feature: MA Experiment ID: 20000265 Result: Down-regulated in Transcription
  misc_feature: MA Experiment 20000265 PARAMETER Experiment Name: At_Open_Flower_P Parameter: Age (day) Value: 21
  misc_feature: MA Experiment 20000265 PARAMETER Experiment Name: At_Open_Flower_P Parameter: Plant Line Value: WS
  misc_feature: MA Experiment 20000265 PARAMETER Experiment Name: At_Open_Flower_P Parameter: Tissue Value: Closed Flower vs. Whole Plant
  misc_feature: MA Experiment ID: 20000495 Result: Down-regulated in Transcription
  misc_feature: MA Experiment 20000495 PARAMETER Experiment Name: At_Guard_Cells_P Parameter: Harvest Date Value: 8/2/2002
  misc_feature: MA Experiment 20000495 PARAMETER Experiment Name: At_Guard_Cells_P Parameter: Organism Value: A. thaliana
  misc_feature: MA Experiment 20000495 PARAMETER Experiment Name: At_Guard_Cells_P Parameter: Tissue Value: Guard Cells vs. Leaves
  misc_feature: MA Experiment ID: 20001247 Result: Up-regulated in Transcription
  misc_feature: MA Experiment 20001247 PARAMETER Experiment Name: At_Far-red-induction_P Parameter: Age (day) Value: 7
  misc_feature: MA Experiment 20001247 PARAMETER Experiment Name: At_Far-red-induction_P Parameter: Light Value: Far-red vs. White
  misc_feature: MA Experiment 20001247 PARAMETER Experiment Name: At_Far-red-induction_P Parameter: Organism Value: A. thaliana
  misc_feature: MA Experiment 20001247 PARAMETER Experiment Name: At_Far-red-induction_P Parameter: Plant Line Value: Columbia
  misc_feature: MA Experiment 20001247 PARAMETER Experiment Name: At_Far-red-induction_P Parameter: Timepoint (hr) Value: 1
  misc_feature: MA Experiment 20001247 PARAMETER Experiment Name: At_Far-red-induction_P Parameter: Tissue Value: Whole Plant
  misc_feature: MA Experiment ID: 20001560 Result: Down-regulated in Transcription
  misc_feature: MA Experiment 20001560 PARAMETER Experiment Name: At_Drought_Soil_Dry_P Parameter: Age (day) Value: 28
  misc_feature: MA Experiment 20001560 PARAMETER Experiment Name: At_Drought_Soil_Dry_P Parameter: Organism Value: A. thaliana
  misc_feature: MA Experiment 20001560 PARAMETER Experiment Name: At_Drought_Soil_Dry_P Parameter: Plant Line Value: WS
  misc_feature: MA Experiment 20001560 PARAMETER Experiment Name: At_Drought_Soil_Dry_P Parameter: Post Timepoint (hr) Value: None
  misc_feature: MA Experiment 20001560 PARAMETER Experiment Name: At_Drought_Soil_Dry_P Parameter: Post-Treatment Value: None
  misc_feature: MA Experiment 20001560 PARAMETER Experiment Name: At_Drought_Soil_Dry_P Parameter: Timepoint (day) Value: 14
  misc_feature: MA Experiment 20001560 PARAMETER Experiment Name: At_Drought_Soil_Dry_P Parameter: Treatment Value: Drought vs. No Drought

SEQ ID NO: 92269 - protein, 283 aa, Arabidopsis thaliana; identical to SEQ ID NO: 88513
  peptide (1)..(283): Ceres Seq. ID no. 12710124
  misc_feature (35)..(80): Pfam Name: Protamine P1 Pfam Description: Protamine P1
  misc_feature (1)..(283): Homolog of NCBI NO: 15242640 NR Description: putative protein; protein id: At5g03110.1
  misc_feature (4)..(228): Homolog of NCBI NO: 15228086 NR Description: hypothetical protein; protein id: At2g37100.1

SEQ ID NO: 92270 - protein, 282 aa, Arabidopsis thaliana; identical to SEQ ID NO: 88514
  peptide (1)..(282): Ceres Seq. ID no. 12710125
  misc_feature (34)..(79): Pfam Name: Protamine P1 Pfam Description: Protamine P1
  misc_feature (1)..(282): Homolog of NCBI NO: 15242640 NR Description: putative protein; protein id: At5g03110.1
  misc_feature (3)..(227): Homolog of NCBI NO: 15228086 NR Description: hypothetical protein; protein id: At2g37100.1

SEQ ID NO: 92271 - protein, 262 aa, Arabidopsis thaliana; identical to SEQ ID NO: 88515
  peptide (1)..(262): Ceres Seq. ID no. 12710126
  misc_feature (14)..(59): Pfam Name: Protamine P1 Pfam Description: Protamine P1
  misc_feature (1)..(262): Homolog of NCBI NO: 15242640 NR Description: putative protein; protein id: At5g03110.1
  misc_feature (1)..(207): Homolog of NCBI NO: 15228086 NR Description: hypothetical protein; protein id: At2g37100.1

SEQ ID NO: 92272 - DNA, 2559 bp, Arabidopsis thaliana; identical to SEQ ID NO: 88516
  misc_feature (1)..(2559): Ceres Seq. ID no. 12710165
  misc_feature: MA Experiment ID: 108435 Result: Up-regulated in Transcription
  misc_feature: MA Experiment 108435 PARAMETER Experiment Name: At_stm_Mutants_cDNA_P Parameter: Plant Line Value: wt Landsburg vs stm
  misc_feature: MA Experiment 108435 PARAMETER Experiment Name: At_stm_Mutants_cDNA_P Parameter: Tissue Value: Shoot Apical Meristem Region
  misc_feature: MA Experiment ID: 108461 Result: Down-regulated in Transcription
  misc_feature: MA Experiment 108461 PARAMETER Experiment Name: At_Germinating_Seeds_cDNA_P Parameter: Age (day) Value: 1 vs. 0
  misc_feature: MA Experiment 108461 PARAMETER Experiment Name: At_Germinating_Seeds_cDNA_P Parameter: Tissue Value: Germinating Seeds
  misc_feature: MA Experiment ID: 108569 Result: Up-regulated in Transcription
  misc_feature: MA Experiment 108569 PARAMETER Experiment Name: At_0.001%_MeJA__cDNA_P Parameter: Timepoint (hr) Value: 6
  misc_feature: MA Experiment 108569 PARAMETER Experiment Name: At_0.001%_MeJA__cDNA_P Parameter: Tissue Value: Aerial
  misc_feature: MA Experiment 108569 PARAMETER Experiment Name: At_0.001%_MeJA__cDNA_P Parameter: Treatment Value: 0.001% MeJA vs. No Treatment
  misc_feature: MA Experiment ID: 108573 Result: Up-regulated in Transcription
  misc_feature: MA Experiment 108573 PARAMETER Experiment Name: At_Drought_cDNA_P Parameter: Timepoint (hr) Value: 6
  misc_feature: MA Experiment 108573 PARAMETER Experiment Name: At_Drought_cDNA_P Parameter: Tissue Value: Aerial
  misc_feature: MA Experiment 108573 PARAMETER Experiment Name: At_Drought_cDNA_P Parameter: Treatment Value: Drought vs. No Drought
  misc_feature: MA Experiment ID: 108576 Result: Up-regulated in Transcription
  misc_feature: MA Experiment 108576 PARAMETER Experiment Name: At_42deg_Heat_cDNA_P Parameter: Temperature (deg C) Value: 42 vs. 22
  misc_feature: MA Experiment 108576 PARAMETER Experiment Name: At_42deg_Heat_cDNA_P Parameter: Timepoint (hr) Value: 1
  misc_feature: MA Experiment 108576 PARAMETER Experiment Name: At_42deg_Heat_cDNA_P Parameter: Tissue Value: Aerial
  misc_feature: MA Experiment ID: 108577 Result: Up-regulated in Transcription
  misc_feature: MA Experiment 108577 PARAMETER Experiment Name: At_42deg_Heat_cDNA_P Parameter: Temperature (deg C) Value: 42 vs. 22
  misc_feature: MA Experiment 108577 PARAMETER Experiment Name: At_42deg_Heat_cDNA_P Parameter: Timepoint (hr) Value: 6
  misc_feature: MA Experiment 108577 PARAMETER Experiment Name: At_42deg_Heat_cDNA_P Parameter: Tissue Value: Aerial
  misc_feature: MA Experiment ID: 108585 Result: Up-regulated in Transcription
  misc_feature: MA Experiment 108585 PARAMETER Experiment Name: At_5mM_NaNP_cDNA_P Parameter: Timepoint (hr) Value: 6
  misc_feature: MA Experiment 108585 PARAMETER Experiment Name: At_5mM_NaNP_cDNA_P Parameter: Tissue Value: Aerial
  misc_feature: MA Experiment 108585 PARAMETER Experiment Name: At_5mM_NaNP_cDNA_P Parameter: Treatment Value: null
  misc_feature: MA Experiment ID: 20000087 Result: Down-regulated in Transcription
  misc_feature: MA Experiment 20000087 PARAMETER Experiment Name: At_100uM_ABA_Mutants_cDNA_P Parameter: Plant Line Value: WS
  misc_feature: MA Experiment 20000087 PARAMETER Experiment Name: At_100uM_ABA_Mutants_cDNA_P Parameter: Timepoint (hr) Value: 6
  misc_feature: MA Experiment 20000087 PARAMETER Experiment Name: At_100uM_ABA_Mutants_cDNA_P Parameter: Tissue Value: Aerial
  misc_feature: MA Experiment 20000087 PARAMETER Experiment Name: At_100uM_ABA_Mutants_cDNA_P Parameter: Treatment Value: 100uM ABA vs. No Treatment
  misc_feature: MA Experiment ID: 20000088 Result: Up-regulated in Transcription
  misc_feature: MA Experiment 20000088 PARAMETER Experiment Name: At_100uM_ABA_Mutants_cDNA_P Parameter: Plant Line Value: Landsberg
  misc_feature: MA Experiment 20000088 PARAMETER Experiment Name: At_100uM_ABA_Mutants_cDNA_P Parameter: Timepoint (hr) Value: 6
  misc_feature: MA Experiment 20000088 PARAMETER Experiment Name: At_100uM_ABA_Mutants_cDNA_P Parameter: Tissue Value: Aerial
  misc_feature: MA Experiment 20000088 PARAMETER Experiment Name: At_100uM_ABA_Mutants_cDNA_P Parameter: Treatment Value: 100uM ABA vs. No Treatment
  misc_feature: MA Experiment ID: 20000111 Result: Up-regulated in Transcription
  misc_feature: MA Experiment 20000111 PARAMETER Experiment Name: At_42deg_Heat_cDNA_P Parameter: Temperature (deg C) Value: 42 vs. 22
  misc_feature: MA Experiment 20000111 PARAMETER Experiment Name: At_42deg_Heat_cDNA_P Parameter: Timepoint (hr) Value: 6
  misc_feature: MA Experiment 20000111 PARAMETER Experiment Name: At_42deg_Heat_cDNA_P Parameter: Tissue Value: Aerial
  misc_feature: MA Experiment ID: 20000112 Result: Up-regulated in Transcription
  misc_feature: MA Experiment 20000112 PARAMETER Experiment Name: At_42deg_Heat_cDNA_P Parameter: Temperature (deg C) Value: 42 vs. 22
  misc_feature: MA Experiment 20000112 PARAMETER Experiment Name: At_42deg_Heat_cDNA_P Parameter: Timepoint (hr) Value: 2
  misc_feature: MA Experiment 20000112 PARAMETER Experiment Name: At_42deg_Heat_cDNA_P Parameter: Tissue Value: Aerial
  misc_feature: MA Experiment ID: 20000144 Result: Up-regulated in Transcription
  misc_feature: MA Experiment 20000144 PARAMETER Experiment Name: At_42deg_Heat_cDNA_P Parameter: Temperature (deg C) Value: 42 vs. 22
  misc_feature: MA Experiment 20000144 PARAMETER Experiment Name: At_42deg_Heat_cDNA_P Parameter: Timepoint (hr) Value: 1
  misc_feature: MA Experiment 20000144 PARAMETER Experiment Name: At_42deg_Heat_cDNA_P Parameter: Tissue Value: Aerial
  misc_feature: MA Experiment ID: 20000224 Result: Down-regulated in Transcription

SEQ ID NO: 92273 - protein, 852 aa, Arabidopsis thaliana; identical to SEQ ID NO: 88517
  peptide (1)..(852): Ceres Seq. ID no. 12710166
  misc_feature (53)..(852): Homolog of NCBI NO: 39587267 NR Description: Hypothetical protein CBG00746 [Caenorhabditis
  misc_feature (53)..(852): Homolog of NCBI NO: 39597425 NR Description: Hypothetical protein CBG03070 [Caenorhabditis
  misc_feature (41)..(503): Homolog of NCBI NO: 23612492 NR Description: cell division cycle ATPase, putative [Plasmodium
  misc_feature (473)..(808): Homolog of NCBI NO: 23612492 NR Description: cell division cycle ATPase, putative [Plasmodium
  misc_feature (53)..(556): Homolog of NCBI NO: 23481659 NR Description: putative cell division cycle ATPase [Plasmodium
  misc_feature (476)..(808): Homolog of NCBI NO: 23481659 NR Description: putative cell division cycle ATPase [Plasmodium
  misc_feature (72)..(761): Homolog of NCBI NO: 15669345 NR Description: cell division control protein 48 (cdc48), AAA [Methanococcus jannaschii] >gi|2492505|sp|Q58556|YB56_METJA Cell cycle protein 48 homolog MJ1156 >gi|2118117|pir||C64444 cell
  misc_feature (100)..(810): Homolog of NCBI NO: 30088847 NR Description: AAA family ATPase [Sulfolobus acidocaldarius]
  misc_feature (441)..(813): Homolog of NCBI NO: 14590568 NR Description: cell division control protein (transitional reticulum ATPase) [Pyrococcus horikoshii] >gi|7435754|pir||H71114
  misc_feature (203)..(446): Homolog of NCBI NO: 14590568 NR Description: cell division control protein (transitional reticulum ATPase) [Pyrococcus horikoshii] >gi|7435754|pir||H71114

SEQ ID NO: 92274 - protein, 761 aa, Arabidopsis thaliana; identical to SEQ ID NO: 42290
  peptide (1)..(761): Ceres Seq. ID no. 12710167
  misc_feature (1)..(761): Homolog of NCBI NO: 39587267 NR Description: Hypothetical protein CBG00746 [Caenorhabditis
  misc_feature (1)..(761): Homolog of NCBI NO: 39597425 NR Description: Hypothetical protein CBG03070 [Caenorhabditis
  misc_feature (1)..(412): Homolog of NCBI NO: 23612492 NR Description: cell division cycle ATPase, putative [Plasmodium
  misc_feature (382)..(717): Homolog of NCBI NO: 23612492 NR Description: cell division cycle ATPase, putative [Plasmodium
  misc_feature (1)..(465): Homolog of NCBI NO: 23481659 NR Description: putative cell division cycle ATPase [Plasmodium
  misc_feature (385)..(717): Homolog of NCBI NO: 23481659 NR Description: putative cell division cycle ATPase [Plasmodium
  misc_feature (1)..(670): Homolog of NCBI NO: 15669345 NR Description: cell division control protein 48 (cdc48), AAA [Methanococcus jannaschii] >gi|2492505|sp|Q58556|YB56_METJA Cell cycle protein 48 homolog MJ1156 >gi|2118117|pir||C64444 cell
  misc_feature (9)..(719): Homolog of NCBI NO: 30088847 NR Description: AAA family ATPase [Sulfolobus acidocaldarius]
  misc_feature (350)..(722): Homolog of NCBI NO: 14590568 NR Description: cell division control protein (transitional reticulum ATPase) [Pyrococcus horikoshii] >gi|7435754|pir||H71114
  misc_feature (112)..(355): Homolog of NCBI NO: 14590568 NR Description: cell division control protein (transitional reticulum ATPase) [Pyrococcus horikoshii] >gi|7435754|pir||H71114

SEQ ID NO: 92275 - protein, 723 aa, Arabidopsis thaliana; identical to SEQ ID NO: 42291
  peptide (1)..(723): Ceres Seq. ID no. 12710168
  misc_feature (1)..(723): Homolog of NCBI NO: 39587267 NR Description: Hypothetical protein CBG00746 [Caenorhabditis
  misc_feature (1)..(723): Homolog of NCBI NO: 39597425 NR Description: Hypothetical protein CBG03070 [Caenorhabditis
  misc_feature (1)..(374): Homolog of NCBI NO: 23612492 NR Description: cell division cycle ATPase, putative [Plasmodium
  misc_feature (344)..(679): Homolog of NCBI NO: 23612492 NR Description: cell division cycle ATPase, putative [Plasmodium
  misc_feature (1)..(427): Homolog of NCBI NO: 23481659 NR Description: putative cell division cycle ATPase [Plasmodium
  misc_feature (347)..(679): Homolog of NCBI NO: 23481659 NR Description: putative cell division cycle ATPase [Plasmodium
  misc_feature (1)..(632): Homolog of NCBI NO: 15669345 NR Description: cell division control protein 48 (cdc48), AAA [Methanococcus jannaschii] >gi|2492505|sp|Q58556|YB56_METJA Cell cycle protein 48 homolog MJ1156 >gi|2118117|pir||C64444 cell
  misc_feature (1)..(681): Homolog of NCBI NO: 30088847 NR Description: AAA family ATPase [Sulfolobus acidocaldarius]
  misc_feature (312)..(684): Homolog of NCBI NO: 14590568 NR Description: cell division control protein (transitional reticulum ATPase) [Pyrococcus horikoshii] >gi|7435754|pir||H71114
  misc_feature (74)..(317): Homolog of NCBI NO: 14590568 NR Description: cell division control protein (transitional reticulum ATPase) [Pyrococcus horikoshii] >gi|7435754|pir||H71114

SEQ ID NO: 92276 - DNA, 588 bp, Arabidopsis thaliana; identical to SEQ ID NO: 88520
  misc_feature (1)..(588): Ceres Seq. ID no. 12710245
  misc_feature: MA Experiment ID: 20000355 Result: Up-regulated in Transcription
  misc_feature: MA Experiment 20000355 PARAMETER Experiment Name: At_Siliques_Sub_P Parameter: Age (day) Value: 21
  misc_feature: MA Experiment 20000355 PARAMETER Experiment Name: At_Siliques_Sub_P Parameter: Organism Value: A. thaliana
  misc_feature: MA Experiment 20000355 PARAMETER Experiment Name: At_Siliques_Sub_P Parameter: Plant Line Value: WS
  misc_feature: MA Experiment 20000355 PARAMETER Experiment Name: At_Siliques_Sub_P Parameter: Tissue Value: Less Than 5mm Siliques vs. Whole Plant
  misc_feature: MA Experiment ID: 20000440 Result: Up-regulated in Transcription
  misc_feature: MA Experiment 20000440 PARAMETER Experiment Name: At_Closed-Flower__Sub_P Parameter: Tissue Value: Closed Flower vs. Whole Plant
  misc_feature: MA Experiment ID: 20001807 Result: Up-regulated in Transcription
  misc_feature: MA Experiment 20001807 PARAMETER Experiment Name: At_50mM_NH4NO3_L-to-H_Sub_P Parameter: Timepoint (hr) Value: 6
  misc_feature: MA Experiment 20001807 PARAMETER Experiment Name: At_50mM_NH4NO3_L-to-H_Sub_P Parameter: Tissue Value: Leaf
  misc_feature: MA Experiment 20001807 PARAMETER Experiment Name: At_50mM_NH4NO3_L-to-H_Sub_P Parameter: Treatment Value: 50mM NH4NO3 vs 100mM Mannitol

SEQ ID NO: 92277 - protein, 195 aa, Arabidopsis thaliana; identical to SEQ ID NO: 88521
  peptide (1)..(195): Ceres Seq. ID no. 12710246
  misc_feature (1)..(195): Homolog of NCBI NO: 26453042 NR Description: unknown protein [Arabidopsis thaliana]
  misc_feature (57)..(195): Homolog of NCBI NO: 22328703 NR Description: similar to GATA zinc finger protein; protein id:
  misc_feature (4)..(194): Homolog of NCBI NO: 15228899 NR Description: GATA zinc finger protein; protein id: At3g16870.1 thaliana] >gi|11994746|dbj|BAB03075.1| gene_id:MUH15.3~unknown
  misc_feature (1)..(150): Homolog of NCBI NO: 22328703 NR Description: similar to GATA zinc finger protein; protein id:
  misc_feature (6)..(102): Homolog of NCBI NO: 18397703 NR Description: GATA zinc finger protein; protein id: supported by cDNA: 110655., supported by cDNA: gi_17380939, by cDNA: gi_20258946 [Arabidopsis thaliana]
  misc_feature (12)..(102): Homolog of NCBI NO: 7549639 NR Description: hypothetical protein [Arabidopsis thaliana]
  misc_feature (12)..(102): Homolog of NCBI NO: 21536761 NR Description: unknown [Arabidopsis thaliana]
  misc_feature (31)..(88): Homolog of NCBI NO: 15239847 NR Description: GATA zinc finger protein; protein id: At5g49300.1 thaliana] >gi|10177159|dbj|BAB10348.1|
  misc_feature (17)..(102): Homolog of NCBI NO: 34897256 NR Description: putative zinc finger protein [Oryza sativa
  misc_feature (7)..(195): Homolog of NCBI NO: 15241967 NR Description: GATA zinc finger protein; protein id: supported by cDNA: 110454., supported by cDNA: gi_17473546 thaliana] >gi|8809654|dbj|BAA97205.1|

SEQ ID NO: 92278 - protein, 193 aa, Arabidopsis thaliana; identical to SEQ ID NO: 88522
  peptide (1)..(193): Ceres Seq. ID no. 12710247
  misc_feature (1)..(193): Homolog of NCBI NO: 26453042 NR Description: unknown protein [Arabidopsis thaliana]
  misc_feature (55)..(193): Homolog of NCBI NO: 22328703 NR Description: similar to GATA zinc finger protein; protein id:
  misc_feature (2)..(192): Homolog of NCBI NO: 15228899 NR Description: GATA zinc finger protein; protein id: At3g16870.1 thaliana] >gi|11994746|dbj|BAB03075.1| gene_id:MUH15.3~unknown
  misc_feature (1)..(148): Homolog of NCBI NO: 22328703 NR Description: similar to GATA zinc finger protein; protein id:
  misc_feature (4)..(100): Homolog of NCBI NO: 18397703 NR Description: GATA zinc finger protein; protein id: supported by cDNA: 110655., supported by cDNA: gi_17380939, by cDNA: gi_20258946 [Arabidopsis thaliana]
  misc_feature (10)..(100): Homolog of NCBI NO: 7549639 NR Description: hypothetical protein [Arabidopsis thaliana]
  misc_feature (10)..(100): Homolog of NCBI NO: 21536761 NR Description: unknown [Arabidopsis thaliana]
  misc_feature (29)..(86): Homolog of NCBI NO: 15239847 NR Description: GATA zinc finger protein; protein id: At5g49300.1 thaliana] >gi|10177159|dbj|BAB10348.1|
  misc_feature (15)..(100): Homolog of NCBI NO: 34897256 NR Description: putative zinc finger protein [Oryza sativa
  misc_feature (5)..(193): Homolog of NCBI NO: 15241967 NR Description: GATA zinc finger protein; protein id: supported by cDNA: 110454., supported by cDNA: gi_17473546 thaliana] >gi|8809654|dbj|BAA97205.1|

SEQ ID NO: 92279 - DNA, 2730 bp, Arabidopsis thaliana; identical to SEQ ID NO: 88523
  misc_feature (1)..(2730): Ceres Seq. ID no. 12710256
  misc_feature: MA Experiment ID: 20000184 Result: Down-regulated in Transcription
  misc_feature: MA Experiment 20000184 PARAMETER Experiment Name: At_Shoots__P Parameter: Age (day) Value: 7
  misc_feature: MA Experiment 20000184 PARAMETER Experiment Name: At_Shoots__P Parameter: Tissue Value: Shoots vs. Whole Plant
  misc_feature: MA Experiment ID: 20000265 Result: Down-regulated in Transcription
  misc_feature: MA Experiment 20000265 PARAMETER Experiment Name: At_Open_Flower_P Parameter: Age (day) Value: 21
  misc_feature: MA Experiment 20000265 PARAMETER Experiment Name: At_Open_Flower_P Parameter: Plant Line Value: WS
  misc_feature: MA Experiment 20000265 PARAMETER Experiment Name: At_Open_Flower_P Parameter: Tissue Value: Closed Flower vs. Whole Plant

SEQ ID NO: 92280 - protein, 909 aa, Arabidopsis thaliana; identical to SEQ ID NO: 88524
  peptide (1)..(909): Ceres Seq. ID no. 12710257
  misc_feature (369)..(460): Pfam Name: IPT/TIG domain Pfam Description: IPT/TIG domain
  misc_feature (298)..(908): Homolog of NCBI NO: 15228914 NR Description: calmodulin-binding protein; protein id:
  misc_feature (1)..(177): Homolog of NCBI NO: 15228914 NR Description: calmodulin-binding protein; protein id:
  misc_feature (193)..(256): Homolog of NCBI NO: 15228914 NR Description: calmodulin-binding protein; protein id:
  misc_feature (298)..(895): Homolog of NCBI NO: 7670023 NR Description: transcription factor-like protein [Arabidopsis
  misc_feature (1)..(177): Homolog of NCBI NO: 7670023 NR Description: transcription factor-like protein [Arabidopsis
  misc_feature (193)..(256): Homolog of NCBI NO: 7670023 NR Description: transcription factor-like protein [Arabidopsis
  misc_feature (1)..(895): Homolog of NCBI NO: 33146995 NR Description: putative calmodulin-binding protein [Oryza sativa
  misc_feature (297)..(907): Homolog of NCBI NO: 37533660 NR Description: putative calmodulin binding protein similar to
  misc_feature (17)..(140): Homolog of NCBI NO: 37533660 NR Description: putative calmodulin binding protein similar to
  misc_feature (308)..(884): Homolog of NCBI NO: 30681670 NR Description: ethylene-induced calmodulin-binding protein,

SEQ ID NO: 92281 - protein, 882 aa, Arabidopsis thaliana; identical to SEQ ID NO: 88525
  peptide (1)..(882): Ceres Seq. ID no. 12710258
  misc_feature (342)..(433): Pfam Name: IPT/TIG domain Pfam Description: IPT/TIG domain
  misc_feature (271)..(881): Homolog of NCBI NO: 15228914 NR Description: calmodulin-binding protein; protein id:
  misc_feature (1)..(150): Homolog of NCBI NO: 15228914 NR Description: calmodulin-binding protein; protein id:
  misc_feature (166)..(229): Homolog of NCBI NO: 15228914 NR Description: calmodulin-binding protein; protein id:
  misc_feature (271)..(868): Homolog of NCBI NO: 7670023 NR Description: transcription factor-like protein [Arabidopsis
  misc_feature (1)..(150): Homolog of NCBI NO: 7670023 NR Description: transcription factor-like protein [Arabidopsis
  misc_feature (166)..(229): Homolog of NCBI NO: 7670023 NR Description: transcription factor-like protein [Arabidopsis
  misc_feature (1)..(868): Homolog of NCBI NO: 33146995 NR Description: putative calmodulin-binding protein [Oryza sativa
  misc_feature (270)..(880): Homolog of NCBI NO: 37533660 NR Description: putative calmodulin binding protein similar to
  misc_feature (1)..(113): Homolog of NCBI NO: 37533660 NR Description: putative calmodulin binding protein similar to
  misc_feature (281)..(857): Homolog of NCBI NO: 30681670 NR Description: ethylene-induced calmodulin-binding protein,

SEQ ID NO: 92282 - protein, 841 aa, Arabidopsis thaliana; identical to SEQ ID NO: 88526
  peptide (1)..(841): Ceres Seq. ID no. 12710259
  misc_feature (301)..(392): Pfam Name: IPT/TIG domain Pfam Description: IPT/TIG domain
  misc_feature (230)..(840): Homolog of NCBI NO: 15228914 NR Description: calmodulin-binding protein; protein id:
  misc_feature (1)..(109): Homolog of NCBI NO: 15228914 NR Description: calmodulin-binding protein; protein id:
  misc_feature (125)..(188): Homolog of NCBI NO: 15228914 NR Description: calmodulin-binding protein; protein id:
  misc_feature (230)..(827): Homolog of NCBI NO: 7670023 NR Description: transcription factor-like protein [Arabidopsis
  misc_feature (1)..(109): Homolog of NCBI NO: 7670023 NR Description: transcription factor-like protein [Arabidopsis
  misc_feature (125)..(188): Homolog of NCBI NO: 7670023 NR Description: transcription factor-like protein [Arabidopsis
  misc_feature (1)..(827): Homolog of NCBI NO: 33146995 NR Description: putative calmodulin-binding protein [Oryza sativa
  misc_feature (229)..(839): Homolog of NCBI NO: 37533660 NR Description: putative calmodulin binding protein similar to
  misc_feature (1)..(72): Homolog of NCBI NO: 37533660 NR Description: putative calmodulin binding protein similar to
  misc_feature (240)..(816): Homolog of NCBI NO: 30681670 NR Description: ethylene-induced calmodulin-binding protein,

SEQ ID NO: 92283 - DNA, 1083 bp, Arabidopsis thaliana; identical to SEQ ID NO: 88527
  misc_feature (1)..(1083): Ceres Seq. ID no. 12710287
  misc_feature: MA Experiment ID: 20000179 Result: Up-regulated in Transcription
  misc_feature: MA Experiment 20000179 PARAMETER Experiment Name: At_Germinating_Seeds_P Parameter: Age (hr) Value: 6 vs. 0
  misc_feature: MA Experiment 20000179 PARAMETER Experiment Name: At_Germinating_Seeds_P Parameter: Tissue Value: Germinating Seeds
  misc_feature: MA Experiment ID: 20000180 Result: Up-regulated in Transcription
  misc_feature: MA Experiment 20000180 PARAMETER Experiment Name: At_Germinating_Seeds_P Parameter: Age (hr) Value: 24 vs. 0
  misc_feature: MA Experiment 20000180 PARAMETER Experiment Name: At_Germinating_Seeds_P Parameter: Tissue Value: Germinating Seeds
  misc_feature: MA Experiment ID: 20000451 Result: Up-regulated in Transcription
  misc_feature: MA Experiment 20000451 PARAMETER Experiment Name: At_CS6879_Shoots-Roots_P Parameter: Age (day) Value: 14
  misc_feature: MA Experiment 20000451 PARAMETER Experiment Name: At_CS6879_Shoots-Roots_P Parameter: Organism Value: A. thaliana
  misc_feature: MA Experiment 20000451 PARAMETER Experiment Name: At_CS6879_Shoots-Roots_P Parameter: Plant Line Value: CS6879 vs. WS
  misc_feature: MA Experiment 20000451 PARAMETER Experiment Name: At_CS6879_Shoots-Roots_P Parameter: Tissue Value: Roots

SEQ ID NO: 92284 - protein, 360 aa, Arabidopsis thaliana; identical to SEQ ID NO: 88528
  peptide (1)..(360): Ceres Seq. ID no. 12710288
  misc_feature (32)..(123): Pfam Name: GDSL-like Lipase/Acylhydrolase Pfam Description: GDSL-like Lipase/Acylhydrolase
  misc_feature (194)..(360): Homolog of NCBI NO: 15234857 NR Description: proline-rich, APG like protein; protein id:
  misc_feature (1)..(123): Homolog of NCBI NO: 15234857 NR Description: proline-rich, APG like protein; protein id:
  misc_feature (1)..(356): Homolog of NCBI NO: 34899288 NR Description: similar to GDSL-motif lipase/hydrolase [Oryza
  misc_feature (25)..(356): Homolog of NCBI NO: 15227849 NR Description: putative GDSL-motif lipase/hydrolase; protein id:
  misc_feature (18)..(356): Homolog of NCBI NO: 15229742 NR Description: putative protein; protein id: At3g50400.1 thaliana] >gi|7630026|emb|CAB88323.1| putative protein thaliana] >gi|26450386|dbj|BAC42308.1| unknown protein
  misc_feature (203)..(290): Homolog of NCBI NO: 15234857 NR Description: proline-rich, APG like protein; protein id:
  misc_feature (14)..(353): Homolog of NCBI NO: 38345537 NR Description: OSJNBa0020J04.12 [Oryza sativa (japonica
  misc_feature (2)..(356): Homolog of NCBI NO: 15220514 NR Description: lipase/hydrolase, putative; protein id: supported by cDNA: 23556., supported by cDNA: gi_18086454
  misc_feature (2)..(356): Homolog of NCBI NO: 21592417 NR Description: lipase/hydrolase, putative [Arabidopsis thaliana]
  misc_feature (31)..(356): Homolog of NCBI NO: 15238210 NR Description: GDSL-motif lipase/hydrolase-like protein; protein

SEQ ID NO: 92285 - DNA, 1250 bp, Arabidopsis thaliana; identical to SEQ ID NO: 88529
  misc_feature (1)..(1250): Ceres Seq. ID no. 12710302
  misc_feature: MA Experiment ID: 108434 Result: Down-regulated in Transcription
  misc_feature: MA Experiment 108434 PARAMETER Experiment Name: At_Root_Tips_cDNA_P Parameter: Tissue Value: Root Tips
  misc_feature: MA Experiment ID: 108469 Result: Up-regulated in Transcription
  misc_feature: MA Experiment ID: 108577 Result: Down-regulated in Transcription
  misc_feature: MA Experiment 108577 PARAMETER Experiment Name: At_42deg_Heat_cDNA_P Parameter: Temperature (deg C) Value: 42 vs. 22
  misc_feature: MA Experiment 108577 PARAMETER Experiment Name: At_42deg_Heat_cDNA_P Parameter: Timepoint (hr) Value: 6
  misc_feature: MA Experiment 108577 PARAMETER Experiment Name: At_42deg_Heat_cDNA_P Parameter: Tissue Value: Aerial
  misc_feature: MA Experiment ID: 108585 Result: Up-regulated in Transcription
  misc_feature: MA Experiment 108585 PARAMETER Experiment Name: At_5mM_NaNP_cDNA_P Parameter: Timepoint (hr) Value: 6
  misc_feature: MA Experiment 108585 PARAMETER Experiment Name: At_5mM_NaNP_cDNA_P Parameter: Tissue Value: Aerial
  misc_feature: MA Experiment 108585 PARAMETER Experiment Name: At_5mM_NaNP_cDNA_P Parameter: Treatment Value: null
  misc_feature: MA Experiment ID: 108594 Result: Up-regulated in Transcription
  misc_feature: MA Experiment 108594 PARAMETER Experiment Name: At_Ler-rhl_Root_cDNA_P Parameter: Plant Line Value: null
  misc_feature: MA Experiment ID: 108595 Result: Up-regulated in Transcription
  misc_feature: MA Experiment 108595 PARAMETER Experiment Name: At_Ler-pi_Ovule_cDNA_P Parameter: Plant Line Value: null
  misc_feature: MA Experiment ID: 108667 Result: Up-regulated in Transcription
  misc_feature: MA Experiment 108667 PARAMETER Experiment Name: At_2mM_SA_cDNA_P Parameter: Plant Line Value: WS
  misc_feature: MA Experiment 108667 PARAMETER Experiment Name: At_2mM_SA_cDNA_P Parameter: Timepoint (hr) Value: 1
  misc_feature: MA Experiment 108667 PARAMETER Experiment Name: At_2mM_SA_cDNA_P Parameter: Treatment Value: 2mM SA vs. No Treatment
  misc_feature: MA Experiment ID: 108668 Result: Up-regulated in Transcription
  misc_feature: MA Experiment 108668 PARAMETER Experiment Name: At_2mM_SA_cDNA_P Parameter: Plant Line Value: WS
  misc_feature: MA Experiment 108668 PARAMETER Experiment Name: At_2mM_SA_cDNA_P Parameter: Timepoint (hr) Value: 6
  misc_feature: MA Experiment 108668 PARAMETER Experiment Name: At_2mM_SA_cDNA_P Parameter: Treatment Value: 2mM SA vs. No Treatment
  misc_feature: MA Experiment ID: 20000111 Result: Down-regulated in Transcription
  misc_feature: MA Experiment 20000111 PARAMETER Experiment Name: At_42deg_Heat_cDNA_P Parameter: Temperature (deg C) Value: 42 vs. 22
  misc_feature: MA Experiment 20000111 PARAMETER Experiment Name: At_42deg_Heat_cDNA_P Parameter: Timepoint (hr) Value: 6
  misc_feature: MA Experiment 20000111 PARAMETER Experiment Name: At_42deg_Heat_cDNA_P Parameter: Tissue Value: Aerial
  misc_feature: MA Experiment ID: 20000113 Result: Down-regulated in Transcription
  misc_feature: MA Experiment 20000113 PARAMETER Experiment Name: At_42deg_Heat_cDNA_P Parameter: Temperature (deg C) Value: 42 vs. 22
  misc_feature: MA Experiment 20000113 PARAMETER Experiment Name: At_42deg_Heat_cDNA_P Parameter: Timepoint (hr) Value: 8
  misc_feature: MA Experiment 20000113 PARAMETER Experiment Name: At_42deg_Heat_cDNA_P Parameter: Tissue Value: Aerial
  misc_feature: MA Experiment ID: 20000173 Result: Down-regulated in Transcription
  misc_feature: MA Experiment 20000173 PARAMETER Experiment Name: At_42deg_Heat_P Parameter: Age (day) Value: 14
  misc_feature: MA Experiment 20000173 PARAMETER Experiment Name: At_42deg_Heat_P Parameter: Organism Value: A. thaliana
  misc_feature: MA Experiment 20000173 PARAMETER Experiment Name: At_42deg_Heat_P Parameter: Plant Line Value: WS
  misc_feature: MA Experiment 20000173 PARAMETER Experiment Name: At_42deg_Heat_P Parameter: Temperature (deg C) Value: 42 vs. 22
  misc_feature: MA Experiment 20000173 PARAMETER Experiment Name: At_42deg_Heat_P Parameter: Timepoint (hr) Value: 6
  misc_feature: MA Experiment 20000173 PARAMETER Experiment Name: At_42deg_Heat_P Parameter: Tissue Value: Aerial
  misc_feature: MA Experiment ID: 20000182 Result: Up-regulated in Transcription
  misc_feature: MA Experiment 20000182 PARAMETER Experiment Name: At_2mM_SA_P Parameter: Age (day) Value: 14
  misc_feature: MA Experiment 20000182 PARAMETER Experiment Name: At_2mM_SA_P Parameter: Organism Value: A. thaliana
  misc_feature: MA Experiment 20000182 PARAMETER Experiment Name: At_2mM_SA_P Parameter: Plant Line Value: WS
  misc_feature: MA Experiment 20000182 PARAMETER Experiment Name: At_2mM_SA_P Parameter: Timepoint (hr) Value: 6
  misc_feature: MA Experiment 20000182 PARAMETER Experiment Name: At_2mM_SA_P Parameter: Tissue Value: Aerial
  misc_feature: MA Experiment 20000182 PARAMETER Experiment Name: At_2mM_SA_P Parameter: Treatment Value: 2mM SA vs. No Treatment
  misc_feature: MA Experiment ID: 20000184 Result: Down-regulated in Transcription
  misc_feature: MA Experiment 20000184 PARAMETER Experiment Name: At_Shoots__P Parameter: Age (day) Value: 7
  misc_feature: MA Experiment 20000184 PARAMETER Experiment Name: At_Shoots__P Parameter: Tissue Value: Shoots vs. Whole Plant
  misc_feature: MA Experiment ID: 20000185 Result: Down-regulated in Transcription
  misc_feature: MA Experiment 20000185 PARAMETER Experiment Name: At_Roots__P Parameter: Age (day) Value: 7 vs. 21
  misc_feature: MA Experiment 20000185 PARAMETER Experiment Name: At_Roots__P Parameter: Organism Value: A. thaliana
  misc_feature: MA Experiment 20000185 PARAMETER Experiment Name: At_Roots__P Parameter: Tissue Value: Roots vs. Whole Plant
  misc_feature: MA Experiment ID: 20000213 Result: Up-regulated in Transcription
  misc_feature: MA Experiment 20000213 PARAMETER Experiment Name: At_4deg_Cold_P Parameter: Timepoint (hr) Value: 2
  misc_feature: MA Experiment ID: 20000234 Result: Down-regulated in Transcription
  misc_feature: MA Experiment 20000234 PARAMETER Experiment Name: At_Siliques_P Parameter: Age (day) Value: 21
  misc_feature: MA Experiment 20000234 PARAMETER Experiment Name: At_Siliques_P Parameter: Organism Value: A. thaliana
  misc_feature: MA Experiment 20000234 PARAMETER Experiment Name: At_Siliques_P Parameter: Plant Line Value: WS
  misc_feature: MA Experiment 20000234 PARAMETER Experiment Name: At_Siliques_P Parameter: Tissue Value: Less Than 5mm Siliques vs. Whole Plant
  misc_feature: MA Experiment ID: 20000235 Result: Down-regulated in Transcription
  misc_feature: MA Experiment 20000235 PARAMETER Experiment Name: At_Siliques_P Parameter: Age (day) Value: 21
  misc_feature: MA Experiment 20000235 PARAMETER Experiment Name: At_Siliques_P Parameter: Organism Value: A. thaliana
  misc_feature: MA Experiment 20000235 PARAMETER Experiment Name: At_Siliques_P Parameter: Plant Line Value: WS
  misc_feature: MA Experiment 20000235 PARAMETER Experiment Name: At_Siliques_P Parameter: Tissue Value: 5-10mm Siliques vs. Whole Plant
  misc_feature: MA Experiment ID: 20000264 Result: Down-regulated in Transcription
  misc_feature: MA Experiment 20000264 PARAMETER Experiment Name: At_Open_Flower_P Parameter: Age (day) Value: 21
  misc_feature: MA Experiment 20000264 PARAMETER Experiment Name: At_Open_Flower_P Parameter: Plant Line Value: WS
  misc_feature: MA Experiment 20000264 PARAMETER Experiment Name: At_Open_Flower_P Parameter: Tissue Value: Open Flower vs. Whole Plant
  misc_feature: MA Experiment ID: 20000265 Result: Down-regulated in Transcription
  misc_feature: MA Experiment 20000265 PARAMETER Experiment Name: At_Open_Flower_P Parameter: Age (day) Value: 21
  misc_feature: MA Experiment 20000265 PARAMETER Experiment Name: At_Open_Flower_P Parameter: Plant Line Value: WS
  misc_feature: MA Experiment 20000265 PARAMETER Experiment Name: At_Open_Flower_P Parameter: Tissue Value: Closed Flower vs. Whole Plant
  misc_feature: MA Experiment ID: 20000268 Result: Down-regulated in Transcription
  misc_feature: MA Experiment 20000268 PARAMETER Experiment Name: At_100mM_NaCl__P Parameter: Age (day) Value: 14
  misc_feature: MA Experiment 20000268 PARAMETER Experiment Name: At_100mM_NaCl__P Parameter: Organism Value: A. thaliana
  misc_feature: MA Experiment 20000268 PARAMETER Experiment Name: At_100mM_NaCl__P Parameter: Plant Line Value: WS
  misc_feature: MA Experiment 20000268 PARAMETER Experiment Name: At_100mM_NaCl__P Parameter: Timepoint (hr) Value: 6
  misc_feature: MA Experiment 20000268 PARAMETER Experiment Name: At_100mM_NaCl__P Parameter: Tissue Value: Whole Plant
  misc_feature: MA Experiment 20000268 PARAMETER Experiment Name: At_100mM_NaCl__P Parameter: Treatment Value: 100mM NaCl vs. No Treatment
  misc_feature: MA Experiment ID: 20000286 Result: Down-regulated in Transcription
  misc_feature: MA Experiment 20000286 PARAMETER Experiment Name: At_Open_Flower_P Parameter: Age (day) Value: 21
  misc_feature: MA Experiment 20000286 PARAMETER Experiment Name: At_Open_Flower_P Parameter: Plant Line Value: WS
  misc_feature: MA Experiment 20000286 PARAMETER Experiment Name: At_Open_Flower_P Parameter: Tissue Value: Half Open vs. Whole Plant
  misc_feature: MA Experiment ID: 20000438 Result: Down-regulated in Transcription
  misc_feature: MA Experiment 20000438 PARAMETER Experiment Name: At_Shoots__P Parameter: Age (day) Value: 14
  misc_feature: MA Experiment 20000438 PARAMETER Experiment Name: At_Shoots__P Parameter: Tissue Value: Shoots vs. Whole Plant
  misc_feature: MA Experiment ID: 20000439 Result: Down-regulated in Transcription
  misc_feature: MA Experiment 20000439 PARAMETER Experiment Name: At_Roots__P Parameter: Age (day) Value: 14 vs. 21
  misc_feature: MA Experiment 20000439 PARAMETER Experiment Name: At_Roots__P Parameter: Organism Value: A. thaliana
  misc_feature: MA Experiment 20000439 PARAMETER Experiment Name: At_Roots__P Parameter: Tissue Value: Roots vs. Whole Plant
  misc_feature: MA Experiment ID: 20000441 Result: Up-regulated in Transcription
  misc_feature: MA Experiment 20000441 PARAMETER Experiment Name: At_1uM_BR-BRZ__P Parameter: Tissue Value: Shoot Apices
  misc_feature: MA Experiment 20000441 PARAMETER Experiment Name: At_1uM_BR-BRZ__P Parameter: Treatment Value: 1uM BR vs. No Treatment
  misc_feature: MA Experiment ID: 20000460 Result: Up-regulated in Transcription
  misc_feature: MA Experiment 20000460 PARAMETER Experiment Name: At_10percent_PEG_P Parameter: Age (day) Value: 12
  misc_feature: MA Experiment 20000460 PARAMETER Experiment Name: At_10percent_PEG_P Parameter: Organism Value: A. thaliana
  misc_feature: MA Experiment 20000460 PARAMETER Experiment Name: At_10percent_PEG_P Parameter: Plant Line Value: WS
  misc_feature: MA Experiment 20000460 PARAMETER Experiment Name: At_10percent_PEG_P Parameter: Timepoint (day) Value: 12
  misc_feature: MA Experiment 20000460 PARAMETER Experiment Name: At_10percent_PEG_P Parameter: Tissue Value: Whole Plant
  misc_feature: MA Experiment 20000460 PARAMETER Experiment Name: At_10percent_PEG_P Parameter: Treatment Value: 10percent PEG vs. No Treatment
  misc_feature: MA Experiment ID: 20000573 Result: Down-regulated in Transcription
  misc_feature: MA Experiment 20000573 PARAMETER Experiment Name: At_100uM_ABA_Mutants__P Parameter: Organism Value: A. thaliana
  misc_feature: MA Experiment 20000573 PARAMETER Experiment Name: At_100uM_ABA_Mutants__P Parameter: Plant Line Value: CS22 vs. Ler wt
  misc_feature: MA Experiment 20000573 PARAMETER Experiment Name: At_100uM_ABA_Mutants__P Parameter: Timepoint (hr) Value: N/A
  misc_feature: MA Experiment 20000573 PARAMETER Experiment Name: At_100uM_ABA_Mutants__P Parameter: Tissue Value: Whole Plant
  misc_feature: MA Experiment 20000573 PARAMETER Experiment Name: At_100uM_ABA_Mutants__P Parameter: Treatment Value: None
  misc_feature: MA Experiment ID: 20000794 Result: Down-regulated in Transcription
  misc_feature: MA Experiment 20000794 PARAMETER Experiment Name: At_Petals_P Parameter: Age (day) Value: 23-25 days
  misc_feature: MA Experiment 20000794 PARAMETER Experiment Name: At_Petals_P Parameter: Plant Line Value: WS
  misc_feature: MA Experiment 20000794 PARAMETER Experiment Name: At_Petals_P Parameter: Tissue Value: Petals vs. Whole plant
  misc_feature: MA Experiment ID: 20001247 Result: Up-regulated in Transcription
  misc_feature: MA Experiment 20001247 PARAMETER Experiment Name: At_Far-red-induction_P Parameter: Age (day) Value: 7
  misc_feature: MA Experiment 20001247 PARAMETER Experiment Name: At_Far-red-induction_P Parameter: Light Value: Far-red vs. White
  misc_feature: MA Experiment 20001247 PARAMETER Experiment Name: At_Far-red-induction_P Parameter: Organism Value: A. thaliana
  misc_feature: MA Experiment 20001247 PARAMETER Experiment Name: At_Far-red-induction_P Parameter: Plant Line Value: Columbia
  misc_feature: MA Experiment 20001247 PARAMETER Experiment Name: At_Far-red-induction_P Parameter: Timepoint (hr) Value: 1
  misc_feature: MA Experiment 20001247 PARAMETER Experiment Name: At_Far-red-induction_P Parameter: Tissue Value: Whole Plant
  misc_feature: MA Experiment ID: 20001451 Result: Down-regulated in Transcription
  misc_feature: MA Experiment 20001451 PARAMETER Experiment Name: At_Far-red-induction_P Parameter: Age (day) Value: 7
  misc_feature: MA Experiment 20001451 PARAMETER Experiment Name: At_Far-red-induction_P Parameter: Light Value: Far-red vs. White
  misc_feature: MA Experiment 20001451 PARAMETER Experiment Name: At_Far-red-induction_P Parameter: Organism Value: A. thaliana
  misc_feature: MA Experiment 20001451 PARAMETER Experiment Name: At_Far-red-induction_P Parameter: Plant Line Value: Columbia
  misc_feature: MA Experiment 20001451 PARAMETER Experiment Name: At_Far-red-induction_P Parameter: Timepoint (hr) Value: 24
  misc_feature: MA Experiment 20001451 PARAMETER Experiment Name: At_Far-red-induction_P Parameter: Tissue Value: Whole Plant
  misc_feature: MA Experiment ID: 20001555 Result: Down-regulated in Transcription
  misc_feature: MA Experiment 20001555 PARAMETER Experiment Name: At_Drought_Soil_Dry_P Parameter: Age (day) Value: 24
  misc_feature: MA Experiment 20001555 PARAMETER Experiment Name: At_Drought_Soil_Dry_P Parameter: Organism Value: A. thaliana
  misc_feature: MA Experiment 20001555 PARAMETER Experiment Name: At_Drought_Soil_Dry_P Parameter: Plant Line Value: WS
  misc_feature: MA Experiment 20001555 PARAMETER Experiment Name: At_Drought_Soil_Dry_P Parameter: Post Timepoint (hr) Value: None
  misc_feature: MA Experiment 20001555 PARAMETER Experiment Name: At_Drought_Soil_Dry_P Parameter: Post-Treatment Value: None
  misc_feature: MA Experiment 20001555 PARAMETER Experiment Name: At_Drought_Soil_Dry_P Parameter: Timepoint (day) Value: 10
  misc_feature: MA Experiment 20001555 PARAMETER Experiment Name: At_Drought_Soil_Dry_P Parameter: Treatment Value: Drought vs. No Drought
  misc_feature: MA Experiment ID: 20001556 Result: Down-regulated in Transcription
  misc_feature: MA Experiment 20001556 PARAMETER Experiment Name: At_Drought_Soil_Dry_P Parameter: Age (day) Value: 26
  misc_feature: MA Experiment 20001556 PARAMETER Experiment Name: At_Drought_Soil_Dry_P Parameter: Organism Value: A. thaliana
  misc_feature: MA Experiment 20001556 PARAMETER Experiment Name: At_Drought_Soil_Dry_P Parameter: Plant Line Value: WS
  misc_feature: MA Experiment 20001556 PARAMETER Experiment Name: At_Drought_Soil_Dry_P Parameter: Post Timepoint (hr) Value: None
  misc_feature: MA Experiment 20001556 PARAMETER Experiment Name: At_Drought_Soil_Dry_P Parameter: Post-Treatment Value: None
  misc_feature: MA Experiment 20001556 PARAMETER Experiment Name: At_Drought_Soil_Dry_P Parameter: Timepoint (day) Value: 12
  misc_feature: MA Experiment 20001556 PARAMETER Experiment Name: At_Drought_Soil_Dry_P Parameter: Treatment Value: Drought vs. No Drought
  misc_feature: MA Experiment ID: 20001904 Result: Down-regulated in Transcription
  misc_feature: MA Experiment 20001904 PARAMETER Experiment Name: At_Drought_Reproduction_P Parameter: Age (day) Value: 37
  misc_feature: MA Experiment 20001904 PARAMETER Experiment Name: At_Drought_Reproduction_P Parameter: Organism Value: A. thaliana
  misc_feature: MA Experiment 20001904 PARAMETER Experiment Name: At_Drought_Reproduction_P Parameter: Plant Line Value: WS
  misc_feature: MA Experiment 20001904 PARAMETER Experiment Name: At_Drought_Reproduction_P Parameter: Timepoint (day) Value: 7
  misc_feature: MA Experiment 20001904 PARAMETER Experiment Name: At_Drought_Reproduction_P Parameter: Tissue Value: Rosettes
  misc_feature: MA Experiment 20001904 PARAMETER Experiment Name: At_Drought_Reproduction_P Parameter: Treatment Value: Drought vs. No Drought
  misc_feature: MA Experiment ID: 20001910 Result: Down-regulated in Transcription
  misc_feature: MA Experiment 20001910 PARAMETER Experiment Name: At_Drought_Reproduction_P Parameter: Age (day) Value: 37
  misc_feature: MA Experiment 20001910 PARAMETER Experiment Name: At_Drought_Reproduction_P Parameter: Organism Value: A. thaliana
  misc_feature: MA Experiment 20001910 PARAMETER Experiment Name: At_Drought_Reproduction_P Parameter: Plant Line Value: WS
  misc_feature: MA Experiment 20001910 PARAMETER Experiment Name: At_Drought_Reproduction_P Parameter: Timepoint (day) Value: 7
  misc_feature: MA Experiment 20001910 PARAMETER Experiment Name: At_Drought_Reproduction_P Parameter: Tissue Value: Flowers
  misc_feature: MA Experiment 20001910 PARAMETER Experiment Name: At_Drought_Reproduction_P Parameter: Treatment Value: Drought vs. No Drought

SEQ ID NO: 92286 - protein, 282 aa, Arabidopsis thaliana; identical to SEQ ID NO: 42540
  peptide (1)..(282): Ceres Seq. ID no. 12710303
  misc_feature (102)..(237): Pfam Name: NUDIX domain Pfam Description: NUDIX domain
  misc_feature (1)..(282): Homolog of NCBI NO: 15235458 NR Description: growth factor like protein; protein id: supported by cDNA: 148575., supported by cDNA: gi_13272466, by cDNA: gi_13877892, supported by cDNA: gi_15810610 [Arabidopsis
  misc_feature (1)..(282): Homolog of NCBI NO: 21553511 NR Description: growth factor like protein [Arabidopsis thaliana]
  misc_feature (1)..(281): Homolog of NCBI NO: 15228147 NR Description: putative mutT domain protein; protein id: [Arabidopsis thaliana] >gi|25387471|pir||G84457 probable mutT
  misc_feature (1)..(282): Homolog of NCBI NO: 38564302 NR Description: At2g04430 [Arabidopsis thaliana]
  misc_feature (1)..(282): Homolog of NCBI NO: 15228145 NR Description: putative mutT domain protein; protein id: [Arabidopsis thaliana] >gi|25387501|pir||E84457 probable mutT
  misc_feature (3)..(269): Homolog of NCBI NO: 9758793 NR Description: MutT domain protein-like [Arabidopsis thaliana]
  misc_feature (3)..(269): Homolog of NCBI NO: 18422823 NR Description: MutT domain protein-like; protein id: supported by cDNA: gi_14596036, supported by cDNA: gi_17978726
  misc_feature (16)..(264): Homolog of NCBI NO: 38564312 NR Description: At4g25434 [Arabidopsis thaliana]
  misc_feature (16)..(161): Homolog of NCBI NO: 30686884 NR Description: MutT/nudix family protein [Arabidopsis thaliana]
  misc_feature (161)..(264): Homolog of NCBI NO: 30686884 NR Description: MutT/nudix family protein [Arabidopsis thaliana]

SEQ ID NO: 92287 - protein, 258 aa, Arabidopsis thaliana; identical to SEQ ID NO: 21781
  peptide (1)..(258): Ceres Seq. ID no. 12710304
  misc_feature (78)..(213): Pfam Name: NUDIX domain Pfam Description: NUDIX domain
  misc_feature (1)..(258): Homolog of NCBI NO: 15235458 NR Description: growth factor like protein; protein id: supported by cDNA: 148575., supported by cDNA: gi_13272466, by cDNA: gi_13877892, supported by cDNA: gi_15810610 [Arabidopsis
  misc_feature (1)..(258): Homolog of NCBI NO: 21553511 NR Description: growth factor like protein [Arabidopsis thaliana]
  misc_feature (1)..(257): Homolog of NCBI NO: 15228147 NR Description: putative mutT domain protein; protein id: [Arabidopsis thaliana] >gi|25387471|pir||G84457 probable mutT
  misc_feature (1)..(258): Homolog of NCBI NO: 38564302 NR Description: At2g04430 [Arabidopsis thaliana]
  misc_feature (1)..(258): Homolog of NCBI NO: 15228145 NR Description: putative mutT domain protein; protein id: [Arabidopsis thaliana] >gi|25387501|pir||E84457 probable mutT
  misc_feature (1)..(245): Homolog of NCBI NO: 9758793 NR Description: MutT domain protein-like [Arabidopsis thaliana]
  misc_feature (1)..(245): Homolog of NCBI NO: 18422823 NR Description: MutT domain protein-like; protein id: supported by cDNA: gi_14596036, supported by cDNA: gi_17978726
  misc_feature (1)..(240): Homolog of NCBI NO: 38564312 NR Description: At4g25434 [Arabidopsis thaliana]
  misc_feature (1)..(137): Homolog of NCBI NO: 30686884 NR Description: MutT/nudix family protein [Arabidopsis thaliana]
  misc_feature (137)..(240): Homolog of NCBI NO: 30686884 NR Description: MutT/nudix family protein [Arabidopsis thaliana]

SEQ ID NO: 92288 - protein, 254 aa, Arabidopsis thaliana; identical to SEQ ID NO: 21782
  peptide (1)..(254): Ceres Seq. ID no. 12710305
  misc_feature (74)..(209): Pfam Name: NUDIX domain Pfam Description: NUDIX domain
  misc_feature (1)..(254): Homolog of NCBI NO: 15235458 NR Description: growth factor like protein; protein id: supported by cDNA: 148575., supported by cDNA: gi_13272466, by cDNA: gi_13877892, supported by cDNA: gi_15810610 [Arabidopsis
  misc_feature (1)..(254): Homolog of NCBI NO: 21553511 NR Description: growth factor like protein [Arabidopsis thaliana]
  misc_feature (1)..(253): Homolog of NCBI NO: 15228147 NR Description: putative mutT domain protein; protein id: [Arabidopsis thaliana] >gi|25387471|pir||G84457 probable mutT
  misc_feature (1)..(254): Homolog of NCBI NO: 38564302 NR Description: At2g04430 [Arabidopsis thaliana]
  misc_feature (1)..(254): Homolog of NCBI NO: 15228145 NR Description: putative mutT domain protein; protein id: [Arabidopsis thaliana] >gi|25387501|pir||E84457 probable mutT
  misc_feature (1)..(241): Homolog of NCBI NO: 9758793 NR Description: MutT domain protein-like [Arabidopsis thaliana]
  misc_feature (1)..(241): Homolog of NCBI NO: 18422823 NR Description: MutT domain protein-like; protein id: supported by cDNA: gi_14596036, supported by cDNA: gi_17978726
  misc_feature (1)..(236): Homolog of NCBI NO: 38564312 NR Description: At4g25434 [Arabidopsis thaliana]
  misc_feature (1)..(133): Homolog of NCBI NO: 30686884 NR Description: MutT/nudix family protein [Arabidopsis thaliana]
  misc_feature (133)..(236): Homolog of NCBI NO: 30686884 NR Description: MutT/nudix family protein [Arabidopsis thaliana]

SEQ ID NO: 92289 - DNA, 1152 bp, Arabidopsis thaliana; identical to SEQ ID NO: 88533
  misc_feature (1)..(1152): Ceres Seq. ID no. 12710436
  misc_feature: MA Experiment ID: 20000171 Result: Up-regulated in Transcription
  misc_feature: MA Experiment 20000171 PARAMETER Experiment Name: At_42deg_Heat_P Parameter: Age (day) Value: 14
  misc_feature: MA Experiment 20000171 PARAMETER Experiment Name: At_42deg_Heat_P Parameter: Organism Value: A. thaliana
  misc_feature: MA Experiment 20000171 PARAMETER Experiment Name: At_42deg_Heat_P Parameter: Plant Line Value: WS
  misc_feature: MA Experiment 20000171 PARAMETER Experiment Name: At_42deg_Heat_P Parameter: Temperature (deg C) Value: 42 vs. 22
  misc_feature: MA Experiment 20000171 PARAMETER Experiment Name: At_42deg_Heat_P Parameter: Timepoint (hr) Value: 1
  misc_feature: MA Experiment 20000171 PARAMETER Experiment Name: At_42deg_Heat_P Parameter: Tissue Value: Aerial
  misc_feature: MA Experiment ID: 20000184 Result: Down-regulated in Transcription
  misc_feature: MA Experiment 20000184 PARAMETER Experiment Name: At_Shoots__P Parameter: Age (day) Value: 7
  misc_feature: MA Experiment 20000184 PARAMETER Experiment Name: At_Shoots__P Parameter: Tissue Value: Shoots vs. Whole Plant
  misc_feature: MA Experiment ID: 20000451 Result: Down-regulated in Transcription
  misc_feature: MA Experiment 20000451 PARAMETER Experiment Name: At_CS6879_Shoots-Roots_P Parameter: Age (day) Value: 14
  misc_feature: MA Experiment 20000451 PARAMETER Experiment Name: At_CS6879_Shoots-Roots_P Parameter: Organism Value: A. thaliana
  misc_feature: MA Experiment 20000451 PARAMETER Experiment Name: At_CS6879_Shoots-Roots_P Parameter: Plant Line Value: CS6879 vs. WS
  misc_feature: MA Experiment 20000451 PARAMETER Experiment Name: At_CS6879_Shoots-Roots_P Parameter: Tissue Value: Roots

SEQ ID NO: 92290 - protein, 383 aa, Arabidopsis thaliana; identical to SEQ ID NO: 88534
  peptide (1)..(383): Ceres Seq. ID no. 12710437
  misc_feature (43)..(195): Homolog of NCBI NO: 15235700 NR Description: putative protein; protein id: At4g13400.1
  misc_feature (249)..(383): Homolog of NCBI NO: 15235700 NR Description: putative protein; protein id: At4g13400.1
  misc_feature (1)..(23): Homolog of NCBI NO: 15235700 NR Description: putative protein; protein id: At4g13400.1
  misc_feature (181)..(383): Homolog of NCBI NO: 22531058 NR Description: putative protein [Arabidopsis thaliana]
  misc_feature (54)..(379): Homolog of NCBI NO: 28829713 NR Description: similar to Arabidopsis thaliana (Mouse-ear
  misc_feature (207)..(379): Homolog of NCBI NO: 2982272 NR Description: hypothetical protein [Picea mariana]
  misc_feature (59)..(274): Homolog of NCBI NO: 40747370 NR Description: hypothetical protein AN0427.2 [Aspergillus
  misc_feature (228)..(346): Homolog of NCBI NO: 40747370 NR Description: hypothetical protein AN0427.2 [Aspergillus

SEQ ID NO: 92291 - protein, 255 aa, Arabidopsis thaliana; identical to SEQ ID NO: 88535
  peptide (1)..(255): Ceres Seq. ID no. 12710438
  misc_feature (1)..(67): Homolog of NCBI NO: 15235700 NR Description: putative protein; protein id: At4g13400.1
  misc_feature (121)..(255): Homolog of NCBI NO: 15235700 NR Description: putative protein; protein id: At4g13400.1
  misc_feature (53)..(255): Homolog of NCBI NO: 22531058 NR Description: putative protein [Arabidopsis thaliana]
  misc_feature (1)..(251): Homolog of NCBI NO: 28829713 NR Description: similar to Arabidopsis thaliana (Mouse-ear
  misc_feature (79)..(251): Homolog of NCBI NO: 2982272 NR Description: hypothetical protein [Picea mariana]
  misc_feature (1)..(146): Homolog of NCBI NO: 40747370 NR Description: hypothetical protein AN0427.2 [Aspergillus
  misc_feature (100)..(218): Homolog of NCBI NO: 40747370 NR Description: hypothetical protein AN0427.2 [Aspergillus

SEQ ID NO: 92292 - protein, 203 aa, Arabidopsis thaliana; identical to SEQ ID NO: 84471
  peptide (1)..(203): Ceres Seq. ID no. 12710439
  misc_feature (1)..(15): Homolog of NCBI NO: 15235700 NR Description: putative protein; protein id: At4g13400.1
  misc_feature (69)..(203): Homolog of NCBI NO: 15235700 NR Description: putative protein; protein id: At4g13400.1
  misc_feature (1)..(203): Homolog of NCBI NO: 22531058 NR Description: putative protein [Arabidopsis thaliana]
  misc_feature (1)..(199): Homolog of NCBI NO: 28829713 NR Description: similar to Arabidopsis thaliana (Mouse-ear
  misc_feature (27)..(199): Homolog of NCBI NO: 2982272 NR Description: hypothetical protein [Picea mariana]
  misc_feature (1)..(94): Homolog of NCBI NO: 40747370 NR Description: hypothetical protein AN0427.2 [Aspergillus
  misc_feature (48)..(166): Homolog of NCBI NO: 40747370 NR Description: hypothetical protein AN0427.2 [Aspergillus

SEQ ID NO: 92293 - DNA, 1080 bp, Arabidopsis thaliana; identical to SEQ ID NO: 88537
  misc_feature (1)..(1080): Ceres Seq. ID no. 12710484

SEQ ID NO: 92294 - protein, 359 aa, Arabidopsis thaliana; identical to SEQ ID NO: 88538
  peptide (1)..(359): Ceres Seq. ID no. 12710485
  misc_feature (146)..(226): Pfam Name: Uncharacterized protein family UPF0016 Pfam Description: Uncharacterized protein family UPF0016
  misc_feature (88)..(339): Homolog of NCBI NO: 15236316 NR Description: putative protein; protein id: At4g13590.1
  misc_feature (1)..(47): Homolog of NCBI NO: 15236316 NR Description: putative protein; protein id: At4g13590.1
  misc_feature (144)..(354): Homolog of NCBI NO: 15010676 NR Description: At1g64150/F22C12_10 [Arabidopsis thaliana]
  misc_feature (144)..(354): Homolog of NCBI NO: 18407980 NR Description: expressed protein; protein id: At1g64150.1,
  misc_feature (149)..(354): Homolog of NCBI NO: 6692097 NR Description: F22C12.9 [Arabidopsis thaliana]
  misc_feature (144)..(356): Homolog of NCBI NO: 16331550 NR Description: transmembrane protein FT27 [Synechocystis sp. PCC
  misc_feature (144)..(354): Homolog of NCBI NO: 22297922 NR Description: ORF_ID:tlr0379~hypothetical protein
  misc_feature (145)..(356): Homolog of NCBI NO: 17556152 NR Description: Uncharacterized protein family UPF0016 (32.1 kD) elegans] >gi|13491294|gb|AAK27882.1| Hypothetical protein
  misc_feature (144)..(358): Homolog of NCBI NO: 17229190 NR Description: hypothetical protein [Nostoc sp. PCC 7120]
  misc_feature (145)..(356): Homolog of NCBI NO: 39588843 NR Description: Hypothetical protein CBG15669 [Caenorhabditis

SEQ ID NO: 92295 - protein, 189 aa, Arabidopsis thaliana; identical to SEQ ID NO: 88539
  peptide (1)..(189): Ceres Seq. ID no. 12710486
  misc_feature (1)..(56): Pfam Name: Uncharacterized protein family UPF0016 Pfam Description: Uncharacterized protein family UPF0016
  misc_feature (1)..(169): Homolog of NCBI NO: 15236316 NR Description: putative protein; protein id: At4g13590.1
  misc_feature (1)..(184): Homolog of NCBI NO: 15010676 NR Description: At1g64150/F22C12_10 [Arabidopsis thaliana]
  misc_feature (1)..(184): Homolog of NCBI NO: 18407980 NR Description: expressed protein; protein id: At1g64150.1,
  misc_feature (1)..(184): Homolog of NCBI NO: 6692097 NR Description: F22C12.9 [Arabidopsis thaliana]
  misc_feature (1)..(186): Homolog of NCBI NO: 16331550 NR Description: transmembrane protein FT27 [Synechocystis sp. PCC
  misc_feature (1)..(184): Homolog of NCBI NO: 22297922 NR Description: ORF_ID:tlr0379~hypothetical protein
  misc_feature (1)..(186): Homolog of NCBI NO: 17556152 NR Description: Uncharacterized protein family UPF0016 (32.1 kD) elegans] >gi|13491294|gb|AAK27882.1| Hypothetical protein
  misc_feature (1)..(188): Homolog of NCBI NO: 17229190 NR Description: hypothetical protein [Nostoc sp. PCC 7120]
  misc_feature (1)..(186): Homolog of NCBI NO: 39588843 NR Description: Hypothetical protein CBG15669 [Caenorhabditis
  misc_feature (1)..(186): Homolog of NCBI NO: 18421551 NR Description: transmembrane protein FT27/PFT27-like; protein At5g36290.1, supported by cDNA: 12993., supported by cDNA: [Arabidopsis thaliana] >gi|15450794|gb|AAK96668.1| transmembrane

SEQ ID NO: 92296 - DNA, 2382 bp, Arabidopsis thaliana; identical to SEQ ID NO: 88540
  misc_feature (1)..(2382): Ceres Seq. ID no. 12710524
  misc_feature: MA Experiment ID: 20000184 Result: Down-regulated in Transcription
  misc_feature: MA Experiment 20000184 PARAMETER Experiment Name: At_Shoots__P Parameter: Age (day) Value: 7
  misc_feature: MA Experiment 20000184 PARAMETER Experiment Name: At_Shoots__P Parameter: Tissue Value: Shoots vs. Whole Plant

SEQ ID NO: 92297 - protein, 793 aa, Arabidopsis thaliana; identical to SEQ ID NO: 88541
  peptide (1)..(793): Ceres Seq. ID no. 12710525
  misc_feature (9)..(389): Pfam Name: tRNA synthetases class I (I, L, M and V) Pfam Description: tRNA synthetases class I (I, L, M and V)
  misc_feature (11)..(604): Homolog of NCBI NO: 37534108 NR Description: putative methionyl-tRNA synthetase [Oryza sativa
  misc_feature (6)..(655): Homolog of NCBI NO: 17540794 NR Description: Methionyl tRNA Synthetase MRS-1 (101.7 kD) (mrs-1)
  misc_feature (605)..(774): Homolog of NCBI NO: 17540794 NR Description: Methionyl tRNA Synthetase MRS-1 (101.7 kD) (mrs-1)
  misc_feature (9)..(583): Homolog of NCBI NO: 34865769 NR Description: similar to methionine-tRNA synthetase; methionine
  misc_feature (6)..(651): Homolog of NCBI NO: 14043022 NR Description: methionine-tRNA synthetase; methionine tRNA
  misc_feature (6)..(651): Homolog of NCBI NO: 15929104 NR Description: methionine-tRNA synthetase [Homo sapiens]
  misc_feature (6)..(651): Homolog of NCBI NO: 2135628 NR Description: methionine-tRNA ligase (EC 6.1.1.10) - human
  misc_feature (6)..(584): Homolog of NCBI NO: 34785759 NR Description: Unknown (protein for MGC:66122) [Danio rerio]
  misc_feature (9)..(611): Homolog of NCBI NO: 34785909 NR Description: Unknown (protein for MGC:69150) [Xenopus laevis]
  misc_feature (11)..(585): Homolog of NCBI NO: 2257528 NR Description: methionyl-tRNA synthetase [Schizosaccharomyces

SEQ ID NO: 92298 - protein, 657 aa, Arabidopsis thaliana; identical to SEQ ID NO: 88542
  peptide (1)..(657): Ceres Seq. ID no. 12710526
  misc_feature (1)..(253): Pfam Name: tRNA synthetases class I (I, L, M and V) Pfam Description: tRNA synthetases class I (I, L, M and V)
  misc_feature (1)..(468): Homolog of NCBI NO: 37534108 NR Description: putative methionyl-tRNA synthetase [Oryza sativa
  misc_feature (1)..(519): Homolog of NCBI NO: 17540794 NR Description: Methionyl tRNA Synthetase MRS-1 (101.7 kD) (mrs-1)
  misc_feature (469)..(638): Homolog of NCBI NO: 17540794 NR Description: Methionyl tRNA Synthetase MRS-1 (101.7 kD) (mrs-1)
  misc_feature (1)..(447): Homolog of NCBI NO: 34865769 NR Description: similar to methionine-tRNA synthetase; methionine
  misc_feature (1)..(515): Homolog of NCBI NO: 14043022 NR Description: methionine-tRNA synthetase; methionine tRNA
  misc_feature (1)..(515): Homolog of NCBI NO: 15929104 NR Description: methionine-tRNA synthetase [Homo sapiens]
  misc_feature (1)..(515): Homolog of NCBI NO: 2135628 NR Description: methionine-tRNA ligase (EC 6.1.1.10) - human
  misc_feature (1)..(448): Homolog of NCBI NO: 34785759 NR Description: Unknown (protein for MGC:66122) [Danio rerio]
  misc_feature (1)..(475): Homolog of NCBI NO: 34785909 NR Description: Unknown (protein for MGC:69150) [Xenopus laevis]
  misc_feature (1)..(449): Homolog of NCBI NO: 2257528 NR Description: methionyl-tRNA synthetase [Schizosaccharomyces

SEQ ID NO: 92299 - protein, 487 aa, Arabidopsis thaliana; identical to SEQ ID NO: 88543
  peptide (1)..(487): Ceres Seq. ID no. 12710527
  misc_feature (1)..(83): Pfam Name: tRNA synthetases class I (I, L, M and V) Pfam Description: tRNA synthetases class I (I, L, M and V)
  misc_feature (1)..(298): Homolog of NCBI NO: 37534108 NR Description: putative methionyl-tRNA synthetase [Oryza sativa
  misc_feature (1)..(349): Homolog of NCBI NO: 17540794 NR Description: Methionyl tRNA Synthetase MRS-1 (101.7 kD) (mrs-1)
  misc_feature (299)..(468): Homolog of NCBI NO: 17540794 NR Description: Methionyl tRNA Synthetase MRS-1 (101.7 kD) (mrs-1)
  misc_feature (1)..(277): Homolog of NCBI NO: 34865769 NR Description: similar to methionine-tRNA synthetase; methionine
  misc_feature (1)..(345): Homolog of NCBI NO: 14043022 NR Description: methionine-tRNA synthetase; methionine tRNA
  misc_feature (1)..(345): Homolog of NCBI NO: 15929104 NR Description: methionine-tRNA synthetase [Homo sapiens]
  misc_feature (1)..(345): Homolog of NCBI NO: 2135628 NR Description: methionine-tRNA ligase (EC 6.1.1.10) - human
  misc_feature (1)..(278): Homolog of NCBI NO: 34785759 NR Description: Unknown (protein for MGC:66122) [Danio rerio]
  misc_feature (1)..(305): Homolog of NCBI NO: 34785909 NR Description: Unknown (protein for MGC:69150) [Xenopus laevis]
  misc_feature (1)..(279): Homolog of NCBI NO: 2257528 NR Description: methionyl-tRNA synthetase [Schizosaccharomyces

SEQ ID NO: 92300 - DNA, 1416 bp, Arabidopsis thaliana; identical to SEQ ID NO: 88544
  misc_feature (1)..(1416): Ceres Seq. ID no. 12710554
  misc_feature: MA Experiment ID: 108461 Result: Up-regulated in Transcription
  misc_feature: MA Experiment 108461 PARAMETER Experiment Name: At_Germinating_Seeds_cDNA_P Parameter: Age (day) Value: 1 vs. 0
  misc_feature: MA Experiment 108461 PARAMETER Experiment Name: At_Germinating_Seeds_cDNA_P Parameter: Tissue Value: Germinating Seeds
  misc_feature: MA Experiment ID: 108561 Result: Down-regulated in Transcription
  misc_feature: MA Experiment 108561 PARAMETER Experiment Name: At_100uM_ABA_cDNA_P Parameter: Timepoint (hr) Value: 6
  misc_feature: MA Experiment 108561 PARAMETER Experiment Name: At_100uM_ABA_cDNA_P Parameter: Tissue Value: Aerial
  misc_feature: MA Experiment 108561 PARAMETER Experiment Name: At_100uM_ABA_cDNA_P Parameter: Treatment Value: 100uM ABA vs. No Treatment
  misc_feature: MA Experiment ID: 108569 Result: Up-regulated in Transcription
  misc_feature: MA Experiment 108569 PARAMETER Experiment Name: At_0.001%_MeJA__cDNA_P Parameter: Timepoint (hr) Value: 6
  misc_feature: MA Experiment 108569 PARAMETER Experiment Name: At_0.001%_MeJA__cDNA_P Parameter: Tissue Value: Aerial
  misc_feature: MA Experiment 108569 PARAMETER Experiment Name: At_0.001%_MeJA__cDNA_P Parameter: Treatment Value: 0.001% MeJA vs. No Treatment
  misc_feature: MA Experiment ID: 108572 Result: Down-regulated in Transcription
  misc_feature: MA Experiment 108572 PARAMETER Experiment Name: At_Drought_cDNA_P Parameter: Timepoint (hr) Value: 1
  misc_feature: MA Experiment 108572 PARAMETER Experiment Name: At_Drought_cDNA_P Parameter: Tissue Value: Aerial
  misc_feature: MA Experiment 108572 PARAMETER Experiment Name: At_Drought_cDNA_P Parameter: Treatment Value: Drought vs. No Drought
  misc_feature: MA Experiment ID: 108573 Result: Down-regulated in Transcription
  misc_feature: MA Experiment 108573 PARAMETER Experiment Name: At_Drought_cDNA_P Parameter: Timepoint (hr) Value: 6
  misc_feature: MA Experiment 108573 PARAMETER Experiment Name: At_Drought_cDNA_P Parameter: Tissue Value: Aerial
  misc_feature: MA Experiment 108573 PARAMETER Experiment Name: At_Drought_cDNA_P Parameter: Treatment Value: Drought vs. No Drought
  misc_feature: MA Experiment ID: 108576 Result: Down-regulated in Transcription
  misc_feature: MA Experiment 108576 PARAMETER Experiment Name: At_42deg_Heat_cDNA_P Parameter: Temperature (deg C) Value: 42 vs. 22
  misc_feature: MA Experiment 108576 PARAMETER Experiment Name: At_42deg_Heat_cDNA_P Parameter: Timepoint (hr) Value: 1
  misc_feature: MA Experiment 108576 PARAMETER Experiment Name: At_42deg_Heat_cDNA_P Parameter: Tissue Value: Aerial
  misc_feature: MA Experiment ID: 108579 Result: Up-regulated in Transcription
  misc_feature: MA Experiment 108579 PARAMETER Experiment Name: At_4deg_Cold_cDNA_P Parameter: Temperature (deg C) Value: 4 vs. 22
  misc_feature: MA Experiment 108579 PARAMETER Experiment Name: At_4deg_Cold_cDNA_P Parameter: Timepoint (hr) Value: 6
  misc_feature: MA Experiment 108579 PARAMETER Experiment Name: At_4deg_Cold_cDNA_P Parameter: Tissue Value: Aerial
  misc_feature: MA Experiment ID: 108595 Result: Down-regulated in Transcription
  misc_feature: MA Experiment 108595 PARAMETER Experiment Name: At_Ler-pi_Ovule_cDNA_P Parameter: Plant Line Value: null
  misc_feature: MA Experiment ID: 20000069 Result: Down-regulated in Transcription
  misc_feature: MA Experiment 20000069 PARAMETER Experiment Name: At_100uM_ABA_Mutants_cDNA_P Parameter: Plant Line Value: CS23
  misc_feature: MA Experiment 20000069 PARAMETER Experiment Name: At_100uM_ABA_Mutants_cDNA_P Parameter: Timepoint (hr) Value: 6
  misc_feature: MA Experiment 20000069 PARAMETER Experiment Name: At_100uM_ABA_Mutants_cDNA_P Parameter: Tissue Value: Aerial
  misc_feature: MA Experiment 20000069 PARAMETER Experiment Name: At_100uM_ABA_Mutants_cDNA_P Parameter: Treatment Value: 100uM ABA vs. No Treatment

SEQ ID NO: 92301 - protein, 471 aa, Arabidopsis thaliana; identical to SEQ ID NO: 77200
  peptide (1)..(471): Ceres Seq. ID no. 12710555
  misc_feature (12)..(412): Pfam Name: Serine hydroxymethyltransferase Pfam Description: Serine hydroxymethyltransferase
  misc_feature (1)..(471): Homolog of NCBI NO: 15236375 NR Description: hydroxymethyltransferase; protein id: supported by cDNA: 29662., supported by cDNA: gi_13358183, by cDNA: gi_13605526, supported by cDNA: gi_20334773 [Arabidopsis
  misc_feature (1)..(471): Homolog of NCBI NO: 21592544 NR Description: hydroxymethyltransferase [Arabidopsis thaliana]
  misc_feature (1)..(471): Homolog of NCBI NO: 11762130 NR Description: AT4g13930 [Arabidopsis thaliana]
  misc_feature (1)..(468): Homolog of NCBI NO: 15236371 NR Description: glycine hydroxymethyltransferase - like protein; id: At4g13890.1 [Arabidopsis thaliana] >gi|7433549|pir||T05258
  misc_feature (4)..(464): Homolog of NCBI NO: 18400090 NR Description: putative hydroxymethyltransferase; protein id: supported by cDNA: 122515. [Arabidopsis thaliana]
  misc_feature (4)..(464): Homolog of NCBI NO: 25286207 NR Description: probable hydroxymethyltransferase, 49598-47322 - Arabidopsis thaliana >gi|12324475|gb|AAG52195.1|AC021199_1
  misc_feature (4)..(464): Homolog of NCBI NO: 21537165 NR Description: putative hydroxymethyltransferase [Arabidopsis
  misc_feature (4)..(464): Homolog of NCBI NO: 15219182 NR Description: glycine hydroxymethyltransferase, putative; id: At1g22020.1 [Arabidopsis thaliana] F2E2.7 [Arabidopsis thaliana] >gi|21928157|gb|AAM78106.1|
  misc_feature (9)..(471): Homolog of NCBI NO: 17066746 NR Description: serine hydroxymethyltransferase [Chlamydomonas
  misc_feature (3)..(461): Homolog of NCBI NO: 18418028 NR Description: glycine hydroxymethyltransferase (EC 2.1.2.1) - protein; protein id: At4g32520.1, supported by cDNA: gi_14030718

SEQ ID NO: 92302 - protein, 347 aa, Arabidopsis thaliana; identical to SEQ ID NO: 88546
  peptide (1)..(347): Ceres Seq. ID no. 12710556
  misc_feature (1)..(288): Pfam Name: Serine hydroxymethyltransferase Pfam Description: Serine hydroxymethyltransferase
  misc_feature (1)..(347): Homolog of NCBI NO: 15236375 NR Description: hydroxymethyltransferase; protein id: supported by cDNA: 29662., supported by cDNA: gi_13358183, by cDNA: gi_13605526, supported by cDNA: gi_20334773 [Arabidopsis
  misc_feature (1)..(347): Homolog of NCBI NO: 21592544 NR Description: hydroxymethyltransferase [Arabidopsis thaliana]
  misc_feature (1)..(347): Homolog of NCBI NO: 11762130 NR Description: AT4g13930 [Arabidopsis thaliana]
  misc_feature (1)..(344): Homolog of NCBI NO: 15236371 NR Description: glycine hydroxymethyltransferase - like protein; id: At4g13890.1 [Arabidopsis thaliana] >gi|7433549|pir||T05258
  misc_feature (1)..(340): Homolog of NCBI NO: 18400090 NR Description: putative hydroxymethyltransferase; protein id: supported by cDNA: 122515. [Arabidopsis thaliana]
  misc_feature (1)..(340): Homolog of NCBI NO: 25286207 NR Description: probable hydroxymethyltransferase, 49598-47322 - Arabidopsis thaliana >gi|12324475|gb|AAG52195.1|AC021199_1
  misc_feature (1)..(340): Homolog of NCBI NO: 21537165 NR Description: putative hydroxymethyltransferase [Arabidopsis
  misc_feature (1)..(340): Homolog of NCBI NO: 15219182 NR Description: glycine hydroxymethyltransferase, putative; id: At1g22020.1 [Arabidopsis thaliana] F2E2.7 [Arabidopsis thaliana] >gi|21928157|gb|AAM78106.1|
  misc_feature (1)..(347): Homolog of NCBI NO: 17066746 NR Description: serine hydroxymethyltransferase [Chlamydomonas
  misc_feature (1)..(337): Homolog of NCBI NO: 18418028 NR Description: glycine hydroxymethyltransferase (EC 2.1.2.1) - protein; protein id: At4g32520.1, supported by cDNA: gi_14030718

SEQ ID NO: 92303 - protein, 256 aa, Arabidopsis thaliana; identical to SEQ ID NO: 88547
  peptide (1)..(256): Ceres Seq. ID no. 12710557
  misc_feature (1)..(197): Pfam Name: Serine hydroxymethyltransferase Pfam Description: Serine hydroxymethyltransferase
  misc_feature (1)..(256): Homolog of NCBI NO: 15236375 NR Description: hydroxymethyltransferase; protein id: supported by cDNA: 29662., supported by cDNA: gi_13358183, by cDNA: gi_13605526, supported by cDNA: gi_20334773 [Arabidopsis
  misc_feature (1)..(256): Homolog of NCBI NO: 21592544 NR Description: hydroxymethyltransferase [Arabidopsis thaliana]
  misc_feature (1)..(256): Homolog of NCBI NO: 11762130 NR Description: AT4g13930 [Arabidopsis thaliana]
  misc_feature (1)..(253): Homolog of NCBI NO: 15236371 NR Description: glycine hydroxymethyltransferase - like protein; id: At4g13890.1 [Arabidopsis thaliana] >gi|7433549|pir||T05258
  misc_feature (1)..(249): Homolog of NCBI NO: 18400090 NR Description: putative hydroxymethyltransferase; protein id: supported by cDNA: 122515. [Arabidopsis thaliana]
  misc_feature (1)..(249): Homolog of NCBI NO: 25286207 NR Description: probable hydroxymethyltransferase, 49598-47322 - Arabidopsis thaliana >gi|12324475|gb|AAG52195.1|AC021199_1
  misc_feature (1)..(249): Homolog of NCBI NO: 21537165 NR Description: putative hydroxymethyltransferase [Arabidopsis
  misc_feature (1)..(249): Homolog of NCBI NO: 15219182 NR Description: glycine hydroxymethyltransferase, putative; id: At1g22020.1 [Arabidopsis thaliana] F2E2.7 [Arabidopsis thaliana] >gi|21928157|gb|AAM78106.1|
  misc_feature (1)..(256): Homolog of NCBI NO: 17066746 NR Description: serine hydroxymethyltransferase [Chlamydomonas
  misc_feature (1)..(246): Homolog of NCBI NO: 18418028 NR Description: glycine hydroxymethyltransferase (EC 2.1.2.1) - protein; protein id: At4g32520.1, supported by cDNA: gi_14030718

SEQ ID NO: 92304 - DNA, 1799 bp, Arabidopsis thaliana; identical to SEQ ID NO: 88548
  misc_feature (1)..(1799): Ceres Seq. ID no. 12710588
  misc_feature: MA Experiment ID: 108433 Result: Down-regulated in Transcription
  misc_feature: MA Experiment 108433 PARAMETER Experiment Name: At_rhl_Mutant2_cDNA_P Parameter: Age (day) Value: 7
  misc_feature: MA Experiment 108433 PARAMETER Experiment Name: At_rhl_Mutant2_cDNA_P Parameter: Organism Value: A. thaliana
  misc_feature: MA Experiment 108433 PARAMETER Experiment Name: At_rhl_Mutant2_cDNA_P Parameter: Plant Line Value: rhl Mutant vs. wt landsburg
  misc_feature: MA Experiment 108433 PARAMETER Experiment Name: At_rhl_Mutant2_cDNA_P Parameter: Tissue Value: Roots
  misc_feature: MA Experiment ID: 108435 Result: Up-regulated in Transcription
  misc_feature: MA Experiment 108435 PARAMETER Experiment Name: At_stm_Mutants_cDNA_P Parameter: Plant Line Value: wt Landsburg vs stm
  misc_feature: MA Experiment 108435 PARAMETER Experiment Name: At_stm_Mutants_cDNA_P Parameter: Tissue Value: Shoot Apical Meristem Region
  misc_feature: MA Experiment ID: 108461 Result: Up-regulated in Transcription
  misc_feature: MA Experiment 108461 PARAMETER Experiment Name: At_Germinating_Seeds_cDNA_P Parameter: Age (day) Value: 1 vs. 0
  misc_feature: MA Experiment 108461 PARAMETER Experiment Name: At_Germinating_Seeds_cDNA_P Parameter: Tissue Value: Germinating Seeds
  misc_feature: MA Experiment ID: 108462 Result: Up-regulated in Transcription
  misc_feature: MA Experiment 108462 PARAMETER Experiment Name: At_Germinating_Seeds_cDNA_P Parameter: Age (day) Value: 2 vs. 0
  misc_feature: MA Experiment 108462 PARAMETER Experiment Name: At_Germinating_Seeds_cDNA_P Parameter: Tissue Value: Germinating Seeds
  misc_feature: MA Experiment ID: 108463 Result: Up-regulated in Transcription
  misc_feature: MA Experiment 108463 PARAMETER Experiment Name: At_Germinating_Seeds_cDNA_P Parameter: Age (day) Value: 3 vs. 0
  misc_feature: MA Experiment 108463 PARAMETER Experiment Name: At_Germinating_Seeds_cDNA_P Parameter: Tissue Value: Germinating Seeds
  misc_feature: MA Experiment ID: 108464 Result: Up-regulated in Transcription
  misc_feature: MA Experiment 108464 PARAMETER Experiment Name: At_Germinating_Seeds_cDNA_P Parameter: Age (day) Value: 4 vs. 0
  misc_feature: MA Experiment 108464 PARAMETER Experiment Name: At_Germinating_Seeds_cDNA_P Parameter: Tissue Value: Germinating Seeds
  misc_feature: MA Experiment ID: 108569 Result: Up-regulated in Transcription
  misc_feature: MA Experiment 108569 PARAMETER Experiment Name: At_0.001%_MeJA__cDNA_P Parameter: Timepoint (hr) Value: 6
  misc_feature: MA Experiment 108569 PARAMETER Experiment Name: At_0.001%_MeJA__cDNA_P Parameter: Tissue Value: Aerial
  misc_feature: MA Experiment 108569 PARAMETER Experiment Name: At_0.001%_MeJA__cDNA_P Parameter: Treatment Value: 0.001% MeJA vs. No Treatment
  misc_feature: MA Experiment ID: 108576 Result: Down-regulated in Transcription
  misc_feature: MA Experiment 108576 PARAMETER Experiment Name: At_42deg_Heat_cDNA_P Parameter: Temperature (deg C) Value: 42 vs. 22
  misc_feature: MA Experiment 108576 PARAMETER Experiment Name: At_42deg_Heat_cDNA_P Parameter: Timepoint (hr) Value: 1
  misc_feature: MA Experiment 108576 PARAMETER Experiment Name: At_42deg_Heat_cDNA_P Parameter: Tissue Value: Aerial
  misc_feature: MA Experiment ID: 108577 Result: Down-regulated in Transcription
  misc_feature: MA Experiment 108577 PARAMETER Experiment Name: At_42deg_Heat_cDNA_P Parameter: Temperature (deg C) Value: 42 vs. 22
  misc_feature: MA Experiment 108577 PARAMETER Experiment Name: At_42deg_Heat_cDNA_P Parameter: Timepoint (hr) Value: 6
  misc_feature: MA Experiment 108577 PARAMETER Experiment Name: At_42deg_Heat_cDNA_P Parameter: Tissue Value: Aerial
  misc_feature: MA Experiment ID: 108595 Result: Down-regulated in Transcription
  misc_feature: MA Experiment 108595 PARAMETER Experiment Name: At_Ler-pi_Ovule_cDNA_P Parameter: Plant Line Value: null
  misc_feature: MA Experiment ID: 108605 Result: Up-regulated in Transcription
  misc_feature: MA Experiment 108605 PARAMETER Experiment Name: At_100uM_ABA_cDNA_P Parameter: Timepoint (hr) Value: 6
  misc_feature: MA Experiment 108605 PARAMETER Experiment Name: At_100uM_ABA_cDNA_P Parameter: Tissue Value: Aerial
  misc_feature: MA Experiment 108605 PARAMETER Experiment Name: At_100uM_ABA_cDNA_P Parameter: Treatment Value: 100uM ABA vs. No Treatment
  misc_feature: MA Experiment ID: 108668 Result: Down-regulated in Transcription
  misc_feature: MA Experiment 108668 PARAMETER Experiment Name: At_2mM_SA_cDNA_P Parameter: Plant Line Value: WS
  misc_feature: MA Experiment 108668 PARAMETER Experiment Name: At_2mM_SA_cDNA_P Parameter: Timepoint (hr) Value: 6
  misc_feature: MA Experiment 108668 PARAMETER Experiment Name: At_2mM_SA_cDNA_P Parameter: Treatment Value: 2mM SA vs. No Treatment
  misc_feature: MA Experiment ID: 20000090 Result: Down-regulated in Transcription
  misc_feature: MA Experiment ID: 20000111 Result: Down-regulated in Transcription
  misc_feature: MA Experiment 20000111 PARAMETER Experiment Name: At_42deg_Heat_cDNA_P Parameter: Temperature (deg C) Value: 42 vs. 22
  misc_feature: MA Experiment 20000111 PARAMETER Experiment Name: At_42deg_Heat_cDNA_P Parameter: Timepoint (hr) Value: 6
  misc_feature: MA Experiment 20000111 PARAMETER Experiment Name: At_42deg_Heat_cDNA_P Parameter: Tissue Value: Aerial
  misc_feature: MA Experiment ID: 20000112 Result: Down-regulated in Transcription
  misc_feature: MA Experiment 20000112 PARAMETER Experiment Name: At_42deg_Heat_cDNA_P Parameter: Temperature (deg C) Value: 42 vs. 22
  misc_feature: MA Experiment 20000112 PARAMETER Experiment Name: At_42deg_Heat_cDNA_P Parameter: Timepoint (hr) Value: 2
  misc_feature: MA Experiment 20000112 PARAMETER Experiment Name: At_42deg_Heat_cDNA_P Parameter: Tissue Value: Aerial
  misc_feature: MA Experiment ID: 20000113 Result: Down-regulated in Transcription
  misc_feature: MA Experiment 20000113 PARAMETER Experiment Name: At_42deg_Heat_cDNA_P Parameter: Temperature (deg C) Value: 42 vs. 22
  misc_feature: MA Experiment 20000113 PARAMETER Experiment Name: At_42deg_Heat_cDNA_P Parameter: Timepoint (hr) Value: 8
  misc_feature: MA Experiment 20000113 PARAMETER Experiment Name: At_42deg_Heat_cDNA_P Parameter: Tissue Value: Aerial
  misc_feature: MA Experiment ID: 20000180 Result: Up-regulated in Transcription
  misc_feature: MA Experiment 20000180 PARAMETER Experiment Name: At_Germinating_Seeds_P Parameter: Age (hr) Value: 24 vs. 0
  misc_feature: MA Experiment 20000180 PARAMETER Experiment Name: At_Germinating_Seeds_P Parameter: Tissue Value: Germinating Seeds
  misc_feature: MA Experiment ID: 20000182 Result: Down-regulated in Transcription
  misc_feature: MA Experiment 20000182 PARAMETER Experiment Name: At_2mM_SA_P Parameter: Age (day) Value: 14
  misc_feature: MA Experiment 20000182 PARAMETER Experiment Name: At_2mM_SA_P Parameter: Organism Value: A. thaliana
  misc_feature: MA Experiment 20000182 PARAMETER Experiment Name: At_2mM_SA_P Parameter: Plant Line Value: WS
  misc_feature: MA Experiment 20000182 PARAMETER Experiment Name: At_2mM_SA_P Parameter: Timepoint (hr) Value: 6
  misc_feature: MA Experiment 20000182 PARAMETER Experiment Name: At_2mM_SA_P Parameter: Tissue Value: Aerial
  misc_feature: MA Experiment 20000182 PARAMETER Experiment Name: At_2mM_SA_P Parameter: Treatment Value: 2mM SA vs. No Treatment
  misc_feature: MA Experiment ID: 20000185 Result: Down-regulated in Transcription
  misc_feature: MA Experiment 20000185 PARAMETER Experiment Name: At_Roots__P Parameter: Age (day) Value: 7 vs. 21
  misc_feature: MA Experiment 20000185 PARAMETER Experiment Name: At_Roots__P Parameter: Organism Value: A. thaliana
  misc_feature: MA Experiment 20000185 PARAMETER Experiment Name: At_Roots__P Parameter: Tissue Value: Roots vs. Whole Plant
  misc_feature: MA Experiment ID: 20000227 Result: Down-regulated in Transcription
  misc_feature: MA Experiment 20000227 PARAMETER Experiment Name: At_Root-Tips-vs-Tops_P Parameter: Tissue Value: Root Tips vs. Root Tops
  misc_feature: MA Experiment ID: 20000234 Result: Down-regulated in Transcription
  misc_feature: MA Experiment 20000234 PARAMETER Experiment Name: At_Siliques_P Parameter: Age (day) Value: 21
  misc_feature: MA Experiment 20000234 PARAMETER Experiment Name: At_Siliques_P Parameter: Organism Value: A. thaliana
  misc_feature: MA Experiment 20000234 PARAMETER Experiment Name: At_Siliques_P Parameter: Plant Line Value: WS
  misc_feature: MA Experiment 20000234 PARAMETER Experiment Name: At_Siliques_P Parameter: Tissue Value: Less Than 5mm Siliques vs. Whole Plant
  misc_feature: MA Experiment ID: 20000264 Result: Down-regulated in Transcription
  misc_feature: MA Experiment 20000264 PARAMETER Experiment Name: At_Open_Flower_P Parameter: Age (day) Value: 21
  misc_feature: MA Experiment 20000264 PARAMETER Experiment Name: At_Open_Flower_P Parameter: Plant Line Value: WS
  misc_feature: MA Experiment 20000264 PARAMETER Experiment Name: At_Open_Flower_P Parameter: Tissue Value: Open Flower vs. Whole Plant
  misc_feature: MA Experiment ID: 20000286 Result: Down-regulated in Transcription
  misc_feature: MA Experiment 20000286 PARAMETER Experiment Name: At_Open_Flower_P Parameter: Age (day) Value: 21
  misc_feature: MA Experiment 20000286 PARAMETER Experiment Name: At_Open_Flower_P Parameter: Plant Line Value: WS
  misc_feature: MA Experiment 20000286 PARAMETER Experiment Name: At_Open_Flower_P Parameter: Tissue Value: Half Open vs. Whole Plant
  misc_feature: MA Experiment ID: 20000436 Result: Down-regulated in Transcription
  misc_feature: MA Experiment 20000436 PARAMETER Experiment Name: At_Drought_P Parameter: Age (day) Value: 7
  misc_feature: MA Experiment 20000436 PARAMETER Experiment Name: At_Drought_P Parameter: Organism Value: A. thaliana
  misc_feature: MA Experiment 20000436 PARAMETER Experiment Name: At_Drought_P Parameter: Plant Line Value: WS
  misc_feature: MA Experiment 20000436 PARAMETER Experiment Name: At_Drought_P Parameter: Timepoint (hr) Value: 12
  misc_feature: MA Experiment 20000436 PARAMETER Experiment Name: At_Drought_P Parameter: Tissue Value: Whole Plant
  misc_feature: MA Experiment 20000436 PARAMETER Experiment Name: At_Drought_P Parameter: Treatment Value: Drought vs. No Drought
  misc_feature: MA Experiment ID: 20000437 Result: Down-regulated in Transcription
  misc_feature: MA Experiment 20000437 PARAMETER Experiment Name: At_Drought_P Parameter: Age (day) Value: 8
  misc_feature: MA Experiment 20000437 PARAMETER Experiment Name: At_Drought_P Parameter: Organism Value: A. thaliana
  misc_feature: MA Experiment 20000437 PARAMETER Experiment Name: At_Drought_P Parameter: Plant Line Value: WS
  misc_feature: MA Experiment 20000437 PARAMETER Experiment Name: At_Drought_P Parameter: Timepoint (hr) Value: 24
  misc_feature: MA Experiment 20000437 PARAMETER Experiment Name: At_Drought_P Parameter: Tissue Value: Whole Plant
  misc_feature: MA Experiment 20000437 PARAMETER Experiment Name: At_Drought_P Parameter: Treatment Value: Drought vs. No Drought
  misc_feature: MA Experiment ID: 20000439 Result: Down-regulated in Transcription
  misc_feature: MA Experiment 20000439 PARAMETER Experiment Name: At_Roots__P Parameter: Age (day) Value: 14 vs. 21
  misc_feature: MA Experiment 20000439 PARAMETER Experiment Name: At_Roots__P Parameter: Organism Value: A. thaliana
  misc_feature: MA Experiment 20000439 PARAMETER Experiment Name: At_Roots__P Parameter: Tissue Value: Roots vs. Whole Plant
  misc_feature: MA Experiment ID: 20000441 Result: Up-regulated in Transcription
  misc_feature: MA Experiment 20000441 PARAMETER Experiment Name: At_1uM_BR-BRZ__P Parameter: Tissue Value: Shoot Apices
  misc_feature: MA Experiment 20000441 PARAMETER Experiment Name: At_1uM_BR-BRZ__P Parameter: Treatment Value: 1uM BR vs. No Treatment
  misc_feature: MA Experiment ID: 20000794 Result: Down-regulated in Transcription
  misc_feature: MA Experiment 20000794 PARAMETER Experiment Name: At_Petals_P Parameter: Age (day) Value: 23-25 days
  misc_feature: MA Experiment 20000794 PARAMETER Experiment Name: At_Petals_P Parameter: Plant Line Value: WS
  misc_feature: MA Experiment 20000794 PARAMETER Experiment Name: At_Petals_P Parameter: Tissue Value: Petals vs. Whole plant
  misc_feature: MA Experiment ID: 20001451 Result: Down-regulated in Transcription
  misc_feature: MA Experiment 20001451 PARAMETER Experiment Name: At_Far-red-induction_P Parameter: Age (day) Value: 7
  misc_feature: MA Experiment 20001451 PARAMETER Experiment Name: At_Far-red-induction_P Parameter: Light Value: Far-red vs. White
  misc_feature: MA Experiment 20001451 PARAMETER Experiment Name: At_Far-red-induction_P Parameter: Organism Value: A. thaliana
  misc_feature: MA Experiment 20001451 PARAMETER Experiment Name: At_Far-red-induction_P Parameter: Plant Line Value: Columbia
  misc_feature: MA Experiment 20001451 PARAMETER Experiment Name: At_Far-red-induction_P Parameter: Timepoint (hr) Value: 24
  misc_feature: MA Experiment 20001451 PARAMETER Experiment Name: At_Far-red-induction_P Parameter: Tissue Value: Whole Plant
  misc_feature: MA Experiment ID: 20001560 Result: Up-regulated in Transcription
  misc_feature: MA Experiment 20001560 PARAMETER Experiment Name: At_Drought_Soil_Dry_P Parameter: Age (day) Value: 28
  misc_feature: MA Experiment 20001560 PARAMETER Experiment Name: At_Drought_Soil_Dry_P Parameter: Organism Value: A. thaliana
  misc_feature: MA Experiment 20001560 PARAMETER Experiment Name: At_Drought_Soil_Dry_P Parameter: Plant Line Value: WS
  misc_feature: MA Experiment 20001560 PARAMETER Experiment Name: At_Drought_Soil_Dry_P Parameter: Post Timepoint (hr) Value: None
  misc_feature: MA Experiment 20001560 PARAMETER Experiment Name: At_Drought_Soil_Dry_P Parameter: Post-Treatment Value: None
  misc_feature: MA Experiment 20001560 PARAMETER Experiment Name: At_Drought_Soil_Dry_P Parameter: Timepoint (day) Value: 14
  misc_feature: MA Experiment 20001560 PARAMETER Experiment Name: At_Drought_Soil_Dry_P Parameter: Treatment Value: Drought vs. No Drought
  misc_feature: MA Experiment ID: 20001757 Result: Up-regulated in Transcription
  misc_feature: MA Experiment 20001757 PARAMETER Experiment Name: At_50mM_NH4NO3_L-to-H_P Parameter: Timepoint (hr) Value: 6
  misc_feature: MA Experiment 20001757 PARAMETER Experiment Name: At_50mM_NH4NO3_L-to-H_P Parameter: Tissue Value: Leaf
  misc_feature: MA Experiment 20001757 PARAMETER Experiment Name: At_50mM_NH4NO3_L-to-H_P Parameter: Treatment Value: 50mM NH4NO3 vs 100mM Mannitol
  misc_feature: MA Experiment ID: 20001911 Result: Down-regulated in Transcription
  misc_feature: MA Experiment 20001911 PARAMETER Experiment Name: At_Drought_Reproduction_P Parameter: Age (day) Value: 40
  misc_feature: MA Experiment 20001911 PARAMETER Experiment Name: At_Drought_Reproduction_P Parameter: Organism Value: A. thaliana
  misc_feature: MA Experiment 20001911 PARAMETER Experiment Name: At_Drought_Reproduction_P Parameter: Plant Line Value: WS
  misc_feature: MA Experiment 20001911 PARAMETER Experiment Name: At_Drought_Reproduction_P Parameter: Timepoint (day) Value: 10
  misc_feature: MA Experiment 20001911 PARAMETER Experiment Name: At_Drought_Reproduction_P Parameter: Tissue Value: Flowers
  misc_feature: MA Experiment 20001911 PARAMETER Experiment Name: At_Drought_Reproduction_P Parameter: Treatment Value: Drought vs. No Drought

SEQ ID NO: 92305 - protein, 502 aa, Arabidopsis thaliana; identical to SEQ ID NO: 88549
  peptide (1)..(502): Ceres Seq. ID no. 12710589
  misc_feature (35)..(502): Pfam Name: 56kDa selenium binding protein (SBP56) Pfam Description: 56kDa selenium binding protein (SBP56)
  misc_feature (16)..(502): Homolog of NCBI NO: 15236386 NR Description: selenium-binding protein like; protein id: supported by cDNA: gi_13605824, supported by cDNA: gi_13877734, by cDNA: gi_17473633, supported by cDNA: gi_17473651 [Arabidopsis
  misc_feature (16)..(502): Homolog of NCBI NO: 13605825 NR Description: AT4g14040/dl3061c [Arabidopsis thaliana]
  misc_feature (16)..(502): Homolog of NCBI NO: 22530900 NR Description: selenium-binding protein-like protein
  misc_feature (16)..(502): Homolog of NCBI NO: 25348077 NR Description: selenium-binding protein like [imported] -
  misc_feature (16)..(502): Homolog of NCBI NO: 15236385 NR Description: selenium-binding protein like; protein id:
  misc_feature (38)..(502): Homolog of NCBI NO: 15485232 NR Description: selenium binding protein [Arabidopsis thaliana]
  misc_feature (3)..(409): Homolog of NCBI NO: 7488184 NR Description: probable selenium-binding protein - Arabidopsis
  misc_feature (20)..(502): Homolog of NCBI NO: 15485720 NR Description: selenium binding protein [Medicago sativa]
  misc_feature (20)..(502): Homolog of NCBI NO: 15485716 NR Description: selenium binding protein [Lotus japonicus]
  misc_feature (25)..(502): Homolog of NCBI NO: 15229520 NR Description: selenium binding protein, putative; protein id:

SEQ ID NO: 92306 - protein, 487 aa, Arabidopsis thaliana; identical to SEQ ID NO: 88550
  peptide (1)..(487): Ceres Seq. ID no. 12710590
  misc_feature (20)..(487): Pfam Name: 56kDa selenium binding protein (SBP56) Pfam Description: 56kDa selenium binding protein (SBP56)
  misc_feature (1)..(487): Homolog of NCBI NO: 15236386 NR Description: selenium-binding protein like; protein id: supported by cDNA: gi_13605824, supported by cDNA: gi_13877734, by cDNA: gi_17473633, supported by cDNA: gi_17473651 [Arabidopsis
  misc_feature (1)..(487): Homolog of NCBI NO: 13605825 NR Description: AT4g14040/dl3061c [Arabidopsis thaliana]
  misc_feature (1)..(487): Homolog of NCBI NO: 22530900 NR Description: selenium-binding protein-like protein
  misc_feature (1)..(487): Homolog of NCBI NO: 25348077 NR Description: selenium-binding protein like [imported] -
  misc_feature (1)..(487): Homolog of NCBI NO: 15236385 NR Description: selenium-binding protein like; protein id:
  misc_feature (23)..(487): Homolog of NCBI NO: 15485232 NR Description: selenium binding protein [Arabidopsis thaliana]
  misc_feature (1)..(394): Homolog of NCBI NO: 7488184 NR Description: probable selenium-binding protein - Arabidopsis
  misc_feature (5)..(487): Homolog of NCBI NO: 15485720 NR Description: selenium binding protein [Medicago sativa]
  misc_feature (5)..(487): Homolog of NCBI NO: 15485716 NR Description: selenium binding protein [Lotus japonicus]
  misc_feature (10)..(487): Homolog of NCBI NO: 15229520 NR Description: selenium binding protein, putative; protein id:

SEQ ID NO: 92307 - protein, 455 aa, Arabidopsis thaliana; identical to SEQ ID NO: 88551
  peptide (1)..(455): Ceres Seq. ID no. 12710591
  misc_feature (1)..(455): Pfam Name: 56kDa selenium binding protein (SBP56) Pfam Description: 56kDa selenium binding protein (SBP56)
  misc_feature (1)..(455): Homolog of NCBI NO: 15236386 NR Description: selenium-binding protein like; protein id: supported by cDNA: gi_13605824, supported by cDNA: gi_13877734, by cDNA: gi_17473633, supported by cDNA: gi_17473651 [Arabidopsis
  misc_feature (1)..(455): Homolog of NCBI NO: 13605825 NR Description: AT4g14040/dl3061c [Arabidopsis thaliana]
  misc_feature (1)..(455): Homolog of NCBI NO: 22530900 NR Description: selenium-binding protein-like protein
  misc_feature (1)..(455): Homolog of NCBI NO: 25348077 NR Description: selenium-binding protein like [imported] -
  misc_feature (1)..(455): Homolog of NCBI NO: 15236385 NR Description: selenium-binding protein like; protein id:
  misc_feature (1)..(455): Homolog of NCBI NO: 15485232 NR Description: selenium binding protein [Arabidopsis thaliana]
  misc_feature (1)..(362): Homolog of NCBI NO: 7488184 NR Description: probable selenium-binding protein - Arabidopsis
  misc_feature (1)..(455): Homolog of NCBI NO: 15485720 NR Description: selenium binding protein [Medicago sativa]
  misc_feature (1)..(455): Homolog of NCBI NO: 15485716 NR Description: selenium binding protein [Lotus japonicus]
  misc_feature (1)..(455): Homolog of NCBI NO: 15229520 NR Description: selenium binding protein, putative; protein id:

SEQ ID NO: 92308 - DNA, 663 bp, Arabidopsis thaliana; identical to SEQ ID NO: 88552
  misc_feature (1)..(663): Ceres Seq. ID no. 12710652
  misc_feature: MA Experiment ID: 20000307 Result: Up-regulated in Transcription
  misc_feature: MA Experiment 20000307 PARAMETER Experiment Name: At_Germinating_Seeds_Sub_P Parameter: Age (hr) Value: 24 vs. 0
  misc_feature: MA Experiment 20000307 PARAMETER Experiment Name: At_Germinating_Seeds_Sub_P Parameter: Organism Value: A. thaliana
  misc_feature: MA Experiment 20000307 PARAMETER Experiment Name: At_Germinating_Seeds_Sub_P Parameter: Plant Line Value: WS
  misc_feature: MA Experiment 20000307 PARAMETER Experiment Name: At_Germinating_Seeds_Sub_P Parameter: Tissue Value: Germinating Seeds
  misc_feature: MA Experiment ID: 20000314 Result: Down-regulated in Transcription
  misc_feature: MA Experiment 20000314 PARAMETER Experiment Name: At_14day_Shoots-Roots_Sub_P Parameter: Age (day) Value: 14
  misc_feature: MA Experiment 20000314 PARAMETER Experiment Name: At_14day_Shoots-Roots_Sub_P Parameter: Organism Value: A. thaliana
  misc_feature: MA Experiment 20000314 PARAMETER Experiment Name: At_14day_Shoots-Roots_Sub_P Parameter: Plant Line Value: WS
  misc_feature: MA Experiment 20000314 PARAMETER Experiment Name: At_14day_Shoots-Roots_Sub_P Parameter: Tissue Value: Roots vs. Whole Plant
  misc_feature: MA Experiment ID: 20000315 Result: Down-regulated in Transcription
  misc_feature: MA Experiment 20000315 PARAMETER Experiment Name: At_14day_Shoots-Roots_Sub_P Parameter: Age (day) Value: 14
  misc_feature: MA Experiment 20000315 PARAMETER Experiment Name: At_14day_Shoots-Roots_Sub_P Parameter: Organism Value: A. thaliana
  misc_feature: MA Experiment 20000315 PARAMETER Experiment Name: At_14day_Shoots-Roots_Sub_P Parameter: Plant Line Value: WS
  misc_feature: MA Experiment 20000315 PARAMETER Experiment Name: At_14day_Shoots-Roots_Sub_P Parameter: Tissue Value: Shoots vs. Whole Plant
  misc_feature: MA Experiment ID: 20000327 Result: Down-regulated in Transcription
  misc_feature: MA Experiment 20000327 PARAMETER Experiment Name: At_42deg_Heat_Sub_P Parameter: Age (day) Value: 14
  misc_feature: MA Experiment 20000327 PARAMETER Experiment Name: At_42deg_Heat_Sub_P Parameter: Organism Value: A. thaliana
  misc_feature: MA Experiment 20000327 PARAMETER Experiment Name: At_42deg_Heat_Sub_P Parameter: Plant Line Value: WS
  misc_feature: MA Experiment 20000327 PARAMETER Experiment Name: At_42deg_Heat_Sub_P Parameter: Temperature (deg C) Value: 42 vs. 22
  misc_feature: MA Experiment 20000327 PARAMETER Experiment Name: At_42deg_Heat_Sub_P Parameter: Timepoint (hr) Value: 1
  misc_feature: MA Experiment 20000327 PARAMETER Experiment Name: At_42deg_Heat_Sub_P Parameter: Tissue Value: Aerial
  misc_feature: MA Experiment ID: 20000346 Result: Up-regulated in Transcription
  misc_feature: MA Experiment 20000346 PARAMETER Experiment Name: At_2mM_SA_Sub_P Parameter: Age (day) Value: 14
  misc_feature: MA Experiment 20000346 PARAMETER Experiment Name: At_2mM_SA_Sub_P Parameter: Organism Value: A. thaliana
  misc_feature: MA Experiment 20000346 PARAMETER Experiment Name: At_2mM_SA_Sub_P Parameter: Plant Line Value: WS
  misc_feature: MA Experiment 20000346 PARAMETER Experiment Name: At_2mM_SA_Sub_P Parameter: Timepoint (hr) Value: 1
  misc_feature: MA Experiment 20000346 PARAMETER Experiment Name: At_2mM_SA_Sub_P Parameter: Tissue Value: Aerial
  misc_feature: MA Experiment 20000346 PARAMETER Experiment Name: At_2mM_SA_Sub_P Parameter: Treatment Value: 2mM SA vs. No Treatment
  misc_feature: MA Experiment ID: 20000352 Result: Up-regulated in Transcription
  misc_feature: MA Experiment 20000352 PARAMETER Experiment Name: At_Drought_Sub_P Parameter: Age (day) Value: 7
  misc_feature: MA Experiment 20000352 PARAMETER Experiment Name: At_Drought_Sub_P Parameter: Organism Value: A. thaliana
  misc_feature: MA Experiment 20000352 PARAMETER Experiment Name: At_Drought_Sub_P Parameter: Plant Line Value: WS
  misc_feature: MA Experiment 20000352 PARAMETER Experiment Name: At_Drought_Sub_P Parameter: Timepoint (hr) Value: 6
  misc_feature: MA Experiment 20000352 PARAMETER Experiment Name: At_Drought_Sub_P Parameter: Tissue Value: Whole Plant
  misc_feature: MA Experiment 20000352 PARAMETER Experiment Name: At_Drought_Sub_P Parameter: Treatment Value: Drought vs. No Drought
  misc_feature: MA Experiment ID: 20000355 Result: Down-regulated in Transcription
  misc_feature: MA Experiment 20000355 PARAMETER Experiment Name: At_Siliques_Sub_P Parameter: Age (day) Value: 21
  misc_feature: MA Experiment 20000355 PARAMETER Experiment Name: At_Siliques_Sub_P Parameter: Organism Value: A. thaliana
  misc_feature: MA Experiment 20000355 PARAMETER Experiment Name: At_Siliques_Sub_P Parameter: Plant Line Value: WS
  misc_feature: MA Experiment 20000355 PARAMETER Experiment Name: At_Siliques_Sub_P Parameter: Tissue Value: Less Than 5mm Siliques vs. Whole Plant
  misc_feature: MA Experiment ID: 20000440 Result: Down-regulated in Transcription
  misc_feature: MA Experiment 20000440 PARAMETER Experiment Name: At_Closed-Flower__Sub_P Parameter: Tissue Value: Closed Flower vs. Whole Plant
  misc_feature: MA Experiment ID: 20000634 Result: Up-regulated in Transcription
  misc_feature: MA Experiment 20000634 PARAMETER Experiment Name: At_10percent_PEG_Sub_P Parameter: Age (day) Value: 12
  misc_feature: MA Experiment 20000634 PARAMETER Experiment Name: At_10percent_PEG_Sub_P Parameter: Organism Value: A. thaliana
  misc_feature: MA Experiment 20000634 PARAMETER Experiment Name: At_10percent_PEG_Sub_P Parameter: Plant Line Value: WS
  misc_feature: MA Experiment 20000634 PARAMETER Experiment Name: At_10percent_PEG_Sub_P Parameter: Timepoint (day) Value: 12
  misc_feature: MA Experiment 20000634 PARAMETER Experiment Name: At_10percent_PEG_Sub_P Parameter: Tissue Value: Whole Plant
  misc_feature: MA Experiment 20000634 PARAMETER Experiment Name: At_10percent_PEG_Sub_P Parameter: Treatment Value: 10% PEG vs. No Treatment
  misc_feature: MA Experiment ID: 20001807 Result: Down-regulated in Transcription
  misc_feature: MA Experiment 20001807 PARAMETER Experiment Name: At_50mM_NH4NO3_L-to-H_Sub_P Parameter: Timepoint (hr) Value: 6
  misc_feature: MA Experiment 20001807 PARAMETER Experiment Name: At_50mM_NH4NO3_L-to-H_Sub_P Parameter: Tissue Value: Leaf
  misc_feature: MA Experiment 20001807 PARAMETER Experiment Name: At_50mM_NH4NO3_L-to-H_Sub_P Parameter: Treatment Value: 50mM NH4NO3 vs 100mM Mannitol

SEQ ID NO: 92309 - protein, 220 aa, Arabidopsis thaliana; identical to SEQ ID NO: 88553
  peptide (1)..(220): Ceres Seq. ID no. 12710653
  misc_feature (1)..(209): Pfam Name: Protein phosphatase 2C Pfam Description: Protein phosphatase 2C
  misc_feature (1)..(220): Homolog of NCBI NO: 15236450 NR Description: protein phosphatase 2C (PP2C), putative; protein At4g08260.1 [Arabidopsis thaliana] >gi|7486866|pir||T10553
  misc_feature (1)..(217): Homolog of NCBI NO: 9294079 NR Description: serine/threonine phosphatase type 2c-like protein
  misc_feature (122)..(217): Homolog of NCBI NO: 22331365 NR Description: protein phosphatase 2C (PP2C), putative; protein
  misc_feature (1)..(93): Homolog of NCBI NO: 22331365 NR Description: protein phosphatase 2C (PP2C), putative; protein
  misc_feature (49)..(216): Homolog of NCBI NO: 15222312 NR Description: protein phosphatase 2C (PP2C); protein id: supported by cDNA: gi_20258779 [Arabidopsis thaliana]
  misc_feature (1)..(48): Homolog of NCBI NO: 15222312 NR Description: protein phosphatase 2C (PP2C); protein id: supported by cDNA: gi_20258779 [Arabidopsis thaliana]
  misc_feature (12)..(220): Homolog of NCBI NO: 15227687 NR Description: protein phosphatase 2C (PP2C); protein id: supported by cDNA: gi_13877670 [Arabidopsis thaliana]
  misc_feature (114)..(216): Homolog of NCBI NO: 25352225 NR Description: hypothetical protein [imported] - Arabidopsis >gi|8954030|gb|AAF82204.1|AC067971_12 Contains similarity to phosphatase 2C from Arabidopsis thaliana gb|AF085279. It contains
  misc_feature (49)..(113): Homolog of NCBI NO: 25352225 NR Description: hypothetical protein [imported] - Arabidopsis >gi|8954030|gb|AAF82204.1|AC067971_12 Contains similarity to phosphatase 2C from Arabidopsis thaliana gb|AF085279. It contains
  misc_feature (1)..(48): Homolog of NCBI NO: 25352225 NR Description: hypothetical protein [imported] - Arabidopsis >gi|8954030|gb|AAF82204.1|AC067971_12 Contains similarity to phosphatase 2C from Arabidopsis thaliana gb|AF085279. It contains

SEQ ID NO: 92310 - protein, 135 aa, Arabidopsis thaliana; identical to SEQ ID NO: 88554
  peptide (1)..(135): Ceres Seq. ID no. 12710654
  misc_feature (1)..(124): Pfam Name: Protein phosphatase 2C Pfam Description: Protein phosphatase 2C
  misc_feature (1)..(135): Homolog of NCBI NO: 15236450 NR Description: protein phosphatase 2C (PP2C), putative; protein At4g08260.1 [Arabidopsis thaliana] >gi|7486866|pir||T10553
  misc_feature (1)..(132): Homolog of NCBI NO: 9294079 NR Description: serine/threonine phosphatase type 2c-like protein
  misc_feature (37)..(132): Homolog of NCBI NO: 22331365 NR Description: protein phosphatase 2C (PP2C), putative; protein
  misc_feature (1)..(131): Homolog of NCBI NO: 15222312 NR Description: protein phosphatase 2C (PP2C); protein id: supported by cDNA: gi_20258779 [Arabidopsis thaliana]
  misc_feature (1)..(135): Homolog of NCBI NO: 15227687 NR Description: protein phosphatase 2C (PP2C); protein id: supported by cDNA: gi_13877670 [Arabidopsis thaliana]
  misc_feature (29)..(131): Homolog of NCBI NO: 25352225 NR Description: hypothetical protein [imported] - Arabidopsis >gi|8954030|gb|AAF82204.1|AC067971_12 Contains similarity to phosphatase 2C from Arabidopsis thaliana gb|AF085279. It contains
  misc_feature (1)..(28): Homolog of NCBI NO: 25352225 NR Description: hypothetical protein [imported] - Arabidopsis >gi|8954030|gb|AAF82204.1|AC067971_12 Contains similarity to phosphatase 2C from Arabidopsis thaliana gb|AF085279. It contains
  misc_feature (1)..(134): Homolog of NCBI NO: 30013681 NR Description: Avr9/Cf-9 rapidly elicited protein 284 [Nicotiana
  misc_feature (1)..(135): Homolog of NCBI NO: 7488754 NR Description: protein phosphatase 2C - alfalfa
  misc_feature (1)..(135): Homolog of NCBI NO: 15225656 NR Description: protein phosphatase 2C (PP2C); protein id: [Arabidopsis thaliana] >gi|25352216|pir||C84826 protein

SEQ ID NO: 92311 - DNA, 958 bp, Arabidopsis thaliana; identical to SEQ ID NO: 88555
  misc_feature (1)..(958): Ceres Seq. ID no. 12710655
  misc_feature: MA Experiment ID: 108434 Result: Down-regulated in Transcription
  misc_feature: MA Experiment 108434 PARAMETER Experiment Name: At_Root_Tips_cDNA_P Parameter: Tissue Value: Root Tips
  misc_feature: MA Experiment ID: 108461 Result: Up-regulated in Transcription
  misc_feature: MA Experiment 108461 PARAMETER Experiment Name: At_Germinating_Seeds_cDNA_P Parameter: Age (day) Value: 1 vs. 0
  misc_feature: MA Experiment 108461 PARAMETER Experiment Name: At_Germinating_Seeds_cDNA_P Parameter: Tissue Value: Germinating Seeds
  misc_feature: MA Experiment ID: 108462 Result: Up-regulated in Transcription
  misc_feature: MA Experiment 108462 PARAMETER Experiment Name: At_Germinating_Seeds_cDNA_P Parameter: Age (day) Value: 2 vs. 0
  misc_feature: MA Experiment 108462 PARAMETER Experiment Name: At_Germinating_Seeds_cDNA_P Parameter: Tissue Value: Germinating Seeds
  misc_feature: MA Experiment ID: 108488 Result: Up-regulated in Transcription
  misc_feature: MA Experiment ID: 108594 Result: Down-regulated in Transcription
  misc_feature: MA Experiment 108594 PARAMETER Experiment Name: At_Ler-rhl_Root_cDNA_P Parameter: Plant Line Value: null
  misc_feature: MA Experiment ID: 108595 Result: Down-regulated in Transcription
  misc_feature: MA Experiment 108595 PARAMETER Experiment Name: At_Ler-pi_Ovule_cDNA_P Parameter: Plant Line Value: null
  misc_feature: MA Experiment ID: 20000090 Result: Down-regulated in Transcription
  misc_feature: MA Experiment ID: 20000307 Result: Up-regulated in Transcription
  misc_feature: MA Experiment 20000307 PARAMETER Experiment Name: At_Germinating_Seeds_Sub_P Parameter: Age (hr) Value: 24 vs. 0
  misc_feature: MA Experiment 20000307 PARAMETER Experiment Name: At_Germinating_Seeds_Sub_P Parameter: Organism Value: A. thaliana
  misc_feature: MA Experiment 20000307 PARAMETER Experiment Name: At_Germinating_Seeds_Sub_P Parameter: Plant Line Value: WS
  misc_feature: MA Experiment 20000307 PARAMETER Experiment Name: At_Germinating_Seeds_Sub_P Parameter: Tissue Value: Germinating Seeds
  misc_feature: MA Experiment ID: 20000314 Result: Down-regulated in Transcription
  misc_feature: MA Experiment 20000314 PARAMETER Experiment Name: At_14day_Shoots-Roots_Sub_P Parameter: Age (day) Value: 14
  misc_feature: MA Experiment 20000314 PARAMETER Experiment Name: At_14day_Shoots-Roots_Sub_P Parameter: Organism Value: A. thaliana
  misc_feature: MA Experiment 20000314 PARAMETER Experiment Name: At_14day_Shoots-Roots_Sub_P Parameter: Plant Line Value: WS
  misc_feature: MA Experiment 20000314 PARAMETER Experiment Name: At_14day_Shoots-Roots_Sub_P Parameter: Tissue Value: Roots vs. Whole Plant
  misc_feature: MA Experiment ID: 20000328 Result: Up-regulated in Transcription
  misc_feature: MA Experiment 20000328 PARAMETER Experiment Name: At_42deg_Heat_Sub_P Parameter: Age (day) Value: 14
  misc_feature: MA Experiment 20000328 PARAMETER Experiment Name: At_42deg_Heat_Sub_P Parameter: Organism Value: A. thaliana
  misc_feature: MA Experiment 20000328 PARAMETER Experiment Name: At_42deg_Heat_Sub_P Parameter: Plant Line Value: WS
  misc_feature: MA Experiment 20000328 PARAMETER Experiment Name: At_42deg_Heat_Sub_P Parameter: Temperature (deg C) Value: 42 vs. 22
  misc_feature: MA Experiment 20000328 PARAMETER Experiment Name: At_42deg_Heat_Sub_P Parameter: Timepoint (hr) Value: 6
  misc_feature: MA Experiment 20000328 PARAMETER Experiment Name: At_42deg_Heat_Sub_P Parameter: Tissue Value: Aerial
  misc_feature: MA Experiment ID: 20001807 Result: Up-regulated in Transcription
  misc_feature: MA Experiment 20001807 PARAMETER Experiment Name: At_50mM_NH4NO3_L-to-H_Sub_P Parameter: Timepoint (hr) Value: 6
  misc_feature: MA Experiment 20001807 PARAMETER Experiment Name: At_50mM_NH4NO3_L-to-H_Sub_P Parameter: Tissue Value: Leaf
  misc_feature: MA Experiment 20001807 PARAMETER Experiment Name: At_50mM_NH4NO3_L-to-H_Sub_P Parameter: Treatment Value: 50mM NH4NO3 vs 100mM Mannitol

SEQ ID NO: 92312 - protein, 265 aa, Arabidopsis thaliana; identical to SEQ ID NO: 88556
  peptide (1)..(265): Ceres Seq. ID no. 12710656
  misc_feature (64)..(232): Pfam Name: Chlorophyll A-B binding protein Pfam Description: Chlorophyll A-B binding protein
  misc_feature (1)..(265): Homolog of NCBI NO: 15224465 NR Description: light-harvesting chlorophyll a/b binding protein; id: At2g05070.1, supported by cDNA: gi_15809900, supported by
  misc_feature (1)..(265): Homolog of NCBI NO: 25299029 NR Description: chlorophyll a/b-binding protein Lhcb2 [imported] Arabidopsis thaliana >gi|4741948|gb|AAD28771.1|AF134124_1 Lhcb2
  misc_feature (1)..(265): Homolog of NCBI NO: 25299022 NR Description: chlorophyll a/b-binding protein Lhcb2 [imported] Arabidopsis thaliana >gi|4741944|gb|AAD28769.1|AF134122_1 Lhcb2
  misc_feature (1)..(264): Homolog of NCBI NO: 15224471 NR Description: light-harvesting chlorophyll a/b binding protein; id: At2g05100.1, supported by cDNA: gi_15450348, supported by gi_15450493, supported by cDNA: gi_4741943, supported by cDNA:
  misc_feature (1)..(265): Homolog of NCBI NO: 15232249 NR Description: light harvesting chlorophyll A/B binding protein, protein id: At3g27690.1, supported by cDNA: 7700., supported by
  misc_feature (1)..(265): Homolog of NCBI NO: 3560529 NR Description: light harvesting chlorophyll A/B binding protein
  misc_feature (1)..(265): Homolog of NCBI NO: 1345698 NR Description: Chlorophyll A-B binding protein 151, chloroplast

SEQ ID NO: 92313 - protein, 229 aa, Arabidopsis thaliana; identical to SEQ ID NO: 88557
  peptide (1)..(229): Ceres Seq. ID no. 12710657
  misc_feature (28)..(196): Pfam Name: Chlorophyll A-B binding protein Pfam Description: Chlorophyll A-B binding protein
  misc_feature (1)..(229): Homolog of NCBI NO: 15224465 NR Description: light-harvesting chlorophyll a/b binding protein; id: At2g05070.1, supported by cDNA: gi_15809900, supported by
  misc_feature (1)..(229): Homolog of NCBI NO: 25299029 NR Description: chlorophyll a/b-binding protein Lhcb2 [imported] Arabidopsis thaliana >gi|4741948|gb|AAD28771.1|AF134124_1 Lhcb2
  misc_feature (1)..(229): Homolog of NCBI NO: 25299022 NR Description: chlorophyll a/b-binding protein Lhcb2 [imported] Arabidopsis thaliana >gi|4741944|gb|AAD28769.1|AF134122_1 Lhcb2
  misc_feature (1)..(228): Homolog of NCBI NO: 15224471 NR Description: light-harvesting chlorophyll a/b binding protein; id: At2g05100.1, supported by cDNA: gi_15450348, supported by gi_15450493, supported by cDNA: gi_4741943, supported by cDNA:
  misc_feature (1)..(229): Homolog of NCBI NO: 15232249 NR Description: light harvesting chlorophyll A/B binding protein, protein id: At3g27690.1, supported by cDNA: 7700., supported by
  misc_feature (1)..(229): Homolog of NCBI NO: 3560529 NR Description: light harvesting chlorophyll A/B binding protein
  misc_feature (1)..(229): Homolog of NCBI NO: 1345698 NR Description: Chlorophyll A-B binding protein 151, chloroplast

SEQ ID NO: 92314 - protein, 160 aa, Arabidopsis thaliana; identical to SEQ ID NO: 25132
  peptide (1)..(160): Ceres Seq. ID no. 12710658
  misc_feature (1)..(127): Pfam Name: Chlorophyll A-B binding protein Pfam Description: Chlorophyll A-B binding protein
  misc_feature (1)..(160): Homolog of NCBI NO: 15224465 NR Description: light-harvesting chlorophyll a/b binding protein; id: At2g05070.1, supported by cDNA: gi_15809900, supported by
  misc_feature (1)..(160): Homolog of NCBI NO: 25299029 NR Description: chlorophyll a/b-binding protein Lhcb2 [imported] Arabidopsis thaliana >gi|4741948|gb|AAD28771.1|AF134124_1 Lhcb2
  misc_feature (1)..(160): Homolog of NCBI NO: 25299022 NR Description: chlorophyll a/b-binding protein Lhcb2 [imported] Arabidopsis thaliana >gi|4741944|gb|AAD28769.1|AF134122_1 Lhcb2
  misc_feature (1)..(159): Homolog of NCBI NO: 15224471 NR Description: light-harvesting chlorophyll a/b binding protein; id: At2g05100.1, supported by cDNA: gi_15450348, supported by gi_15450493, supported by cDNA: gi_4741943, supported by cDNA:
  misc_feature (1)..(160): Homolog of NCBI NO: 15232249 NR Description: light harvesting chlorophyll A/B binding protein, protein id: At3g27690.1, supported by cDNA: 7700., supported by
  misc_feature (1)..(160): Homolog of NCBI NO: 3560529 NR Description: light harvesting chlorophyll A/B binding protein
  misc_feature (1)..(160): Homolog of NCBI NO: 1345698 NR Description: Chlorophyll A-B binding protein 151, chloroplast

SEQ ID NO: 92315 - DNA, 1083 bp, Arabidopsis thaliana; identical to SEQ ID NO: 88559
  misc_feature (1)..(1083): Ceres Seq. ID no. 12710909
  misc_feature: MA Experiment ID: 108573 Result: Up-regulated in Transcription
  misc_feature: MA Experiment 108573 PARAMETER Experiment Name: At_Drought_cDNA_P Parameter: Timepoint (hr) Value: 6
  misc_feature: MA Experiment 108573 PARAMETER Experiment Name: At_Drought_cDNA_P Parameter: Tissue Value: Aerial
  misc_feature: MA Experiment 108573 PARAMETER Experiment Name: At_Drought_cDNA_P Parameter: Treatment Value: Drought vs. No Drought
  misc_feature: MA Experiment ID: 108579 Result: Down-regulated in Transcription
  misc_feature: MA Experiment 108579 PARAMETER Experiment Name: At_4deg_Cold_cDNA_P Parameter: Temperature (deg C) Value: 4 vs. 22
  misc_feature: MA Experiment 108579 PARAMETER Experiment Name: At_4deg_Cold_cDNA_P Parameter: Timepoint (hr) Value: 6
  misc_feature: MA Experiment 108579 PARAMETER Experiment Name: At_4deg_Cold_cDNA_P Parameter: Tissue Value: Aerial

SEQ ID NO: 92316 - protein, 360 aa, Arabidopsis thaliana; identical to SEQ ID NO: 88560
  peptide (1)..(360): Ceres Seq. ID no. 12710910
  misc_feature (1)..(360): Homolog of NCBI NO: 18396221 NR Description: Expressed protein; protein id: At2g06005.1, by cDNA: 253548. [Arabidopsis thaliana] Expressed protein [Arabidopsis thaliana]
  misc_feature (133)..(360): Homolog of NCBI NO: 20453094 NR Description: At2g06010/F5K7.23 [Arabidopsis thaliana]
  misc_feature (204)..(307): Homolog of NCBI NO: 25411202 NR Description: hypothetical protein At2g06010 [imported] -
  misc_feature (231)..(352): Homolog of NCBI NO: 15242018 NR Description: putative protein; protein id: At5g20580.1

SEQ ID NO: 92317 - protein, 349 aa, Arabidopsis thaliana; identical to SEQ ID NO: 88561
  peptide (1)..(349): Ceres Seq. ID no. 12710911
  misc_feature (1)..(349): Homolog of NCBI NO: 18396221 NR Description: Expressed protein; protein id: At2g06005.1, by cDNA: 253548. [Arabidopsis thaliana] Expressed protein [Arabidopsis thaliana]
  misc_feature (122)..(349): Homolog of NCBI NO: 20453094 NR Description: At2g06010/F5K7.23 [Arabidopsis thaliana]
  misc_feature (193)..(296): Homolog of NCBI NO: 25411202 NR Description: hypothetical protein At2g06010 [imported] -
  misc_feature (220)..(341): Homolog of NCBI NO: 15242018 NR Description: putative protein; protein id: At5g20580.1

SEQ ID NO: 92318 - protein, 342 aa, Arabidopsis thaliana; identical to SEQ ID NO: 88562
  peptide (1)..(342): Ceres Seq. ID no. 12710912
  misc_feature (1)..(342): Homolog of NCBI NO: 18396221 NR Description: Expressed protein; protein id: At2g06005.1, by cDNA: 253548. [Arabidopsis thaliana] Expressed protein [Arabidopsis thaliana]
  misc_feature (115)..(342): Homolog of NCBI NO: 20453094 NR Description: At2g06010/F5K7.23 [Arabidopsis thaliana]
  misc_feature (186)..(289): Homolog of NCBI NO: 25411202 NR Description: hypothetical protein At2g06010 [imported] -
  misc_feature (213)..(334): Homolog of NCBI NO: 15242018 NR Description: putative protein; protein id: At5g20580.1

SEQ ID NO: 92319 - DNA, 501 bp, Arabidopsis thaliana; identical to SEQ ID NO: 88563
  misc_feature (1)..(501): Ceres Seq. ID no. 12710913
  misc_feature: MA Experiment ID: 20000184 Result: Down-regulated in Transcription
  misc_feature: MA Experiment 20000184 PARAMETER Experiment Name: At_Shoots__P Parameter: Age (day) Value: 7
  misc_feature: MA Experiment 20000184 PARAMETER Experiment Name: At_Shoots__P Parameter: Tissue Value: Shoots vs. Whole Plant

SEQ ID NO: 92320 - protein, 166 aa, Arabidopsis thaliana; identical to SEQ ID NO: 47917
  peptide (1)..(166): Ceres Seq. ID no. 12710914
  misc_feature (1)..(166): Homolog of NCBI NO: 18396223 NR Description: hypothetical protein; protein id: At2g06010.1, by cDNA: gi_18252842 [Arabidopsis thaliana] unknown protein [Arabidopsis thaliana]
  misc_feature (1)..(164): Homolog of NCBI NO: 38344551 NR Description: OSJNBa0027P08.19 [Oryza sativa (japonica
  misc_feature (12)..(148): Homolog of NCBI NO: 25411202 NR Description: hypothetical protein At2g06010 [imported] -

SEQ ID NO: 92321 - protein, 84 aa, Arabidopsis thaliana; identical to SEQ ID NO: 88565
  peptide (1)..(84): Ceres Seq. ID no. 12710915
  misc_feature (1)..(84): Homolog of NCBI NO: 18396223 NR Description: hypothetical protein; protein id: At2g06010.1, by cDNA: gi_18252842 [Arabidopsis thaliana] unknown protein [Arabidopsis thaliana]
  misc_feature (1)..(82): Homolog of NCBI NO: 38344551 NR Description: OSJNBa0027P08.19 [Oryza sativa (japonica
  misc_feature (1)..(66): Homolog of NCBI NO: 25411202 NR Description: hypothetical protein At2g06010 [imported] -

SEQ ID NO: 92322 - DNA, 1724 bp, Arabidopsis thaliana; identical to SEQ ID NO: 88566
  misc_feature (1)..(1724): Ceres Seq. ID no. 12710988
  misc_feature: MA Experiment ID: 108595 Result: Up-regulated in Transcription
  misc_feature: MA Experiment 108595 PARAMETER Experiment Name: At_Ler-pi_Ovule_cDNA_P Parameter: Plant Line Value: null
  misc_feature: MA Experiment ID: 20000111 Result: Up-regulated in Transcription
  misc_feature: MA Experiment 20000111 PARAMETER Experiment Name: At_42deg_Heat_cDNA_P Parameter: Temperature (deg C) Value: 42 vs. 22
  misc_feature: MA Experiment 20000111 PARAMETER Experiment Name: At_42deg_Heat_cDNA_P Parameter: Timepoint (hr) Value: 6
  misc_feature: MA Experiment 20000111 PARAMETER Experiment Name: At_42deg_Heat_cDNA_P Parameter: Tissue Value: Aerial
  misc_feature: MA Experiment ID: 20000437 Result: Up-regulated in Transcription
  misc_feature: MA Experiment 20000437 PARAMETER Experiment Name: At_Drought_P Parameter: Age (day) Value: 8
  misc_feature: MA Experiment 20000437 PARAMETER Experiment Name: At_Drought_P Parameter: Organism Value: A. thaliana
  misc_feature: MA Experiment 20000437 PARAMETER Experiment Name: At_Drought_P Parameter: Plant Line Value: WS
  misc_feature: MA Experiment 20000437 PARAMETER Experiment Name: At_Drought_P Parameter: Timepoint (hr) Value: 24
  misc_feature: MA Experiment 20000437 PARAMETER Experiment Name: At_Drought_P Parameter: Tissue Value: Whole Plant
  misc_feature: MA Experiment 20000437 PARAMETER Experiment Name: At_Drought_P Parameter: Treatment Value: Drought vs. No Drought

SEQ ID NO: 92323 - protein, 314 aa, Arabidopsis thaliana; identical to SEQ ID NO: 88567
  peptide (1)..(314): Ceres Seq. ID no. 12710989
  misc_feature (12)..(309): Pfam Name: Protein of unknown function (DUF789) Pfam Description: Protein of unknown function (DUF789)
  misc_feature (1)..(314): Homolog of NCBI NO: 15219407 NR Description: hypothetical protein; protein id: At1g73210.1
  misc_feature (1)..(314): Homolog of NCBI NO: 27754726 NR Description: unknown protein [Arabidopsis thaliana]
  misc_feature (1)..(313): Homolog of NCBI NO: 18394539 NR Description: expressed protein; protein id: At1g17830.1, by cDNA: 37923. [Arabidopsis thaliana] >gi|25373434|pir||D86313
  misc_feature (1)..(313): Homolog of NCBI NO: 21593308 NR Description: unknown [Arabidopsis thaliana]
  misc_feature (9)..(309): Homolog of NCBI NO: 22328289 NR Description: hypothetical protein; protein id: At4g03420.1, by cDNA: gi_18650615, supported by cDNA: gi_20453246 [Arabidopsis >gi|18650616|gb|AAL75907.1| AT4g03420/F9H3_4 [Arabidopsis
  misc_feature (9)..(309): Homolog of NCBI NO: 25373431 NR Description: hypothetical protein AT4g03420 [imported] - thaliana >gi|4206196|gb|AAD11584.1|AAD11584 hypothetical protein thaliana] >gi|7270212|emb|CAB77827.1| hypothetical protein
  misc_feature (7)..(313): Homolog of NCBI NO: 18958013 NR Description: At1g03610/F21B7_13 [Arabidopsis thaliana]
  misc_feature (7)..(313): Homolog of NCBI NO: 18379117 NR Description: expressed protein; protein id: At1g03610.1, by cDNA: 123030., supported by cDNA: gi_18958012 [Arabidopsis
  misc_feature (7)..(313): Homolog of NCBI NO: 9280648 NR Description: F21B7.22 [Arabidopsis thaliana]
  misc_feature (4)..(310): Homolog of NCBI NO: 37535654 NR Description: unknown protein [Oryza sativa (japonica

SEQ ID NO: 92324 - protein, 261 aa, Arabidopsis thaliana; identical to SEQ ID NO: 42859
  peptide (1)..(261): Ceres Seq. ID no. 12710990
  misc_feature (1)..(256): Pfam Name: Protein of unknown function (DUF789) Pfam Description: Protein of unknown function (DUF789)
  misc_feature (1)..(261): Homolog of NCBI NO: 15219407 NR Description: hypothetical protein; protein id: At1g73210.1
  misc_feature (1)..(261): Homolog of NCBI NO: 27754726 NR Description: unknown protein [Arabidopsis thaliana]
  misc_feature (1)..(260): Homolog of NCBI NO: 18394539 NR Description: expressed protein; protein id: At1g17830.1, by cDNA: 37923. [Arabidopsis thaliana] >gi|25373434|pir||D86313
  misc_feature (1)..(260): Homolog of NCBI NO: 21593308 NR Description: unknown [Arabidopsis thaliana]
  misc_feature (1)..(256): Homolog of NCBI NO: 22328289 NR Description: hypothetical protein; protein id: At4g03420.1, by cDNA: gi_18650615, supported by cDNA: gi_20453246 [Arabidopsis >gi|18650616|gb|AAL75907.1| AT4g03420/F9H3_4 [Arabidopsis
  misc_feature (1)..(256): Homolog of NCBI NO: 25373431 NR Description: hypothetical protein AT4g03420 [imported] - thaliana >gi|4206196|gb|AAD11584.1|AAD11584 hypothetical protein thaliana] >gi|7270212|emb|CAB77827.1| hypothetical protein
  misc_feature (1)..(260): Homolog of NCBI NO: 18958013 NR Description: At1g03610/F21B7_13 [Arabidopsis thaliana]
  misc_feature (1)..(260): Homolog of NCBI NO: 18379117 NR Description: expressed protein; protein id: At1g03610.1, by cDNA: 123030., supported by cDNA: gi_18958012 [Arabidopsis
  misc_feature (1)..(260): Homolog of NCBI NO: 9280648 NR Description: F21B7.22 [Arabidopsis thaliana]
  misc_feature (1)..(257): Homolog of NCBI NO: 37535654 NR Description: unknown protein [Oryza sativa (japonica

SEQ ID NO: 92325 - protein, 243 aa, Arabidopsis thaliana; identical to SEQ ID NO: 42860
  peptide (1)..(243): Ceres Seq. ID no. 12710991
  misc_feature (1)..(238): Pfam Name: Protein of unknown function (DUF789) Pfam Description: Protein of unknown function (DUF789)
  misc_feature (1)..(243): Homolog of NCBI NO: 15219407 NR Description: hypothetical protein; protein id: At1g73210.1
  misc_feature (1)..(243): Homolog of NCBI NO: 27754726 NR Description: unknown protein [Arabidopsis thaliana]
  misc_feature (1)..(242): Homolog of NCBI NO: 18394539 NR Description: expressed protein; protein id: At1g17830.1, by cDNA: 37923. [Arabidopsis thaliana] >gi|25373434|pir||D86313
  misc_feature (1)..(242): Homolog of NCBI NO: 21593308 NR Description: unknown [Arabidopsis thaliana]
  misc_feature (1)..(238): Homolog of NCBI NO: 22328289 NR Description: hypothetical protein; protein id: At4g03420.1, by cDNA: gi_18650615, supported by cDNA: gi_20453246 [Arabidopsis >gi|18650616|gb|AAL75907.1| AT4g03420/F9H3_4 [Arabidopsis
  misc_feature (1)..(238): Homolog of NCBI NO: 25373431 NR Description: hypothetical protein AT4g03420 [imported] - thaliana >gi|4206196|gb|AAD11584.1|AAD11584 hypothetical protein thaliana] >gi|7270212|emb|CAB77827.1| hypothetical protein
  misc_feature (1)..(242): Homolog of NCBI NO: 18958013 NR Description: At1g03610/F21B7_13 [Arabidopsis thaliana]
  misc_feature (1)..(242): Homolog of NCBI NO: 18379117 NR Description: expressed protein; protein id: At1g03610.1, by cDNA: 123030., supported by cDNA: gi_18958012 [Arabidopsis
  misc_feature (1)..(242): Homolog of NCBI NO: 9280648 NR Description: F21B7.22 [Arabidopsis thaliana]
  misc_feature (1)..(239): Homolog of NCBI NO: 37535654 NR Description: unknown protein [Oryza sativa (japonica

SEQ ID NO: 92326 - DNA, 894 bp, Arabidopsis thaliana; identical to SEQ ID NO: 88570
  misc_feature (1)..(894): Ceres Seq. ID no. 12710992
  misc_feature: MA Experiment ID: 108434 Result: Up-regulated in Transcription
  misc_feature: MA Experiment 108434 PARAMETER Experiment Name: At_Root_Tips_cDNA_P Parameter: Tissue Value: Root Tips
  misc_feature: MA Experiment ID: 108462 Result: Down-regulated in Transcription
  misc_feature: MA Experiment 108462 PARAMETER Experiment Name: At_Germinating_Seeds_cDNA_P Parameter: Age (day) Value: 2 vs. 0
  misc_feature: MA Experiment 108462 PARAMETER Experiment Name: At_Germinating_Seeds_cDNA_P Parameter: Tissue Value: Germinating Seeds
  misc_feature: MA Experiment ID: 108463 Result: Down-regulated in Transcription
  misc_feature: MA Experiment 108463 PARAMETER Experiment Name: At_Germinating_Seeds_cDNA_P Parameter: Age (day) Value: 3 vs. 0
  misc_feature: MA Experiment 108463 PARAMETER Experiment Name: At_Germinating_Seeds_cDNA_P Parameter: Tissue Value: Germinating Seeds
  misc_feature: MA Experiment ID: 108464 Result: Down-regulated in Transcription
  misc_feature: MA Experiment 108464 PARAMETER Experiment Name: At_Germinating_Seeds_cDNA_P Parameter: Age (day) Value: 4 vs. 0
  misc_feature: MA Experiment 108464 PARAMETER Experiment Name: At_Germinating_Seeds_cDNA_P Parameter: Tissue Value: Germinating Seeds
  misc_feature: MA Experiment ID: 108573 Result: Down-regulated in Transcription
  misc_feature: MA Experiment 108573 PARAMETER Experiment Name: At_Drought_cDNA_P Parameter: Timepoint (hr) Value: 6
  misc_feature: MA Experiment 108573 PARAMETER Experiment Name: At_Drought_cDNA_P Parameter: Tissue Value: Aerial
  misc_feature: MA Experiment 108573 PARAMETER Experiment Name: At_Drought_cDNA_P Parameter: Treatment Value: Drought vs. No Drought
  misc_feature: MA Experiment ID: 20000234 Result: Up-regulated in Transcription
  misc_feature: MA Experiment 20000234 PARAMETER Experiment Name: At_Siliques_P Parameter: Age (day) Value: 21
  misc_feature: MA Experiment 20000234 PARAMETER Experiment Name: At_Siliques_P Parameter: Organism Value: A. thaliana
  misc_feature: MA Experiment 20000234 PARAMETER Experiment Name: At_Siliques_P Parameter: Plant Line Value: WS
  misc_feature: MA Experiment 20000234 PARAMETER Experiment Name: At_Siliques_P Parameter: Tissue Value: Less Than 5mm Siliques vs. Whole Plant
  misc_feature: MA Experiment ID: 20000437 Result: Down-regulated in Transcription
  misc_feature: MA Experiment 20000437 PARAMETER Experiment Name: At_Drought_P Parameter: Age (day) Value: 8
  misc_feature: MA Experiment 20000437 PARAMETER Experiment Name: At_Drought_P Parameter: Organism Value: A. thaliana
  misc_feature: MA Experiment 20000437 PARAMETER Experiment Name: At_Drought_P Parameter: Plant Line Value: WS
  misc_feature: MA Experiment 20000437 PARAMETER Experiment Name: At_Drought_P Parameter: Timepoint (hr) Value: 24
  misc_feature: MA Experiment 20000437 PARAMETER Experiment Name: At_Drought_P Parameter: Tissue Value: Whole Plant
  misc_feature: MA Experiment 20000437 PARAMETER Experiment Name: At_Drought_P Parameter: Treatment Value: Drought vs. No Drought
  misc_feature: MA Experiment ID: 20000496 Result: Up-regulated in Transcription
  misc_feature: MA Experiment 20000496 PARAMETER Experiment Name: At_Guard_Cells_P Parameter: Harvest Date Value: 7/19/2002
  misc_feature: MA Experiment 20000496 PARAMETER Experiment Name: At_Guard_Cells_P Parameter: Organism Value: Canola
  misc_feature: MA Experiment 20000496 PARAMETER Experiment Name: At_Guard_Cells_P Parameter: Tissue Value: Guard Cells vs. Leaves
  misc_feature: MA Experiment ID: 20000794 Result: Down-regulated in Transcription
  misc_feature: MA Experiment 20000794 PARAMETER Experiment Name: At_Petals_P Parameter: Age (day) Value: 23-25 days
  misc_feature: MA Experiment 20000794 PARAMETER Experiment Name: At_Petals_P Parameter: Plant Line Value: WS
  misc_feature: MA Experiment 20000794 PARAMETER Experiment Name: At_Petals_P Parameter: Tissue Value: Petals vs. Whole plant
  misc_feature: MA Experiment ID: 20001558 Result: Up-regulated in Transcription
  misc_feature: MA Experiment 20001558 PARAMETER Experiment Name: At_Drought_Soil_Dry_P Parameter: Age (day) Value: 27
  misc_feature: MA Experiment 20001558 PARAMETER Experiment Name: At_Drought_Soil_Dry_P Parameter: Organism Value: A. thaliana
  misc_feature: MA Experiment 20001558 PARAMETER Experiment Name: At_Drought_Soil_Dry_P Parameter: Plant Line Value: WS
  misc_feature: MA Experiment 20001558 PARAMETER Experiment Name: At_Drought_Soil_Dry_P Parameter: Post Timepoint (hr) Value: 6
  misc_feature: MA Experiment 20001558 PARAMETER Experiment Name: At_Drought_Soil_Dry_P Parameter: Post-Treatment Value: Re-Water vs. No Drought
  misc_feature: MA Experiment 20001558 PARAMETER Experiment Name: At_Drought_Soil_Dry_P Parameter: Timepoint (day) Value: 13
  misc_feature: MA Experiment 20001558 PARAMETER Experiment Name: At_Drought_Soil_Dry_P Parameter: Treatment Value: Drought vs. No Drought
  misc_feature: MA Experiment ID: 20001757 Result: Up-regulated in Transcription
  misc_feature: MA Experiment 20001757 PARAMETER Experiment Name: At_50mM_NH4NO3_L-to-H_P Parameter: Timepoint (hr) Value: 6
  misc_feature: MA Experiment 20001757 PARAMETER Experiment Name: At_50mM_NH4NO3_L-to-H_P Parameter: Tissue Value: Leaf
  misc_feature: MA Experiment 20001757 PARAMETER Experiment Name: At_50mM_NH4NO3_L-to-H_P Parameter: Treatment Value: 50mM NH4NO3 vs 100mM Mannitol

SEQ ID NO: 92327 - protein, 165 aa, Arabidopsis thaliana; identical to SEQ ID NO: 41188
  peptide (1)..(165): Ceres Seq. ID no. 12710993
  misc_feature (34)..(92): Pfam Name: NAC domain Pfam Description: NAC domain
  misc_feature (1)..(165): Homolog of NCBI NO: 15219413 NR Description: putative transcription factor BTF3 (RNA B transcription factor 3); protein id: At1g73230.1, supported by
  misc_feature (1)..(165): Homolog of NCBI NO: 21537065 NR Description: putative transcription factor BTF3 (RNA
  misc_feature (1)..(165): Homolog of NCBI NO: 15220876 NR Description: transcription factor, putative; protein id: supported by cDNA: 1105., supported by cDNA: gi_12083221, by cDNA: gi_15027872, supported by cDNA: gi_16323126, supported
  misc_feature (1)..(165): Homolog of NCBI NO: 16323127 NR Description: At1g17880/F2H15_10 [Arabidopsis thaliana]
  misc_feature (1)..(164): Homolog of NCBI NO: 33945882 NR Description: transcription factor homolog BTF3-like protein
  misc_feature (1)..(165): Homolog of NCBI NO: 24431603 NR Description: Putative transcription factor [Oryza sativa
  misc_feature (1)..(165): Homolog of NCBI NO: 29367567 NR Description: putative transcription factor BTF3 [Oryza sativa
  misc_feature (1)..(158): Homolog of NCBI NO: 37535464 NR Description: putative transcription factor [Oryza sativa
  misc_feature (1)..(157): Homolog of NCBI NO: 27573340 NR Description: putative transcription factor [Oryza sativa
  misc_feature (9)..(164): Homolog of NCBI NO: 25956272 NR Description: unnamed protein product [Lotus japonicus]

SEQ ID NO: 92328 - protein, 159 aa, Arabidopsis thaliana; identical to SEQ ID NO: 41189
  peptide (1)..(159): Ceres Seq. ID no. 12710994
  misc_feature (28)..(86): Pfam Name: NAC domain Pfam Description: NAC domain
  misc_feature (1)..(159): Homolog of NCBI NO: 15219413 NR Description: putative transcription factor BTF3 (RNA B transcription factor 3); protein id: At1g73230.1, supported by
  misc_feature (1)..(159): Homolog of NCBI NO: 21537065 NR Description: putative transcription factor BTF3 (RNA
  misc_feature (1)..(159): Homolog of NCBI NO: 15220876 NR Description: transcription factor, putative; protein id: supported by cDNA: 1105., supported by cDNA: gi_12083221, by cDNA: gi_15027872, supported by cDNA: gi_16323126, supported
  misc_feature (1)..(159): Homolog of NCBI NO: 16323127 NR Description: At1g17880/F2H15_10 [Arabidopsis thaliana]
  misc_feature (1)..(158): Homolog of NCBI NO: 33945882 NR Description: transcription factor homolog BTF3-like protein
  misc_feature (1)..(159): Homolog of NCBI NO: 24431603 NR Description: Putative transcription factor [Oryza sativa
  misc_feature (1)..(159): Homolog of NCBI NO: 29367567 NR Description: putative transcription factor BTF3 [Oryza sativa
  misc_feature (1)..(152): Homolog of NCBI NO: 37535464 NR Description: putative transcription factor [Oryza sativa
  misc_feature (1)..(151): Homolog of NCBI NO: 27573340 NR Description: putative transcription factor [Oryza sativa
  misc_feature (3)..(158): Homolog of NCBI NO: 25956272 NR Description: unnamed protein product [Lotus japonicus]

SEQ ID NO: 92329 - protein, 157 aa, Arabidopsis thaliana; identical to SEQ ID NO: 41190
  peptide (1)..(157): Ceres Seq. ID no. 12710995
  misc_feature (26)..(84): Pfam Name: NAC domain Pfam Description: NAC domain
  misc_feature (1)..(157): Homolog of NCBI NO: 15219413 NR Description: putative transcription factor BTF3 (RNA B transcription factor 3); protein id: At1g73230.1, supported by
  misc_feature (1)..(157): Homolog of NCBI NO: 21537065 NR Description: putative transcription factor BTF3 (RNA
  misc_feature (1)..(157): Homolog of NCBI NO: 15220876 NR Description: transcription factor, putative; protein id: supported by cDNA: 1105., supported by cDNA: gi_12083221, by cDNA: gi_15027872, supported by cDNA: gi_16323126, supported
  misc_feature (1)..(157): Homolog of NCBI NO: 16323127 NR Description: At1g17880/F2H15_10 [Arabidopsis thaliana]
  misc_feature (1)..(156): Homolog of NCBI NO: 33945882 NR Description: transcription factor homolog BTF3-like protein
  misc_feature (1)..(157): Homolog of NCBI NO: 24431603 NR Description: Putative transcription factor [Oryza sativa
  misc_feature (1)..(157): Homolog of NCBI NO: 29367567 NR Description: putative transcription factor BTF3 [Oryza sativa
  misc_feature (1)..(150): Homolog of NCBI NO: 37535464 NR Description: putative transcription factor [Oryza sativa
  misc_feature (1)..(149): Homolog of NCBI NO: 27573340 NR Description: putative transcription factor [Oryza sativa
  misc_feature (1)..(156): Homolog of NCBI NO: 25956272 NR Description: unnamed protein product [Lotus japonicus]

SEQ ID NO: 92330 - DNA, 1308 bp, Arabidopsis thaliana; identical to SEQ ID NO: 88574
  misc_feature (1)..(1308): Ceres Seq. ID no. 12710999
  misc_feature: MA Experiment ID: 20000328 Result: Down-regulated in Transcription
  misc_feature: MA Experiment 20000328 PARAMETER Experiment Name: At_42deg_Heat_Sub_P Parameter: Age (day) Value: 14
  misc_feature: MA Experiment 20000328 PARAMETER Experiment Name: At_42deg_Heat_Sub_P Parameter: Organism Value: A. thaliana
  misc_feature: MA Experiment 20000328 PARAMETER Experiment Name: At_42deg_Heat_Sub_P Parameter: Plant Line Value: WS
  misc_feature: MA Experiment 20000328 PARAMETER Experiment Name: At_42deg_Heat_Sub_P Parameter: Temperature (deg C) Value: 42 vs. 22
  misc_feature: MA Experiment 20000328 PARAMETER Experiment Name: At_42deg_Heat_Sub_P Parameter: Timepoint (hr) Value: 6
  misc_feature: MA Experiment 20000328 PARAMETER Experiment Name: At_42deg_Heat_Sub_P Parameter: Tissue Value: Aerial
  misc_feature: MA Experiment ID: 20000440 Result: Up-regulated in Transcription
  misc_feature: MA Experiment 20000440 PARAMETER Experiment Name: At_Closed-Flower__Sub_P Parameter: Tissue Value: Closed Flower vs. Whole Plant

SEQ ID NO: 92331 - protein, 435 aa, Arabidopsis thaliana; identical to SEQ ID NO: 88575
  peptide (1)..(435): Ceres Seq. ID no. 12711000
  misc_feature (37)..(432): Pfam Name: Serine carboxypeptidase Pfam Description: Serine carboxypeptidase
  misc_feature (1)..(435): Homolog of NCBI NO: 15219435 NR Description: putative serine carboxypeptidase; protein id: [Arabidopsis thaliana] >gi|12324317|gb|AAG52126.1|AC010556_8
  misc_feature (1)..(275): Homolog of NCBI NO: 25289774 NR Description: probable serine carboxypeptidase T9L24.47 - Arabidopsis thaliana >gi|11120810|gb|AAG30990.1|AC012396_26
  misc_feature (299)..(435): Homolog of NCBI NO: 25289774 NR Description: probable serine carboxypeptidase T9L24.47 - Arabidopsis thaliana >gi|11120810|gb|AAG30990.1|AC012396_26
  misc_feature (1)..(435): Homolog of NCBI NO: 15219433 NR Description: putative serine carboxypeptidase; protein id: [Arabidopsis thaliana] >gi|25289779|pir||C96759 protein serine
  misc_feature (1)..(435): Homolog of NCBI NO: 15219429 NR Description: putative serine carboxypeptidase; protein id: [Arabidopsis thaliana] >gi|25289788|pir||A96759 protein serine
  misc_feature (1)..(435): Homolog of NCBI NO: 22327401 NR Description: serine carboxypeptidase; protein id: At5g36180.1, by cDNA: gi_20260289 [Arabidopsis thaliana] serine carboxypeptidase [Arabidopsis thaliana]
  misc_feature (1)..(435): Homolog of NCBI NO: 8777303 NR Description: serine carboxypeptidase [Arabidopsis thaliana]
  misc_feature (4)..(435): Homolog of NCBI NO: 15219431 NR Description: putative serine carboxypeptidase; protein id: [Arabidopsis thaliana] >gi|25289778|pir||B96759 protein serine
  misc_feature (1)..(435): Homolog of NCBI NO: 15219427 NR Description: putative serine carboxypeptidase; protein id: [Arabidopsis thaliana] >gi|25289777|pir||H96758 protein serine
  misc_feature (1)..(435): Homolog of NCBI NO: 15228300 NR Description: putative glucose acyltransferase; protein id: [Arabidopsis thaliana] >gi|8567775|gb|AAF76347.1| glucose putative [Arabidopsis thaliana]

SEQ ID NO: 92332 - protein, 333 aa, Arabidopsis thaliana; identical to SEQ ID NO: 88576
  peptide (1)..(333): Ceres Seq. ID no. 12711001
  misc_feature (1)..(330): Pfam Name: Serine carboxypeptidase Pfam Description: Serine carboxypeptidase
  misc_feature (1)..(333): Homolog of NCBI NO: 15219435 NR Description: putative serine carboxypeptidase; protein id: [Arabidopsis thaliana] >gi|12324317|gb|AAG52126.1|AC010556_8
  misc_feature (1)..(173): Homolog of NCBI NO: 25289774 NR Description: probable serine carboxypeptidase T9L24.47 - Arabidopsis thaliana >gi|11120810|gb|AAG30990.1|AC012396_26
  misc_feature (197)..(333): Homolog of NCBI NO: 25289774 NR Description: probable serine carboxypeptidase T9L24.47 - Arabidopsis thaliana >gi|11120810|gb|AAG30990.1|AC012396_26
  misc_feature (1)..(333): Homolog of NCBI NO: 15219433 NR Description: putative serine carboxypeptidase; protein id: [Arabidopsis thaliana] >gi|25289779|pir||C96759 protein serine
  misc_feature (1)..(333): Homolog of NCBI NO: 15219429 NR Description: putative serine carboxypeptidase; protein id: [Arabidopsis thaliana] >gi|25289788|pir||A96759 protein serine
  misc_feature (1)..(333): Homolog of NCBI NO: 22327401 NR Description: serine carboxypeptidase; protein id: At5g36180.1, by cDNA: gi_20260289 [Arabidopsis thaliana] serine carboxypeptidase [Arabidopsis thaliana]
  misc_feature (1)..(333): Homolog of NCBI NO: 8777303 NR Description: serine carboxypeptidase [Arabidopsis thaliana]
  misc_feature (1)..(333): Homolog of NCBI NO: 15219431 NR Description: putative serine carboxypeptidase; protein id: [Arabidopsis thaliana] >gi|25289778|pir||B96759 protein serine
  misc_feature (1)..(333): Homolog of NCBI NO: 15219427 NR Description: putative serine carboxypeptidase; protein id: [Arabidopsis thaliana] >gi|25289777|pir||H96758 protein serine
  misc_feature (1)..(333): Homolog of NCBI NO: 15228300 NR Description: putative glucose acyltransferase; protein id: [Arabidopsis thaliana] >gi|8567775|gb|AAF76347.1| glucose putative [Arabidopsis thaliana]

SEQ ID NO: 92333 - protein, 308 aa, Arabidopsis thaliana; identical to SEQ ID NO: 88577
  peptide (1)..(308): Ceres Seq. ID no. 12711002
  misc_feature (1)..(305): Pfam Name: Serine carboxypeptidase Pfam Description: Serine carboxypeptidase
  misc_feature (1)..(308): Homolog of NCBI NO: 15219435 NR Description: putative serine carboxypeptidase; protein id: [Arabidopsis thaliana] >gi|12324317|gb|AAG52126.1|AC010556_8
  misc_feature (1)..(148): Homolog of NCBI NO: 25289774 NR Description: probable serine carboxypeptidase T9L24.47 - Arabidopsis thaliana >gi|11120810|gb|AAG30990.1|AC012396_26
  misc_feature (172)..(308): Homolog of NCBI NO: 25289774 NR Description: probable serine carboxypeptidase T9L24.47 - Arabidopsis thaliana >gi|11120810|gb|AAG30990.1|AC012396_26
  misc_feature (1)..(308): Homolog of NCBI NO: 15219433 NR Description: putative serine carboxypeptidase; protein id: [Arabidopsis thaliana] >gi|25289779|pir||C96759 protein serine
  misc_feature (1)..(308): Homolog of NCBI NO: 15219429 NR Description: putative serine carboxypeptidase; protein id: [Arabidopsis thaliana] >gi|25289788|pir||A96759 protein serine
  misc_feature (1)..(308): Homolog of NCBI NO: 22327401 NR Description: serine carboxypeptidase; protein id: At5g36180.1, by cDNA: gi_20260289 [Arabidopsis thaliana] serine carboxypeptidase [Arabidopsis thaliana]
  misc_feature (1)..(308): Homolog of NCBI NO: 8777303 NR Description: serine carboxypeptidase [Arabidopsis thaliana]
  misc_feature (1)..(308): Homolog of NCBI NO: 15219431 NR Description: putative serine carboxypeptidase; protein id: [Arabidopsis thaliana] >gi|25289778|pir||B96759 protein serine
  misc_feature (1)..(308): Homolog of NCBI NO: 15219427 NR Description: putative serine carboxypeptidase; protein id: [Arabidopsis thaliana] >gi|25289777|pir||H96758 protein serine
  misc_feature (1)..(308): Homolog of NCBI NO: 15228300 NR Description: putative glucose acyltransferase; protein id: [Arabidopsis thaliana] >gi|8567775|gb|AAF76347.1| glucose putative [Arabidopsis thaliana]

SEQ ID NO: 92334 - DNA, 1563 bp, Arabidopsis thaliana; identical to SEQ ID NO: 88578
  misc_feature (1)..(1563): Ceres Seq. ID no. 12711003
  misc_feature: MA Experiment ID: 20000185 Result: Up-regulated in Transcription
  misc_feature: MA Experiment 20000185 PARAMETER Experiment Name: At_Roots__P Parameter: Age (day) Value: 7 vs. 21
  misc_feature: MA Experiment 20000185 PARAMETER Experiment Name: At_Roots__P Parameter: Organism Value: A. thaliana
  misc_feature: MA Experiment 20000185 PARAMETER Experiment Name: At_Roots__P Parameter: Tissue Value: Roots vs. Whole Plant
  misc_feature: MA Experiment ID: 20000437 Result: Down-regulated in Transcription
  misc_feature: MA Experiment 20000437 PARAMETER Experiment Name: At_Drought_P Parameter: Age (day) Value: 8
  misc_feature: MA Experiment 20000437 PARAMETER Experiment Name: At_Drought_P Parameter: Organism Value: A. thaliana
  misc_feature: MA Experiment 20000437 PARAMETER Experiment Name: At_Drought_P Parameter: Plant Line Value: WS
  misc_feature: MA Experiment 20000437 PARAMETER Experiment Name: At_Drought_P Parameter: Timepoint (hr) Value: 24
  misc_feature: MA Experiment 20000437 PARAMETER Experiment Name: At_Drought_P Parameter: Tissue Value: Whole Plant
  misc_feature: MA Experiment 20000437 PARAMETER Experiment Name: At_Drought_P Parameter: Treatment Value: Drought vs. No Drought

SEQ ID NO: 92335 - protein, 520 aa, Arabidopsis thaliana; identical to SEQ ID NO: 88579
  peptide (1)..(520): Ceres Seq. ID no. 12711004
  misc_feature (230)..(510): Pfam Name: Cytochrome P450 Pfam Description: Cytochrome P450
  misc_feature (1)..(520): Homolog of NCBI NO: 15219454 NR Description: steroid 22-alpha-hydroxylase, putative; protein
  misc_feature (103)..(514): Homolog of NCBI NO: 15239203 NR Description: cytochrome p450, putative; protein id: supported by cDNA: 36334., supported by cDNA: gi_14596098, by cDNA: gi_15450716, supported by cDNA: gi_17380617, supported
  misc_feature (20)..(111): Homolog of NCBI NO: 15239203 NR Description: cytochrome p450, putative; protein id: supported by cDNA: 36334., supported by cDNA: gi_14596098, by cDNA: gi_15450716, supported by cDNA: gi_17380617, supported
  misc_feature (103)..(516): Homolog of NCBI NO: 9587211 NR Description: cytochrome P450 [Vigna radiata]
  misc_feature (14)..(114): Homolog of NCBI NO: 9587211 NR Description: cytochrome P450 [Vigna radiata]
  misc_feature (31)..(516): Homolog of NCBI NO: 34902330 NR Description: Putative steroid 22-alpha-hydroxylase [Oryza
  misc_feature (93)..(512): Homolog of NCBI NO: 18400142 NR Description: cytochrome P450, putative; protein id: supported by cDNA: gi_14971016 [Arabidopsis thaliana] CYP90D [Arabidopsis thaliana] >gi|28393374|gb|AAO42111.1|
  misc_feature (42)..(75): Homolog of NCBI NO: 18400142 NR Description: cytochrome P450, putative; protein id: supported by cDNA: gi_14971016 [Arabidopsis thaliana] CYP90D [Arabidopsis thaliana] >gi|28393374|gb|AAO42111.1|
  misc_feature (291)..(512): Homolog of NCBI NO: 15229822 NR Description: steroid 22-alpha-hydroxylase (DWF4); protein id:
  misc_feature (103)..(277): Homolog of NCBI NO: 15229822 NR Description: steroid 22-alpha-hydroxylase (DWF4); protein id:

SEQ ID NO: 92336 - protein, 391 aa, Arabidopsis thaliana; identical to SEQ ID NO: 88580
  peptide (1)..(391): Ceres Seq. ID no. 12711005
  misc_feature (101)..(381): Pfam Name: Cytochrome P450 Pfam Description: Cytochrome P450
  misc_feature (1)..(391): Homolog of NCBI NO: 15219454 NR Description: steroid 22-alpha-hydroxylase, putative; protein
  misc_feature (1)..(385): Homolog of NCBI NO: 15239203 NR Description: cytochrome p450, putative; protein id: supported by cDNA: 36334., supported by cDNA: gi_14596098, by cDNA: gi_15450716, supported by cDNA: gi_17380617, supported
  misc_feature (1)..(387): Homolog of NCBI NO: 9587211 NR Description: cytochrome P450 [Vigna radiata]
  misc_feature (1)..(387): Homolog of NCBI NO: 34902330 NR Description: Putative steroid 22-alpha-hydroxylase [Oryza
  misc_feature (1)..(383): Homolog of NCBI NO: 18400142 NR Description: cytochrome P450, putative; protein id: supported by cDNA: gi_14971016 [Arabidopsis thaliana] CYP90D [Arabidopsis thaliana] >gi|28393374|gb|AAO42111.1|
  misc_feature (162)..(383): Homolog of NCBI NO: 15229822 NR Description: steroid 22-alpha-hydroxylase (DWF4); protein id:
  misc_feature (1)..(148): Homolog of NCBI NO: 15229822 NR Description: steroid 22-alpha-hydroxylase (DWF4); protein id:
  misc_feature (162)..(383): Homolog of NCBI NO: 2935342 NR Description: steroid 22-alpha-hydroxylase; DWF4; CYP90B1
  misc_feature (1)..(148): Homolog of NCBI NO: 2935342 NR Description: steroid 22-alpha-hydroxylase; DWF4; CYP90B1
  misc_feature (1)..(348): Homolog of NCBI NO: 9294019 NR Description: cytochrome P450-like protein [Arabidopsis

SEQ ID NO: 92337 - protein, 349 aa, Arabidopsis thaliana; identical to SEQ ID NO: 88581
  peptide (1)..(349): Ceres Seq. ID no. 12711006
  misc_feature (59)..(339): Pfam Name: Cytochrome P450 Pfam Description: Cytochrome P450
  misc_feature (1)..(349): Homolog of NCBI NO: 15219454 NR Description: steroid 22-alpha-hydroxylase, putative; protein
  misc_feature (1)..(343): Homolog of NCBI NO: 15239203 NR Description: cytochrome p450, putative; protein id: supported by cDNA: 36334., supported by cDNA: gi_14596098, by cDNA: gi_15450716, supported by cDNA: gi_17380617, supported
  misc_feature (1)..(345): Homolog of NCBI NO: 9587211 NR Description: cytochrome P450 [Vigna radiata]
  misc_feature (1)..(345): Homolog of NCBI NO: 34902330 NR Description: Putative steroid 22-alpha-hydroxylase [Oryza
  misc_feature (1)..(341): Homolog of NCBI NO: 18400142 NR Description: cytochrome P450, putative; protein id: supported by cDNA: gi_14971016 [Arabidopsis thaliana] CYP90D [Arabidopsis thaliana] >gi|28393374|gb|AAO42111.1|
  misc_feature (120)..(341): Homolog of NCBI NO: 15229822 NR Description: steroid 22-alpha-hydroxylase (DWF4); protein id:
  misc_feature (1)..(106): Homolog of NCBI NO: 15229822 NR Description: steroid 22-alpha-hydroxylase (DWF4); protein id:
  misc_feature (120)..(341): Homolog of NCBI NO: 2935342 NR Description: steroid 22-alpha-hydroxylase; DWF4; CYP90B1
  misc_feature (1)..(106): Homolog of NCBI NO: 2935342 NR Description: steroid 22-alpha-hydroxylase; DWF4; CYP90B1
  misc_feature (1)..(306): Homolog of NCBI NO: 9294019 NR Description: cytochrome P450-like protein [Arabidopsis

SEQ ID NO: 92338 - DNA, 1623 bp, Arabidopsis thaliana; identical to SEQ ID NO: 88582
  misc_feature (1)..(1623): Ceres Seq. ID no. 12711037
  misc_feature: MA Experiment ID: 20000306 Result: Up-regulated in Transcription
  misc_feature: MA Experiment 20000306 PARAMETER Experiment Name: At_Germinating_Seeds_Sub_P Parameter: Age (hr) Value: 6 vs. 0
  misc_feature: MA Experiment 20000306 PARAMETER Experiment Name: At_Germinating_Seeds_Sub_P Parameter: Organism Value: A. thaliana
  misc_feature: MA Experiment 20000306 PARAMETER Experiment Name: At_Germinating_Seeds_Sub_P Parameter: Plant Line Value: WS
  misc_feature: MA Experiment 20000306 PARAMETER Experiment Name: At_Germinating_Seeds_Sub_P Parameter: Tissue Value: Germinating Seeds
  misc_feature: MA Experiment ID: 20000307 Result: Up-regulated in Transcription
  misc_feature: MA Experiment 20000307 PARAMETER Experiment Name: At_Germinating_Seeds_Sub_P Parameter: Age (hr) Value: 24 vs. 0
  misc_feature: MA Experiment 20000307 PARAMETER Experiment Name: At_Germinating_Seeds_Sub_P Parameter: Organism Value: A. thaliana
  misc_feature: MA Experiment 20000307 PARAMETER Experiment Name: At_Germinating_Seeds_Sub_P Parameter: Plant Line Value: WS
  misc_feature: MA Experiment 20000307 PARAMETER Experiment Name: At_Germinating_Seeds_Sub_P Parameter: Tissue Value: Germinating Seeds
  misc_feature: MA Experiment ID: 20000329 Result: Up-regulated in Transcription
  misc_feature: MA Experiment 20000329 PARAMETER Experiment Name: At_4deg_Cold_Sub_P Parameter: Age (day) Value: 14
  misc_feature: MA Experiment 20000329 PARAMETER Experiment Name: At_4deg_Cold_Sub_P Parameter: Organism Value: A. thaliana
  misc_feature: MA Experiment 20000329 PARAMETER Experiment Name: At_4deg_Cold_Sub_P Parameter: Plant Line Value: WS
  misc_feature: MA Experiment 20000329 PARAMETER Experiment Name: At_4deg_Cold_Sub_P Parameter: Temperature (deg C) Value: 4 vs. 22
  misc_feature: MA Experiment 20000329 PARAMETER Experiment Name: At_4deg_Cold_Sub_P Parameter: Timepoint (hr) Value: 6
  misc_feature: MA Experiment 20000329 PARAMETER Experiment Name: At_4deg_Cold_Sub_P Parameter: Tissue Value: Aerial
  misc_feature: MA Experiment ID: 20000332 Result: Up-regulated in Transcription
  misc_feature: MA Experiment 20000332 PARAMETER Experiment Name: At_4deg_Cold_Sub_P Parameter: Age (day) Value: 14
  misc_feature: MA Experiment 20000332 PARAMETER Experiment Name: At_4deg_Cold_Sub_P Parameter: Organism Value: A. thaliana
  misc_feature: MA Experiment 20000332 PARAMETER Experiment Name: At_4deg_Cold_Sub_P Parameter: Plant Line Value: WS
  misc_feature: MA Experiment 20000332 PARAMETER Experiment Name: At_4deg_Cold_Sub_P Parameter: Temperature (deg C) Value: 4 vs. 22
  misc_feature: MA Experiment 20000332 PARAMETER Experiment Name: At_4deg_Cold_Sub_P Parameter: Timepoint (hr) Value: 2
  misc_feature: MA Experiment 20000332 PARAMETER Experiment Name: At_4deg_Cold_Sub_P Parameter: Tissue Value: Aerial
  misc_feature: MA Experiment ID: 20000349 Result: Down-regulated in Transcription
  misc_feature: MA Experiment 20000349 PARAMETER Experiment Name: At_100uM_ABA_Sub_P Parameter: Age (day) Value: 14
  misc_feature: MA Experiment 20000349 PARAMETER Experiment Name: At_100uM_ABA_Sub_P Parameter: Organism Value: A. thaliana
  misc_feature: MA Experiment 20000349 PARAMETER Experiment Name: At_100uM_ABA_Sub_P Parameter: Plant Line Value: WS
  misc_feature: MA Experiment 20000349 PARAMETER Experiment Name: At_100uM_ABA_Sub_P Parameter: Timepoint (hr) Value: 6
  misc_feature: MA Experiment 20000349 PARAMETER Experiment Name: At_100uM_ABA_Sub_P Parameter: Tissue Value: Aerial
  misc_feature: MA Experiment 20000349 PARAMETER Experiment Name: At_100uM_ABA_Sub_P Parameter: Treatment Value: 100uM ABA vs. No Treatment
  misc_feature: MA Experiment ID: 20000440 Result: Up-regulated in Transcription
  misc_feature: MA Experiment 20000440 PARAMETER Experiment Name: At_Closed-Flower__Sub_P Parameter: Tissue Value: Closed Flower vs. Whole Plant

SEQ ID NO: 92339 - protein, 540 aa, Arabidopsis thaliana; identical to SEQ ID NO: 88583
  peptide (1)..(540): Ceres Seq. ID no. 12711038
  misc_feature (20)..(540): Homolog of NCBI NO: 15219502 NR Description: phosphoethanolamine N-methyltransferase, protein id: At1g73600.1 [Arabidopsis thaliana]
  misc_feature (51)..(540): Homolog of NCBI NO: 24212080 NR Description: Putative phosphoethanolamine N-methyltransferase 3
  misc_feature (52)..(540): Homolog of NCBI NO: 30684743 NR Description: phosphoethanolamine N-methyltransferase, putative
  misc_feature (52)..(540): Homolog of NCBI NO: 20260388 NR Description: unknown protein [Arabidopsis thaliana]
  misc_feature (52)..(540): Homolog of NCBI NO: 9294501 NR Description: methyl transferase-like protein [Arabidopsis
  misc_feature (55)..(539): Homolog of NCBI NO: 28804509 NR Description: phosphoethanolamine N-methyltransferase [Aster
  misc_feature (67)..(539): Homolog of NCBI NO: 15221909 NR Description: phosphoethanolamine N-methyltransferase, protein id: At1g48600.1, supported by cDNA: gi_16226648, by cDNA: gi_17380783 [Arabidopsis thaliana]
  misc_feature (56)..(539): Homolog of NCBI NO: 24212082 NR Description: Phosphoethanolamine N-methyltransferase
  misc_feature (52)..(539): Homolog of NCBI NO: 12584943 NR Description: phosphoethanolamine N-methyltransferase
  misc_feature (56)..(539): Homolog of NCBI NO: 28436074 NR Description: phosphoethanolamine N-methyltransferase [Suaeda

SEQ ID NO: 92340 - protein, 490 aa, Arabidopsis thaliana; identical to SEQ ID NO: 88584
  peptide (1)..(490): Ceres Seq. ID no. 12711039
  misc_feature (1)..(490): Homolog of NCBI NO: 15219502 NR Description: phosphoethanolamine N-methyltransferase, protein id: At1g73600.1 [Arabidopsis thaliana]
  misc_feature (1)..(490): Homolog of NCBI NO: 24212080 NR Description: Putative phosphoethanolamine N-methyltransferase 3
  misc_feature (2)..(490): Homolog of NCBI NO: 30684743 NR Description: phosphoethanolamine N-methyltransferase, putative
  misc_feature (2)..(490): Homolog of NCBI NO: 20260388 NR Description: unknown protein [Arabidopsis thaliana]
  misc_feature (2)..(490): Homolog of NCBI NO: 9294501 NR Description: methyl transferase-like protein [Arabidopsis
  misc_feature (5)..(489): Homolog of NCBI NO: 28804509 NR Description: phosphoethanolamine N-methyltransferase [Aster
  misc_feature (17)..(489): Homolog of NCBI NO: 15221909 NR Description: phosphoethanolamine N-methyltransferase, protein id: At1g48600.1, supported by cDNA: gi_16226648, by cDNA: gi_17380783 [Arabidopsis thaliana]
  misc_feature (6)..(489): Homolog of NCBI NO: 24212082 NR Description: Phosphoethanolamine N-methyltransferase
  misc_feature (2)..(489): Homolog of NCBI NO: 12584943 NR Description: phosphoethanolamine N-methyltransferase
  misc_feature (6)..(489): Homolog of NCBI NO: 28436074 NR Description: phosphoethanolamine N-methyltransferase [Suaeda

SEQ ID NO: 92341 - protein, 464 aa, Arabidopsis thaliana; identical to SEQ ID NO: 88585
  peptide (1)..(464): Ceres Seq. ID no. 12711040
  misc_feature (1)..(464): Homolog of NCBI NO: 15219502 NR Description: phosphoethanolamine N-methyltransferase, protein id: At1g73600.1 [Arabidopsis thaliana]
  misc_feature (1)..(464): Homolog of NCBI NO: 24212080 NR Description: Putative phosphoethanolamine N-methyltransferase 3
  misc_feature (1)..(464): Homolog of NCBI NO: 30684743 NR Description: phosphoethanolamine N-methyltransferase, putative
  misc_feature (1)..(464): Homolog of NCBI NO: 20260388 NR Description: unknown protein [Arabidopsis thaliana]
  misc_feature (1)..(464): Homolog of NCBI NO: 9294501 NR Description: methyl transferase-like protein [Arabidopsis
  misc_feature (1)..(463): Homolog of NCBI NO: 28804509 NR Description: phosphoethanolamine N-methyltransferase [Aster
  misc_feature (1)..(463): Homolog of NCBI NO: 15221909 NR Description: phosphoethanolamine N-methyltransferase, protein id: At1g48600.1, supported by cDNA: gi_16226648, by cDNA: gi_17380783 [Arabidopsis thaliana]
  misc_feature (1)..(463): Homolog of NCBI NO: 24212082 NR Description: Phosphoethanolamine N-methyltransferase
  misc_feature (1)..(463): Homolog of NCBI NO: 12584943 NR Description: phosphoethanolamine N-methyltransferase
  misc_feature (1)..(463): Homolog of NCBI NO: 28436074 NR Description: phosphoethanolamine N-methyltransferase [Suaeda

SEQ ID NO: 92342 - DNA, 3009 bp, Arabidopsis thaliana; identical to SEQ ID NO: 88586
  misc_feature (1)..(3009): Ceres Seq. ID no. 12711064
  misc_feature: MA Experiment ID: 20000185 Result: Up-regulated in Transcription
  misc_feature: MA Experiment 20000185 PARAMETER Experiment Name: At_Roots__P Parameter: Age (day) Value: 7 vs. 21
  misc_feature: MA Experiment 20000185 PARAMETER Experiment Name: At_Roots__P Parameter: Organism Value: A. thaliana
  misc_feature: MA Experiment 20000185 PARAMETER Experiment Name: At_Roots__P Parameter: Tissue Value: Roots vs. Whole Plant
  misc_feature: MA Experiment ID: 20000438 Result: Up-regulated in Transcription
  misc_feature: MA Experiment 20000438 PARAMETER Experiment Name: At_Shoots__P Parameter: Age (day) Value: 14
  misc_feature: MA Experiment 20000438 PARAMETER Experiment Name: At_Shoots__P Parameter: Tissue Value: Shoots vs. Whole Plant
  misc_feature: MA Experiment ID: 20000439 Result: Up-regulated in Transcription
  misc_feature: MA Experiment 20000439 PARAMETER Experiment Name: At_Roots__P Parameter: Age (day) Value: 14 vs. 21
  misc_feature: MA Experiment 20000439 PARAMETER Experiment Name: At_Roots__P Parameter: Organism Value: A. thaliana
  misc_feature: MA Experiment 20000439 PARAMETER Experiment Name: At_Roots__P Parameter: Tissue Value: Roots vs. Whole Plant
  misc_feature: MA Experiment ID: 20000441 Result: Up-regulated in Transcription
  misc_feature: MA Experiment 20000441 PARAMETER Experiment Name: At_1uM_BR-BRZ__P Parameter: Tissue Value: Shoot Apices
  misc_feature: MA Experiment 20000441 PARAMETER Experiment Name: At_1uM_BR-BRZ__P Parameter: Treatment Value: 1uM BR vs. No Treatment
  misc_feature: MA Experiment ID: 20000443 Result: Up-regulated in Transcription
  misc_feature: MA Experiment 20000443 PARAMETER Experiment Name: At_1uM_BR-BRZ__P Parameter: Tissue Value: Shoot Apices
  misc_feature: MA Experiment 20000443 PARAMETER Experiment Name: At_1uM_BR-BRZ__P Parameter: Treatment Value: 1uM BRZ vs. No Treatment
  misc_feature: MA Experiment ID: 20000794 Result: Up-regulated in Transcription
  misc_feature: MA Experiment 20000794 PARAMETER Experiment Name: At_Petals_P Parameter: Age (day) Value: 23-25 days
  misc_feature: MA Experiment 20000794 PARAMETER Experiment Name: At_Petals_P Parameter: Plant Line Value: WS
  misc_feature: MA Experiment 20000794 PARAMETER Experiment Name: At_Petals_P Parameter: Tissue Value: Petals vs. Whole plant
  misc_feature: MA Experiment ID: 20001450 Result: Up-regulated in Transcription
  misc_feature: MA Experiment 20001450 PARAMETER Experiment Name: At_Far-red-induction_P Parameter: Age (day) Value: 7
  misc_feature: MA Experiment 20001450 PARAMETER Experiment Name: At_Far-red-induction_P Parameter: Light Value: Far-red vs. White
  misc_feature: MA Experiment 20001450 PARAMETER Experiment Name: At_Far-red-induction_P Parameter: Organism Value: A. thaliana
  misc_feature: MA Experiment 20001450 PARAMETER Experiment Name: At_Far-red-induction_P Parameter: Plant Line Value: Columbia
  misc_feature: MA Experiment 20001450 PARAMETER Experiment Name: At_Far-red-induction_P Parameter: Timepoint (hr) Value: 8
  misc_feature: MA Experiment 20001450 PARAMETER Experiment Name: At_Far-red-induction_P Parameter: Tissue Value: Whole Plant
  misc_feature: MA Experiment ID: 20001556 Result: Down-regulated in Transcription
  misc_feature: MA Experiment 20001556 PARAMETER Experiment Name: At_Drought_Soil_Dry_P Parameter: Age (day) Value: 26
  misc_feature: MA Experiment 20001556 PARAMETER Experiment Name: At_Drought_Soil_Dry_P Parameter: Organism Value: A. thaliana
  misc_feature: MA Experiment 20001556 PARAMETER Experiment Name: At_Drought_Soil_Dry_P Parameter: Plant Line Value: WS
  misc_feature: MA Experiment 20001556 PARAMETER Experiment Name: At_Drought_Soil_Dry_P Parameter: Post Timepoint (hr) Value: None
  misc_feature: MA Experiment 20001556 PARAMETER Experiment Name: At_Drought_Soil_Dry_P Parameter: Post-Treatment Value: None
  misc_feature: MA Experiment 20001556 PARAMETER Experiment Name: At_Drought_Soil_Dry_P Parameter: Timepoint (day) Value: 12
  misc_feature: MA Experiment 20001556 PARAMETER Experiment Name: At_Drought_Soil_Dry_P Parameter: Treatment Value: Drought vs. No Drought
  misc_feature: MA Experiment ID: 20001904 Result: Down-regulated in Transcription
  misc_feature: MA Experiment 20001904 PARAMETER Experiment Name: At_Drought_Reproduction_P Parameter: Age (day) Value: 37
  misc_feature: MA Experiment 20001904 PARAMETER Experiment Name: At_Drought_Reproduction_P Parameter: Organism Value: A. thaliana
  misc_feature: MA Experiment 20001904 PARAMETER Experiment Name: At_Drought_Reproduction_P Parameter: Plant Line Value: WS
  misc_feature: MA Experiment 20001904 PARAMETER Experiment Name: At_Drought_Reproduction_P Parameter: Timepoint (day) Value: 7
  misc_feature: MA Experiment 20001904 PARAMETER Experiment Name: At_Drought_Reproduction_P Parameter: Tissue Value: Rosettes
  misc_feature: MA Experiment 20001904 PARAMETER Experiment Name: At_Drought_Reproduction_P Parameter: Treatment Value: Drought vs. No Drought

SEQ ID NO: 92343 - protein, 1002 aa, Arabidopsis thaliana; identical to SEQ ID NO: 88587
  peptide (1)..(1002): Ceres Seq. ID no. 12711065
  misc_feature (720)..(972): Pfam Name: Protein kinase domain Pfam Description: Protein kinase domain
  misc_feature (1)..(84): Homolog of NCBI NO: 32527767 NR Description: shoot regeneration-related mitogen activated
  misc_feature (5)..(524): Homolog of NCBI NO: 22326737 NR Description: MAP3K delta-1 protein kinase; protein id: supported by cDNA: gi_18700074 [Arabidopsis thaliana]
  misc_feature (683)..(994): Homolog of NCBI NO: 22326737 NR Description: MAP3K delta-1 protein kinase; protein id: supported by cDNA: gi_18700074 [Arabidopsis thaliana]
  misc_feature (91)..(524): Homolog of NCBI NO: 11358502 NR Description: MAP3K delta-1 protein kinase - Arabidopsis
  misc_feature (683)..(957): Homolog of NCBI NO: 11358502 NR Description: MAP3K delta-1 protein kinase - Arabidopsis
  misc_feature (5)..(358): Homolog of NCBI NO: 7489058 NR Description: probable protein kinase TCTR2 - tomato
  misc_feature (708)..(997): Homolog of NCBI NO: 7489058 NR Description: probable protein kinase TCTR2 - tomato
  misc_feature (111)..(418): Homolog of NCBI NO: 7488198 NR Description: probable serine/threonine-specific protein kinase
  misc_feature (111)..(418): Homolog of NCBI NO: 18390931 NR Description: putative protein kinase; protein id: At1g08720.1, by cDNA: gi_11127924 [Arabidopsis thaliana]
  misc_feature (668)..(979): Homolog of NCBI NO: 7488198 NR Description: probable serine/threonine-specific protein kinase

SEQ ID NO: 92344 - protein, 1000 aa, Arabidopsis thaliana; identical to SEQ ID NO: 88588
  peptide (1)..(1000): Ceres Seq. ID no. 12711066
  misc_feature (718)..(970): Pfam Name: Protein kinase domain Pfam Description: Protein kinase domain
  misc_feature (1)..(82): Homolog of NCBI NO: 32527767 NR Description: shoot regeneration-related mitogen activated
  misc_feature (3)..(522): Homolog of NCBI NO: 22326737 NR Description: MAP3K delta-1 protein kinase; protein id: supported by cDNA: gi_18700074 [Arabidopsis thaliana]
  misc_feature (681)..(992): Homolog of NCBI NO: 22326737 NR Description: MAP3K delta-1 protein kinase; protein id: supported by cDNA: gi_18700074 [Arabidopsis thaliana]
  misc_feature (89)..(522): Homolog of NCBI NO: 11358502 NR Description: MAP3K delta-1 protein kinase - Arabidopsis
  misc_feature (681)..(955): Homolog of NCBI NO: 11358502 NR Description: MAP3K delta-1 protein kinase - Arabidopsis
  misc_feature (3)..(356): Homolog of NCBI NO: 7489058 NR Description: probable protein kinase TCTR2 - tomato
  misc_feature (706)..(995): Homolog of NCBI NO: 7489058 NR Description: probable protein kinase TCTR2 - tomato
  misc_feature (109)..(416): Homolog of NCBI NO: 7488198 NR Description: probable serine/threonine-specific protein kinase
  misc_feature (109)..(416): Homolog of NCBI NO: 18390931 NR Description: putative protein kinase; protein id: At1g08720.1, by cDNA: gi_11127924 [Arabidopsis thaliana]
  misc_feature (666)..(977): Homolog of NCBI NO: 7488198 NR Description: probable serine/threonine-specific protein kinase

SEQ ID NO: 92345 - protein, 998 aa, Arabidopsis thaliana; identical to SEQ ID NO: 88589
  peptide (1)..(998): Ceres Seq. ID no. 12711067
  misc_feature (716)..(968): Pfam Name: Protein kinase domain Pfam Description: Protein kinase domain
  misc_feature (1)..(80): Homolog of NCBI NO: 32527767 NR Description: shoot regeneration-related mitogen activated
  misc_feature (1)..(520): Homolog of NCBI NO: 22326737 NR Description: MAP3K delta-1 protein kinase; protein id: supported by cDNA: gi_18700074 [Arabidopsis thaliana]
  misc_feature (679)..(990): Homolog of NCBI NO: 22326737 NR Description: MAP3K delta-1 protein kinase; protein id: supported by cDNA: gi_18700074 [Arabidopsis thaliana]
  misc_feature (87)..(520): Homolog of NCBI NO: 11358502 NR Description: MAP3K delta-1 protein kinase - Arabidopsis
  misc_feature (679)..(953): Homolog of NCBI NO: 11358502 NR Description: MAP3K delta-1 protein kinase - Arabidopsis
  misc_feature (1)..(354): Homolog of NCBI NO: 7489058 NR Description: probable protein kinase TCTR2 - tomato
  misc_feature (704)..(993): Homolog of NCBI NO: 7489058 NR Description: probable protein kinase TCTR2 - tomato
  misc_feature (107)..(414): Homolog of NCBI NO: 7488198 NR Description: probable serine/threonine-specific protein kinase
  misc_feature (107)..(414): Homolog of NCBI NO: 18390931 NR Description: putative protein kinase; protein id: At1g08720.1, by cDNA: gi_11127924 [Arabidopsis thaliana]
  misc_feature (664)..(975): Homolog of NCBI NO: 7488198 NR Description: probable serine/threonine-specific protein kinase

SEQ ID NO: 92346 - DNA, 3042 bp, Arabidopsis thaliana; identical to SEQ ID NO: 88590
  misc_feature (1)..(3042): Ceres Seq. ID no. 12711084
  misc_feature: MA Experiment ID: 20000180 Result: Up-regulated in Transcription
  misc_feature: MA Experiment 20000180 PARAMETER Experiment Name: At_Germinating_Seeds_P Parameter: Age (hr) Value: 24 vs. 0
  misc_feature: MA Experiment 20000180 PARAMETER Experiment Name: At_Germinating_Seeds_P Parameter: Tissue Value: Germinating Seeds
  misc_feature: MA Experiment ID: 20000185 Result: Up-regulated in Transcription
  misc_feature: MA Experiment 20000185 PARAMETER Experiment Name: At_Roots__P Parameter: Age (day) Value: 7 vs. 21
  misc_feature: MA Experiment 20000185 PARAMETER Experiment Name: At_Roots__P Parameter: Organism Value: A. thaliana
  misc_feature: MA Experiment 20000185 PARAMETER Experiment Name: At_Roots__P Parameter: Tissue Value: Roots vs. Whole Plant
  misc_feature: MA Experiment ID: 20000235 Result: Up-regulated in Transcription
  misc_feature: MA Experiment 20000235 PARAMETER Experiment Name: At_Siliques_P Parameter: Age (day) Value: 21
  misc_feature: MA Experiment 20000235 PARAMETER Experiment Name: At_Siliques_P Parameter: Organism Value: A. thaliana
  misc_feature: MA Experiment 20000235 PARAMETER Experiment Name: At_Siliques_P Parameter: Plant Line Value: WS
  misc_feature: MA Experiment 20000235 PARAMETER Experiment Name: At_Siliques_P Parameter: Tissue Value: 5-10mm Siliques vs. Whole Plant
  misc_feature: MA Experiment ID: 20000264 Result: Up-regulated in Transcription
  misc_feature: MA Experiment 20000264 PARAMETER Experiment Name: At_Open_Flower_P Parameter: Age (day) Value: 21
  misc_feature: MA Experiment 20000264 PARAMETER Experiment Name: At_Open_Flower_P Parameter: Plant Line Value: WS
  misc_feature: MA Experiment 20000264 PARAMETER Experiment Name: At_Open_Flower_P Parameter: Tissue Value: Open Flower vs. Whole Plant
  misc_feature: MA Experiment ID: 20000794 Result: Up-regulated in Transcription
  misc_feature: MA Experiment 20000794 PARAMETER Experiment Name: At_Petals_P Parameter: Age (day) Value: 23-25 days
  misc_feature: MA Experiment 20000794 PARAMETER Experiment Name: At_Petals_P Parameter: Plant Line Value: WS
  misc_feature: MA Experiment 20000794 PARAMETER Experiment Name: At_Petals_P Parameter: Tissue Value: Petals vs. Whole plant
  misc_feature: MA Experiment ID: 20001910 Result: Up-regulated in Transcription
  misc_feature: MA Experiment 20001910 PARAMETER Experiment Name: At_Drought_Reproduction_P Parameter: Age (day) Value: 37
  misc_feature: MA Experiment 20001910 PARAMETER Experiment Name: At_Drought_Reproduction_P Parameter: Organism Value: A. thaliana
  misc_feature: MA Experiment 20001910 PARAMETER Experiment Name: At_Drought_Reproduction_P Parameter: Plant Line Value: WS
  misc_feature: MA Experiment 20001910 PARAMETER Experiment Name: At_Drought_Reproduction_P Parameter: Timepoint (day) Value: 7
  misc_feature: MA Experiment 20001910 PARAMETER Experiment Name: At_Drought_Reproduction_P Parameter: Tissue Value: Flowers
  misc_feature: MA Experiment 20001910 PARAMETER Experiment Name: At_Drought_Reproduction_P Parameter: Treatment Value: Drought vs. No Drought

SEQ ID NO: 92347 - protein, 1013 aa, Arabidopsis thaliana; identical to SEQ ID NO: 88591
  peptide (1)..(1013): Ceres Seq. ID no. 12711085
  misc_feature (62)..(500): Pfam Name: Myosin tail Pfam Description: Myosin tail
  misc_feature (6)..(640): Homolog of NCBI NO: 6714287 NR Description: F15H18.10 [Arabidopsis thaliana]
  misc_feature (645)..(1013): Homolog of NCBI NO: 6714287 NR Description: F15H18.10 [Arabidopsis thaliana]
  misc_feature (279)..(952): Homolog of NCBI NO: 25404429 NR Description: kinesin-like protein, 73641-79546 [imported] -
  misc_feature (279)..(952): Homolog of NCBI NO: 30696876 NR Description: kinesin-related protein [Arabidopsis thaliana]
  misc_feature (559)..(952): Homolog of NCBI NO: 6633835 NR Description: F2K11.1 [Arabidopsis thaliana]
  misc_feature (317)..(557): Homolog of NCBI NO: 6633835 NR Description: F2K11.1 [Arabidopsis thaliana]
  misc_feature (91)..(381): Homolog of NCBI NO: 6633835 NR Description: F2K11.1 [Arabidopsis thaliana]
  misc_feature (333)..(628): Homolog of NCBI NO: 34909422 NR Description: putative kinesin-like protein [Oryza sativa
  misc_feature (690)..(931): Homolog of NCBI NO: 34909422 NR Description: putative kinesin-like protein [Oryza sativa
  misc_feature (302)..(904): Homolog of NCBI NO: 18421069 NR Description: kinesin-related protein; protein id: At5g27000.1

SEQ ID NO: 92348 - protein, 1010 aa, Arabidopsis thaliana; identical to SEQ ID NO: 88592
  peptide (1)..(1010): Ceres Seq. ID no. 12711086
  misc_feature (59)..(497): Pfam Name: Myosin tail Pfam Description: Myosin tail
  misc_feature (3)..(637): Homolog of NCBI NO: 6714287 NR Description: F15H18.10 [Arabidopsis thaliana]
  misc_feature (642)..(1010): Homolog of NCBI NO: 6714287 NR Description: F15H18.10 [Arabidopsis thaliana]
  misc_feature (276)..(949): Homolog of NCBI NO: 25404429 NR Description: kinesin-like protein, 73641-79546 [imported] -
  misc_feature (276)..(949): Homolog of NCBI NO: 30696876 NR Description: kinesin-related protein [Arabidopsis thaliana]
  misc_feature (556)..(949): Homolog of NCBI NO: 6633835 NR Description: F2K11.1 [Arabidopsis thaliana]
  misc_feature (314)..(554): Homolog of NCBI NO: 6633835 NR Description: F2K11.1 [Arabidopsis thaliana]
  misc_feature (88)..(378): Homolog of NCBI NO: 6633835 NR Description: F2K11.1 [Arabidopsis thaliana]
  misc_feature (330)..(625): Homolog of NCBI NO: 34909422 NR Description: putative kinesin-like protein [Oryza sativa
  misc_feature (687)..(928): Homolog of NCBI NO: 34909422 NR Description: putative kinesin-like protein [Oryza sativa
  misc_feature (299)..(901): Homolog of NCBI NO: 18421069 NR Description: kinesin-related protein; protein id: At5g27000.1

SEQ ID NO: 92349 - protein, 930 aa, Arabidopsis thaliana; identical to SEQ ID NO: 88593
  peptide (1)..(930): Ceres Seq. ID no. 12711087
  misc_feature (1)..(417): Pfam Name: Myosin tail Pfam Description: Myosin tail
  misc_feature (1)..(557): Homolog of NCBI NO: 6714287 NR Description: F15H18.10 [Arabidopsis thaliana]
  misc_feature (562)..(930): Homolog of NCBI NO: 6714287 NR Description: F15H18.10 [Arabidopsis thaliana]
  misc_feature (196)..(869): Homolog of NCBI NO: 25404429 NR Description: kinesin-like protein, 73641-79546 [imported] -
  misc_feature (196)..(869): Homolog of NCBI NO: 30696876 NR Description: kinesin-related protein [Arabidopsis thaliana]
  misc_feature (476)..(869): Homolog of NCBI NO: 6633835 NR Description: F2K11.1 [Arabidopsis thaliana]
  misc_feature (234)..(474): Homolog of NCBI NO: 6633835 NR Description: F2K11.1 [Arabidopsis thaliana]
  misc_feature (8)..(298): Homolog of NCBI NO: 6633835 NR Description: F2K11.1 [Arabidopsis thaliana]
  misc_feature (250)..(545): Homolog of NCBI NO: 34909422 NR Description: putative kinesin-like protein [Oryza sativa
  misc_feature (607)..(848): Homolog of NCBI NO: 34909422 NR Description: putative kinesin-like protein [Oryza sativa
  misc_feature (219)..(821): Homolog of NCBI NO: 18421069 NR Description: kinesin-related protein; protein id: At5g27000.1

SEQ ID NO: 92350 - DNA, 1683 bp, Arabidopsis thaliana; identical to SEQ ID NO: 88594
  misc_feature (1)..(1683): Ceres Seq. ID no. 12711092
  misc_feature: MA Experiment ID: 20000306 Result: Down-regulated in Transcription
  misc_feature: MA Experiment 20000306 PARAMETER Experiment Name: At_Germinating_Seeds_Sub_P Parameter: Age (hr) Value: 6 vs. 0
  misc_feature: MA Experiment 20000306 PARAMETER Experiment Name: At_Germinating_Seeds_Sub_P Parameter: Organism Value: A. thaliana
  misc_feature: MA Experiment 20000306 PARAMETER Experiment Name: At_Germinating_Seeds_Sub_P Parameter: Plant Line Value: WS
  misc_feature: MA Experiment 20000306 PARAMETER Experiment Name: At_Germinating_Seeds_Sub_P Parameter: Tissue Value: Germinating Seeds
  misc_feature: MA Experiment ID: 20000307 Result: Down-regulated in Transcription
  misc_feature: MA Experiment 20000307 PARAMETER Experiment Name: At_Germinating_Seeds_Sub_P Parameter: Age (hr) Value: 24 vs. 0
  misc_feature: MA Experiment 20000307 PARAMETER Experiment Name: At_Germinating_Seeds_Sub_P Parameter: Organism Value: A. thaliana
  misc_feature: MA Experiment 20000307 PARAMETER Experiment Name: At_Germinating_Seeds_Sub_P Parameter: Plant Line Value: WS
  misc_feature: MA Experiment 20000307 PARAMETER Experiment Name: At_Germinating_Seeds_Sub_P Parameter: Tissue Value: Germinating Seeds
  misc_feature: MA Experiment ID: 20000328 Result: Up-regulated in Transcription
  misc_feature: MA Experiment 20000328 PARAMETER Experiment Name: At_42deg_Heat_Sub_P Parameter: Age (day) Value: 14
  misc_feature: MA Experiment 20000328 PARAMETER Experiment Name: At_42deg_Heat_Sub_P Parameter: Organism Value: A. thaliana
  misc_feature: MA Experiment 20000328 PARAMETER Experiment Name: At_42deg_Heat_Sub_P Parameter: Plant Line Value: WS
  misc_feature: MA Experiment 20000328 PARAMETER Experiment Name: At_42deg_Heat_Sub_P Parameter: Temperature (deg C) Value: 42 vs. 22
  misc_feature: MA Experiment 20000328 PARAMETER Experiment Name: At_42deg_Heat_Sub_P Parameter: Timepoint (hr) Value: 6
  misc_feature: MA Experiment 20000328 PARAMETER Experiment Name: At_42deg_Heat_Sub_P Parameter: Tissue Value: Aerial
  misc_feature: MA Experiment ID: 20000347 Result: Up-regulated in Transcription
  misc_feature: MA Experiment 20000347 PARAMETER Experiment Name: At_2mM_SA_Sub_P Parameter: Age (day) Value: 14
  misc_feature: MA Experiment 20000347 PARAMETER Experiment Name: At_2mM_SA_Sub_P Parameter: Organism Value: A. thaliana
  misc_feature: MA Experiment 20000347 PARAMETER Experiment Name: At_2mM_SA_Sub_P Parameter: Plant Line Value: WS
  misc_feature: MA Experiment 20000347 PARAMETER Experiment Name: At_2mM_SA_Sub_P Parameter: Timepoint (hr) Value: 6
  misc_feature: MA Experiment 20000347 PARAMETER Experiment Name: At_2mM_SA_Sub_P Parameter: Tissue Value: Aerial
  misc_feature: MA Experiment 20000347 PARAMETER Experiment Name: At_2mM_SA_Sub_P Parameter: Treatment Value: 2mM SA vs. No Treatment
  misc_feature: MA Experiment ID: 20000352 Result: Up-regulated in Transcription
  misc_feature: MA Experiment 20000352 PARAMETER Experiment Name: At_Drought_Sub_P Parameter: Age (day) Value: 7
  misc_feature: MA Experiment 20000352 PARAMETER Experiment Name: At_Drought_Sub_P Parameter: Organism Value: A. thaliana
  misc_feature: MA Experiment 20000352 PARAMETER Experiment Name: At_Drought_Sub_P Parameter: Plant Line Value: WS
  misc_feature: MA Experiment 20000352 PARAMETER Experiment Name: At_Drought_Sub_P Parameter: Timepoint (hr) Value: 6
  misc_feature: MA Experiment 20000352 PARAMETER Experiment Name: At_Drought_Sub_P Parameter: Tissue Value: Whole Plant
  misc_feature: MA Experiment 20000352 PARAMETER Experiment Name: At_Drought_Sub_P Parameter: Treatment Value: Drought vs. No Drought
  misc_feature: MA Experiment ID: 20001807 Result: Down-regulated in Transcription
  misc_feature: MA Experiment 20001807 PARAMETER Experiment Name: At_50mM_NH4NO3_L-to-H_Sub_P Parameter: Timepoint (hr) Value: 6
  misc_feature: MA Experiment 20001807 PARAMETER Experiment Name: At_50mM_NH4NO3_L-to-H_Sub_P Parameter: Tissue Value: Leaf
  misc_feature: MA Experiment 20001807 PARAMETER Experiment Name: At_50mM_NH4NO3_L-to-H_Sub_P Parameter: Treatment Value: 50mM NH4NO3 vs 100mM Mannitol

SEQ ID NO: 92351 - protein, 560 aa, Arabidopsis thaliana; identical to SEQ ID NO: 88595
  peptide (1)..(560): Ceres Seq. ID no. 12711093
  misc_feature (1)..(560): Homolog of NCBI NO: 25406301 NR Description: protein glucosyltransferase F2P9.25 [imported] - thaliana >gi|12325153|gb|AAG52529.1|AC016662_23 putative
  misc_feature (1)..(467): Homolog of NCBI NO: 22330612 NR Description: putative glucosyltransferase; protein id:
  misc_feature (26)..(467): Homolog of NCBI NO: 20260128 NR Description: putative glucosyltransferase [Arabidopsis
  misc_feature (12)..(441): Homolog of NCBI NO: 15223779 NR Description: putative glucosyl transferase; protein id: [Arabidopsis thaliana] >gi|25286807|pir||H96549 hypothetical
  misc_feature (6)..(464): Homolog of NCBI NO: 15242769 NR Description: putative protein; protein id: At5g03490.1
  misc_feature (27)..(468): Homolog of NCBI NO: 19911191 NR Description: glucosyltransferase like protein [Vigna angularis]
  misc_feature (7)..(470): Homolog of NCBI NO: 2232354 NR Description: UDPG glucosyltransferase [Solanum berthaultii]
  misc_feature (206)..(463): Homolog of NCBI NO: 21536579 NR Description: unknown [Arabidopsis thaliana]
  misc_feature (12)..(160): Homolog of NCBI NO: 21536579 NR Description: unknown [Arabidopsis thaliana]
  misc_feature (36)..(466): Homolog of NCBI NO: 10241430 NR Description: putative glucosyltransferase [Oryza sativa

SEQ ID NO: 92352 - protein, 535 aa, Arabidopsis thaliana; identical to SEQ ID NO: 88596
  peptide (1)..(535): Ceres Seq. ID no. 12711094
  misc_feature (1)..(535): Homolog of NCBI NO: 25406301 NR Description: protein glucosyltransferase F2P9.25 [imported] - thaliana >gi|12325153|gb|AAG52529.1|AC016662_23 putative
  misc_feature (1)..(442): Homolog of NCBI NO: 22330612 NR Description: putative glucosyltransferase; protein id:
  misc_feature (1)..(442): Homolog of NCBI NO: 20260128 NR Description: putative glucosyltransferase [Arabidopsis
  misc_feature (1)..(416): Homolog of NCBI NO: 15223779 NR Description: putative glucosyl transferase; protein id: [Arabidopsis thaliana] >gi|25286807|pir||H96549 hypothetical
  misc_feature (1)..(439): Homolog of NCBI NO: 15242769 NR Description: putative protein; protein id: At5g03490.1
  misc_feature (2)..(443): Homolog of NCBI NO: 19911191 NR Description: glucosyltransferase like protein [Vigna angularis]
  misc_feature (1)..(445): Homolog of NCBI NO: 2232354 NR Description: UDPG glucosyltransferase [Solanum berthaultii]
  misc_feature (181)..(438): Homolog of NCBI NO: 21536579 NR Description: unknown [Arabidopsis thaliana]
  misc_feature (1)..(135): Homolog of NCBI NO: 21536579 NR Description: unknown [Arabidopsis thaliana]
  misc_feature (11)..(441): Homolog of NCBI NO: 10241430 NR Description: putative glucosyltransferase [Oryza sativa

SEQ ID NO: 92353 - protein, 462 aa, Arabidopsis thaliana; identical to SEQ ID NO: 88597
  peptide (1)..(462): Ceres Seq. ID no. 12711095
  misc_feature (1)..(462): Homolog of NCBI NO: 25406301 NR Description: protein glucosyltransferase F2P9.25 [imported] - thaliana >gi|12325153|gb|AAG52529.1|AC016662_23 putative
  misc_feature (1)..(369): Homolog of NCBI NO: 22330612 NR Description: putative glucosyltransferase; protein id:
  misc_feature (1)..(369): Homolog of NCBI NO: 20260128 NR Description: putative glucosyltransferase [Arabidopsis
  misc_feature (1)..(343): Homolog of NCBI NO: 15223779 NR Description: putative glucosyl transferase; protein id: [Arabidopsis thaliana] >gi|25286807|pir||H96549 hypothetical
  misc_feature (1)..(366): Homolog of NCBI NO: 15242769 NR Description: putative protein; protein id: At5g03490.1
  misc_feature (1)..(370): Homolog of NCBI NO: 19911191 NR Description: glucosyltransferase like protein [Vigna angularis]
  misc_feature (1)..(372): Homolog of NCBI NO: 2232354 NR Description: UDPG glucosyltransferase [Solanum berthaultii]
  misc_feature (108)..(365): Homolog of NCBI NO: 21536579 NR Description: unknown [Arabidopsis thaliana]
  misc_feature (1)..(62): Homolog of NCBI NO: 21536579 NR Description: unknown [Arabidopsis thaliana]
  misc_feature (1)..(368): Homolog of NCBI NO: 10241430 NR Description: putative glucosyltransferase [Oryza sativa

SEQ ID NO: 92354 - DNA, 987 bp, Arabidopsis thaliana; identical to SEQ ID NO: 88598
  misc_feature (1)..(987): Ceres Seq. ID no. 12711102
  misc_feature: MA Experiment ID: 108434 Result: Down-regulated in Transcription
  misc_feature: MA Experiment 108434 PARAMETER Experiment Name: At_Root_Tips_cDNA_P Parameter: Tissue Value: Root Tips
  misc_feature: MA Experiment ID: 108561 Result: Up-regulated in Transcription
  misc_feature: MA Experiment 108561 PARAMETER Experiment Name: At_100uM_ABA_cDNA_P Parameter: Timepoint (hr) Value: 6
  misc_feature: MA Experiment 108561 PARAMETER Experiment Name: At_100uM_ABA_cDNA_P Parameter: Tissue Value: Aerial
  misc_feature: MA Experiment 108561 PARAMETER Experiment Name: At_100uM_ABA_cDNA_P Parameter: Treatment Value: 100uM ABA vs. No Treatment
  misc_feature: MA Experiment ID: 20000072 Result: Up-regulated in Transcription
  misc_feature: MA Experiment 20000072 PARAMETER Experiment Name: At_100uM_ABA_Mutants_cDNA_P Parameter: Plant Line Value: CS8105
  misc_feature: MA Experiment 20000072 PARAMETER Experiment Name: At_100uM_ABA_Mutants_cDNA_P Parameter: Timepoint (hr) Value: 6
  misc_feature: MA Experiment 20000072 PARAMETER Experiment Name: At_100uM_ABA_Mutants_cDNA_P Parameter: Tissue Value: Aerial
  misc_feature: MA Experiment 20000072 PARAMETER Experiment Name: At_100uM_ABA_Mutants_cDNA_P Parameter: Treatment Value: 100uM ABA vs. No Treatment

SEQ ID NO: 92355 - protein, 328 aa, Arabidopsis thaliana; identical to SEQ ID NO: 88599
  peptide (1)..(328): Ceres Seq. ID no. 12711103
  misc_feature (2)..(323): Pfam Name: Strictosidine synthase Pfam Description: Strictosidine synthase
  misc_feature (1)..(328): Homolog of NCBI NO: 21431845 NR Description: Strictosidine synthase 3 precursor (SS-3)
  misc_feature (1)..(328): Homolog of NCBI NO: 30698979 NR Description: strictosidine synthase family [Arabidopsis
  misc_feature (1)..(314): Homolog of NCBI NO: 1754987 NR Description: strictosidine synthase
  misc_feature (1)..(328): Homolog of NCBI NO: 15221106 NR Description: strictosidine synthase family; protein id: supported by cDNA: gi_14334593, supported by cDNA: gi_17104522, by cDNA: gi_1754984 [Arabidopsis thaliana]
  misc_feature (1)..(328): Homolog of NCBI NO: 1754983 NR Description: strictosidine synthase >gi|1754985|gb|AAB40594.1|
  misc_feature (1)..(328): Homolog of NCBI NO: 15221105 NR Description: strictosidine synthase family; protein id: supported by cDNA: 17206. [Arabidopsis thaliana]
  misc_feature (38)..(265): Homolog of NCBI NO: 11280567 NR Description: hypothetical protein F24I3.110 - Arabidopsis >gi|6911873|emb|CAB72173.1| putative protein [Arabidopsis
  misc_feature (38)..(265): Homolog of NCBI NO: 30694556 NR Description: strictosidine synthase-related [Arabidopsis
  misc_feature (273)..(328): Homolog of NCBI NO: 11280567 NR Description: hypothetical protein F24I3.110 - Arabidopsis >gi|6911873|emb|CAB72173.1| putative protein [Arabidopsis
  misc_feature (273)..(328): Homolog of NCBI NO: 30694556 NR Description: strictosidine synthase-related [Arabidopsis

SEQ ID NO: 92356 - DNA, 1344 bp, Arabidopsis thaliana; identical to SEQ ID NO: 88600
  misc_feature (1)..(1344): Ceres Seq. ID no. 12711141
  misc_feature: MA Experiment ID: 20000437 Result: Up-regulated in Transcription
  misc_feature: MA Experiment 20000437 PARAMETER Experiment Name: At_Drought_P Parameter: Age (day) Value: 8
  misc_feature: MA Experiment 20000437 PARAMETER Experiment Name: At_Drought_P Parameter: Organism Value: A. thaliana
  misc_feature: MA Experiment 20000437 PARAMETER Experiment Name: At_Drought_P Parameter: Plant Line Value: WS
  misc_feature: MA Experiment 20000437 PARAMETER Experiment Name: At_Drought_P Parameter: Timepoint (hr) Value: 24
  misc_feature: MA Experiment 20000437 PARAMETER Experiment Name: At_Drought_P Parameter: Tissue Value: Whole Plant
  misc_feature: MA Experiment 20000437 PARAMETER Experiment Name: At_Drought_P Parameter: Treatment Value: Drought vs. No Drought
  misc_feature: MA Experiment ID: 20001555 Result: Up-regulated in Transcription
  misc_feature: MA Experiment 20001555 PARAMETER Experiment Name: At_Drought_Soil_Dry_P Parameter: Age (day) Value: 24
  misc_feature: MA Experiment 20001555 PARAMETER Experiment Name: At_Drought_Soil_Dry_P Parameter: Organism Value: A. thaliana
  misc_feature: MA Experiment 20001555 PARAMETER Experiment Name: At_Drought_Soil_Dry_P Parameter: Plant Line Value: WS
  misc_feature: MA Experiment 20001555 PARAMETER Experiment Name: At_Drought_Soil_Dry_P Parameter: Post Timepoint (hr) Value: None
  misc_feature: MA Experiment 20001555 PARAMETER Experiment Name: At_Drought_Soil_Dry_P Parameter: Post-Treatment Value: None
  misc_feature: MA Experiment 20001555 PARAMETER Experiment Name: At_Drought_Soil_Dry_P Parameter: Timepoint (day) Value: 10
  misc_feature: MA Experiment 20001555 PARAMETER Experiment Name: At_Drought_Soil_Dry_P Parameter: Treatment Value: Drought vs. No Drought
  misc_feature: MA Experiment ID: 20001905 Result: Up-regulated in Transcription
  misc_feature: MA Experiment 20001905 PARAMETER Experiment Name: At_Drought_Reproduction_P Parameter: Age (day) Value: 40
  misc_feature: MA Experiment 20001905 PARAMETER Experiment Name: At_Drought_Reproduction_P Parameter: Organism Value: A. thaliana
  misc_feature: MA Experiment 20001905 PARAMETER Experiment Name: At_Drought_Reproduction_P Parameter: Plant Line Value: WS
  misc_feature: MA Experiment 20001905 PARAMETER Experiment Name: At_Drought_Reproduction_P Parameter: Timepoint (day) Value: 10
  misc_feature: MA Experiment 20001905 PARAMETER Experiment Name: At_Drought_Reproduction_P Parameter: Tissue Value: Rosettes
  misc_feature: MA Experiment 20001905 PARAMETER Experiment Name: At_Drought_Reproduction_P Parameter: Treatment Value: Drought vs. No Drought
  misc_feature: MA Experiment ID: 20001911 Result: Up-regulated in Transcription
  misc_feature: MA Experiment 20001911 PARAMETER Experiment Name: At_Drought_Reproduction_P Parameter: Age (day) Value: 40
  misc_feature: MA Experiment 20001911 PARAMETER Experiment Name: At_Drought_Reproduction_P Parameter: Organism Value: A. thaliana
  misc_feature: MA Experiment 20001911 PARAMETER Experiment Name: At_Drought_Reproduction_P Parameter: Plant Line Value: WS
  misc_feature: MA Experiment 20001911 PARAMETER Experiment Name: At_Drought_Reproduction_P Parameter: Timepoint (day) Value: 10
  misc_feature: MA Experiment 20001911 PARAMETER Experiment Name: At_Drought_Reproduction_P Parameter: Tissue Value: Flowers
  misc_feature: MA Experiment 20001911 PARAMETER Experiment Name: At_Drought_Reproduction_P Parameter: Treatment Value: Drought vs. No Drought

SEQ ID NO: 92357 - protein, 447 aa, Arabidopsis thaliana; identical to SEQ ID NO: 88601
  peptide (1)..(447): Ceres Seq. ID no. 12711142
  misc_feature (54)..(115): Pfam Name: CBS domain Pfam Description: CBS domain
  misc_feature (1)..(447): Homolog of NCBI NO: 25404839 NR Description: hypothetical protein T17F3.17 [imported] -
  misc_feature (9)..(444): Homolog of NCBI NO: 34912162 NR Description: P0712E02.24 [Oryza sativa (japonica
  misc_feature (208)..(447): Homolog of NCBI NO: 18409372 NR Description: expressed protein; protein id: At1g69800.1, by cDNA: gi_15450969 [Arabidopsis thaliana]
  misc_feature (153)..(433): Homolog of NCBI NO: 32364482 NR Description: AKIN gamma [Medicago truncatula]
  misc_feature (35)..(158): Homolog of NCBI NO: 32364482 NR Description: AKIN gamma [Medicago truncatula]
  misc_feature (138)..(433): Homolog of NCBI NO: 38346640 NR Description: OSJNBa0072D21.10 [Oryza sativa (japonica
  misc_feature (35)..(144): Homolog of NCBI NO: 38346640 NR Description: OSJNBa0072D21.10 [Oryza sativa (japonica
  misc_feature (172)..(433): Homolog of NCBI NO: 15228397 NR Description: putative protein; protein id: At3g48530.1, by cDNA: 34151., supported by cDNA: gi_14596102, supported by
  misc_feature (13)..(119): Homolog of NCBI NO: 15228397 NR Description: putative protein; protein id: At3g48530.1, by cDNA: 34151., supported by cDNA: gi_14596102, supported by
  misc_feature (172)..(433): Homolog of NCBI NO: 21592917 NR Description: unknown [Arabidopsis thaliana]

SEQ ID NO: 92358 - protein, 298 aa, Arabidopsis thaliana; identical to SEQ ID NO: 88602
  peptide (1)..(298): Ceres Seq. ID no. 12711143
  misc_feature (1)..(298): Homolog of NCBI NO: 25404839 NR Description: hypothetical protein T17F3.17 [imported] -
  misc_feature (1)..(295): Homolog of NCBI NO: 34912162 NR Description: P0712E02.24 [Oryza sativa (japonica
  misc_feature (59)..(298): Homolog of NCBI NO: 18409372 NR Description: expressed protein; protein id: At1g69800.1, by cDNA: gi_15450969 [Arabidopsis thaliana]
  misc_feature (4)..(284): Homolog of NCBI NO: 32364482 NR Description: AKIN gamma [Medicago truncatula]
  misc_feature (1)..(284): Homolog of NCBI NO: 38346640 NR Description: OSJNBa0072D21.10 [Oryza sativa (japonica
  misc_feature (23)..(284): Homolog of NCBI NO: 15228397 NR Description: putative protein; protein id: At3g48530.1, by cDNA: 34151., supported by cDNA: gi_14596102, supported by
  misc_feature (23)..(284): Homolog of NCBI NO: 21592917 NR Description: unknown [Arabidopsis thaliana]
  misc_feature (12)..(284): Homolog of NCBI NO: 19386799 NR Description: OJ1485_B09.7 [Oryza sativa (japonica
  misc_feature (1)..(17): Homolog of NCBI NO: 19386799 NR Description: OJ1485_B09.7 [Oryza sativa (japonica
  misc_feature (29)..(208): Homolog of NCBI NO: 20502802 NR Description: YZ1 [Zea mays]

SEQ ID NO: 92359 - DNA, 1812 bp, Arabidopsis thaliana; identical to SEQ ID NO: 88603
  misc_feature (1)..(1812): Ceres Seq. ID no. 12711144
  misc_feature: MA Experiment ID: 20000171 Result: Up-regulated in Transcription
  misc_feature: MA Experiment 20000171 PARAMETER Experiment Name: At_42deg_Heat_P Parameter: Age (day) Value: 14
  misc_feature: MA Experiment 20000171 PARAMETER Experiment Name: At_42deg_Heat_P Parameter: Organism Value: A. thaliana
  misc_feature: MA Experiment 20000171 PARAMETER Experiment Name: At_42deg_Heat_P Parameter: Plant Line Value: WS
  misc_feature: MA Experiment 20000171 PARAMETER Experiment Name: At_42deg_Heat_P Parameter: Temperature (deg C) Value: 42 vs. 22
  misc_feature: MA Experiment 20000171 PARAMETER Experiment Name: At_42deg_Heat_P Parameter: Timepoint (hr) Value: 1
  misc_feature: MA Experiment 20000171 PARAMETER Experiment Name: At_42deg_Heat_P Parameter: Tissue Value: Aerial
  misc_feature: MA Experiment ID: 20000173 Result: Up-regulated in Transcription
  misc_feature: MA Experiment 20000173 PARAMETER Experiment Name: At_42deg_Heat_P Parameter: Age (day) Value: 14
  misc_feature: MA Experiment 20000173 PARAMETER Experiment Name: At_42deg_Heat_P Parameter: Organism Value: A. thaliana
  misc_feature: MA Experiment 20000173 PARAMETER Experiment Name: At_42deg_Heat_P Parameter: Plant Line Value: WS
  misc_feature: MA Experiment 20000173 PARAMETER Experiment Name: At_42deg_Heat_P Parameter: Temperature (deg C) Value: 42 vs. 22
  misc_feature: MA Experiment 20000173 PARAMETER Experiment Name: At_42deg_Heat_P Parameter: Timepoint (hr) Value: 6
  misc_feature: MA Experiment 20000173 PARAMETER Experiment Name: At_42deg_Heat_P Parameter: Tissue Value: Aerial

SEQ ID NO: 92360 - protein, 603 aa, Arabidopsis thaliana; identical to SEQ ID NO: 88604
  peptide (1)..(603): Ceres Seq. ID no. 12711145
  misc_feature (115)..(532): Pfam Name: POT family Pfam Description: POT family
  misc_feature (4)..(603): Homolog of NCBI NO: 25404844 NR Description: nitrate transporter (NTL1), 53025-56402 - Arabidopsis thaliana >gi|12325224|gb|AAG52554.1|AC010675_2
  misc_feature (20)..(603): Homolog of NCBI NO: 18409382 NR Description: nitrate transporter (NTL1); protein id: supported by cDNA: gi_17064753, supported by cDNA: gi_3377516 thaliana] >gi|23397158|gb|AAN31862.1| putative nitrate
  misc_feature (20)..(603): Homolog of NCBI NO: 17064754 NR Description: nitrate transporter (NTL1) [Arabidopsis thaliana]
  misc_feature (20)..(603): Homolog of NCBI NO: 11358579 NR Description: nitrate transporter NTL1 [validated] - thaliana >gi|3377517|gb|AAC28086.1| nitrate transporter NTL1
  misc_feature (285)..(603): Homolog of NCBI NO: 22329803 NR Description: nitrate transporter, putative; protein id: supported by cDNA: gi_18175947, supported by cDNA: gi_20465362 thaliana] >gi|18175948|gb|AAL59956.1| putative nitrate
  misc_feature (20)..(299): Homolog of NCBI NO: 22329803 NR Description: nitrate transporter, putative; protein id: supported by cDNA: gi_18175947, supported by cDNA: gi_20465362 thaliana] >gi|18175948|gb|AAL59956.1| putative nitrate
  misc_feature (285)..(603): Homolog of NCBI NO: 25403281 NR Description: protein T7N9.10 [imported] - Arabidopsis thaliana
  misc_feature (24)..(299): Homolog of NCBI NO: 25403281 NR Description: protein T7N9.10 [imported] - Arabidopsis thaliana
  misc_feature (1)..(598): Homolog of NCBI NO: 15241938 NR Description: nitrate transporter NTL1 - like protein; protein
  misc_feature (25)..(598): Homolog of NCBI NO: 10177451 NR Description: nitrate transporter NTL1 [Arabidopsis thaliana]

SEQ ID NO: 92361 - protein, 600 aa, Arabidopsis thaliana; identical to SEQ ID NO: 88605
  peptide (1)..(600): Ceres Seq. ID no. 12711146
  misc_feature (112)..(529): Pfam Name: POT family Pfam Description: POT family
  misc_feature (1)..(600): Homolog of NCBI NO: 25404844 NR Description: nitrate transporter (NTL1), 53025-56402 - Arabidopsis thaliana >gi|12325224|gb|AAG52554.1|AC010675_2
  misc_feature (17)..(600): Homolog of NCBI NO: 18409382 NR Description: nitrate transporter (NTL1); protein id: supported by cDNA: gi_17064753, supported by cDNA: gi_3377516 thaliana] >gi|23397158|gb|AAN31862.1| putative nitrate
  misc_feature (17)..(600): Homolog of NCBI NO: 17064754 NR Description: nitrate transporter (NTL1) [Arabidopsis thaliana]
  misc_feature (17)..(600): Homolog of NCBI NO: 11358579 NR Description: nitrate transporter NTL1 [validated] - thaliana >gi|3377517|gb|AAC28086.1| nitrate transporter NTL1
  misc_feature (282)..(600): Homolog of NCBI NO: 22329803 NR Description: nitrate transporter, putative; protein id: supported by cDNA: gi_18175947, supported by cDNA: gi_20465362 thaliana] >gi|18175948|gb|AAL59956.1| putative nitrate
  misc_feature (17)..(296): Homolog of NCBI NO: 22329803 NR Description: nitrate transporter, putative; protein id: supported by cDNA: gi_18175947, supported by cDNA: gi_20465362 thaliana] >gi|18175948|gb|AAL59956.1| putative nitrate
  misc_feature (282)..(600): Homolog of NCBI NO: 25403281 NR Description: protein T7N9.10 [imported] - Arabidopsis thaliana
  misc_feature (21)..(296): Homolog of NCBI NO: 25403281 NR Description: protein T7N9.10 [imported] - Arabidopsis thaliana
  misc_feature (1)..(595): Homolog of NCBI NO: 15241938 NR Description: nitrate transporter NTL1 - like protein; protein
  misc_feature (22)..(595): Homolog of NCBI NO: 10177451 NR Description: nitrate transporter NTL1 [Arabidopsis thaliana]

SEQ ID NO: 92362 - protein, 557 aa, Arabidopsis thaliana; identical to SEQ ID NO: 88606
  peptide (1)..(557): Ceres Seq. ID no. 12711147
  misc_feature (69)..(486): Pfam Name: POT family Pfam Description: POT family
  misc_feature (1)..(557): Homolog of NCBI NO: 25404844 NR Description: nitrate transporter (NTL1), 53025-56402 - Arabidopsis thaliana >gi|12325224|gb|AAG52554.1|AC010675_2
  misc_feature (1)..(557): Homolog of NCBI NO: 18409382 NR Description: nitrate transporter (NTL1); protein id: supported by cDNA: gi_17064753, supported by cDNA: gi_3377516 thaliana] >gi|23397158|gb|AAN31862.1| putative nitrate
  misc_feature (1)..(557): Homolog of NCBI NO: 17064754 NR Description: nitrate transporter (NTL1) [Arabidopsis thaliana]
  misc_feature (1)..(557): Homolog of NCBI NO: 11358579 NR Description: nitrate transporter NTL1 [validated] - thaliana >gi|3377517|gb|AAC28086.1| nitrate transporter NTL1
  misc_feature (239)..(557): Homolog of NCBI NO: 22329803 NR Description: nitrate transporter, putative; protein id: supported by cDNA: gi_18175947, supported by cDNA: gi_20465362 thaliana] >gi|18175948|gb|AAL59956.1| putative nitrate
  misc_feature (1)..(253): Homolog of NCBI NO: 22329803 NR Description: nitrate transporter, putative; protein id: supported by cDNA: gi_18175947, supported by cDNA: gi_20465362 thaliana] >gi|18175948|gb|AAL59956.1| putative nitrate
  misc_feature (239)..(557): Homolog of NCBI NO: 25403281 NR Description: protein T7N9.10 [imported] - Arabidopsis thaliana
  misc_feature (1)..(253): Homolog of NCBI NO: 25403281 NR Description: protein T7N9.10 [imported] - Arabidopsis thaliana
  misc_feature (1)..(552): Homolog of NCBI NO: 15241938 NR Description: nitrate transporter NTL1 - like protein; protein
  misc_feature (1)..(552): Homolog of NCBI NO: 10177451 NR Description: nitrate transporter NTL1 [Arabidopsis thaliana]

SEQ ID NO: 92363 - DNA, 1554 bp, Arabidopsis thaliana; identical to SEQ ID NO: 88607
  misc_feature (1)..(1554): Ceres Seq. ID no. 12711148

SEQ ID NO: 92364 - protein, 517 aa, Arabidopsis thaliana; identical to SEQ ID NO: 88608
  peptide (1)..(517): Ceres Seq. ID no. 12711149
  misc_feature (64)..(448): Pfam Name: POT family Pfam Description: POT family
  misc_feature (64)..(517): Homolog of NCBI NO: 15222484 NR Description: putative peptide transporter; protein id: [Arabidopsis thaliana] >gi|25404845|pir||H96720 probable peptide
  misc_feature (1)..(102): Homolog of NCBI NO: 15222484 NR Description: putative peptide transporter; protein id: [Arabidopsis thaliana] >gi|25404845|pir||H96720 probable peptide
  misc_feature (107)..(511): Homolog of NCBI NO: 25404847 NR Description: probable peptide transporter T17F3.10 [imported] Arabidopsis thaliana >gi|12325237|gb|AAG52567.1|AC010675_15
  misc_feature (16)..(104): Homolog of NCBI NO: 25404847 NR Description: probable peptide transporter T17F3.10 [imported] Arabidopsis thaliana >gi|12325237|gb|AAG52567.1|AC010675_15
  misc_feature (107)..(511): Homolog of NCBI NO: 18409391 NR Description: putative peptide transporter; protein id: supported by cDNA: 22243., supported by cDNA: gi_19699103 thaliana] >gi|19699104|gb|AAL90918.1| At1g69870/T17F3_10
  misc_feature (16)..(104): Homolog of NCBI NO: 18409391 NR Description: putative peptide transporter; protein id: supported by cDNA: 22243., supported by cDNA: gi_19699103 thaliana] >gi|19699104|gb|AAL90918.1| At1g69870/T17F3_10
  misc_feature (107)..(511): Homolog of NCBI NO: 25403285 NR Description: protein T7N9.14 [imported] - Arabidopsis thaliana
  misc_feature (28)..(104): Homolog of NCBI NO: 25403285 NR Description: protein T7N9.14 [imported] - Arabidopsis thaliana
  misc_feature (101)..(511): Homolog of NCBI NO: 34906908 NR Description: putative peptide transporter [Oryza sativa
  misc_feature (32)..(102): Homolog of NCBI NO: 34906908 NR Description: putative peptide transporter [Oryza sativa

SEQ ID NO: 92365 - protein, 493 aa, Arabidopsis thaliana; identical to SEQ ID NO: 88609
  peptide (1)..(493): Ceres Seq. ID no. 12711150
  misc_feature (40)..(424): Pfam Name: POT family Pfam Description: POT family
  misc_feature (40)..(493): Homolog of NCBI NO: 15222484 NR Description: putative peptide transporter; protein id: [Arabidopsis thaliana] >gi|25404845|pir||H96720 probable peptide
  misc_feature (1)..(78): Homolog of NCBI NO: 15222484 NR Description: putative peptide transporter; protein id: [Arabidopsis thaliana] >gi|25404845|pir||H96720 probable peptide
  misc_feature (83)..(487): Homolog of NCBI NO: 25404847 NR Description: probable peptide transporter T17F3.10 [imported] Arabidopsis thaliana >gi|12325237|gb|AAG52567.1|AC010675_15
  misc_feature (1)..(80): Homolog of NCBI NO: 25404847 NR Description: probable peptide transporter T17F3.10 [imported] Arabidopsis thaliana >gi|12325237|gb|AAG52567.1|AC010675_15
  misc_feature (83)..(487): Homolog of NCBI NO: 18409391 NR Description: putative peptide transporter; protein id: supported by cDNA: 22243., supported by cDNA: gi_19699103 thaliana] >gi|19699104|gb|AAL90918.1| At1g69870/T17F3_10
  misc_feature (1)..(80): Homolog of NCBI NO: 18409391 NR Description: putative peptide transporter; protein id: supported by cDNA: 22243., supported by cDNA: gi_19699103 thaliana] >gi|19699104|gb|AAL90918.1| At1g69870/T17F3_10
  misc_feature (83)..(487): Homolog of NCBI NO: 25403285 NR Description: protein T7N9.14 [imported] - Arabidopsis thaliana
  misc_feature (4)..(80): Homolog of NCBI NO: 25403285 NR Description: protein T7N9.14 [imported] - Arabidopsis thaliana
  misc_feature (77)..(487): Homolog of NCBI NO: 34906908 NR Description: putative peptide transporter [Oryza sativa
  misc_feature (8)..(78): Homolog of NCBI NO: 34906908 NR Description: putative peptide transporter [Oryza sativa

SEQ ID NO: 92366 - protein, 475 aa, Arabidopsis thaliana; identical to SEQ ID NO: 88610
  peptide (1)..(475): Ceres Seq. ID no. 12711151
  misc_feature (22)..(406): Pfam Name: POT family Pfam Description: POT family
  misc_feature (22)..(475): Homolog of NCBI NO: 15222484 NR Description: putative peptide transporter; protein id: [Arabidopsis thaliana] >gi|25404845|pir||H96720 probable peptide
  misc_feature (1)..(60): Homolog of NCBI NO: 15222484 NR Description: putative peptide transporter; protein id: [Arabidopsis thaliana] >gi|25404845|pir||H96720 probable peptide
  misc_feature (65)..(469): Homolog of NCBI NO: 25404847 NR Description: probable peptide transporter T17F3.10 [imported] Arabidopsis thaliana >gi|12325237|gb|AAG52567.1|AC010675_15
  misc_feature (1)..(62): Homolog of NCBI NO: 25404847 NR Description: probable peptide transporter T17F3.10 [imported] Arabidopsis thaliana >gi|12325237|gb|AAG52567.1|AC010675_15
  misc_feature (65)..(469): Homolog of NCBI NO: 18409391 NR Description: putative peptide transporter; protein id: supported by cDNA: 22243., supported by cDNA: gi_19699103 thaliana] >gi|19699104|gb|AAL90918.1| At1g69870/T17F3_10
  misc_feature (1)..(62): Homolog of NCBI NO: 18409391 NR Description: putative peptide transporter; protein id: supported by cDNA: 22243., supported by cDNA: gi_19699103 thaliana] >gi|19699104|gb|AAL90918.1| At1g69870/T17F3_10
  misc_feature (65)..(469): Homolog of NCBI NO: 25403285 NR Description: protein T7N9.14 [imported] - Arabidopsis thaliana
  misc_feature (1)..(62): Homolog of NCBI NO: 25403285 NR Description: protein T7N9.14 [imported] - Arabidopsis thaliana
  misc_feature (59)..(469): Homolog of NCBI NO: 34906908 NR Description: putative peptide transporter [Oryza sativa
  misc_feature (1)..(60): Homolog of NCBI NO: 34906908 NR Description: putative peptide transporter [Oryza sativa

SEQ ID NO: 92367 - DNA, 1911 bp, Arabidopsis thaliana; identical to SEQ ID NO: 88611
  misc_feature (1)..(1911): Ceres Seq. ID no. 12711160
  misc_feature: MA Experiment ID: 20000171 Result: Up-regulated in Transcription
  misc_feature: MA Experiment 20000171 PARAMETER Experiment Name: At_42deg_Heat_P Parameter: Age (day) Value: 14
  misc_feature: MA Experiment 20000171 PARAMETER Experiment Name: At_42deg_Heat_P Parameter: Organism Value: A. thaliana
  misc_feature: MA Experiment 20000171 PARAMETER Experiment Name: At_42deg_Heat_P Parameter: Plant Line Value: WS
  misc_feature: MA Experiment 20000171 PARAMETER Experiment Name: At_42deg_Heat_P Parameter: Temperature (deg C) Value: 42 vs. 22
  misc_feature: MA Experiment 20000171 PARAMETER Experiment Name: At_42deg_Heat_P Parameter: Timepoint (hr) Value: 1
  misc_feature: MA Experiment 20000171 PARAMETER Experiment Name: At_42deg_Heat_P Parameter: Tissue Value: Aerial
  misc_feature: MA Experiment ID: 20000439 Result: Down-regulated in Transcription
  misc_feature: MA Experiment 20000439 PARAMETER Experiment Name: At_Roots__P Parameter: Age (day) Value: 14 vs. 21
  misc_feature: MA Experiment 20000439 PARAMETER Experiment Name: At_Roots__P Parameter: Organism Value: A. thaliana
  misc_feature: MA Experiment 20000439 PARAMETER Experiment Name: At_Roots__P Parameter: Tissue Value: Roots vs. Whole Plant
  misc_feature: MA Experiment ID: 20000495 Result: Up-regulated in Transcription
  misc_feature: MA Experiment 20000495 PARAMETER Experiment Name: At_Guard_Cells_P Parameter: Harvest Date Value: 8/2/2002
  misc_feature: MA Experiment 20000495 PARAMETER Experiment Name: At_Guard_Cells_P Parameter: Organism Value: A. thaliana
  misc_feature: MA Experiment 20000495 PARAMETER Experiment Name: At_Guard_Cells_P Parameter: Tissue Value: Guard Cells vs. Leaves
  misc_feature: MA Experiment ID: 20000794 Result: Down-regulated in Transcription
  misc_feature: MA Experiment 20000794 PARAMETER Experiment Name: At_Petals_P Parameter: Age (day) Value: 23-25 days
  misc_feature: MA Experiment 20000794 PARAMETER Experiment Name: At_Petals_P Parameter: Plant Line Value: WS
  misc_feature: MA Experiment 20000794 PARAMETER Experiment Name: At_Petals_P Parameter: Tissue Value: Petals vs. Whole plant

SEQ ID NO: 92368 - protein, 636 aa, Arabidopsis thaliana; identical to SEQ ID NO: 88612
  peptide (1)..(636): Ceres Seq. ID no. 12711161
  misc_feature (256)..(623): Homolog of NCBI NO: 29150383 NR Description: putative protein kinase [Oryza sativa (japonica
  misc_feature (24)..(628): Homolog of NCBI NO: 15408730 NR Description: P0443D08.12 [Oryza sativa (japonica
  misc_feature (194)..(623): Homolog of NCBI NO: 25404646 NR Description: probable wall-associated kinase T4O24.5
  misc_feature (5)..(226): Homolog of NCBI NO: 25404646 NR Description: probable wall-associated kinase T4O24.5
  misc_feature (194)..(623): Homolog of NCBI NO: 12597754 NR Description: protein kinase, putative [Arabidopsis thaliana]
  misc_feature (29)..(226): Homolog of NCBI NO: 12597754 NR Description: protein kinase, putative [Arabidopsis thaliana]
  misc_feature (194)..(623): Homolog of NCBI NO: 30697422 NR Description: serine/threonine protein kinase family
  misc_feature (29)..(226): Homolog of NCBI NO: 30697422 NR Description: serine/threonine protein kinase family
  misc_feature (310)..(623): Homolog of NCBI NO: 26450415 NR Description: unknown protein [Arabidopsis thaliana]
  misc_feature (310)..(623): Homolog of NCBI NO: 9758129 NR Description: contains similarity to protein

SEQ ID NO: 92369 - DNA, 1302 bp, Arabidopsis thaliana; identical to SEQ ID NO: 88613
  misc_feature (1)..(1302): Ceres Seq. ID no. 12711162
  misc_feature: MA Experiment ID: 20000306 Result: Down-regulated in Transcription
  misc_feature: MA Experiment 20000306 PARAMETER Experiment Name: At_Germinating_Seeds_Sub_P Parameter: Age (hr) Value: 6 vs. 0
  misc_feature: MA Experiment 20000306 PARAMETER Experiment Name: At_Germinating_Seeds_Sub_P Parameter: Organism Value: A. thaliana
  misc_feature: MA Experiment 20000306 PARAMETER Experiment Name: At_Germinating_Seeds_Sub_P Parameter: Plant Line Value: WS
  misc_feature: MA Experiment 20000306 PARAMETER Experiment Name: At_Germinating_Seeds_Sub_P Parameter: Tissue Value: Germinating Seeds
  misc_feature: MA Experiment ID: 20000307 Result: Down-regulated in Transcription
  misc_feature: MA Experiment 20000307 PARAMETER Experiment Name: At_Germinating_Seeds_Sub_P Parameter: Age (hr) Value: 24 vs. 0
  misc_feature: MA Experiment 20000307 PARAMETER Experiment Name: At_Germinating_Seeds_Sub_P Parameter: Organism Value: A. thaliana
  misc_feature: MA Experiment 20000307 PARAMETER Experiment Name: At_Germinating_Seeds_Sub_P Parameter: Plant Line Value: WS
  misc_feature: MA Experiment 20000307 PARAMETER Experiment Name: At_Germinating_Seeds_Sub_P Parameter: Tissue Value: Germinating Seeds
  misc_feature: MA Experiment ID: 20000315 Result: Down-regulated in Transcription
  misc_feature: MA Experiment 20000315 PARAMETER Experiment Name: At_14day_Shoots-Roots_Sub_P Parameter: Age (day) Value: 14
  misc_feature: MA Experiment 20000315 PARAMETER Experiment Name: At_14day_Shoots-Roots_Sub_P Parameter: Organism Value: A. thaliana
  misc_feature: MA Experiment 20000315 PARAMETER Experiment Name: At_14day_Shoots-Roots_Sub_P Parameter: Plant Line Value: WS
  misc_feature: MA Experiment 20000315 PARAMETER Experiment Name: At_14day_Shoots-Roots_Sub_P Parameter: Tissue Value: Shoots vs. Whole Plant
  misc_feature: MA Experiment ID: 20000327 Result: Up-regulated in Transcription
  misc_feature: MA Experiment 20000327 PARAMETER Experiment Name: At_42deg_Heat_Sub_P Parameter: Age (day) Value: 14
  misc_feature: MA Experiment 20000327 PARAMETER Experiment Name: At_42deg_Heat_Sub_P Parameter: Organism Value: A. thaliana
  misc_feature: MA Experiment 20000327 PARAMETER Experiment Name: At_42deg_Heat_Sub_P Parameter: Plant Line Value: WS
  misc_feature: MA Experiment 20000327 PARAMETER Experiment Name: At_42deg_Heat_Sub_P Parameter: Temperature (deg C) Value: 42 vs. 22
  misc_feature: MA Experiment 20000327 PARAMETER Experiment Name: At_42deg_Heat_Sub_P Parameter: Timepoint (hr) Value: 1
  misc_feature: MA Experiment 20000327 PARAMETER Experiment Name: At_42deg_Heat_Sub_P Parameter: Tissue Value: Aerial
  misc_feature: MA Experiment ID: 20000355 Result: Down-regulated in Transcription
  misc_feature: MA Experiment 20000355 PARAMETER Experiment Name: At_Siliques_Sub_P Parameter: Age (day) Value: 21
  misc_feature: MA Experiment 20000355 PARAMETER Experiment Name: At_Siliques_Sub_P Parameter: Organism Value: A. thaliana
  misc_feature: MA Experiment 20000355 PARAMETER Experiment Name: At_Siliques_Sub_P Parameter: Plant Line Value: WS
  misc_feature: MA Experiment 20000355 PARAMETER Experiment Name: At_Siliques_Sub_P Parameter: Tissue Value: Less Than 5mm Siliques vs. Whole Plant
  misc_feature: MA Experiment ID: 20000440 Result: Down-regulated in Transcription
  misc_feature: MA Experiment 20000440 PARAMETER Experiment Name: At_Closed-Flower__Sub_P Parameter: Tissue Value: Closed Flower vs. Whole Plant

SEQ ID NO: 92370 - protein, 433 aa, Arabidopsis thaliana; identical to SEQ ID NO: 88614
  peptide (1)..(433): Ceres Seq. ID no. 12711163
  misc_feature (7)..(316): Homolog of NCBI NO: 25403291 NR Description: protein T7N9.20 [imported] - Arabidopsis thaliana
  misc_feature (318)..(430): Homolog of NCBI NO: 25403291 NR Description: protein T7N9.20 [imported] - Arabidopsis thaliana
  misc_feature (1)..(232): Homolog of NCBI NO: 15222499 NR Description: glutathione transferase, putative; protein id: [Arabidopsis thaliana] >gi|25313220|pir||G96721 probable
  misc_feature (223)..(433): Homolog of NCBI NO: 15222497 NR Description: glutathione transferase, putative; protein id: [Arabidopsis thaliana] >gi|25313218|pir||F96721 probable
  misc_feature (223)..(433): Homolog of NCBI NO: 38454100 NR Description: At1g69920 [Arabidopsis thaliana]
  misc_feature (226)..(433): Homolog of NCBI NO: 15223432 NR Description: glutathione transferase, putative; protein id: supported by cDNA: 2985., supported by cDNA: gi_11096019, by cDNA: gi_14994260, supported by cDNA: gi_15215629, supported
  misc_feature (226)..(433): Homolog of NCBI NO: 21592561 NR Description: glutathione transferase, putative [Arabidopsis
  misc_feature (226)..(433): Homolog of NCBI NO: 25403291 NR Description: protein T7N9.20 [imported] - Arabidopsis thaliana
  misc_feature (7)..(230): Homolog of NCBI NO: 15223432 NR Description: glutathione transferase, putative; protein id: supported by cDNA: 2985., supported by cDNA: gi_11096019, by cDNA: gi_14994260, supported by cDNA: gi_15215629, supported
  misc_feature (13)..(230): Homolog of NCBI NO: 21592561 NR Description: glutathione transferase, putative [Arabidopsis

SEQ ID NO: 92371 - protein, 430 aa, Arabidopsis thaliana; identical to SEQ ID NO: 88615
  peptide (1)..(430): Ceres Seq. ID no. 12711164
  misc_feature (4)..(313): Homolog of NCBI NO: 25403291 NR Description: protein T7N9.20 [imported] - Arabidopsis thaliana
  misc_feature (315)..(427): Homolog of NCBI NO: 25403291 NR Description: protein T7N9.20 [imported] - Arabidopsis thaliana
  misc_feature (1)..(229): Homolog of NCBI NO: 15222499 NR Description: glutathione transferase, putative; protein id: [Arabidopsis thaliana] >gi|25313220|pir||G96721 probable
  misc_feature (220)..(430): Homolog of NCBI NO: 15222497 NR Description: glutathione transferase, putative; protein id: [Arabidopsis thaliana] >gi|25313218|pir||F96721 probable
  misc_feature (220)..(430): Homolog of NCBI NO: 38454100 NR Description: At1g69920 [Arabidopsis thaliana]
  misc_feature (223)..(430): Homolog of NCBI NO: 15223432 NR Description: glutathione transferase, putative; protein id: supported by cDNA: 2985., supported by cDNA: gi_11096019, by cDNA: gi_14994260, supported by cDNA: gi_15215629, supported
  misc_feature (223)..(430): Homolog of NCBI NO: 25403291 NR Description: protein T7N9.20 [imported] - Arabidopsis thaliana
  misc_feature (223)..(430): Homolog of NCBI NO: 21592561 NR Description: glutathione transferase, putative [Arabidopsis
  misc_feature (4)..(227): Homolog of NCBI NO: 15223432 NR Description: glutathione transferase, putative; protein id: supported by cDNA: 2985., supported by cDNA: gi_11096019, by cDNA: gi_14994260, supported by cDNA: gi_15215629, supported
  misc_feature (10)..(227): Homolog of NCBI NO: 21592561 NR Description: glutathione transferase, putative [Arabidopsis

SEQ ID NO: 92372 - protein, 354 aa, Arabidopsis thaliana; identical to SEQ ID NO: 88616
  peptide (1)..(354): Ceres Seq. ID no. 12711165
  misc_feature (1)..(237): Homolog of NCBI NO: 25403291 NR Description: protein T7N9.20 [imported] - Arabidopsis thaliana
  misc_feature (239)..(351): Homolog of NCBI NO: 25403291 NR Description: protein T7N9.20 [imported] - Arabidopsis thaliana
  misc_feature (1)..(153): Homolog of NCBI NO: 15222499 NR Description: glutathione transferase, putative; protein id: [Arabidopsis thaliana] >gi|25313220|pir||G96721 probable
  misc_feature (144)..(354): Homolog of NCBI NO: 15222497 NR Description: glutathione transferase, putative; protein id: [Arabidopsis thaliana] >gi|25313218|pir||F96721 probable
  misc_feature (144)..(354): Homolog of NCBI NO: 38454100 NR Description: At1g69920 [Arabidopsis thaliana]
  misc_feature (147)..(354): Homolog of NCBI NO: 15223432 NR Description: glutathione transferase, putative; protein id: supported by cDNA: 2985., supported by cDNA: gi_11096019, by cDNA: gi_14994260, supported by cDNA: gi_15215629, supported
  misc_feature (147)..(354): Homolog of NCBI NO: 25403291 NR Description: protein T7N9.20 [imported] - Arabidopsis thaliana
  misc_feature (147)..(354): Homolog of NCBI NO: 21592561 NR Description: glutathione transferase, putative [Arabidopsis
  misc_feature (1)..(151): Homolog of NCBI NO: 15223432 NR Description: glutathione transferase, putative; protein id: supported by cDNA: 2985., supported by cDNA: gi_11096019, by cDNA: gi_14994260, supported by cDNA: gi_15215629, supported
  misc_feature (1)..(151): Homolog of NCBI NO: 21592561 NR Description: glutathione transferase, putative [Arabidopsis

SEQ ID NO: 92373 - DNA, 2358 bp, Arabidopsis thaliana; identical to SEQ ID NO: 88617
  misc_feature (1)..(2358): Ceres Seq. ID no. 12711168
  misc_feature: MA Experiment ID: 20000180 Result: Down-regulated in Transcription
  misc_feature: MA Experiment 20000180 PARAMETER Experiment Name: At_Germinating_Seeds_P Parameter: Age (hr) Value: 24 vs. 0
  misc_feature: MA Experiment 20000180 PARAMETER Experiment Name: At_Germinating_Seeds_P Parameter: Tissue Value: Germinating Seeds
  misc_feature: MA Experiment ID: 20001451 Result: Down-regulated in Transcription
  misc_feature: MA Experiment 20001451 PARAMETER Experiment Name: At_Far-red-induction_P Parameter: Age (day) Value: 7
  misc_feature: MA Experiment 20001451 PARAMETER Experiment Name: At_Far-red-induction_P Parameter: Light Value: Far-red vs. White
  misc_feature: MA Experiment 20001451 PARAMETER Experiment Name: At_Far-red-induction_P Parameter: Organism Value: A. thaliana
  misc_feature: MA Experiment 20001451 PARAMETER Experiment Name: At_Far-red-induction_P Parameter: Plant Line Value: Columbia
  misc_feature: MA Experiment 20001451 PARAMETER Experiment Name: At_Far-red-induction_P Parameter: Timepoint (hr) Value: 24
  misc_feature: MA Experiment 20001451 PARAMETER Experiment Name: At_Far-red-induction_P Parameter: Tissue Value: Whole Plant

SEQ ID NO: 92374 - protein, 785 aa, Arabidopsis thaliana; identical to SEQ ID NO: 88618
  peptide (1)..(785): Ceres Seq. ID no. 12711169
  misc_feature (694)..(778): Pfam Name: hAT family dimerisation domain Pfam Description: hAT family dimerisation domain
  misc_feature (123)..(785): Homolog of NCBI NO: 22331085 NR Description: hypothetical protein; protein id: At3g14800.1, by cDNA: gi_18176329, supported by cDNA: gi_20465374 [Arabidopsis
  misc_feature (123)..(783): Homolog of NCBI NO: 30683310 NR Description: expressed protein [Arabidopsis thaliana]
  misc_feature (132)..(783): Homolog of NCBI NO: 22535576 NR Description: Ac transposase-like protein [Oryza sativa
  misc_feature (120)..(684): Homolog of NCBI NO: 15228474 NR Description: putative transposase; protein id: At3g42170.1
  misc_feature (661)..(785): Homolog of NCBI NO: 15228474 NR Description: putative transposase; protein id: At3g42170.1
  misc_feature (240)..(665): Homolog of NCBI NO: 15220044 NR Description: hypothetical protein; protein id: At1g80020.1
  misc_feature (671)..(785): Homolog of NCBI NO: 15220044 NR Description: hypothetical protein; protein id: At1g80020.1
  misc_feature (159)..(704): Homolog of NCBI NO: 15218119 NR Description: hypothetical protein; protein id: At1g15300.1, by cDNA: gi_20260645 [Arabidopsis thaliana]
  misc_feature (690)..(780): Homolog of NCBI NO: 15218119 NR Description: hypothetical protein; protein id: At1g15300.1, by cDNA: gi_20260645 [Arabidopsis thaliana]
  misc_feature (241)..(779): Homolog of NCBI NO: 20521440 NR Description: B1003B09.3 [Oryza sativa (japonica

SEQ ID NO: 92375 - protein, 720 aa, Arabidopsis thaliana; identical to SEQ ID NO: 88619
  peptide (1)..(720): Ceres Seq. ID no. 12711170
  misc_feature (629)..(713): Pfam Name: hAT family dimerisation domain Pfam Description: hAT family dimerisation domain
  misc_feature (58)..(720): Homolog of NCBI NO: 22331085 NR Description: hypothetical protein; protein id: At3g14800.1, by cDNA: gi_18176329, supported by cDNA: gi_20465374 [Arabidopsis
  misc_feature (58)..(718): Homolog of NCBI NO: 30683310 NR Description: expressed protein [Arabidopsis thaliana]
  misc_feature (67)..(718): Homolog of NCBI NO: 22535576 NR Description: Ac transposase-like protein [Oryza sativa
  misc_feature (55)..(619): Homolog of NCBI NO: 15228474 NR Description: putative transposase; protein id: At3g42170.1
  misc_feature (596)..(720): Homolog of NCBI NO: 15228474 NR Description: putative transposase; protein id: At3g42170.1
  misc_feature (175)..(600): Homolog of NCBI NO: 15220044 NR Description: hypothetical protein; protein id: At1g80020.1
  misc_feature (606)..(720): Homolog of NCBI NO: 15220044 NR Description: hypothetical protein; protein id: At1g80020.1
  misc_feature (94)..(639): Homolog of NCBI NO: 15218119 NR Description: hypothetical protein; protein id: At1g15300.1, by cDNA: gi_20260645 [Arabidopsis thaliana]
  misc_feature (625)..(715): Homolog of NCBI NO: 15218119 NR Description: hypothetical protein; protein id: At1g15300.1, by cDNA: gi_20260645 [Arabidopsis thaliana]
  misc_feature (176)..(714): Homolog of NCBI NO: 20521440 NR Description: B1003B09.3 [Oryza sativa (japonica

SEQ ID NO: 92376 - protein, 716 aa, Arabidopsis thaliana; identical to SEQ ID NO: 88620
  peptide (1)..(716): Ceres Seq. ID no. 12711171
  misc_feature (625)..(709): Pfam Name: hAT family dimerisation domain Pfam Description: hAT family dimerisation domain
  misc_feature (54)..(716): Homolog of NCBI NO: 22331085 NR Description: hypothetical protein; protein id: At3g14800.1, by cDNA: gi_18176329, supported by cDNA: gi_20465374 [Arabidopsis
  misc_feature (54)..(714): Homolog of NCBI NO: 30683310 NR Description: expressed protein [Arabidopsis thaliana]
  misc_feature (63)..(714): Homolog of NCBI NO: 22535576 NR Description: Ac transposase-like protein [Oryza sativa
  misc_feature (51)..(615): Homolog of NCBI NO: 15228474 NR Description: putative transposase; protein id: At3g42170.1
  misc_feature (592)..(716): Homolog of NCBI NO: 15228474 NR Description: putative transposase; protein id: At3g42170.1
  misc_feature (171)..(596): Homolog of NCBI NO: 15220044 NR Description: hypothetical protein; protein id: At1g80020.1
  misc_feature (602)..(716): Homolog of NCBI NO: 15220044 NR Description: hypothetical protein; protein id: At1g80020.1
  misc_feature (90)..(635): Homolog of NCBI NO: 15218119 NR Description: hypothetical protein; protein id: At1g15300.1, by cDNA: gi_20260645 [Arabidopsis thaliana]
  misc_feature (621)..(711): Homolog of NCBI NO: 15218119 NR Description: hypothetical protein; protein id: At1g15300.1, by cDNA: gi_20260645 [Arabidopsis thaliana]
  misc_feature (172)..(710): Homolog of NCBI NO: 20521440 NR Description: B1003B09.3 [Oryza sativa (japonica

SEQ ID NO: 92377 - DNA, 3798 bp, Arabidopsis thaliana; identical to SEQ ID NO: 88621
  misc_feature (1)..(3798): Ceres Seq. ID no. 12711186
  misc_feature: MA Experiment ID: 20000171 Result: Up-regulated in Transcription
  misc_feature: MA Experiment 20000171 PARAMETER Experiment Name: At_42deg_Heat_P Parameter: Age (day) Value: 14
  misc_feature: MA Experiment 20000171 PARAMETER Experiment Name: At_42deg_Heat_P Parameter: Organism Value: A. thaliana
  misc_feature: MA Experiment 20000171 PARAMETER Experiment Name: At_42deg_Heat_P Parameter: Plant Line Value: WS
  misc_feature: MA Experiment 20000171 PARAMETER Experiment Name: At_42deg_Heat_P Parameter: Temperature (deg C) Value: 42 vs. 22
  misc_feature: MA Experiment 20000171 PARAMETER Experiment Name: At_42deg_Heat_P Parameter: Timepoint (hr) Value: 1
  misc_feature: MA Experiment 20000171 PARAMETER Experiment Name: At_42deg_Heat_P Parameter: Tissue Value: Aerial
  misc_feature: MA Experiment ID: 20000184 Result: Down-regulated in Transcription
  misc_feature: MA Experiment 20000184 PARAMETER Experiment Name: At_Shoots__P Parameter: Age (day) Value: 7
  misc_feature: MA Experiment 20000184 PARAMETER Experiment Name: At_Shoots__P Parameter: Tissue Value: Shoots vs. Whole Plant
  misc_feature: MA Experiment ID: 20000286 Result: Up-regulated in Transcription
  misc_feature: MA Experiment 20000286 PARAMETER Experiment Name: At_Open_Flower_P Parameter: Age (day) Value: 21
  misc_feature: MA Experiment 20000286 PARAMETER Experiment Name: At_Open_Flower_P Parameter: Plant Line Value: WS
  misc_feature: MA Experiment 20000286 PARAMETER Experiment Name: At_Open_Flower_P Parameter: Tissue Value: Half Open vs. Whole Plant
  misc_feature: MA Experiment ID: 20000495 Result: Down-regulated in Transcription
  misc_feature: MA Experiment 20000495 PARAMETER Experiment Name: At_Guard_Cells_P Parameter: Harvest Date Value: 8/2/2002
  misc_feature: MA Experiment 20000495 PARAMETER Experiment Name: At_Guard_Cells_P Parameter: Organism Value: A. thaliana
  misc_feature: MA Experiment 20000495 PARAMETER Experiment Name: At_Guard_Cells_P Parameter: Tissue Value: Guard Cells vs. Leaves
  misc_feature: MA Experiment ID: 20000794 Result: Up-regulated in Transcription
  misc_feature: MA Experiment 20000794 PARAMETER Experiment Name: At_Petals_P Parameter: Age (day) Value: 23-25 days
  misc_feature: MA Experiment 20000794 PARAMETER Experiment Name: At_Petals_P Parameter: Plant Line Value: WS
  misc_feature: MA Experiment 20000794 PARAMETER Experiment Name: At_Petals_P Parameter: Tissue Value: Petals vs. Whole plant
  misc_feature: MA Experiment ID: 20001247 Result: Up-regulated in Transcription
  misc_feature: MA Experiment 20001247 PARAMETER Experiment Name: At_Far-red-induction_P Parameter: Age (day) Value: 7
  misc_feature: MA Experiment 20001247 PARAMETER Experiment Name: At_Far-red-induction_P Parameter: Light Value: Far-red vs. White
  misc_feature: MA Experiment 20001247 PARAMETER Experiment Name: At_Far-red-induction_P Parameter: Organism Value: A. thaliana
  misc_feature: MA Experiment 20001247 PARAMETER Experiment Name: At_Far-red-induction_P Parameter: Plant Line Value: Columbia
  misc_feature: MA Experiment 20001247 PARAMETER Experiment Name: At_Far-red-induction_P Parameter: Timepoint (hr) Value: 1
  misc_feature: MA Experiment 20001247 PARAMETER Experiment Name: At_Far-red-induction_P Parameter: Tissue Value: Whole Plant

SEQ ID NO: 92378 - protein, 1265 aa, Arabidopsis thaliana; identical to SEQ ID NO: 88622
  peptide (1)..(1265): Ceres Seq. ID no. 12711187
  misc_feature (117)..(163): Pfam Name: Paired amphipathic helix repeat Pfam Description: Paired amphipathic helix repeat
  misc_feature (3)..(933): Homolog of NCBI NO: 6094552 NR Description: unknown protein [Arabidopsis thaliana]
  misc_feature (828)..(1234): Homolog of NCBI NO: 6094552 NR Description: unknown protein [Arabidopsis thaliana]
  misc_feature (323)..(1262): Homolog of NCBI NO: 15218938 NR Description: hypothetical protein; protein id: At1g59890.1
  misc_feature (3)..(198): Homolog of NCBI NO: 15218938 NR Description: hypothetical protein; protein id: At1g59890.1
  misc_feature (432)..(1262): Homolog of NCBI NO: 15218525 NR Description: unknown protein; protein id: At1g10450.1
  misc_feature (12)..(200): Homolog of NCBI NO: 15218525 NR Description: unknown protein; protein id: At1g10450.1
  misc_feature (373)..(1217): Homolog of NCBI NO: 25402600 NR Description: protein T10O24.5 [imported] - Arabidopsis >gi|5091536|gb|AAD39565.1|AC007067_5 T10O24.5 [Arabidopsis
  misc_feature (12)..(200): Homolog of NCBI NO: 25402600 NR Description: protein T10O24.5 [imported] - Arabidopsis >gi|5091536|gb|AAD39565.1|AC007067_5 T10O24.5 [Arabidopsis
  misc_feature (307)..(1262): Homolog of NCBI NO: 25404243 NR Description: hypothetical protein F23H11.20 [imported] - thaliana >gi|5080821|gb|AAD39330.1|AC007258_19 Hypothetical
  misc_feature (3)..(198): Homolog of NCBI NO: 25404243 NR Description: hypothetical protein F23H11.20 [imported] - thaliana >gi|5080821|gb|AAD39330.1|AC007258_19 Hypothetical

SEQ ID NO: 92379 - protein, 1226 aa, Arabidopsis thaliana; identical to SEQ ID NO: 88623
  peptide (1)..(1226): Ceres Seq. ID no. 12711188
  misc_feature (78)..(124): Pfam Name: Paired amphipathic helix repeat Pfam Description: Paired amphipathic helix repeat
  misc_feature (1)..(894): Homolog of NCBI NO: 6094552 NR Description: unknown protein [Arabidopsis thaliana]
  misc_feature (789)..(1195): Homolog of NCBI NO: 6094552 NR Description: unknown protein [Arabidopsis thaliana]
  misc_feature (284)..(1223): Homolog of NCBI NO: 15218938 NR Description: hypothetical protein; protein id: At1g59890.1
  misc_feature (1)..(159): Homolog of NCBI NO: 15218938 NR Description: hypothetical protein; protein id: At1g59890.1
  misc_feature (393)..(1223): Homolog of NCBI NO: 15218525 NR Description: unknown protein; protein id: At1g10450.1
  misc_feature (1)..(161): Homolog of NCBI NO: 15218525 NR Description: unknown protein; protein id: At1g10450.1
  misc_feature (334)..(1178): Homolog of NCBI NO: 25402600 NR Description: protein T10O24.5 [imported] - Arabidopsis >gi|5091536|gb|AAD39565.1|AC007067_5 T10O24.5 [Arabidopsis
  misc_feature (1)..(161): Homolog of NCBI NO: 25402600 NR Description: protein T10O24.5 [imported] - Arabidopsis >gi|5091536|gb|AAD39565.1|AC007067_5 T10O24.5 [Arabidopsis
  misc_feature (268)..(1223): Homolog of NCBI NO: 25404243 NR Description: hypothetical protein F23H11.20 [imported] - thaliana >gi|5080821|gb|AAD39330.1|AC007258_19 Hypothetical
  misc_feature (1)..(159): Homolog of NCBI NO: 25404243 NR Description: hypothetical protein F23H11.20 [imported] - thaliana >gi|5080821|gb|AAD39330.1|AC007258_19 Hypothetical

SEQ ID NO: 92380 - protein, 1137 aa, Arabidopsis thaliana; identical to SEQ ID NO: 88624
  peptide (1)..(1137): Ceres Seq. ID no. 12711189
  misc_feature (1)..(35): Pfam Name: Paired amphipathic helix repeat Pfam Description: Paired amphipathic helix repeat
  misc_feature (1)..(805): Homolog of NCBI NO: 6094552 NR Description: unknown protein [Arabidopsis thaliana]
  misc_feature (700)..(1106): Homolog of NCBI NO: 6094552 NR Description: unknown protein [Arabidopsis thaliana]
  misc_feature (195)..(1134): Homolog of NCBI NO: 15218938 NR Description: hypothetical protein; protein id: At1g59890.1
  misc_feature (1)..(70): Homolog of NCBI NO: 15218938 NR Description: hypothetical protein; protein id: At1g59890.1
  misc_feature (304)..(1134): Homolog of NCBI NO: 15218525 NR Description: unknown protein; protein id: At1g10450.1
  misc_feature (1)..(72): Homolog of NCBI NO: 15218525 NR Description: unknown protein; protein id: At1g10450.1
  misc_feature (245)..(1089): Homolog of NCBI NO: 25402600 NR Description: protein T10O24.5 [imported] - Arabidopsis >gi|5091536|gb|AAD39565.1|AC007067_5 T10O24.5 [Arabidopsis
  misc_feature (1)..(72): Homolog of NCBI NO: 25402600 NR Description: protein T10O24.5 [imported] - Arabidopsis >gi|5091536|gb|AAD39565.1|AC007067_5 T10O24.5 [Arabidopsis
  misc_feature (179)..(1134): Homolog of NCBI NO: 25404243 NR Description: hypothetical protein F23H11.20 [imported] - thaliana >gi|5080821|gb|AAD39330.1|AC007258_19 Hypothetical
  misc_feature (1)..(70): Homolog of NCBI NO: 25404243 NR Description: hypothetical protein F23H11.20 [imported] - thaliana >gi|5080821|gb|AAD39330.1|AC007258_19 Hypothetical

SEQ ID NO: 92381 - DNA, 1282 bp, Arabidopsis thaliana; identical to SEQ ID NO: 88625
  misc_feature (1)..(1282): Ceres Seq. ID no. 12711202
  misc_feature: MA Experiment ID: 108461 Result: Up-regulated in Transcription
  misc_feature: MA Experiment 108461 PARAMETER Experiment Name: At_Germinating_Seeds_cDNA_P Parameter: Age (day) Value: 1 vs. 0
  misc_feature: MA Experiment 108461 PARAMETER Experiment Name: At_Germinating_Seeds_cDNA_P Parameter: Tissue Value: Germinating Seeds
  misc_feature: MA Experiment ID: 108462 Result: Up-regulated in Transcription
  misc_feature: MA Experiment 108462 PARAMETER Experiment Name: At_Germinating_Seeds_cDNA_P Parameter: Age (day) Value: 2 vs. 0
  misc_feature: MA Experiment 108462 PARAMETER Experiment Name: At_Germinating_Seeds_cDNA_P Parameter: Tissue Value: Germinating Seeds
  misc_feature: MA Experiment ID: 108463 Result: Up-regulated in Transcription
  misc_feature: MA Experiment 108463 PARAMETER Experiment Name: At_Germinating_Seeds_cDNA_P Parameter: Age (day) Value: 3 vs. 0
  misc_feature: MA Experiment 108463 PARAMETER Experiment Name: At_Germinating_Seeds_cDNA_P Parameter: Tissue Value: Germinating Seeds
  misc_feature: MA Experiment ID: 108464 Result: Up-regulated in Transcription
  misc_feature: MA Experiment 108464 PARAMETER Experiment Name: At_Germinating_Seeds_cDNA_P Parameter: Age (day) Value: 4 vs. 0
  misc_feature: MA Experiment 108464 PARAMETER Experiment Name: At_Germinating_Seeds_cDNA_P Parameter: Tissue Value: Germinating Seeds
  misc_feature: MA Experiment ID: 108488 Result: Up-regulated in Transcription
  misc_feature: MA Experiment ID: 108585 Result: Down-regulated in Transcription
  misc_feature: MA Experiment 108585 PARAMETER Experiment Name: At_5mM_NaNP_cDNA_P Parameter: Timepoint (hr) Value: 6
  misc_feature: MA Experiment 108585 PARAMETER Experiment Name: At_5mM_NaNP_cDNA_P Parameter: Tissue Value: Aerial
  misc_feature: MA Experiment 108585 PARAMETER Experiment Name: At_5mM_NaNP_cDNA_P Parameter: Treatment Value: null
  misc_feature: MA Experiment ID: 108595 Result: Down-regulated in Transcription
  misc_feature: MA Experiment 108595 PARAMETER Experiment Name: At_Ler-pi_Ovule_cDNA_P Parameter: Plant Line Value: null
  misc_feature: MA Experiment ID: 20000089 Result: Down-regulated in Transcription
  misc_feature: MA Experiment ID: 20000090 Result: Down-regulated in Transcription
  misc_feature: MA Experiment ID: 20000111 Result: Down-regulated in Transcription
  misc_feature: MA Experiment 20000111 PARAMETER Experiment Name: At_42deg_Heat_cDNA_P Parameter: Temperature (deg C) Value: 42 vs. 22
  misc_feature: MA Experiment 20000111 PARAMETER Experiment Name: At_42deg_Heat_cDNA_P Parameter: Timepoint (hr) Value: 6
  misc_feature: MA Experiment 20000111 PARAMETER Experiment Name: At_42deg_Heat_cDNA_P Parameter: Tissue Value: Aerial
  misc_feature: MA Experiment ID: 20000113 Result: Down-regulated in Transcription
  misc_feature: MA Experiment 20000113 PARAMETER Experiment Name: At_42deg_Heat_cDNA_P Parameter: Temperature (deg C) Value: 42 vs. 22
  misc_feature: MA Experiment 20000113 PARAMETER Experiment Name: At_42deg_Heat_cDNA_P Parameter: Timepoint (hr) Value: 8
  misc_feature: MA Experiment 20000113 PARAMETER Experiment Name: At_42deg_Heat_cDNA_P Parameter: Tissue Value: Aerial

SEQ ID NO: 92382 - protein, 416 aa, Arabidopsis thaliana; identical to SEQ ID NO: 24155
  peptide (1)..(416): Ceres Seq. ID no. 12711203
  misc_feature (247)..(411): Pfam Name: Arabidopsis proteins of unknown function Pfam Description: Arabidopsis proteins of unknown function
  misc_feature (1)..(416): Homolog of NCBI NO: 15223079 NR Description: unknown protein; protein id: At1g70230.1, by cDNA: gi_19310588 [Arabidopsis thaliana]
  misc_feature (2)..(411): Homolog of NCBI NO: 30678135 NR Description: expressed protein [Arabidopsis thaliana] unknown protein [Arabidopsis thaliana]
  misc_feature (79)..(311): Homolog of NCBI NO: 34900856 NR Description: P0458G06.13 [Oryza sativa (japonica
  misc_feature (279)..(413): Homolog of NCBI NO: 34900856 NR Description: P0458G06.13 [Oryza sativa (japonica
  misc_feature (4)..(411): Homolog of NCBI NO: 15237044 NR Description: putative protein; protein id: At4g11090.1
  misc_feature (89)..(411): Homolog of NCBI NO: 25518737 NR Description: hypothetical protein F6F3.23 [imported] - thaliana >gi|9665154|gb|AAF97338.1|AC023628_19 Unknown protein
  misc_feature (44)..(409): Homolog of NCBI NO: 28393189 NR Description: unknown protein [Arabidopsis thaliana]
  misc_feature (79)..(409): Homolog of NCBI NO: 15234058 NR Description: hypothetical protein; protein id: At4g01080.1
  misc_feature (14)..(411): Homolog of NCBI NO: 7486743 NR Description: hypothetical protein F9D16.260 - Arabidopsis >gi|4454048|emb|CAA23045.1| putative protein [Arabidopsis >gi|7269228|emb|CAB81297.1| putative protein [Arabidopsis
  misc_feature (14)..(411): Homolog of NCBI NO: 30686312 NR Description: expressed protein [Arabidopsis thaliana]

SEQ ID NO: 92383 - protein, 274 aa, Arabidopsis thaliana; identical to SEQ ID NO: 24156
  peptide (1)..(274): Ceres Seq. ID no. 12711204
  misc_feature (105)..(269): Pfam Name: Arabidopsis proteins of unknown function Pfam Description: Arabidopsis proteins of unknown function
  misc_feature (1)..(274): Homolog of NCBI NO: 15223079 NR Description: unknown protein; protein id: At1g70230.1, by cDNA: gi_19310588 [Arabidopsis thaliana]
  misc_feature (1)..(269): Homolog of NCBI NO: 30678135 NR Description: expressed protein [Arabidopsis thaliana] unknown protein [Arabidopsis thaliana]
  misc_feature (1)..(169): Homolog of NCBI NO: 34900856 NR Description: P0458G06.13 [Oryza sativa (japonica
  misc_feature (137)..(271): Homolog of NCBI NO: 34900856 NR Description: P0458G06.13 [Oryza sativa (japonica
  misc_feature (1)..(269): Homolog of NCBI NO: 15237044 NR Description: putative protein; protein id: At4g11090.1
  misc_feature (1)..(269): Homolog of NCBI NO: 25518737 NR Description: hypothetical protein F6F3.23 [imported] - thaliana >gi|9665154|gb|AAF97338.1|AC023628_19 Unknown protein
  misc_feature (1)..(267): Homolog of NCBI NO: 28393189 NR Description: unknown protein [Arabidopsis thaliana]
  misc_feature (1)..(267): Homolog of NCBI NO: 15234058 NR Description: hypothetical protein; protein id: At4g01080.1
  misc_feature (1)..(269): Homolog of NCBI NO: 7486743 NR Description: hypothetical protein F9D16.260 - Arabidopsis >gi|4454048|emb|CAA23045.1| putative protein [Arabidopsis >gi|7269228|emb|CAB81297.1| putative protein [Arabidopsis
  misc_feature (1)..(269): Homolog of NCBI NO: 30686312 NR Description: expressed protein [Arabidopsis thaliana]

SEQ ID NO: 92384 - protein, 262 aa, Arabidopsis thaliana; identical to SEQ ID NO: 24157
  peptide (1)..(262): Ceres Seq. ID no. 12711205
  misc_feature (93)..(257): Pfam Name: Arabidopsis proteins of unknown function Pfam Description: Arabidopsis proteins of unknown function
  misc_feature (1)..(262): Homolog of NCBI NO: 15223079 NR Description: unknown protein; protein id: At1g70230.1, by cDNA: gi_19310588 [Arabidopsis thaliana]
  misc_feature (1)..(257): Homolog of NCBI NO: 30678135 NR Description: expressed protein [Arabidopsis thaliana] unknown protein [Arabidopsis thaliana]
  misc_feature (1)..(157): Homolog of NCBI NO: 34900856 NR Description: P0458G06.13 [Oryza sativa (japonica
  misc_feature (125)..(259): Homolog of NCBI NO: 34900856 NR Description: P0458G06.13 [Oryza sativa (japonica
  misc_feature (1)..(257): Homolog of NCBI NO: 15237044 NR Description: putative protein; protein id: At4g11090.1
  misc_feature (1)..(257): Homolog of NCBI NO: 25518737 NR Description: hypothetical protein F6F3.23 [imported] - thaliana >gi|9665154|gb|AAF97338.1|AC023628_19 Unknown protein
  misc_feature (1)..(255): Homolog of NCBI NO: 28393189 NR Description: unknown protein [Arabidopsis thaliana]
  misc_feature (1)..(255): Homolog of NCBI NO: 15234058 NR Description: hypothetical protein; protein id: At4g01080.1
  misc_feature (1)..(257): Homolog of NCBI NO: 7486743 NR Description: hypothetical protein F9D16.260 - Arabidopsis >gi|4454048|emb|CAA23045.1| putative protein [Arabidopsis >gi|7269228|emb|CAB81297.1| putative protein [Arabidopsis
  misc_feature (1)..(257): Homolog of NCBI NO: 30686312 NR Description: expressed protein [Arabidopsis thaliana]

SEQ ID NO: 92385 - DNA, 1083 bp, Arabidopsis thaliana; identical to SEQ ID NO: 88629
  misc_feature (1)..(1083): Ceres Seq. ID no. 12711206
  misc_feature: MA Experiment ID: 20001554 Result: Up-regulated in Transcription
  misc_feature: MA Experiment 20001554 PARAMETER Experiment Name: At_Drought_Soil_Dry_P Parameter: Age (day) Value: 21
  misc_feature: MA Experiment 20001554 PARAMETER Experiment Name: At_Drought_Soil_Dry_P Parameter: Organism Value: A. thaliana
  misc_feature: MA Experiment 20001554 PARAMETER Experiment Name: At_Drought_Soil_Dry_P Parameter: Plant Line Value: WS
  misc_feature: MA Experiment 20001554 PARAMETER Experiment Name: At_Drought_Soil_Dry_P Parameter: Post Timepoint (hr) Value: None
  misc_feature: MA Experiment 20001554 PARAMETER Experiment Name: At_Drought_Soil_Dry_P Parameter: Post-Treatment Value: None
  misc_feature: MA Experiment 20001554 PARAMETER Experiment Name: At_Drought_Soil_Dry_P Parameter: Timepoint (day) Value: 7
  misc_feature: MA Experiment 20001554 PARAMETER Experiment Name: At_Drought_Soil_Dry_P Parameter: Treatment Value: Drought vs. No Drought
  misc_feature: MA Experiment ID: 20001556 Result: Down-regulated in Transcription
  misc_feature: MA Experiment 20001556 PARAMETER Experiment Name: At_Drought_Soil_Dry_P Parameter: Age (day) Value: 26
  misc_feature: MA Experiment 20001556 PARAMETER Experiment Name: At_Drought_Soil_Dry_P Parameter: Organism Value: A. thaliana
  misc_feature: MA Experiment 20001556 PARAMETER Experiment Name: At_Drought_Soil_Dry_P Parameter: Plant Line Value: WS
  misc_feature: MA Experiment 20001556 PARAMETER Experiment Name: At_Drought_Soil_Dry_P Parameter: Post Timepoint (hr) Value: None
  misc_feature: MA Experiment 20001556 PARAMETER Experiment Name: At_Drought_Soil_Dry_P Parameter: Post-Treatment Value: None
  misc_feature: MA Experiment 20001556 PARAMETER Experiment Name: At_Drought_Soil_Dry_P Parameter: Timepoint (day) Value: 12
  misc_feature: MA Experiment 20001556 PARAMETER Experiment Name: At_Drought_Soil_Dry_P Parameter: Treatment Value: Drought vs. No Drought
  misc_feature: MA Experiment ID: 20001558 Result: Down-regulated in Transcription
  misc_feature: MA Experiment 20001558 PARAMETER Experiment Name: At_Drought_Soil_Dry_P Parameter: Age (day) Value: 27
  misc_feature: MA Experiment 20001558 PARAMETER Experiment Name: At_Drought_Soil_Dry_P Parameter: Organism Value: A. thaliana
  misc_feature: MA Experiment 20001558 PARAMETER Experiment Name: At_Drought_Soil_Dry_P Parameter: Plant Line Value: WS
  misc_feature: MA Experiment 20001558 PARAMETER Experiment Name: At_Drought_Soil_Dry_P Parameter: Post Timepoint (hr) Value: 6
  misc_feature: MA Experiment 20001558 PARAMETER Experiment Name: At_Drought_Soil_Dry_P Parameter: Post-Treatment Value: Re-Water vs. No Drought
  misc_feature: MA Experiment 20001558 PARAMETER Experiment Name: At_Drought_Soil_Dry_P Parameter: Timepoint (day) Value: 13
  misc_feature: MA Experiment 20001558 PARAMETER Experiment Name: At_Drought_Soil_Dry_P Parameter: Treatment Value: Drought vs. No Drought
  misc_feature: MA Experiment ID: 20001560 Result: Down-regulated in Transcription
  misc_feature: MA Experiment 20001560 PARAMETER Experiment Name: At_Drought_Soil_Dry_P Parameter: Age (day) Value: 28
  misc_feature: MA Experiment 20001560 PARAMETER Experiment Name: At_Drought_Soil_Dry_P Parameter: Organism Value: A. thaliana
  misc_feature: MA Experiment 20001560 PARAMETER Experiment Name: At_Drought_Soil_Dry_P Parameter: Plant Line Value: WS
  misc_feature: MA Experiment 20001560 PARAMETER Experiment Name: At_Drought_Soil_Dry_P Parameter: Post Timepoint (hr) Value: None
  misc_feature: MA Experiment 20001560 PARAMETER Experiment Name: At_Drought_Soil_Dry_P Parameter: Post-Treatment Value: None
  misc_feature: MA Experiment 20001560 PARAMETER Experiment Name: At_Drought_Soil_Dry_P Parameter: Timepoint (day) Value: 14
  misc_feature: MA Experiment 20001560 PARAMETER Experiment Name: At_Drought_Soil_Dry_P Parameter: Treatment Value: Drought vs. No Drought
  misc_feature: MA Experiment ID: 20001757 Result: Up-regulated in Transcription
  misc_feature: MA Experiment 20001757 PARAMETER Experiment Name: At_50mM_NH4NO3_L-to-H_P Parameter: Timepoint (hr) Value: 6
  misc_feature: MA Experiment 20001757 PARAMETER Experiment Name: At_50mM_NH4NO3_L-to-H_P Parameter: Tissue Value: Leaf
  misc_feature: MA Experiment 20001757 PARAMETER Experiment Name: At_50mM_NH4NO3_L-to-H_P Parameter: Treatment Value: 50mM NH4NO3 vs 100mM Mannitol
  misc_feature: MA Experiment ID: 20001904 Result: Down-regulated in Transcription
  misc_feature: MA Experiment 20001904 PARAMETER Experiment Name: At_Drought_Reproduction_P Parameter: Age (day) Value: 37
  misc_feature: MA Experiment 20001904 PARAMETER Experiment Name: At_Drought_Reproduction_P Parameter: Organism Value: A. thaliana
  misc_feature: MA Experiment 20001904 PARAMETER Experiment Name: At_Drought_Reproduction_P Parameter: Plant Line Value: WS
  misc_feature: MA Experiment 20001904 PARAMETER Experiment Name: At_Drought_Reproduction_P Parameter: Timepoint (day) Value: 7
  misc_feature: MA Experiment 20001904 PARAMETER Experiment Name: At_Drought_Reproduction_P Parameter: Tissue Value: Rosettes
  misc_feature: MA Experiment 20001904 PARAMETER Experiment Name: At_Drought_Reproduction_P Parameter: Treatment Value: Drought vs. No Drought

SEQ ID NO: 92386 - protein, 360 aa, Arabidopsis thaliana; identical to SEQ ID NO: 88630
  peptide (1)..(360): Ceres Seq. ID no. 12711207
  misc_feature (6)..(140): Pfam Name: Integral membrane protein DUF6 Pfam Description: Integral membrane protein DUF6
  misc_feature (1)..(250): Homolog of NCBI NO: 15223106 NR Description: hypothetical protein; protein id: At1g70260.1
  misc_feature (1)..(353): Homolog of NCBI NO: 15218979 NR Description: hypothetical protein; protein id: At1g60050.1
  misc_feature (96)..(250): Homolog of NCBI NO: 25406046 NR Description: hypothetical protein F20P5.2 [imported] - thaliana >gi|2194115|gb|AAB61090.1| F20P5.2 gene product
  misc_feature (1)..(352): Homolog of NCBI NO: 18405635 NR Description: expressed protein; protein id: At3g28050.1, by cDNA: 6530., supported by cDNA: gi_13937164 [Arabidopsis >gi|13937165|gb|AAK50076.1|AF372936_1 AT3g28050/MMG15_6
  misc_feature (1)..(332): Homolog of NCBI NO: 21594034 NR Description: nodulin MtN21-like protein [Arabidopsis thaliana]
  misc_feature (1)..(340): Homolog of NCBI NO: 10177511 NR Description: nodulin-like protein [Arabidopsis thaliana]
  misc_feature (1)..(251): Homolog of NCBI NO: 15242614 NR Description: putative protein; protein id: At5g40240.1
  misc_feature (256)..(340): Homolog of NCBI NO: 15242614 NR Description: putative protein; protein id: At5g40240.1
  misc_feature (1)..(345): Homolog of NCBI NO: 10177510 NR Description: nodulin-like protein [Arabidopsis thaliana]
  misc_feature (1)..(345): Homolog of NCBI NO: 15242612 NR Description: putative protein; protein id: At5g40230.1

SEQ ID NO: 92387 - protein, 357 aa, Arabidopsis thaliana; identical to SEQ ID NO: 88631
  peptide (1)..(357): Ceres Seq. ID no. 12711208
  misc_feature (3)..(137): Pfam Name: Integral membrane protein DUF6 Pfam Description: Integral membrane protein DUF6
  misc_feature (1)..(247): Homolog of NCBI NO: 15223106 NR Description: hypothetical protein; protein id: At1g70260.1
  misc_feature (1)..(350): Homolog of NCBI NO: 15218979 NR Description: hypothetical protein; protein id: At1g60050.1
  misc_feature (93)..(247): Homolog of NCBI NO: 25406046 NR Description: hypothetical protein F20P5.2 [imported] - thaliana >gi|2194115|gb|AAB61090.1| F20P5.2 gene product
  misc_feature (1)..(349): Homolog of NCBI NO: 18405635 NR Description: expressed protein; protein id: At3g28050.1, by cDNA: 6530., supported by cDNA: gi_13937164 [Arabidopsis >gi|13937165|gb|AAK50076.1|AF372936_1 AT3g28050/MMG15_6
  misc_feature (1)..(329): Homolog of NCBI NO: 21594034 NR Description: nodulin MtN21-like protein [Arabidopsis thaliana]
  misc_feature (1)..(337): Homolog of NCBI NO: 10177511 NR Description: nodulin-like protein [Arabidopsis thaliana]
  misc_feature (1)..(248): Homolog of NCBI NO: 15242614 NR Description: putative protein; protein id: At5g40240.1
  misc_feature (253)..(337): Homolog of NCBI NO: 15242614 NR Description: putative protein; protein id: At5g40240.1
  misc_feature (1)..(342): Homolog of NCBI NO: 10177510 NR Description: nodulin-like protein [Arabidopsis thaliana]
  misc_feature (1)..(342): Homolog of NCBI NO: 15242612 NR Description: putative protein; protein id: At5g40230.1

SEQ ID NO: 92388 - protein, 347 aa, Arabidopsis thaliana; identical to SEQ ID NO: 88632
  peptide (1)..(347): Ceres Seq. ID no. 12711209
  misc_feature (1)..(127): Pfam Name: Integral membrane protein DUF6 Pfam Description: Integral membrane protein DUF6
  misc_feature (1)..(237): Homolog of NCBI NO: 15223106 NR Description: hypothetical protein; protein id: At1g70260.1
  misc_feature (1)..(340): Homolog of NCBI NO: 15218979 NR Description: hypothetical protein; protein id: At1g60050.1
  misc_feature (83)..(237): Homolog of NCBI NO: 25406046 NR Description: hypothetical protein F20P5.2 [imported] - thaliana >gi|2194115|gb|AAB61090.1| F20P5.2 gene product
  misc_feature (1)..(339): Homolog of NCBI NO: 18405635 NR Description: expressed protein; protein id: At3g28050.1, by cDNA: 6530., supported by cDNA: gi_13937164 [Arabidopsis >gi|13937165|gb|AAK50076.1|AF372936_1 AT3g28050/MMG15_6
  misc_feature (1)..(319): Homolog of NCBI NO: 21594034 NR Description: nodulin MtN21-like protein [Arabidopsis thaliana]
  misc_feature (1)..(327): Homolog of NCBI NO: 10177511 NR Description: nodulin-like protein [Arabidopsis thaliana]
  misc_feature (1)..(238): Homolog of NCBI NO: 15242614 NR Description: putative protein; protein id: At5g40240.1
  misc_feature (243)..(327): Homolog of NCBI NO: 15242614 NR Description: putative protein; protein id: At5g40240.1
  misc_feature (1)..(332): Homolog of NCBI NO: 10177510 NR Description: nodulin-like protein [Arabidopsis thaliana]
  misc_feature (1)..(332): Homolog of NCBI NO: 15242612 NR Description: putative protein; protein id: At5g40230.1

SEQ ID NO: 92389 - DNA, 1815 bp, Arabidopsis thaliana; identical to SEQ ID NO: 88633
  misc_feature (1)..(1815): Ceres Seq. ID no. 12711231
  misc_feature: MA Experiment ID: 20000436 Result: Down-regulated in Transcription
  misc_feature: MA Experiment 20000436 PARAMETER Experiment Name: At_Drought_P Parameter: Age (day) Value: 7
  misc_feature: MA Experiment 20000436 PARAMETER Experiment Name: At_Drought_P Parameter: Organism Value: A. thaliana
  misc_feature: MA Experiment 20000436 PARAMETER Experiment Name: At_Drought_P Parameter: Plant Line Value: WS
  misc_feature: MA Experiment 20000436 PARAMETER Experiment Name: At_Drought_P Parameter: Timepoint (hr) Value: 12
  misc_feature: MA Experiment 20000436 PARAMETER Experiment Name: At_Drought_P Parameter: Tissue Value: Whole Plant
  misc_feature: MA Experiment 20000436 PARAMETER Experiment Name: At_Drought_P Parameter: Treatment Value: Drought vs. No Drought
  misc_feature: MA Experiment ID: 20000453 Result: Down-regulated in Transcription
  misc_feature: MA Experiment 20000453 PARAMETER Experiment Name: At_100uM_ABA_P Parameter: Age (day) Value: 15
  misc_feature: MA Experiment 20000453 PARAMETER Experiment Name: At_100uM_ABA_P Parameter: Organism Value: A. thaliana
  misc_feature: MA Experiment 20000453 PARAMETER Experiment Name: At_100uM_ABA_P Parameter: Plant Line Value: WS
  misc_feature: MA Experiment 20000453 PARAMETER Experiment Name: At_100uM_ABA_P Parameter: Timepoint (hr) Value: 24
  misc_feature: MA Experiment 20000453 PARAMETER Experiment Name: At_100uM_ABA_P Parameter: Tissue Value: Aerial
  misc_feature: MA Experiment 20000453 PARAMETER Experiment Name: At_100uM_ABA_P Parameter: Treatment Value: 100uM ABA vs. No Treatment
  misc_feature: MA Experiment ID: 20000794 Result: Up-regulated in Transcription
  misc_feature: MA Experiment 20000794 PARAMETER Experiment Name: At_Petals_P Parameter: Age (day) Value: 23-25 days
  misc_feature: MA Experiment 20000794 PARAMETER Experiment Name: At_Petals_P Parameter: Plant Line Value: WS
  misc_feature: MA Experiment 20000794 PARAMETER Experiment Name: At_Petals_P Parameter: Tissue Value: Petals vs. Whole plant
  misc_feature: MA Experiment ID: 20001451 Result: Down-regulated in Transcription
  misc_feature: MA Experiment 20001451 PARAMETER Experiment Name: At_Far-red-induction_P Parameter: Age (day) Value: 7
  misc_feature: MA Experiment 20001451 PARAMETER Experiment Name: At_Far-red-induction_P Parameter: Light Value: Far-red vs. White
  misc_feature: MA Experiment 20001451 PARAMETER Experiment Name: At_Far-red-induction_P Parameter: Organism Value: A. thaliana
  misc_feature: MA Experiment 20001451 PARAMETER Experiment Name: At_Far-red-induction_P Parameter: Plant Line Value: Columbia
  misc_feature: MA Experiment 20001451 PARAMETER Experiment Name: At_Far-red-induction_P Parameter: Timepoint (hr) Value: 24
  misc_feature: MA Experiment 20001451 PARAMETER Experiment Name: At_Far-red-induction_P Parameter: Tissue Value: Whole Plant

SEQ ID NO: 92390 - protein, 604 aa, Arabidopsis thaliana; identical to SEQ ID NO: 88634
  peptide (1)..(604): Ceres Seq. ID no. 12711232
  misc_feature (16)..(266): Pfam Name: Protein kinase domain Pfam Description: Protein kinase domain
  misc_feature (1)..(604): Homolog of NCBI NO: 15223145 NR Description: Ste-20 related kinase SPAK, putative; protein id:
  misc_feature (1)..(525): Homolog of NCBI NO: 7485682 NR Description: hypothetical protein F17O7.3 - Arabidopsis
  misc_feature (1)..(354): Homolog of NCBI NO: 17529280 NR Description: putative protein kinase [Arabidopsis thaliana]
  misc_feature (500)..(602): Homolog of NCBI NO: 17529280 NR Description: putative protein kinase [Arabidopsis thaliana]
  misc_feature (1)..(354): Homolog of NCBI NO: 30685021 NR Description: protein kinase family [Arabidopsis thaliana]
  misc_feature (500)..(602): Homolog of NCBI NO: 30685021 NR Description: protein kinase family [Arabidopsis thaliana]
  misc_feature (1)..(313): Homolog of NCBI NO: 11358725 NR Description: protein kinase-like protein - Arabidopsis thaliana
  misc_feature (1)..(313): Homolog of NCBI NO: 15220847 NR Description: putative Ser/Thr protein kinase; protein id:
  misc_feature (496)..(535): Homolog of NCBI NO: 15220847 NR Description: putative Ser/Thr protein kinase; protein id:
  misc_feature (494)..(542): Homolog of NCBI NO: 15220847 NR Description: putative Ser/Thr protein kinase; protein id:

SEQ ID NO: 92391 - protein, 539 aa, Arabidopsis thaliana; identical to SEQ ID NO: 88635
  peptide (1)..(539): Ceres Seq. ID no. 12711233
  misc_feature (1)..(201): Pfam Name: Protein kinase domain Pfam Description: Protein kinase domain
  misc_feature (1)..(539): Homolog of NCBI NO: 15223145 NR Description: Ste-20 related kinase SPAK, putative; protein id:
  misc_feature (1)..(460): Homolog of NCBI NO: 7485682 NR Description: hypothetical protein F17O7.3 - Arabidopsis
  misc_feature (1)..(289): Homolog of NCBI NO: 17529280 NR Description: putative protein kinase [Arabidopsis thaliana]
  misc_feature (435)..(537): Homolog of NCBI NO: 17529280 NR Description: putative protein kinase [Arabidopsis thaliana]
  misc_feature (1)..(289): Homolog of NCBI NO: 30685021 NR Description: protein kinase family [Arabidopsis thaliana]
  misc_feature (435)..(537): Homolog of NCBI NO: 30685021 NR Description: protein kinase family [Arabidopsis thaliana]
  misc_feature (1)..(248): Homolog of NCBI NO: 11358725 NR Description: protein kinase-like protein - Arabidopsis thaliana
  misc_feature (1)..(248): Homolog of NCBI NO: 15220847 NR Description: putative Ser/Thr protein kinase; protein id:
  misc_feature (431)..(470): Homolog of NCBI NO: 15220847 NR Description: putative Ser/Thr protein kinase; protein id:
  misc_feature (429)..(477): Homolog of NCBI NO: 15220847 NR Description: putative Ser/Thr protein kinase; protein id:

SEQ ID NO: 92392 - protein, 514 aa, Arabidopsis thaliana; identical to SEQ ID NO: 88636
  peptide (1)..(514): Ceres Seq. ID no. 12711234
  misc_feature (1)..(176): Pfam Name: Protein kinase domain Pfam Description: Protein kinase domain
  misc_feature (1)..(514): Homolog of NCBI NO: 15223145 NR Description: Ste-20 related kinase SPAK, putative; protein id:
  misc_feature (1)..(435): Homolog of NCBI NO: 7485682 NR Description: hypothetical protein F17O7.3 - Arabidopsis
  misc_feature (1)..(264): Homolog of NCBI NO: 17529280 NR Description: putative protein kinase [Arabidopsis thaliana]
  misc_feature (410)..(512): Homolog of NCBI NO: 17529280 NR Description: putative protein kinase [Arabidopsis thaliana]
  misc_feature (1)..(264): Homolog of NCBI NO: 30685021 NR Description: protein kinase family [Arabidopsis thaliana]
  misc_feature (410)..(512): Homolog of NCBI NO: 30685021 NR Description: protein kinase family [Arabidopsis thaliana]
  misc_feature (1)..(223): Homolog of NCBI NO: 11358725 NR Description: protein kinase-like protein - Arabidopsis thaliana
  misc_feature (1)..(223): Homolog of NCBI NO: 15220847 NR Description: putative Ser/Thr protein kinase; protein id:
  misc_feature (406)..(445): Homolog of NCBI NO: 15220847 NR Description: putative Ser/Thr protein kinase; protein id:
  misc_feature (404)..(452): Homolog of NCBI NO: 15220847 NR Description: putative Ser/Thr protein kinase; protein id:

SEQ ID NO: 92393 - DNA, 2931 bp, Arabidopsis thaliana; identical to SEQ ID NO: 88637
  misc_feature (1)..(2931): Ceres Seq. ID no. 12711235
  misc_feature: MA Experiment ID: 20000180 Result: Up-regulated in Transcription
  misc_feature: MA Experiment 20000180 PARAMETER Experiment Name: At_Germinating_Seeds_P Parameter: Age (hr) Value: 24 vs. 0
  misc_feature: MA Experiment 20000180 PARAMETER Experiment Name: At_Germinating_Seeds_P Parameter: Tissue Value: Germinating Seeds
  misc_feature: MA Experiment ID: 20000227 Result: Up-regulated in Transcription
  misc_feature: MA Experiment 20000227 PARAMETER Experiment Name: At_Root-Tips-vs-Tops_P Parameter: Tissue Value: Root Tips vs. Root Tops
  misc_feature: MA Experiment ID: 20000439 Result: Up-regulated in Transcription
  misc_feature: MA Experiment 20000439 PARAMETER Experiment Name: At_Roots__P Parameter: Age (day) Value: 14 vs. 21
  misc_feature: MA Experiment 20000439 PARAMETER Experiment Name: At_Roots__P Parameter: Organism Value: A. thaliana
  misc_feature: MA Experiment 20000439 PARAMETER Experiment Name: At_Roots__P Parameter: Tissue Value: Roots vs. Whole Plant

SEQ ID NO: 92394 - protein, 976 aa, Arabidopsis thaliana; identical to SEQ ID NO: 88638
  peptide (1)..(976): Ceres Seq. ID no. 12711236
  misc_feature (298)..(526): Pfam Name: Formin Homology 2 Domain Pfam Description: Formin Homology 2 Domain
  misc_feature (297)..(793): Homolog of NCBI NO: 15220786 NR Description: Pto kinase interactor, putative; protein id:
  misc_feature (782)..(976): Homolog of NCBI NO: 15220786 NR Description: Pto kinase interactor, putative; protein id:
  misc_feature (297)..(793): Homolog of NCBI NO: 25518375 NR Description: hypothetical protein F5O8.10 - Arabidopsis
  misc_feature (785)..(976): Homolog of NCBI NO: 25518375 NR Description: hypothetical protein F5O8.10 - Arabidopsis
  misc_feature (297)..(724): Homolog of NCBI NO: 8778584 NR Description: F28C11.17 [Arabidopsis thaliana]
  misc_feature (782)..(976): Homolog of NCBI NO: 8778584 NR Description: F28C11.17 [Arabidopsis thaliana]
  misc_feature (291)..(970): Homolog of NCBI NO: 15218591 NR Description: protein kinase, putative; protein id: At1g10620.1
  misc_feature (291)..(970): Homolog of NCBI NO: 25402610 NR Description: protein F20B24.6 [imported] - Arabidopsis >gi|6573752|gb|AAF17672.1|AC009398_21 F20B24.6 [Arabidopsis
  misc_feature (26)..(204): Homolog of NCBI NO: 15220786 NR Description: Pto kinase interactor, putative; protein id:
  misc_feature (297)..(515): Homolog of NCBI NO: 15221470 NR Description: protein kinase, putative; protein id: supported by cDNA: gi_21280864 [Arabidopsis thaliana]

SEQ ID NO: 92395 - protein, 947 aa, Arabidopsis thaliana; identical to SEQ ID NO: 88639
  peptide (1)..(947): Ceres Seq. ID no. 12711237
  misc_feature (269)..(497): Pfam Name: Formin Homology 2 Domain Pfam Description: Formin Homology 2 Domain
  misc_feature (268)..(764): Homolog of NCBI NO: 15220786 NR Description: Pto kinase interactor, putative; protein id:
  misc_feature (753)..(947): Homolog of NCBI NO: 15220786 NR Description: Pto kinase interactor, putative; protein id:
  misc_feature (268)..(764): Homolog of NCBI NO: 25518375 NR Description: hypothetical protein F5O8.10 - Arabidopsis
  misc_feature (756)..(947): Homolog of NCBI NO: 25518375 NR Description: hypothetical protein F5O8.10 - Arabidopsis
  misc_feature (268)..(695): Homolog of NCBI NO: 8778584 NR Description: F28C11.17 [Arabidopsis thaliana]
  misc_feature (753)..(947): Homolog of NCBI NO: 8778584 NR Description: F28C11.17 [Arabidopsis thaliana]
  misc_feature (262)..(941): Homolog of NCBI NO: 15218591 NR Description: protein kinase, putative; protein id: At1g10620.1
  misc_feature (262)..(941): Homolog of NCBI NO: 25402610 NR Description: protein F20B24.6 [imported] - Arabidopsis >gi|6573752|gb|AAF17672.1|AC009398_21 F20B24.6 [Arabidopsis
  misc_feature (1)..(175): Homolog of NCBI NO: 15220786 NR Description: Pto kinase interactor, putative; protein id:
  misc_feature (268)..(486): Homolog of NCBI NO: 15221470 NR Description: protein kinase, putative; protein id: supported by cDNA: gi_21280864 [Arabidopsis thaliana]

SEQ ID NO: 92396 - protein, 751 aa, Arabidopsis thaliana; identical to SEQ ID NO: 88640
  peptide (1)..(751): Ceres Seq. ID no. 12711238
  misc_feature (73)..(301): Pfam Name: Formin Homology 2 Domain Pfam Description: Formin Homology 2 Domain
  misc_feature (72)..(568): Homolog of NCBI NO: 15220786 NR Description: Pto kinase interactor, putative; protein id:
  misc_feature (557)..(751): Homolog of NCBI NO: 15220786 NR Description: Pto kinase interactor, putative; protein id:
  misc_feature (72)..(568): Homolog of NCBI NO: 25518375 NR Description: hypothetical protein F5O8.10 - Arabidopsis
  misc_feature (560)..(751): Homolog of NCBI NO: 25518375 NR Description: hypothetical protein F5O8.10 - Arabidopsis
  misc_feature (72)..(499): Homolog of NCBI NO: 8778584 NR Description: F28C11.17 [Arabidopsis thaliana]
  misc_feature (557)..(751): Homolog of NCBI NO: 8778584 NR Description: F28C11.17 [Arabidopsis thaliana]
  misc_feature (66)..(745): Homolog of NCBI NO: 15218591 NR Description: protein kinase, putative; protein id: At1g10620.1
  misc_feature (66)..(745): Homolog of NCBI NO: 25402610 NR Description: protein F20B24.6 [imported] - Arabidopsis >gi|6573752|gb|AAF17672.1|AC009398_21 F20B24.6 [Arabidopsis
  misc_feature (72)..(290): Homolog of NCBI NO: 15221470 NR Description: protein kinase, putative; protein id: supported by cDNA: gi_21280864 [Arabidopsis thaliana]
  misc_feature (369)..(560): Homolog of NCBI NO: 15221470 NR Description: protein kinase, putative; protein id: supported by cDNA: gi_21280864 [Arabidopsis thaliana]

SEQ ID NO: 92397 - DNA, 2886 bp, Arabidopsis thaliana; identical to SEQ ID NO: 88641
  misc_feature (1)..(2886): Ceres Seq. ID no. 12711239
  misc_feature: MA Experiment ID: 20000180 Result: Up-regulated in Transcription
  misc_feature: MA Experiment 20000180 PARAMETER Experiment Name: At_Germinating_Seeds_P Parameter: Age (hr) Value: 24 vs. 0
  misc_feature: MA Experiment 20000180 PARAMETER Experiment Name: At_Germinating_Seeds_P Parameter: Tissue Value: Germinating Seeds
  misc_feature: MA Experiment ID: 20000227 Result: Up-regulated in Transcription
  misc_feature: MA Experiment 20000227 PARAMETER Experiment Name: At_Root-Tips-vs-Tops_P Parameter: Tissue Value: Root Tips vs. Root Tops
  misc_feature: MA Experiment ID: 20000439 Result: Up-regulated in Transcription
  misc_feature: MA Experiment 20000439 PARAMETER Experiment Name: At_Roots__P Parameter: Age (day) Value: 14 vs. 21
  misc_feature: MA Experiment 20000439 PARAMETER Experiment Name: At_Roots__P Parameter: Organism Value: A. thaliana
  misc_feature: MA Experiment 20000439 PARAMETER Experiment Name: At_Roots__P Parameter: Tissue Value: Roots vs. Whole Plant

SEQ ID NO: 92398 - protein, 961 aa, Arabidopsis thaliana; identical to SEQ ID NO: 88642
  peptide (1)..(961): Ceres Seq. ID no. 12711240
  misc_feature (283)..(511): Pfam Name: Formin Homology 2 Domain Pfam Description: Formin Homology 2 Domain
  misc_feature (282)..(778): Homolog of NCBI NO: 15220786 NR Description: Pto kinase interactor, putative; protein id:
  misc_feature (767)..(961): Homolog of NCBI NO: 15220786 NR Description: Pto kinase interactor, putative; protein id:
  misc_feature (282)..(778): Homolog of NCBI NO: 25518375 NR Description: hypothetical protein F5O8.10 - Arabidopsis
  misc_feature (770)..(961): Homolog of NCBI NO: 25518375 NR Description: hypothetical protein F5O8.10 - Arabidopsis
  misc_feature (282)..(709): Homolog of NCBI NO: 8778584 NR Description: F28C11.17 [Arabidopsis thaliana]
  misc_feature (767)..(961): Homolog of NCBI NO: 8778584 NR Description: F28C11.17 [Arabidopsis thaliana]
  misc_feature (276)..(955): Homolog of NCBI NO: 15218591 NR Description: protein kinase, putative; protein id: At1g10620.1
  misc_feature (276)..(955): Homolog of NCBI NO: 25402610 NR Description: protein F20B24.6 [imported] - Arabidopsis >gi|6573752|gb|AAF17672.1|AC009398_21 F20B24.6 [Arabidopsis
  misc_feature (26)..(189): Homolog of NCBI NO: 15220786 NR Description: Pto kinase interactor, putative; protein id:
  misc_feature (282)..(500): Homolog of NCBI NO: 15221470 NR Description: protein kinase, putative; protein id: supported by cDNA: gi_21280864 [Arabidopsis thaliana]

SEQ ID NO: 92399 - protein, 932 aa, Arabidopsis thaliana; identical to SEQ ID NO: 88643
  peptide (1)..(932): Ceres Seq. ID no. 12711241
  misc_feature (254)..(482): Pfam Name: Formin Homology 2 Domain Pfam Description: Formin Homology 2 Domain
  misc_feature (253)..(749): Homolog of NCBI NO: 15220786 NR Description: Pto kinase interactor, putative; protein id:
  misc_feature (738)..(932): Homolog of NCBI NO: 15220786 NR Description: Pto kinase interactor, putative; protein id:
  misc_feature (253)..(749): Homolog of NCBI NO: 25518375 NR Description: hypothetical protein F5O8.10 - Arabidopsis
  misc_feature (741)..(932): Homolog of NCBI NO: 25518375 NR Description: hypothetical protein F5O8.10 - Arabidopsis
  misc_feature (253)..(680): Homolog of NCBI NO: 8778584 NR Description: F28C11.17 [Arabidopsis thaliana]
  misc_feature (738)..(932): Homolog of NCBI NO: 8778584 NR Description: F28C11.17 [Arabidopsis thaliana]
  misc_feature (247)..(926): Homolog of NCBI NO: 15218591 NR Description: protein kinase, putative; protein id: At1g10620.1
  misc_feature (247)..(926): Homolog of NCBI NO: 25402610 NR Description: protein F20B24.6 [imported] - Arabidopsis >gi|6573752|gb|AAF17672.1|AC009398_21 F20B24.6 [Arabidopsis
  misc_feature (1)..(160): Homolog of NCBI NO: 15220786 NR Description: Pto kinase interactor, putative; protein id:
  misc_feature (253)..(471): Homolog of NCBI NO: 15221470 NR Description: protein kinase, putative; protein id: supported by cDNA: gi_21280864 [Arabidopsis thaliana]

SEQ ID NO: 92400 - protein, 751 aa, Arabidopsis thaliana; identical to SEQ ID NO: 88640
  peptide (1)..(751): Ceres Seq. ID no. 12711242
  misc_feature (73)..(301): Pfam Name: Formin Homology 2 Domain Pfam Description: Formin Homology 2 Domain
  misc_feature (72)..(568): Homolog of NCBI NO: 15220786 NR Description: Pto kinase interactor, putative; protein id:
  misc_feature (557)..(751): Homolog of NCBI NO: 15220786 NR Description: Pto kinase interactor, putative; protein id:
  misc_feature (72)..(568): Homolog of NCBI NO: 25518375 NR Description: hypothetical protein F5O8.10 - Arabidopsis
  misc_feature (560)..(751): Homolog of NCBI NO: 25518375 NR Description: hypothetical protein F5O8.10 - Arabidopsis
  misc_feature (72)..(499): Homolog of NCBI NO: 8778584 NR Description: F28C11.17 [Arabidopsis thaliana]
  misc_feature (557)..(751): Homolog of NCBI NO: 8778584 NR Description: F28C11.17 [Arabidopsis thaliana]
  misc_feature (66)..(745): Homolog of NCBI NO: 15218591 NR Description: protein kinase, putative; protein id: At1g10620.1
  misc_feature (66)..(745): Homolog of NCBI NO: 25402610 NR Description: protein F20B24.6 [imported] - Arabidopsis >gi|6573752|gb|AAF17672.1|AC009398_21 F20B24.6 [Arabidopsis
  misc_feature (72)..(290): Homolog of NCBI NO: 15221470 NR Description: protein kinase, putative; protein id: supported by cDNA: gi_21280864 [Arabidopsis thaliana]
  misc_feature (369)..(560): Homolog of NCBI NO: 15221470 NR Description: protein kinase, putative; protein id: supported by cDNA: gi_21280864 [Arabidopsis thaliana]

SEQ ID NO: 92401 - DNA, 1201 bp, Arabidopsis thaliana; identical to SEQ ID NO: 88645
  misc_feature (1)..(1201): Ceres Seq. ID no. 12711274
  misc_feature: MA Experiment ID: 108434 Result: Down-regulated in Transcription
  misc_feature: MA Experiment 108434 PARAMETER Experiment Name: At_Root_Tips_cDNA_P Parameter: Tissue Value: Root Tips
  misc_feature: MA Experiment ID: 108435 Result: Down-regulated in Transcription
  misc_feature: MA Experiment 108435 PARAMETER Experiment Name: At_stm_Mutants_cDNA_P Parameter: Plant Line Value: wt Landsburg vs stm
  misc_feature: MA Experiment 108435 PARAMETER Experiment Name: At_stm_Mutants_cDNA_P Parameter: Tissue Value: Shoot Apical Meristem Region
  misc_feature: MA Experiment ID: 108462 Result: Up-regulated in Transcription
  misc_feature: MA Experiment 108462 PARAMETER Experiment Name: At_Germinating_Seeds_cDNA_P Parameter: Age (day) Value: 2 vs. 0
  misc_feature: MA Experiment 108462 PARAMETER Experiment Name: At_Germinating_Seeds_cDNA_P Parameter: Tissue Value: Germinating Seeds
  misc_feature: MA Experiment ID: 108463 Result: Up-regulated in Transcription
  misc_feature: MA Experiment 108463 PARAMETER Experiment Name: At_Germinating_Seeds_cDNA_P Parameter: Age (day) Value: 3 vs. 0
  misc_feature: MA Experiment 108463 PARAMETER Experiment Name: At_Germinating_Seeds_cDNA_P Parameter: Tissue Value: Germinating Seeds
  misc_feature: MA Experiment ID: 108464 Result: Up-regulated in Transcription
  misc_feature: MA Experiment 108464 PARAMETER Experiment Name: At_Germinating_Seeds_cDNA_P Parameter: Age (day) Value: 4 vs. 0
  misc_feature: MA Experiment 108464 PARAMETER Experiment Name: At_Germinating_Seeds_cDNA_P Parameter: Tissue Value: Germinating Seeds
  misc_feature: MA Experiment ID: 108489 Result: Down-regulated in Transcription
  misc_feature: MA Experiment ID: 108573 Result: Up-regulated in Transcription
  misc_feature: MA Experiment 108573 PARAMETER Experiment Name: At_Drought_cDNA_P Parameter: Timepoint (hr) Value: 6
  misc_feature: MA Experiment 108573 PARAMETER Experiment Name: At_Drought_cDNA_P Parameter: Tissue Value: Aerial
  misc_feature: MA Experiment 108573 PARAMETER Experiment Name: At_Drought_cDNA_P Parameter: Treatment Value: Drought vs. No Drought
  misc_feature: MA Experiment ID: 108595 Result: Down-regulated in Transcription
  misc_feature: MA Experiment 108595 PARAMETER Experiment Name: At_Ler-pi_Ovule_cDNA_P Parameter: Plant Line Value: null
  misc_feature: MA Experiment ID: 20000087 Result: Down-regulated in Transcription
  misc_feature: MA Experiment 20000087 PARAMETER Experiment Name: At_100uM_ABA_Mutants_cDNA_P Parameter: Plant Line Value: WS
  misc_feature: MA Experiment 20000087 PARAMETER Experiment Name: At_100uM_ABA_Mutants_cDNA_P Parameter: Timepoint (hr) Value: 6
  misc_feature: MA Experiment 20000087 PARAMETER Experiment Name: At_100uM_ABA_Mutants_cDNA_P Parameter: Tissue Value: Aerial
  misc_feature: MA Experiment 20000087 PARAMETER Experiment Name: At_100uM_ABA_Mutants_cDNA_P Parameter: Treatment Value: 100uM ABA vs. No Treatment
  misc_feature: MA Experiment ID: 20000185 Result: Down-regulated in Transcription
  misc_feature: MA Experiment 20000185 PARAMETER Experiment Name: At_Roots__P Parameter: Age (day) Value: 7 vs. 21
  misc_feature: MA Experiment 20000185 PARAMETER Experiment Name: At_Roots__P Parameter: Organism Value: A. thaliana
  misc_feature: MA Experiment 20000185 PARAMETER Experiment Name: At_Roots__P Parameter: Tissue Value: Roots vs. Whole Plant
  misc_feature: MA Experiment ID: 20000227 Result: Down-regulated in Transcription
  misc_feature: MA Experiment 20000227 PARAMETER Experiment Name: At_Root-Tips-vs-Tops_P Parameter: Tissue Value: Root Tips vs. Root Tops
  misc_feature: MA Experiment ID: 20000439 Result: Down-regulated in Transcription
  misc_feature: MA Experiment 20000439 PARAMETER Experiment Name: At_Roots__P Parameter: Age (day) Value: 14 vs. 21
  misc_feature: MA Experiment 20000439 PARAMETER Experiment Name: At_Roots__P Parameter: Organism Value: A. thaliana
  misc_feature: MA Experiment 20000439 PARAMETER Experiment Name: At_Roots__P Parameter: Tissue Value: Roots vs. Whole Plant
  misc_feature: MA Experiment ID: 20001451 Result: Down-regulated in Transcription
  misc_feature: MA Experiment 20001451 PARAMETER Experiment Name: At_Far-red-induction_P Parameter: Age (day) Value: 7
  misc_feature: MA Experiment 20001451 PARAMETER Experiment Name: At_Far-red-induction_P Parameter: Light Value: Far-red vs. White
  misc_feature: MA Experiment 20001451 PARAMETER Experiment Name: At_Far-red-induction_P Parameter: Organism Value: A. thaliana
  misc_feature: MA Experiment 20001451 PARAMETER Experiment Name: At_Far-red-induction_P Parameter: Plant Line Value: Columbia
  misc_feature: MA Experiment 20001451 PARAMETER Experiment Name: At_Far-red-induction_P Parameter: Timepoint (hr) Value: 24
  misc_feature: MA Experiment 20001451 PARAMETER Experiment Name: At_Far-red-induction_P Parameter: Tissue Value: Whole Plant
  misc_feature: MA Experiment ID: 20001557 Result: Down-regulated in Transcription
  misc_feature: MA Experiment 20001557 PARAMETER Experiment Name: At_Drought_Soil_Dry_P Parameter: Age (day) Value: 27
  misc_feature: MA Experiment 20001557 PARAMETER Experiment Name: At_Drought_Soil_Dry_P Parameter: Organism Value: A. thaliana
  misc_feature: MA Experiment 20001557 PARAMETER Experiment Name: At_Drought_Soil_Dry_P Parameter: Plant Line Value: WS
  misc_feature: MA Experiment 20001557 PARAMETER Experiment Name: At_Drought_Soil_Dry_P Parameter: Post Timepoint (hr) Value: 3
  misc_feature: MA Experiment 20001557 PARAMETER Experiment Name: At_Drought_Soil_Dry_P Parameter: Post-Treatment Value: Re-Water vs. No Drought
  misc_feature: MA Experiment 20001557 PARAMETER Experiment Name: At_Drought_Soil_Dry_P Parameter: Timepoint (day) Value: 13
  misc_feature: MA Experiment 20001557 PARAMETER Experiment Name: At_Drought_Soil_Dry_P Parameter: Treatment Value: Drought vs. No Drought
  misc_feature: MA Experiment ID: 20001558 Result: Down-regulated in Transcription
  misc_feature: MA Experiment 20001558 PARAMETER Experiment Name: At_Drought_Soil_Dry_P Parameter: Age (day) Value: 27
  misc_feature: MA Experiment 20001558 PARAMETER Experiment Name: At_Drought_Soil_Dry_P Parameter: Organism Value: A. thaliana
  misc_feature: MA Experiment 20001558 PARAMETER Experiment Name: At_Drought_Soil_Dry_P Parameter: Plant Line Value: WS
  misc_feature: MA Experiment 20001558 PARAMETER Experiment Name: At_Drought_Soil_Dry_P Parameter: Post Timepoint (hr) Value: 6
  misc_feature: MA Experiment 20001558 PARAMETER Experiment Name: At_Drought_Soil_Dry_P Parameter: Post-Treatment Value: Re-Water vs. No Drought
  misc_feature: MA Experiment 20001558 PARAMETER Experiment Name: At_Drought_Soil_Dry_P Parameter: Timepoint (day) Value: 13
  misc_feature: MA Experiment 20001558 PARAMETER Experiment Name: At_Drought_Soil_Dry_P Parameter: Treatment Value: Drought vs. No Drought
  misc_feature: MA Experiment ID: 20001560 Result: Down-regulated in Transcription
  misc_feature: MA Experiment 20001560 PARAMETER Experiment Name: At_Drought_Soil_Dry_P Parameter: Age (day) Value: 28
  misc_feature: MA Experiment 20001560 PARAMETER Experiment Name: At_Drought_Soil_Dry_P Parameter: Organism Value: A. thaliana
  misc_feature: MA Experiment 20001560 PARAMETER Experiment Name: At_Drought_Soil_Dry_P Parameter: Plant Line Value: WS
  misc_feature: MA Experiment 20001560 PARAMETER Experiment Name: At_Drought_Soil_Dry_P Parameter: Post Timepoint (hr) Value: None
  misc_feature: MA Experiment 20001560 PARAMETER Experiment Name: At_Drought_Soil_Dry_P Parameter: Post-Treatment Value: None
  misc_feature: MA Experiment 20001560 PARAMETER Experiment Name: At_Drought_Soil_Dry_P Parameter: Timepoint (day) Value: 14
  misc_feature: MA Experiment 20001560 PARAMETER Experiment Name: At_Drought_Soil_Dry_P Parameter: Treatment Value: Drought vs. No Drought
  misc_feature: MA Experiment ID: 20001905 Result: Down-regulated in Transcription
  misc_feature: MA Experiment 20001905 PARAMETER Experiment Name: At_Drought_Reproduction_P Parameter: Age (day) Value: 40
  misc_feature: MA Experiment 20001905 PARAMETER Experiment Name: At_Drought_Reproduction_P Parameter: Organism Value: A. thaliana
  misc_feature: MA Experiment 20001905 PARAMETER Experiment Name: At_Drought_Reproduction_P Parameter: Plant Line Value: WS
  misc_feature: MA Experiment 20001905 PARAMETER Experiment Name: At_Drought_Reproduction_P Parameter: Timepoint (day) Value: 10
  misc_feature: MA Experiment 20001905 PARAMETER Experiment Name: At_Drought_Reproduction_P Parameter: Tissue Value: Rosettes
  misc_feature: MA Experiment 20001905 PARAMETER Experiment Name: At_Drought_Reproduction_P Parameter: Treatment Value: Drought vs. No Drought

SEQ ID NO: 92402 - protein, 348 aa, Arabidopsis thaliana; identical to SEQ ID NO: 24112
  peptide (1)..(348): Ceres Seq. ID no. 12711275
  misc_feature (10)..(348): Homolog of NCBI NO: 18414386 NR Description: auxin-regulated protein; protein id: At5g03880.1, by cDNA: 37668., supported by cDNA: gi_15451053, supported by gi_20148314 [Arabidopsis thaliana] >gi|15451054|gb|AAK96798.1|
  misc_feature (10)..(348): Homolog of NCBI NO: 21593275 NR Description: unknown [Arabidopsis thaliana]
  misc_feature (10)..(348): Homolog of NCBI NO: 11282317 NR Description: hypothetical protein F8F6.90 - Arabidopsis >gi|7406398|emb|CAB85508.1| putative protein [Arabidopsis >gi|9758017|dbj|BAB08614.1|
  misc_feature (144)..(348): Homolog of NCBI NO: 18413285 NR Description: putative protein; protein id: At4g10000.1,
  misc_feature (144)..(348): Homolog of NCBI NO: 21593568 NR Description: unknown [Arabidopsis thaliana]
  misc_feature (144)..(348): Homolog of NCBI NO: 7487730 NR Description: hypothetical protein T5L19.130 - Arabidopsis >gi|4539003|emb|CAB39624.1| putative protein [Arabidopsis >gi|7267696|emb|CAB78123.1| putative protein [Arabidopsis
  misc_feature (142)..(258): Homolog of NCBI NO: 15488040 NR Description: unknown [Photobacterium profundum]

SEQ ID NO: 92403 - protein, 339 aa, Arabidopsis thaliana; identical to SEQ ID NO: 24113
  peptide (1)..(339): Ceres Seq. ID no. 12711276
  misc_feature (1)..(339): Homolog of NCBI NO: 18414386 NR Description: auxin-regulated protein; protein id: At5g03880.1, by cDNA: 37668., supported by cDNA: gi_15451053, supported by gi_20148314 [Arabidopsis thaliana] >gi|15451054|gb|AAK96798.1|
  misc_feature (1)..(339): Homolog of NCBI NO: 21593275 NR Description: unknown [Arabidopsis thaliana]
  misc_feature (1)..(339): Homolog of NCBI NO: 11282317 NR Description: hypothetical protein F8F6.90 - Arabidopsis >gi|7406398|emb|CAB85508.1| putative protein [Arabidopsis >gi|9758017|dbj|BAB08614.1|
  misc_feature (135)..(339): Homolog of NCBI NO: 18413285 NR Description: putative protein; protein id: At4g10000.1,
  misc_feature (135)..(339): Homolog of NCBI NO: 21593568 NR Description: unknown [Arabidopsis thaliana]
  misc_feature (135)..(339): Homolog of NCBI NO: 7487730 NR Description: hypothetical protein T5L19.130 - Arabidopsis >gi|4539003|emb|CAB39624.1| putative protein [Arabidopsis >gi|7267696|emb|CAB78123.1| putative protein [Arabidopsis
  misc_feature (133)..(249): Homolog of NCBI NO: 15488040 NR Description: unknown [Photobacterium profundum]

SEQ ID NO: 92404 - protein, 307 aa, Arabidopsis thaliana; identical to SEQ ID NO: 24114
  peptide (1)..(307): Ceres Seq. ID no. 12711277
  misc_feature (1)..(307): Homolog of NCBI NO: 18414386 NR Description: auxin-regulated protein; protein id: At5g03880.1, by cDNA: 37668., supported by cDNA: gi_15451053, supported by gi_20148314 [Arabidopsis thaliana] >gi|15451054|gb|AAK96798.1|
  misc_feature (1)..(307): Homolog of NCBI NO: 21593275 NR Description: unknown [Arabidopsis thaliana]
  misc_feature (1)..(307): Homolog of NCBI NO: 11282317 NR Description: hypothetical protein F8F6.90 - Arabidopsis >gi|7406398|emb|CAB85508.1| putative protein [Arabidopsis >gi|9758017|dbj|BAB08614.1|
  misc_feature (103)..(307): Homolog of NCBI NO: 18413285 NR Description: putative protein; protein id: At4g10000.1,
  misc_feature (103)..(307): Homolog of NCBI NO: 21593568 NR Description: unknown [Arabidopsis thaliana]
  misc_feature (103)..(307): Homolog of NCBI NO: 7487730 NR Description: hypothetical protein T5L19.130 - Arabidopsis >gi|4539003|emb|CAB39624.1| putative protein [Arabidopsis >gi|7267696|emb|CAB78123.1| putative protein [Arabidopsis
  misc_feature (101)..(217): Homolog of NCBI NO: 15488040 NR Description: unknown [Photobacterium profundum]

SEQ ID NO: 92405 - DNA, 4056 bp, Arabidopsis thaliana; identical to SEQ ID NO: 88649
  misc_feature (1)..(4056): Ceres Seq. ID no. 12711320
  misc_feature: MA Experiment ID: 20001905 Result: Up-regulated in Transcription
  misc_feature: MA Experiment 20001905 PARAMETER Experiment Name: At_Drought_Reproduction_P Parameter: Age (day) Value: 40
  misc_feature: MA Experiment 20001905 PARAMETER Experiment Name: At_Drought_Reproduction_P Parameter: Organism Value: A. thaliana
  misc_feature: MA Experiment 20001905 PARAMETER Experiment Name: At_Drought_Reproduction_P Parameter: Plant Line Value: WS
  misc_feature: MA Experiment 20001905 PARAMETER Experiment Name: At_Drought_Reproduction_P Parameter: Timepoint (day) Value: 10
  misc_feature: MA Experiment 20001905 PARAMETER Experiment Name: At_Drought_Reproduction_P Parameter: Tissue Value: Rosettes
  misc_feature: MA Experiment 20001905 PARAMETER Experiment Name: At_Drought_Reproduction_P Parameter: Treatment Value: Drought vs. No Drought

SEQ ID NO: 92406 - protein, 1351 aa, Arabidopsis thaliana; identical to SEQ ID NO: 88650
  peptide (1)..(1351): Ceres Seq. ID no. 12711321
  misc_feature (292)..(401): Pfam Name: jmjC domain Pfam Description: jmjC domain
  misc_feature (254)..(626): Homolog of NCBI NO: 22331694 NR Description: similar to zinc finger protein - like; protein
  misc_feature (9)..(183): Homolog of NCBI NO: 22331694 NR Description: similar to zinc finger protein - like; protein
  misc_feature (1240)..(1350): Homolog of NCBI NO: 22331694 NR Description: similar to zinc finger protein - like; protein
  misc_feature (658)..(761): Homolog of NCBI NO: 22331694 NR Description: similar to zinc finger protein - like; protein
  misc_feature (254)..(626): Homolog of NCBI NO: 7488434 NR Description: zinc finger protein T29H11.50 - Arabidopsis >gi|4678345|emb|CAB41155.1| putative zinc finger protein
  misc_feature (9)..(183): Homolog of NCBI NO: 7488434 NR Description: zinc finger protein T29H11.50 - Arabidopsis >gi|4678345|emb|CAB41155.1| putative zinc finger protein
  misc_feature (1240)..(1350): Homolog of NCBI NO: 7488434 NR Description: zinc finger protein T29H11.50 - Arabidopsis >gi|4678345|emb|CAB41155.1| putative zinc finger protein
  misc_feature (658)..(761): Homolog of NCBI NO: 7488434 NR Description: zinc finger protein T29H11.50 - Arabidopsis >gi|4678345|emb|CAB41155.1| putative zinc finger protein
  misc_feature (1053)..(1350): Homolog of NCBI NO: 20804883 NR Description: putative zinc finger protein [Oryza sativa
  misc_feature (260)..(517): Homolog of NCBI NO: 20804883 NR Description: putative zinc finger protein [Oryza sativa

SEQ ID NO: 92407 - protein, 1106 aa, Arabidopsis thaliana; identical to SEQ ID NO: 88651
  peptide (1)..(1106): Ceres Seq. ID no. 12711322
  misc_feature (47)..(156): Pfam Name: jmjC domain Pfam Description: jmjC domain
  misc_feature (9)..(381): Homolog of NCBI NO: 22331694 NR Description: similar to zinc finger protein - like; protein
  misc_feature (995)..(1105): Homolog of NCBI NO: 22331694 NR Description: similar to zinc finger protein - like; protein
  misc_feature (413)..(516): Homolog of NCBI NO: 22331694 NR Description: similar to zinc finger protein - like; protein
  misc_feature (9)..(381): Homolog of NCBI NO: 7488434 NR Description: zinc finger protein T29H11.50 - Arabidopsis >gi|4678345|emb|CAB41155.1| putative zinc finger protein
  misc_feature (995)..(1105): Homolog of NCBI NO: 7488434 NR Description: zinc finger protein T29H11.50 - Arabidopsis >gi|4678345|emb|CAB41155.1| putative zinc finger protein
  misc_feature (413)..(516): Homolog of NCBI NO: 7488434 NR Description: zinc finger protein T29H11.50 - Arabidopsis >gi|4678345|emb|CAB41155.1| putative zinc finger protein
  misc_feature (808)..(1105): Homolog of NCBI NO: 20804883 NR Description: putative zinc finger protein [Oryza sativa
  misc_feature (15)..(272): Homolog of NCBI NO: 20804883 NR Description: putative zinc finger protein [Oryza sativa
  misc_feature (381)..(633): Homolog of NCBI NO: 20804883 NR Description: putative zinc finger protein [Oryza sativa
  misc_feature (1)..(229): Homolog of NCBI NO: 15237976 NR Description: putative protein; protein id: At5g46910.1 thaliana] >gi|9759433|dbj|BAB10230.1|

SEQ ID NO: 92408 - protein, 1100 aa, Arabidopsis thaliana; identical to SEQ ID NO: 88652
  peptide (1)..(1100): Ceres Seq. ID no. 12711323
  misc_feature (41)..(150): Pfam Name: jmjC domain Pfam Description: jmjC domain
  misc_feature (3)..(375): Homolog of NCBI NO: 22331694 NR Description: similar to zinc finger protein - like; protein
  misc_feature (989)..(1099): Homolog of NCBI NO: 22331694 NR Description: similar to zinc finger protein - like; protein
  misc_feature (407)..(510): Homolog of NCBI NO: 22331694 NR Description: similar to zinc finger protein - like; protein
  misc_feature (3)..(375): Homolog of NCBI NO: 7488434 NR Description: zinc finger protein T29H11.50 - Arabidopsis >gi|4678345|emb|CAB41155.1| putative zinc finger protein
  misc_feature (989)..(1099): Homolog of NCBI NO: 7488434 NR Description: zinc finger protein T29H11.50 - Arabidopsis >gi|4678345|emb|CAB41155.1| putative zinc finger protein
  misc_feature (407)..(510): Homolog of NCBI NO: 7488434 NR Description: zinc finger protein T29H11.50 - Arabidopsis >gi|4678345|emb|CAB41155.1| putative zinc finger protein
  misc_feature (802)..(1099): Homolog of NCBI NO: 20804883 NR Description: putative zinc finger protein [Oryza sativa
  misc_feature (9)..(266): Homolog of NCBI NO: 20804883 NR Description: putative zinc finger protein [Oryza sativa
  misc_feature (375)..(627): Homolog of NCBI NO: 20804883 NR Description: putative zinc finger protein [Oryza sativa
  misc_feature (1)..(223): Homolog of NCBI NO: 15237976 NR Description: putative protein; protein id: At5g46910.1 thaliana] >gi|9759433|dbj|BAB10230.1|

SEQ ID NO: 92409 - DNA, 1257 bp, Arabidopsis thaliana; identical to SEQ ID NO: 88653
  misc_feature (1)..(1257): Ceres Seq. ID no. 12711324
  misc_feature: MA Experiment ID: 108462 Result: Down-regulated in Transcription
  misc_feature: MA Experiment 108462 PARAMETER Experiment Name: At_Germinating_Seeds_cDNA_P Parameter: Age (day) Value: 2 vs. 0
  misc_feature: MA Experiment 108462 PARAMETER Experiment Name: At_Germinating_Seeds_cDNA_P Parameter: Tissue Value: Germinating Seeds
  misc_feature: MA Experiment ID: 108464 Result: Down-regulated in Transcription
  misc_feature: MA Experiment 108464 PARAMETER Experiment Name: At_Germinating_Seeds_cDNA_P Parameter: Age (day) Value: 4 vs. 0
  misc_feature: MA Experiment 108464 PARAMETER Experiment Name: At_Germinating_Seeds_cDNA_P Parameter: Tissue Value: Germinating Seeds
  misc_feature: MA Experiment ID: 20000224 Result: Down-regulated in Transcription
  misc_feature: MA Experiment ID: 20001911 Result: Up-regulated in Transcription
  misc_feature: MA Experiment 20001911 PARAMETER Experiment Name: At_Drought_Reproduction_P Parameter: Age (day) Value: 40
  misc_feature: MA Experiment 20001911 PARAMETER Experiment Name: At_Drought_Reproduction_P Parameter: Organism Value: A. thaliana
  misc_feature: MA Experiment 20001911 PARAMETER Experiment Name: At_Drought_Reproduction_P Parameter: Plant Line Value: WS
  misc_feature: MA Experiment 20001911 PARAMETER Experiment Name: At_Drought_Reproduction_P Parameter: Timepoint (day) Value: 10
  misc_feature: MA Experiment 20001911 PARAMETER Experiment Name: At_Drought_Reproduction_P Parameter: Tissue Value: Flowers
  misc_feature: MA Experiment 20001911 PARAMETER Experiment Name: At_Drought_Reproduction_P Parameter: Treatment Value: Drought vs. No Drought

SEQ ID NO: 92410 - protein, 310 aa, Arabidopsis thaliana; identical to SEQ ID NO: 22430
  peptide (1)..(310): Ceres Seq. ID no. 12711325
  misc_feature (9)..(80): Pfam Name: RNA recognition motif. (a.k.a. RRM, RBD, or RNP domain) Pfam Description: RNA recognition motif. (a.k.a. RRM, RBD, or RNP
  misc_feature (1)..(310): Homolog of NCBI NO: 15237666 NR Description: glycine-rich RNA-binding protein; protein id:
  misc_feature (1)..(295): Homolog of NCBI NO: 33146923 NR Description: glycine-rich RNA-binding protein-like [Oryza
  misc_feature (7)..(293): Homolog of NCBI NO: 18406831 NR Description: glycine-rich RNA-binding protein; protein id: supported by cDNA: 42847. [Arabidopsis thaliana]
  misc_feature (8)..(248): Homolog of NCBI NO: 15231557 NR Description: glycine-rich RNA-binding protein; protein id: supported by cDNA: gi_15451065, supported by cDNA: gi_15982738, by cDNA: gi_15983476, supported by cDNA: gi_18377411 [Arabidopsis
  misc_feature (1)..(200): Homolog of NCBI NO: 40714682 NR Description: putative RNA binding protein [Oryza sativa
  misc_feature (1)..(189): Homolog of NCBI NO: 12659074 NR Description: RNA-binding protein [Triticum aestivum]
  misc_feature (125)..(310): Homolog of NCBI NO: 21954079 NR Description: putative RNA binding protein [Arabidopsis
  misc_feature (3)..(215): Homolog of NCBI NO: 2129944 NR Description: RNA-binding protein RZ-1 - wood tobacco
  misc_feature (8)..(167): Homolog of NCBI NO: 15235002 NR Description: glycine-rich RNA-binding protein 8 (GRP8); id: At4g39260.1, supported by cDNA: gi_166838 [Arabidopsis
  misc_feature (8)..(167): Homolog of NCBI NO: 1346180 NR Description: Glycine-rich RNA-binding protein GRP1A

SEQ ID NO: 92411 - protein, 272 aa, Arabidopsis thaliana; identical to SEQ ID NO: 22431
  peptide (1)..(272): Ceres Seq. ID no. 12711326
  misc_feature (1)..(272): Homolog of NCBI NO: 15237666 NR Description: glycine-rich RNA-binding protein; protein id:
  misc_feature (1)..(257): Homolog of NCBI NO: 33146923 NR Description: glycine-rich RNA-binding protein-like [Oryza
  misc_feature (1)..(255): Homolog of NCBI NO: 18406831 NR Description: glycine-rich RNA-binding protein; protein id: supported by cDNA: 42847. [Arabidopsis thaliana]
  misc_feature (1)..(210): Homolog of NCBI NO: 15231557 NR Description: glycine-rich RNA-binding protein; protein id: supported by cDNA: gi_15451065, supported by cDNA: gi_15982738, by cDNA: gi_15983476, supported by cDNA: gi_18377411 [Arabidopsis
  misc_feature (1)..(162): Homolog of NCBI NO: 40714682 NR Description: putative RNA binding protein [Oryza sativa
  misc_feature (1)..(151): Homolog of NCBI NO: 12659074 NR Description: RNA-binding protein [Triticum aestivum]
  misc_feature (87)..(272): Homolog of NCBI NO: 21954079 NR Description: putative RNA binding protein [Arabidopsis
  misc_feature (1)..(177): Homolog of NCBI NO: 2129944 NR Description: RNA-binding protein RZ-1 - wood tobacco
  misc_feature (1)..(129): Homolog of NCBI NO: 15235002 NR Description: glycine-rich RNA-binding protein 8 (GRP8); id: At4g39260.1, supported by cDNA: gi_166838 [Arabidopsis
  misc_feature (1)..(129): Homolog of NCBI NO: 1346180 NR Description: Glycine-rich RNA-binding protein GRP1A

SEQ ID NO: 92412 - protein, 250 aa, Arabidopsis thaliana; identical to SEQ ID NO: 22432
  peptide (1)..(250): Ceres Seq. ID no. 12711327
  misc_feature (1)..(250): Homolog of NCBI NO: 15237666 NR Description: glycine-rich RNA-binding protein; protein id:
  misc_feature (1)..(235): Homolog of NCBI NO: 33146923 NR Description: glycine-rich RNA-binding protein-like [Oryza
  misc_feature (1)..(233): Homolog of NCBI NO: 18406831 NR Description: glycine-rich RNA-binding protein; protein id: supported by cDNA: 42847. [Arabidopsis thaliana]
  misc_feature (1)..(188): Homolog of NCBI NO: 15231557 NR Description: glycine-rich RNA-binding protein; protein id: supported by cDNA: gi_15451065, supported by cDNA: gi_15982738, by cDNA: gi_15983476, supported by cDNA: gi_18377411 [Arabidopsis
  misc_feature (1)..(140): Homolog of NCBI NO: 40714682 NR Description: putative RNA binding protein [Oryza sativa
  misc_feature (1)..(129): Homolog of NCBI NO: 12659074 NR Description: RNA-binding protein [Triticum aestivum]
  misc_feature (65)..(250): Homolog of NCBI NO: 21954079 NR Description: putative RNA binding protein [Arabidopsis
  misc_feature (1)..(155): Homolog of NCBI NO: 2129944 NR Description: RNA-binding protein RZ-1 - wood tobacco
  misc_feature (1)..(107): Homolog of NCBI NO: 15235002 NR Description: glycine-rich RNA-binding protein 8 (GRP8); id: At4g39260.1, supported by cDNA: gi_166838 [Arabidopsis
  misc_feature (1)..(107): Homolog of NCBI NO: 1346180 NR Description: Glycine-rich RNA-binding protein GRP1A

SEQ ID NO: 92413 - DNA, 2793 bp, Arabidopsis thaliana; identical to SEQ ID NO: 88657
  misc_feature (1)..(2793): Ceres Seq. ID no. 12711399
  misc_feature: MA Experiment ID: 20000184 Result: Down-regulated in Transcription
  misc_feature: MA Experiment 20000184 PARAMETER Experiment Name: At_Shoots__P Parameter: Age (day) Value: 7
  misc_feature: MA Experiment 20000184 PARAMETER Experiment Name: At_Shoots__P Parameter: Tissue Value: Shoots vs. Whole Plant
  misc_feature: MA Experiment ID: 20001451 Result: Up-regulated in Transcription
  misc_feature: MA Experiment 20001451 PARAMETER Experiment Name: At_Far-red-induction_P Parameter: Age (day) Value: 7
  misc_feature: MA Experiment 20001451 PARAMETER Experiment Name: At_Far-red-induction_P Parameter: Light Value: Far-red vs. White
  misc_feature: MA Experiment 20001451 PARAMETER Experiment Name: At_Far-red-induction_P Parameter: Organism Value: A. thaliana
  misc_feature: MA Experiment 20001451 PARAMETER Experiment Name: At_Far-red-induction_P Parameter: Plant Line Value: Columbia
  misc_feature: MA Experiment 20001451 PARAMETER Experiment Name: At_Far-red-induction_P Parameter: Timepoint (hr) Value: 24
  misc_feature: MA Experiment 20001451 PARAMETER Experiment Name: At_Far-red-induction_P Parameter: Tissue Value: Whole Plant

SEQ ID NO: 92414 - protein, 930 aa, Arabidopsis thaliana; identical to SEQ ID NO: 88658
  peptide (1)..(930): Ceres Seq. ID no. 12711400
  misc_feature (145)..(216): Pfam Name: RNA recognition motif. (a.k.a. RRM, RBD, or RNP domain) Pfam Description: RNA recognition motif. (a.k.a. RRM, RBD, or RNP
  misc_feature (376)..(930): Homolog of NCBI NO: 18414702 NR Description: putative protein; protein id: At5g04810.1
  misc_feature (502)..(890): Homolog of NCBI NO: 7489198 NR Description: salt-inducible protein, membrane-associated -
  misc_feature (292)..(846): Homolog of NCBI NO: 34902570 NR Description: Putative indole-3-acetate
  misc_feature (325)..(824): Homolog of NCBI NO: 34906814 NR Description: similar to membrane-associated salt-inducible
  misc_feature (281)..(811): Homolog of NCBI NO: 34902570 NR Description: Putative indole-3-acetate
  misc_feature (310)..(852): Homolog of NCBI NO: 30840221 NR Description: fertility restorer [Raphanus sativus]
  misc_feature (310)..(852): Homolog of NCBI NO: 30840327 NR Description: fertility restorer homologue [Raphanus sativus]
  misc_feature (311)..(838): Homolog of NCBI NO: 34394343 NR Description: putative fertility restorer homologue [Oryza
  misc_feature (325)..(828): Homolog of NCBI NO: 15221610 NR Description: hypothetical protein; protein id: At1g62860.1
  misc_feature (320)..(855): Homolog of NCBI NO: 15221282 NR Description: hypothetical protein; protein id: At1g12300.1

SEQ ID NO: 92415 - protein, 732 aa, Arabidopsis thaliana; identical to SEQ ID NO: 85077
  peptide (1)..(732): Ceres Seq. ID no. 12711401
  misc_feature (370)..(404): Pfam Name: PPR repeat Pfam Description: PPR repeat
  misc_feature (178)..(732): Homolog of NCBI NO: 18414702 NR Description: putative protein; protein id: At5g04810.1
  misc_feature (304)..(692): Homolog of NCBI NO: 7489198 NR Description: salt-inducible protein, membrane-associated -
  misc_feature (94)..(648): Homolog of NCBI NO: 34902570 NR Description: Putative indole-3-acetate
  misc_feature (127)..(626): Homolog of NCBI NO: 34906814 NR Description: similar to membrane-associated salt-inducible
  misc_feature (83)..(613): Homolog of NCBI NO: 34902570 NR Description: Putative indole-3-acetate
  misc_feature (112)..(654): Homolog of NCBI NO: 30840221 NR Description: fertility restorer [Raphanus sativus]
  misc_feature (112)..(654): Homolog of NCBI NO: 30840327 NR Description: fertility restorer homologue [Raphanus sativus]
  misc_feature (113)..(640): Homolog of NCBI NO: 34394343 NR Description: putative fertility restorer homologue [Oryza
  misc_feature (127)..(630): Homolog of NCBI NO: 15221610 NR Description: hypothetical protein; protein id: At1g62860.1
  misc_feature (122)..(657): Homolog of NCBI NO: 15221282 NR Description: hypothetical protein; protein id: At1g12300.1

SEQ ID NO: 92416 - protein, 687 aa, Arabidopsis thaliana; identical to SEQ ID NO: 85078
  peptide (1)..(687): Ceres Seq. ID no. 12711402
  misc_feature (325)..(359): Pfam Name: PPR repeat Pfam Description: PPR repeat
  misc_feature (133)..(687): Homolog of NCBI NO: 18414702 NR Description: putative protein; protein id: At5g04810.1
  misc_feature (259)..(647): Homolog of NCBI NO: 7489198 NR Description: salt-inducible protein, membrane-associated -
  misc_feature (49)..(603): Homolog of NCBI NO: 34902570 NR Description: Putative indole-3-acetate
  misc_feature (82)..(581): Homolog of NCBI NO: 34906814 NR Description: similar to membrane-associated salt-inducible
  misc_feature (38)..(568): Homolog of NCBI NO: 34902570 NR Description: Putative indole-3-acetate
  misc_feature (67)..(609): Homolog of NCBI NO: 30840221 NR Description: fertility restorer [Raphanus sativus]
  misc_feature (67)..(609): Homolog of NCBI NO: 30840327 NR Description: fertility restorer homologue [Raphanus sativus]
  misc_feature (68)..(595): Homolog of NCBI NO: 34394343 NR Description: putative fertility restorer homologue [Oryza
  misc_feature (82)..(585): Homolog of NCBI NO: 15221610 NR Description: hypothetical protein; protein id: At1g62860.1
  misc_feature (77)..(612): Homolog of NCBI NO: 15221282 NR Description: hypothetical protein; protein id: At1g12300.1

SEQ ID NO: 92417 - DNA, 1663 bp, Arabidopsis thaliana; identical to SEQ ID NO: 88661
  misc_feature (1)..(1663): Ceres Seq. ID no. 12711421
  misc_feature: MA Experiment ID: 108579 Result: Down-regulated in Transcription
  misc_feature: MA Experiment 108579 PARAMETER Experiment Name: At_4deg_Cold_cDNA_P Parameter: Temperature (deg C) Value: 4 vs. 22
  misc_feature: MA Experiment 108579 PARAMETER Experiment Name: At_4deg_Cold_cDNA_P Parameter: Timepoint (hr) Value: 6
  misc_feature: MA Experiment 108579 PARAMETER Experiment Name: At_4deg_Cold_cDNA_P Parameter: Tissue Value: Aerial

SEQ ID NO: 92418 - protein, 476 aa, Arabidopsis thaliana; identical to SEQ ID NO: 88662
  peptide (1)..(476): Ceres Seq. ID no. 12711422
  misc_feature (69)..(476): Pfam Name: Aminotransferase class-III Pfam Description: Aminotransferase class-III
  misc_feature (1)..(476): Homolog of NCBI NO: 18420498 NR Description: putative protein; protein id: At4g39660.1, by cDNA: gi_15809991, supported by cDNA: gi_5731258 [Arabidopsis >gi|15809992|gb|AAL06923.1| AT4g39660/T19P19_50 [Arabidopsis
  misc_feature (1)..(476): Homolog of NCBI NO: 5731259 NR Description: alanine:glyoxylate aminotransferase 2 homolog
  misc_feature (39)..(476): Homolog of NCBI NO: 15231974 NR Description: putative aminotransferase; protein id: supported by cDNA: gi_20466699 [Arabidopsis thaliana] putative aminotransferase [Arabidopsis thaliana]
  misc_feature (3)..(476): Homolog of NCBI NO: 15224499 NR Description: putative beta-alanine-pyruvate aminotransferase; id: At2g38400.1, supported by cDNA: 147543., supported by cDNA: supported by cDNA: gi_5731260 [Arabidopsis thaliana]
  misc_feature (3)..(476): Homolog of NCBI NO: 15028237 NR Description: putative beta-alanine-pyruvate aminotransferase
  misc_feature (232)..(474): Homolog of NCBI NO: 16198011 NR Description: LD24726p [Drosophila melanogaster]
  misc_feature (232)..(474): Homolog of NCBI NO: 28574759 NR Description: CG11241-PA [Drosophila melanogaster]
  misc_feature (1)..(229): Homolog of NCBI NO: 16198011 NR Description: LD24726p [Drosophila melanogaster]
  misc_feature (1)..(229): Homolog of NCBI NO: 28574759 NR Description: CG11241-PA [Drosophila melanogaster]
  misc_feature (132)..(466): Homolog of NCBI NO: 7434175 NR Description: hypothetical protein T19P19.50 - Arabidopsis >gi|3080435|emb|CAA18752.1| putative protein [Arabidopsis >gi|7270950|emb|CAB80629.1| putative protein [Arabidopsis

SEQ ID NO: 92419 - protein, 391 aa, Arabidopsis thaliana; identical to SEQ ID NO: 88663
  peptide (1)..(391): Ceres Seq. ID no. 12711423
  misc_feature (1)..(391): Pfam Name: Aminotransferase class-III Pfam Description: Aminotransferase class-III
  misc_feature (1)..(391): Homolog of NCBI NO: 18420498 NR Description: putative protein; protein id: At4g39660.1, by cDNA: gi_15809991, supported by cDNA: gi_5731258 [Arabidopsis >gi|15809992|gb|AAL06923.1| AT4g39660/T19P19_50 [Arabidopsis
  misc_feature (1)..(391): Homolog of NCBI NO: 5731259 NR Description: alanine:glyoxylate aminotransferase 2 homolog
  misc_feature (1)..(391): Homolog of NCBI NO: 15231974 NR Description: putative aminotransferase; protein id: supported by cDNA: gi_20466699 [Arabidopsis thaliana] putative aminotransferase [Arabidopsis thaliana]
  misc_feature (1)..(391): Homolog of NCBI NO: 15224499 NR Description: putative beta-alanine-pyruvate aminotransferase; id: At2g38400.1, supported by cDNA: 147543., supported by cDNA: supported by cDNA: gi_5731260 [Arabidopsis thaliana]
  misc_feature (1)..(391): Homolog of NCBI NO: 15028237 NR Description: putative beta-alanine-pyruvate aminotransferase
  misc_feature (147)..(389): Homolog of NCBI NO: 16198011 NR Description: LD24726p [Drosophila melanogaster]
  misc_feature (147)..(389): Homolog of NCBI NO: 28574759 NR Description: CG11241-PA [Drosophila melanogaster]
  misc_feature (1)..(144): Homolog of NCBI NO: 16198011 NR Description: LD24726p [Drosophila melanogaster]
  misc_feature (1)..(144): Homolog of NCBI NO: 28574759 NR Description: CG11241-PA [Drosophila melanogaster]
  misc_feature (47)..(381): Homolog of NCBI NO: 7434175 NR Description: hypothetical protein T19P19.50 - Arabidopsis >gi|3080435|emb|CAA18752.1| putative protein [Arabidopsis >gi|7270950|emb|CAB80629.1| putative protein [Arabidopsis

SEQ ID NO: 92420 - protein, 327 aa, Arabidopsis thaliana; identical to SEQ ID NO: 88664
  peptide (1)..(327): Ceres Seq. ID no. 12711424
  misc_feature (1)..(327): Pfam Name: Aminotransferase class-III Pfam Description: Aminotransferase class-III
  misc_feature (1)..(327): Homolog of NCBI NO: 18420498 NR Description: putative protein; protein id: At4g39660.1, by cDNA: gi_15809991, supported by cDNA: gi_5731258 [Arabidopsis >gi|15809992|gb|AAL06923.1| AT4g39660/T19P19_50 [Arabidopsis
  misc_feature (1)..(327): Homolog of NCBI NO: 5731259 NR Description: alanine:glyoxylate aminotransferase 2 homolog
  misc_feature (1)..(327): Homolog of NCBI NO: 15231974 NR Description: putative aminotransferase; protein id: supported by cDNA: gi_20466699 [Arabidopsis thaliana] putative aminotransferase [Arabidopsis thaliana]
  misc_feature (1)..(327): Homolog of NCBI NO: 15224499 NR Description: putative beta-alanine-pyruvate aminotransferase; id: At2g38400.1, supported by cDNA: 147543., supported by cDNA: supported by cDNA: gi_5731260 [Arabidopsis thaliana]
  misc_feature (1)..(327): Homolog of NCBI NO: 15028237 NR Description: putative beta-alanine-pyruvate aminotransferase
  misc_feature (83)..(325): Homolog of NCBI NO: 16198011 NR Description: LD24726p [Drosophila melanogaster]
  misc_feature (83)..(325): Homolog of NCBI NO: 28574759 NR Description: CG11241-PA [Drosophila melanogaster]
  misc_feature (1)..(80): Homolog of NCBI NO: 16198011 NR Description: LD24726p [Drosophila melanogaster]
  misc_feature (1)..(80): Homolog of NCBI NO: 28574759 NR Description: CG11241-PA [Drosophila melanogaster]
  misc_feature (1)..(317): Homolog of NCBI NO: 7434175 NR Description: hypothetical protein T19P19.50 - Arabidopsis >gi|3080435|emb|CAA18752.1| putative protein [Arabidopsis >gi|7270950|emb|CAB80629.1| putative protein [Arabidopsis

SEQ ID NO: 92421 - DNA, 1944 bp, Arabidopsis thaliana; identical to SEQ ID NO: 88665
  misc_feature (1)..(1944): Ceres Seq. ID no. 12711432

SEQ ID NO: 92422 - protein, 647 aa, Arabidopsis thaliana; identical to SEQ ID NO: 88666
  peptide (1)..(647): Ceres Seq. ID no. 12711433
  misc_feature (254)..(593): Pfam Name: Protein of unknown function (DUF632) Pfam Description: Protein of unknown function (DUF632)
  misc_feature (251)..(589): Homolog of NCBI NO: 15225846 NR Description: hypothetical protein; protein id: At2g27090.1
  misc_feature (9)..(259): Homolog of NCBI NO: 15225846 NR Description: hypothetical protein; protein id: At2g27090.1
  misc_feature (240)..(647): Homolog of NCBI NO: 22324428 NR Description: hypothetical protein~predicted by GeneMark.hmm
  misc_feature (8)..(89): Homolog of NCBI NO: 22324428 NR Description: hypothetical protein~predicted by GeneMark.hmm
  misc_feature (235)..(643): Homolog of NCBI NO: 15234640 NR Description: putative protein; protein id: At4g30130.1, by cDNA: gi_15810478 [Arabidopsis thaliana]
  misc_feature (9)..(282): Homolog of NCBI NO: 15234640 NR Description: putative protein; protein id: At4g30130.1, by cDNA: gi_15810478 [Arabidopsis thaliana]
  misc_feature (151)..(631): Homolog of NCBI NO: 32526673 NR Description: bzip-like transcription factor-like protein
  misc_feature (23)..(88): Homolog of NCBI NO: 32526673 NR Description: bzip-like transcription factor-like protein
  misc_feature (319)..(596): Homolog of NCBI NO: 15219083 NR Description: putative bzip-like transcription factor; protein At1g21740.1 [Arabidopsis thaliana] >gi|25518309|pir||A86351
  misc_feature (9)..(99): Homolog of NCBI NO: 15219083 NR Description: putative bzip-like transcription factor; protein At1g21740.1 [Arabidopsis thaliana] >gi|25518309|pir||A86351

SEQ ID NO: 92423 - protein, 639 aa, Arabidopsis thaliana; identical to SEQ ID NO: 88667
  peptide (1)..(639): Ceres Seq. ID no. 12711434
  misc_feature (246)..(585): Pfam Name: Protein of unknown function (DUF632) Pfam Description: Protein of unknown function (DUF632)
  misc_feature (243)..(581): Homolog of NCBI NO: 15225846 NR Description: hypothetical protein; protein id: At2g27090.1
  misc_feature (1)..(251): Homolog of NCBI NO: 15225846 NR Description: hypothetical protein; protein id: At2g27090.1
  misc_feature (232)..(639): Homolog of NCBI NO: 22324428 NR Description: hypothetical protein~predicted by GeneMark.hmm
  misc_feature (1)..(81): Homolog of NCBI NO: 22324428 NR Description: hypothetical protein~predicted by GeneMark.hmm
  misc_feature (227)..(635): Homolog of NCBI NO: 15234640 NR Description: putative protein; protein id: At4g30130.1, by cDNA: gi_15810478 [Arabidopsis thaliana]
  misc_feature (1)..(274): Homolog of NCBI NO: 15234640 NR Description: putative protein; protein id: At4g30130.1, by cDNA: gi_15810478 [Arabidopsis thaliana]
  misc_feature (143)..(623): Homolog of NCBI NO: 32526673 NR Description: bzip-like transcription factor-like protein
  misc_feature (15)..(80): Homolog of NCBI NO: 32526673 NR Description: bzip-like transcription factor-like protein
  misc_feature (311)..(588): Homolog of NCBI NO: 15219083 NR Description: putative bzip-like transcription factor; protein At1g21740.1 [Arabidopsis thaliana] >gi|25518309|pir||A86351
  misc_feature (1)..(91): Homolog of NCBI NO: 15219083 NR Description: putative bzip-like transcription factor; protein At1g21740.1 [Arabidopsis thaliana] >gi|25518309|pir||A86351

SEQ ID NO: 92424 - protein, 630 aa, Arabidopsis thaliana; identical to SEQ ID NO: 88668
  peptide (1)..(630): Ceres Seq. ID no. 12711435
  misc_feature (237)..(576): Pfam Name: Protein of unknown function (DUF632) Pfam Description: Protein of unknown function (DUF632)
  misc_feature (234)..(572): Homolog of NCBI NO: 15225846 NR Description: hypothetical protein; protein id: At2g27090.1
  misc_feature (1)..(242): Homolog of NCBI NO: 15225846 NR Description: hypothetical protein; protein id: At2g27090.1
  misc_feature (223)..(630): Homolog of NCBI NO: 22324428 NR Description: hypothetical protein~predicted by GeneMark.hmm
  misc_feature (1)..(72): Homolog of NCBI NO: 22324428 NR Description: hypothetical protein~predicted by GeneMark.hmm
  misc_feature (218)..(626): Homolog of NCBI NO: 15234640 NR Description: putative protein; protein id: At4g30130.1, by cDNA: gi_15810478 [Arabidopsis thaliana]
  misc_feature (1)..(265): Homolog of NCBI NO: 15234640 NR Description: putative protein; protein id: At4g30130.1, by cDNA: gi_15810478 [Arabidopsis thaliana]
  misc_feature (134)..(614): Homolog of NCBI NO: 32526673 NR Description: bzip-like transcription factor-like protein
  misc_feature (6)..(71): Homolog of NCBI NO: 32526673 NR Description: bzip-like transcription factor-like protein
  misc_feature (302)..(579): Homolog of NCBI NO: 15219083 NR Description: putative bzip-like transcription factor; protein At1g21740.1 [Arabidopsis thaliana] >gi|25518309|pir||A86351
  misc_feature (1)..(82): Homolog of NCBI NO: 15219083 NR Description: putative bzip-like transcription factor; protein At1g21740.1 [Arabidopsis thaliana] >gi|25518309|pir||A86351

SEQ ID NO: 92425 - DNA, 1913 bp, Arabidopsis thaliana; identical to SEQ ID NO: 88669
  misc_feature (1)..(1913): Ceres Seq. ID no. 12711436
  misc_feature: MA Experiment ID: 108434 Result: Up-regulated in Transcription
  misc_feature: MA Experiment 108434 PARAMETER Experiment Name: At_Root_Tips_cDNA_P Parameter: Tissue Value: Root Tips
  misc_feature: MA Experiment ID: 108462 Result: Up-regulated in Transcription
  misc_feature: MA Experiment 108462 PARAMETER Experiment Name: At_Germinating_Seeds_cDNA_P Parameter: Age (day) Value: 2 vs. 0
  misc_feature: MA Experiment 108462 PARAMETER Experiment Name: At_Germinating_Seeds_cDNA_P Parameter: Tissue Value: Germinating Seeds
  misc_feature: MA Experiment ID: 108464 Result: Up-regulated in Transcription
  misc_feature: MA Experiment 108464 PARAMETER Experiment Name: At_Germinating_Seeds_cDNA_P Parameter: Age (day) Value: 4 vs. 0
  misc_feature: MA Experiment 108464 PARAMETER Experiment Name: At_Germinating_Seeds_cDNA_P Parameter: Tissue Value: Germinating Seeds
  misc_feature: MA Experiment ID: 108501 Result: Up-regulated in Transcription
  misc_feature: MA Experiment 108501 PARAMETER Experiment Name: At_ap2_floral_buds_cDNA_P Parameter: Plant Line Value: ap2 (Ler.)
  misc_feature: MA Experiment 108501 PARAMETER Experiment Name: At_ap2_floral_buds_cDNA_P Parameter: Tissue Value: Closed Flower
  misc_feature: MA Experiment ID: 108561 Result: Down-regulated in Transcription
  misc_feature: MA Experiment 108561 PARAMETER Experiment Name: At_100uM_ABA_cDNA_P Parameter: Timepoint (hr) Value: 6
  misc_feature: MA Experiment 108561 PARAMETER Experiment Name: At_100uM_ABA_cDNA_P Parameter: Tissue Value: Aerial
  misc_feature: MA Experiment 108561 PARAMETER Experiment Name: At_100uM_ABA_cDNA_P Parameter: Treatment Value: 100uM ABA vs. No Treatment
  misc_feature: MA Experiment ID: 108569 Result: Up-regulated in Transcription
  misc_feature: MA Experiment 108569 PARAMETER Experiment Name: At_0.001%_MeJA__cDNA_P Parameter: Timepoint (hr) Value: 6
  misc_feature: MA Experiment 108569 PARAMETER Experiment Name: At_0.001%_MeJA__cDNA_P Parameter: Tissue Value: Aerial
  misc_feature: MA Experiment 108569 PARAMETER Experiment Name: At_0.001%_MeJA__cDNA_P Parameter: Treatment Value: 0.001% MeJA vs. No Treatment
  misc_feature: MA Experiment ID: 108577 Result: Up-regulated in Transcription
  misc_feature: MA Experiment 108577 PARAMETER Experiment Name: At_42deg_Heat_cDNA_P Parameter: Temperature (deg C) Value: 42 vs. 22
  misc_feature: MA Experiment 108577 PARAMETER Experiment Name: At_42deg_Heat_cDNA_P Parameter: Timepoint (hr) Value: 6
  misc_feature: MA Experiment 108577 PARAMETER Experiment Name: At_42deg_Heat_cDNA_P Parameter: Tissue Value: Aerial
  misc_feature: MA Experiment ID: 108579 Result: Up-regulated in Transcription
  misc_feature: MA Experiment 108579 PARAMETER Experiment Name: At_4deg_Cold_cDNA_P Parameter: Temperature (deg C) Value: 4 vs. 22
  misc_feature: MA Experiment 108579 PARAMETER Experiment Name: At_4deg_Cold_cDNA_P Parameter: Timepoint (hr) Value: 6
  misc_feature: MA Experiment 108579 PARAMETER Experiment Name: At_4deg_Cold_cDNA_P Parameter: Tissue Value: Aerial
  misc_feature: MA Experiment ID: 108605 Result: Down-regulated in Transcription
  misc_feature: MA Experiment 108605 PARAMETER Experiment Name: At_100uM_ABA_cDNA_P Parameter: Timepoint (hr) Value: 6
  misc_feature: MA Experiment 108605 PARAMETER Experiment Name: At_100uM_ABA_cDNA_P Parameter: Tissue Value: Aerial
  misc_feature: MA Experiment 108605 PARAMETER Experiment Name: At_100uM_ABA_cDNA_P Parameter: Treatment Value: 100uM ABA vs. No Treatment
  misc_feature: MA Experiment ID: 20000071 Result: Down-regulated in Transcription
  misc_feature: MA Experiment 20000071 PARAMETER Experiment Name: At_100uM_ABA_Mutants_cDNA_P Parameter: Plant Line Value: CS8104
  misc_feature: MA Experiment 20000071 PARAMETER Experiment Name: At_100uM_ABA_Mutants_cDNA_P Parameter: Timepoint (hr) Value: 6
  misc_feature: MA Experiment 20000071 PARAMETER Experiment Name: At_100uM_ABA_Mutants_cDNA_P Parameter: Tissue Value: Aerial
  misc_feature: MA Experiment 20000071 PARAMETER Experiment Name: At_100uM_ABA_Mutants_cDNA_P Parameter: Treatment Value: 100uM ABA vs. No Treatment
  misc_feature: MA Experiment ID: 20000086 Result: Down-regulated in Transcription
  misc_feature: MA Experiment 20000086 PARAMETER Experiment Name: At_100uM_ABA_Mutants_cDNA_P Parameter: Plant Line Value: CS22
  misc_feature: MA Experiment 20000086 PARAMETER Experiment Name: At_100uM_ABA_Mutants_cDNA_P Parameter: Timepoint (hr) Value: 6
  misc_feature: MA Experiment 20000086 PARAMETER Experiment Name: At_100uM_ABA_Mutants_cDNA_P Parameter: Tissue Value: Aerial
  misc_feature: MA Experiment 20000086 PARAMETER Experiment Name: At_100uM_ABA_Mutants_cDNA_P Parameter: Treatment Value: 100uM ABA vs. No Treatment
  misc_feature: MA Experiment ID: 20000093 Result: Up-regulated in Transcription
  misc_feature: MA Experiment 20000093 PARAMETER Experiment Name: At_42deg_Heat_cDNA_P Parameter: Temperature (deg C) Value: 42 vs. 22
  misc_feature: MA Experiment 20000093 PARAMETER Experiment Name: At_42deg_Heat_cDNA_P Parameter: Timepoint (hr) Value: 0.5
  misc_feature: MA Experiment 20000093 PARAMETER Experiment Name: At_42deg_Heat_cDNA_P Parameter: Tissue Value: Aerial
  misc_feature: MA Experiment ID: 20000117 Result: Down-regulated in Transcription
  misc_feature: MA Experiment 20000117 PARAMETER Experiment Name: At_100uM_ABA_Mutants_cDNA_P Parameter: Plant Line Value: Columbia
  misc_feature: MA Experiment 20000117 PARAMETER Experiment Name: At_100uM_ABA_Mutants_cDNA_P Parameter: Timepoint (hr) Value: 6
  misc_feature: MA Experiment 20000117 PARAMETER Experiment Name: At_100uM_ABA_Mutants_cDNA_P Parameter: Tissue Value: Aerial
  misc_feature: MA Experiment 20000117 PARAMETER Experiment Name: At_100uM_ABA_Mutants_cDNA_P Parameter: Treatment Value: 100uM ABA vs. No Treatment
  misc_feature: MA Experiment ID: 20000169 Result: Down-regulated in Transcription
  misc_feature: MA Experiment 20000169 PARAMETER Experiment Name: At_100uM_ABA_P Parameter: Age (day) Value: 14
  misc_feature: MA Experiment 20000169 PARAMETER Experiment Name: At_100uM_ABA_P Parameter: Organism Value: A. thaliana
  misc_feature: MA Experiment 20000169 PARAMETER Experiment Name: At_100uM_ABA_P Parameter: Plant Line Value: WS
  misc_feature: MA Experiment 20000169 PARAMETER Experiment Name: At_100uM_ABA_P Parameter: Timepoint (hr) Value: 6
  misc_feature: MA Experiment 20000169 PARAMETER Experiment Name: At_100uM_ABA_P Parameter: Tissue Value: Aerial
  misc_feature: MA Experiment 20000169 PARAMETER Experiment Name: At_100uM_ABA_P Parameter: Treatment Value: 100uM ABA vs. No Treatment
  misc_feature: MA Experiment ID: 20000184 Result: Up-regulated in Transcription
  misc_feature: MA Experiment 20000184 PARAMETER Experiment Name: At_Shoots__P Parameter: Age (day) Value: 7
  misc_feature: MA Experiment 20000184 PARAMETER Experiment Name: At_Shoots__P Parameter: Tissue Value: Shoots vs. Whole Plant
  misc_feature: MA Experiment ID: 20000227 Result: Up-regulated in Transcription
  misc_feature: MA Experiment 20000227 PARAMETER Experiment Name: At_Root-Tips-vs-Tops_P Parameter: Tissue Value: Root Tips vs. Root Tops
  misc_feature: MA Experiment ID: 20000234 Result: Up-regulated in Transcription
  misc_feature: MA Experiment 20000234 PARAMETER Experiment Name: At_Siliques_P Parameter: Age (day) Value: 21
  misc_feature: MA Experiment 20000234 PARAMETER Experiment Name: At_Siliques_P Parameter: Organism Value: A. thaliana
  misc_feature: MA Experiment 20000234 PARAMETER Experiment Name: At_Siliques_P Parameter: Plant Line Value: WS
  misc_feature: MA Experiment 20000234 PARAMETER Experiment Name: At_Siliques_P Parameter: Tissue Value: Less Than 5mm Siliques vs. Whole Plant
  misc_feature: MA Experiment ID: 20000269 Result: Up-regulated in Transcription
  misc_feature: MA Experiment 20000269 PARAMETER Experiment Name: At_1mM_KNO3_L-vs-H_Roots_P Parameter: Age (day) Value: 7,10,12
  misc_feature: MA Experiment 20000269 PARAMETER Experiment Name: At_1mM_KNO3_L-vs-H_Roots_P Parameter: Organism Value: A. thaliana
  misc_feature: MA Experiment 20000269 PARAMETER Experiment Name: At_1mM_KNO3_L-vs-H_Roots_P Parameter: Plant Line Value: WS
  misc_feature: MA Experiment 20000269 PARAMETER Experiment Name: At_1mM_KNO3_L-vs-H_Roots_P Parameter: Timepoint (day) Value: 7,10,12
  misc_feature: MA Experiment 20000269 PARAMETER Experiment Name: At_1mM_KNO3_L-vs-H_Roots_P Parameter: Tissue Value: Roots
  misc_feature: MA Experiment 20000269 PARAMETER Experiment Name: At_1mM_KNO3_L-vs-H_Roots_P Parameter: Treatment Value: 1mM KNO3 vs. 50mM KNO3
  misc_feature: MA Experiment ID: 20000438 Result: Up-regulated in Transcription
  misc_feature: MA Experiment 20000438 PARAMETER Experiment Name: At_Shoots__P Parameter: Age (day) Value: 14
  misc_feature: MA Experiment 20000438 PARAMETER Experiment Name: At_Shoots__P Parameter: Tissue Value: Shoots vs. Whole Plant
  misc_feature: MA Experiment ID: 20000441 Result: Down-regulated in Transcription
  misc_feature: MA Experiment 20000441 PARAMETER Experiment Name: At_1uM_BR-BRZ__P Parameter: Tissue Value: Shoot Apices
  misc_feature: MA Experiment 20000441 PARAMETER Experiment Name: At_1uM_BR-BRZ__P Parameter: Treatment Value: 1uM BR vs. No Treatment
  misc_feature: MA Experiment ID: 20000573 Result: Down-regulated in Transcription
  misc_feature: MA Experiment 20000573 PARAMETER Experiment Name: At_100uM_ABA_Mutants__P Parameter: Organism Value: A. thaliana
  misc_feature: MA Experiment 20000573 PARAMETER Experiment Name: At_100uM_ABA_Mutants__P Parameter: Plant Line Value: CS22 vs. Ler wt
  misc_feature: MA Experiment 20000573 PARAMETER Experiment Name: At_100uM_ABA_Mutants__P Parameter: Timepoint (hr) Value: N/A
  misc_feature: MA Experiment 20000573 PARAMETER Experiment Name: At_100uM_ABA_Mutants__P Parameter: Tissue Value: Whole Plant
  misc_feature: MA Experiment 20000573 PARAMETER Experiment Name: At_100uM_ABA_Mutants__P Parameter: Treatment Value: None
  misc_feature: MA Experiment ID: 20000574 Result: Down-regulated in Transcription
  misc_feature: MA Experiment 20000574 PARAMETER Experiment Name: At_100uM_ABA_Mutants__P Parameter: Organism Value: A. thaliana
  misc_feature: MA Experiment 20000574 PARAMETER Experiment Name: At_100uM_ABA_Mutants__P Parameter: Plant Line Value: CS23 vs. Ler wt
  misc_feature: MA Experiment 20000574 PARAMETER Experiment Name: At_100uM_ABA_Mutants__P Parameter: Timepoint (hr) Value: N/A
  misc_feature: MA Experiment 20000574 PARAMETER Experiment Name: At_100uM_ABA_Mutants__P Parameter: Tissue Value: Whole Plant
  misc_feature: MA Experiment 20000574 PARAMETER Experiment Name: At_100uM_ABA_Mutants__P Parameter: Treatment Value: None
  misc_feature: MA Experiment ID: 20000794 Result: Down-regulated in Transcription
  misc_feature: MA Experiment 20000794 PARAMETER Experiment Name: At_Petals_P Parameter: Age (day) Value: 23-25 days
  misc_feature: MA Experiment 20000794 PARAMETER Experiment Name: At_Petals_P Parameter: Plant Line Value: WS
  misc_feature: MA Experiment 20000794 PARAMETER Experiment Name: At_Petals_P Parameter: Tissue Value: Petals vs. Whole plant
  misc_feature: MA Experiment ID: 20001248 Result: Down-regulated in Transcription
  misc_feature: MA Experiment 20001248 PARAMETER Experiment Name: At_Far-red-induction_P Parameter: Age (day) Value: 7
  misc_feature: MA Experiment 20001248 PARAMETER Experiment Name: At_Far-red-induction_P Parameter: Light Value: Far-red vs. White
  misc_feature: MA Experiment 20001248 PARAMETER Experiment Name: At_Far-red-induction_P Parameter: Organism Value: A. thaliana
  misc_feature: MA Experiment 20001248 PARAMETER Experiment Name: At_Far-red-induction_P Parameter: Plant Line Value: Columbia
  misc_feature: MA Experiment 20001248 PARAMETER Experiment Name: At_Far-red-induction_P Parameter: Timepoint (hr) Value: 4
  misc_feature: MA Experiment 20001248 PARAMETER Experiment Name: At_Far-red-induction_P Parameter: Tissue Value: Whole Plant
  misc_feature: MA Experiment ID: 20001450 Result: Down-regulated in Transcription
  misc_feature: MA Experiment 20001450 PARAMETER Experiment Name: At_Far-red-induction_P Parameter: Age (day) Value: 7
  misc_feature: MA Experiment 20001450 PARAMETER Experiment Name: At_Far-red-induction_P Parameter: Light Value: Far-red vs. White
  misc_feature: MA Experiment 20001450 PARAMETER Experiment Name: At_Far-red-induction_P Parameter: Organism Value: A. thaliana
  misc_feature: MA Experiment 20001450 PARAMETER Experiment Name: At_Far-red-induction_P Parameter: Plant Line Value: Columbia
  misc_feature: MA Experiment 20001450 PARAMETER Experiment Name: At_Far-red-induction_P Parameter: Timepoint (hr) Value: 8
  misc_feature: MA Experiment 20001450 PARAMETER Experiment Name: At_Far-red-induction_P Parameter: Tissue Value: Whole Plant
  misc_feature: MA Experiment ID: 20001451 Result: Down-regulated in Transcription
  misc_feature: MA Experiment 20001451 PARAMETER Experiment Name: At_Far-red-induction_P Parameter: Age (day) Value: 7
  misc_feature: MA Experiment 20001451 PARAMETER Experiment Name: At_Far-red-induction_P Parameter: Light Value: Far-red vs. White
  misc_feature: MA Experiment 20001451 PARAMETER Experiment Name: At_Far-red-induction_P Parameter: Organism Value: A. thaliana
  misc_feature: MA Experiment 20001451 PARAMETER Experiment Name: At_Far-red-induction_P Parameter: Plant Line Value: Columbia
  misc_feature: MA Experiment 20001451 PARAMETER Experiment Name: At_Far-red-induction_P Parameter: Timepoint (hr) Value: 24
  misc_feature: MA Experiment 20001451 PARAMETER Experiment Name: At_Far-red-induction_P Parameter: Tissue Value: Whole Plant
  misc_feature: MA Experiment ID: 20001757 Result: Down-regulated in Transcription
  misc_feature: MA Experiment 20001757 PARAMETER Experiment Name: At_50mM_NH4NO3_L-to-H_P Parameter: Timepoint (hr) Value: 6
  misc_feature: MA Experiment 20001757 PARAMETER Experiment Name: At_50mM_NH4NO3_L-to-H_P Parameter: Tissue Value: Leaf
  misc_feature: MA Experiment 20001757 PARAMETER Experiment Name: At_50mM_NH4NO3_L-to-H_P Parameter: Treatment Value: 50mM NH4NO3 vs 100mM Mannitol
  misc_feature: MA Experiment ID: 20001911 Result: Down-regulated in Transcription
  misc_feature: MA Experiment 20001911 PARAMETER Experiment Name: At_Drought_Reproduction_P Parameter: Age (day) Value: 40
  misc_feature: MA Experiment 20001911 PARAMETER Experiment Name: At_Drought_Reproduction_P Parameter: Organism Value: A. thaliana
  misc_feature: MA Experiment 20001911 PARAMETER Experiment Name: At_Drought_Reproduction_P Parameter: Plant Line Value: WS
  misc_feature: MA Experiment 20001911 PARAMETER Experiment Name: At_Drought_Reproduction_P Parameter: Timepoint (day) Value: 10
  misc_feature: MA Experiment 20001911 PARAMETER Experiment Name: At_Drought_Reproduction_P Parameter: Tissue Value: Flowers
  misc_feature: MA Experiment 20001911 PARAMETER Experiment Name: At_Drought_Reproduction_P Parameter: Treatment Value: Drought vs. No Drought

SEQ ID NO: 92426 - protein, 534 aa, Arabidopsis thaliana; identical to SEQ ID NO: 26151
  peptide (1)..(534): Ceres Seq. ID no. 12711437
  misc_feature (85)..(519): Pfam Name: Myo-inositol-1-phosphate synthase Pfam Description: Myo-inositol-1-phosphate synthase
  misc_feature (24)..(534): Homolog of NCBI NO: 15236025 NR Description: myo-inositol-1-phosphate synthase; protein id: supported by cDNA: 1978., supported by cDNA: gi_1161311, by cDNA: gi_13937199, supported by cDNA: gi_14334743 [Arabidopsis
  misc_feature (24)..(534): Homolog of NCBI NO: 1161312 NR Description: myo-inositol-1-phosphate synthase
  misc_feature (24)..(534): Homolog of NCBI NO: 14548092 NR Description: Inositol-3-phosphate synthase
  misc_feature (24)..(534): Homolog of NCBI NO: 14548093 NR Description: Inositol-3-phosphate synthase
  misc_feature (25)..(534): Homolog of NCBI NO: 7488491 NR Description: inositol-3-phosphate synthase (EC 5.5.1.4)
  misc_feature (24)..(534): Homolog of NCBI NO: 15227169 NR Description: putative myo-inositol 1-phosphate synthase; id: At2g22240.1, supported by cDNA: gi_15450746, supported by
  misc_feature (24)..(534): Homolog of NCBI NO: 14548098 NR Description: Inositol-3-phosphate synthase
  misc_feature (24)..(534): Homolog of NCBI NO: 973313 NR Description: myo-inositol 1-phosphate synthase isozyme-2
  misc_feature (24)..(534): Homolog of NCBI NO: 14548099 NR Description: Inositol-3-phosphate synthase
  misc_feature (24)..(534): Homolog of NCBI NO: 32140125 NR Description: inositol 1-phosphate synthase [Porteresia

SEQ ID NO: 92427 - protein, 511 aa, Arabidopsis thaliana; identical to SEQ ID NO: 26152
  peptide (1)..(511): Ceres Seq. ID no. 12711438
  misc_feature (62)..(496): Pfam Name: Myo-inositol-1-phosphate synthase Pfam Description: Myo-inositol-1-phosphate synthase
  misc_feature (1)..(511): Homolog of NCBI NO: 15236025 NR Description: myo-inositol-1-phosphate synthase; protein id: supported by cDNA: 1978., supported by cDNA: gi_1161311, by cDNA: gi_13937199, supported by cDNA: gi_14334743 [Arabidopsis
  misc_feature (1)..(511): Homolog of NCBI NO: 1161312 NR Description: myo-inositol-1-phosphate synthase
  misc_feature (1)..(511): Homolog of NCBI NO: 14548092 NR Description: Inositol-3-phosphate synthase
  misc_feature (1)..(511): Homolog of NCBI NO: 14548093 NR Description: Inositol-3-phosphate synthase
  misc_feature (2)..(511): Homolog of NCBI NO: 7488491 NR Description: inositol-3-phosphate synthase (EC 5.5.1.4)
  misc_feature (1)..(511): Homolog of NCBI NO: 15227169 NR Description: putative myo-inositol 1-phosphate synthase; id: At2g22240.1, supported by cDNA: gi_15450746, supported by
  misc_feature (1)..(511): Homolog of NCBI NO: 14548098 NR Description: Inositol-3-phosphate synthase
  misc_feature (1)..(511): Homolog of NCBI NO: 973313 NR Description: myo-inositol 1-phosphate synthase isozyme-2
  misc_feature (1)..(511): Homolog of NCBI NO: 14548099 NR Description: Inositol-3-phosphate synthase
  misc_feature (1)..(511): Homolog of NCBI NO: 32140125 NR Description: inositol 1-phosphate synthase [Porteresia

SEQ ID NO: 92428 - protein, 446 aa, Arabidopsis thaliana; identical to SEQ ID NO: 26153
  peptide (1)..(446): Ceres Seq. ID no. 12711439
  misc_feature (1)..(431): Pfam Name: Myo-inositol-1-phosphate synthase Pfam Description: Myo-inositol-1-phosphate synthase
  misc_feature (1)..(446): Homolog of NCBI NO: 15236025 NR Description: myo-inositol-1-phosphate synthase; protein id: supported by cDNA: 1978., supported by cDNA: gi_1161311, by cDNA: gi_13937199, supported by cDNA: gi_14334743 [Arabidopsis
  misc_feature (1)..(446): Homolog of NCBI NO: 1161312 NR Description: myo-inositol-1-phosphate synthase
  misc_feature (1)..(446): Homolog of NCBI NO: 14548092 NR Description: Inositol-3-phosphate synthase
  misc_feature (1)..(446): Homolog of NCBI NO: 14548093 NR Description: Inositol-3-phosphate synthase
  misc_feature (1)..(446): Homolog of NCBI NO: 7488491 NR Description: inositol-3-phosphate synthase (EC 5.5.1.4)
  misc_feature (1)..(446): Homolog of NCBI NO: 15227169 NR Description: putative myo-inositol 1-phosphate synthase; id: At2g22240.1, supported by cDNA: gi_15450746, supported by
  misc_feature (1)..(446): Homolog of NCBI NO: 14548098 NR Description: Inositol-3-phosphate synthase
  misc_feature (1)..(446): Homolog of NCBI NO: 973313 NR Description: myo-inositol 1-phosphate synthase isozyme-2
  misc_feature (1)..(446): Homolog of NCBI NO: 14548099 NR Description: Inositol-3-phosphate synthase
  misc_feature (1)..(446): Homolog of NCBI NO: 32140125 NR Description: inositol 1-phosphate synthase [Porteresia

SEQ ID NO: 92429 - DNA, 2328 bp, Arabidopsis thaliana; identical to SEQ ID NO: 88673
  misc_feature (1)..(2328): Ceres Seq. ID no. 12711463
  misc_feature: MA Experiment ID: 20000180 Result: Down-regulated in Transcription
  misc_feature: MA Experiment 20000180 PARAMETER Experiment Name: At_Germinating_Seeds_P Parameter: Age (hr) Value: 24 vs. 0
  misc_feature: MA Experiment 20000180 PARAMETER Experiment Name: At_Germinating_Seeds_P Parameter: Tissue Value: Germinating Seeds
  misc_feature: MA Experiment ID: 20001247 Result: Down-regulated in Transcription
  misc_feature: MA Experiment 20001247 PARAMETER Experiment Name: At_Far-red-induction_P Parameter: Age (day) Value: 7
  misc_feature: MA Experiment 20001247 PARAMETER Experiment Name: At_Far-red-induction_P Parameter: Light Value: Far-red vs. White
  misc_feature: MA Experiment 20001247 PARAMETER Experiment Name: At_Far-red-induction_P Parameter: Organism Value: A. thaliana
  misc_feature: MA Experiment 20001247 PARAMETER Experiment Name: At_Far-red-induction_P Parameter: Plant Line Value: Columbia
  misc_feature: MA Experiment 20001247 PARAMETER Experiment Name: At_Far-red-induction_P Parameter: Timepoint (hr) Value: 1
  misc_feature: MA Experiment 20001247 PARAMETER Experiment Name: At_Far-red-induction_P Parameter: Tissue Value: Whole Plant
  misc_feature: MA Experiment ID: 20001248 Result: Up-regulated in Transcription
  misc_feature: MA Experiment 20001248 PARAMETER Experiment Name: At_Far-red-induction_P Parameter: Age (day) Value: 7
  misc_feature: MA Experiment 20001248 PARAMETER Experiment Name: At_Far-red-induction_P Parameter: Light Value: Far-red vs. White
  misc_feature: MA Experiment 20001248 PARAMETER Experiment Name: At_Far-red-induction_P Parameter: Organism Value: A. thaliana
  misc_feature: MA Experiment 20001248 PARAMETER Experiment Name: At_Far-red-induction_P Parameter: Plant Line Value: Columbia
  misc_feature: MA Experiment 20001248 PARAMETER Experiment Name: At_Far-red-induction_P Parameter: Timepoint (hr) Value: 4
  misc_feature: MA Experiment 20001248 PARAMETER Experiment Name: At_Far-red-induction_P Parameter: Tissue Value: Whole Plant

SEQ ID NO: 92430 - protein, 775 aa, Arabidopsis thaliana; identical to SEQ ID NO: 88674
  peptide (1)..(775): Ceres Seq. ID no. 12711464
  misc_feature (670)..(704): Pfam Name: PPR repeat Pfam Description: PPR repeat
  misc_feature (1)..(660): Homolog of NCBI NO: 22329268 NR Description: hypothetical protein; protein id: At4g39952.1
  misc_feature (40)..(775): Homolog of NCBI NO: 38567725 NR Description: B1358B12.23 [Oryza sativa (japonica
  misc_feature (40)..(775): Homolog of NCBI NO: 38347057 NR Description: OSJNBa0060P14.4 [Oryza sativa (japonica
  misc_feature (402)..(775): Homolog of NCBI NO: 22329268 NR Description: hypothetical protein; protein id: At4g39952.1
  misc_feature (37)..(775): Homolog of NCBI NO: 18409250 NR Description: PPR-repeat protein, putative; protein id: [Arabidopsis thaliana] >gi|12325094|gb|AAG52503.1|AC018364_21
  misc_feature (21)..(773): Homolog of NCBI NO: 15228590 NR Description: hypothetical protein; protein id: At3g03580.1 thaliana] >gi|6091764|gb|AAF03474.1|AC009327_13 hypothetical [Arabidopsis thaliana] >gi|28393735|gb|AAO42278.1| unknown
  misc_feature (2)..(768): Homolog of NCBI NO: 38606535 NR Description: OSJNBa0016O02.23 [Oryza sativa (japonica
  misc_feature (7)..(775): Homolog of NCBI NO: 34897084 NR Description: hypothetical protein [Oryza sativa (japonica group)] >gi|12957718|gb|AAK09236.1| hypothetical protein [Oryza
  misc_feature (14)..(773): Homolog of NCBI NO: 38423978 NR Description: PPR-repeat protein-like [Oryza sativa (japonica
  misc_feature (11)..(773): Homolog of NCBI NO: 34903762 NR Description: unnamed protein product [Oryza sativa (japonica group)] >gi|7340873|dbj|BAA92963.1| unnamed protein product

SEQ ID NO: 92431 - protein, 660 aa, Arabidopsis thaliana; identical to SEQ ID NO: 88675
  peptide (1)..(660): Ceres Seq. ID no. 12711465
  misc_feature (555)..(589): Pfam Name: PPR repeat Pfam Description: PPR repeat
  misc_feature (1)..(545): Homolog of NCBI NO: 22329268 NR Description: hypothetical protein; protein id: At4g39952.1
  misc_feature (1)..(660): Homolog of NCBI NO: 38567725 NR Description: B1358B12.23 [Oryza sativa (japonica
  misc_feature (1)..(660): Homolog of NCBI NO: 38347057 NR Description: OSJNBa0060P14.4 [Oryza sativa (japonica
  misc_feature (287)..(660): Homolog of NCBI NO: 22329268 NR Description: hypothetical protein; protein id: At4g39952.1
  misc_feature (1)..(660): Homolog of NCBI NO: 18409250 NR Description: PPR-repeat protein, putative; protein id: [Arabidopsis thaliana] >gi|12325094|gb|AAG52503.1|AC018364_21
  misc_feature (1)..(658): Homolog of NCBI NO: 15228590 NR Description: hypothetical protein; protein id: At3g03580.1 thaliana] >gi|6091764|gb|AAF03474.1|AC009327_13 hypothetical [Arabidopsis thaliana] >gi|28393735|gb|AAO42278.1| unknown
  misc_feature (1)..(653): Homolog of NCBI NO: 38606535 NR Description: OSJNBa0016O02.23 [Oryza sativa (japonica
  misc_feature (1)..(660): Homolog of NCBI NO: 34897084 NR Description: hypothetical protein [Oryza sativa (japonica group)] >gi|12957718|gb|AAK09236.1| hypothetical protein [Oryza
  misc_feature (1)..(658): Homolog of NCBI NO: 38423978 NR Description: PPR-repeat protein-like [Oryza sativa (japonica
  misc_feature (1)..(658): Homolog of NCBI NO: 34903762 NR Description: unnamed protein product [Oryza sativa (japonica group)] >gi|7340873|dbj|BAA92963.1| unnamed protein product

SEQ ID NO: 92432 - protein, 646 aa, Arabidopsis thaliana; identical to SEQ ID NO: 88676
  peptide (1)..(646): Ceres Seq. ID no. 12711466
  misc_feature (541)..(575): Pfam Name: PPR repeat Pfam Description: PPR repeat
  misc_feature (1)..(531): Homolog of NCBI NO: 22329268 NR Description: hypothetical protein; protein id: At4g39952.1
  misc_feature (1)..(646): Homolog of NCBI NO: 38567725 NR Description: B1358B12.23 [Oryza sativa (japonica
  misc_feature (1)..(646): Homolog of NCBI NO: 38347057 NR Description: OSJNBa0060P14.4 [Oryza sativa (japonica
  misc_feature (273)..(646): Homolog of NCBI NO: 22329268 NR Description: hypothetical protein; protein id: At4g39952.1
  misc_feature (1)..(646): Homolog of NCBI NO: 18409250 NR Description: PPR-repeat protein, putative; protein id: [Arabidopsis thaliana] >gi|12325094|gb|AAG52503.1|AC018364_21
  misc_feature (1)..(644): Homolog of NCBI NO: 15228590 NR Description: hypothetical protein; protein id: At3g03580.1 thaliana] >gi|6091764|gb|AAF03474.1|AC009327_13 hypothetical [Arabidopsis thaliana] >gi|28393735|gb|AAO42278.1| unknown
  misc_feature (1)..(639): Homolog of NCBI NO: 38606535 NR Description: OSJNBa0016O02.23 [Oryza sativa (japonica
  misc_feature (1)..(646): Homolog of NCBI NO: 34897084 NR Description: hypothetical protein [Oryza sativa (japonica group)] >gi|12957718|gb|AAK09236.1| hypothetical protein [Oryza
  misc_feature (1)..(644): Homolog of NCBI NO: 38423978 NR Description: PPR-repeat protein-like [Oryza sativa (japonica
  misc_feature (1)..(644): Homolog of NCBI NO: 34903762 NR Description: unnamed protein product [Oryza sativa (japonica group)] >gi|7340873|dbj|BAA92963.1| unnamed protein product

SEQ ID NO: 92433 - DNA, 1064 bp, Arabidopsis thaliana; identical to SEQ ID NO: 88677
  misc_feature (1)..(1064): Ceres Seq. ID no. 12711515
  misc_feature: MA Experiment ID: 108435 Result: Down-regulated in Transcription
  misc_feature: MA Experiment 108435 PARAMETER Experiment Name: At_stm_Mutants_cDNA_P Parameter: Plant Line Value: wt Landsburg vs stm
  misc_feature: MA Experiment 108435 PARAMETER Experiment Name: At_stm_Mutants_cDNA_P Parameter: Tissue Value: Shoot Apical Meristem Region
  misc_feature: MA Experiment ID: 108461 Result: Down-regulated in Transcription
  misc_feature: MA Experiment 108461 PARAMETER Experiment Name: At_Germinating_Seeds_cDNA_P Parameter: Age (day) Value: 1 vs. 0
  misc_feature: MA Experiment 108461 PARAMETER Experiment Name: At_Germinating_Seeds_cDNA_P Parameter: Tissue Value: Germinating Seeds
  misc_feature: MA Experiment ID: 108462 Result: Down-regulated in Transcription
  misc_feature: MA Experiment 108462 PARAMETER Experiment Name: At_Germinating_Seeds_cDNA_P Parameter: Age (day) Value: 2 vs. 0
  misc_feature: MA Experiment 108462 PARAMETER Experiment Name: At_Germinating_Seeds_cDNA_P Parameter: Tissue Value: Germinating Seeds
  misc_feature: MA Experiment ID: 108463 Result: Down-regulated in Transcription
  misc_feature: MA Experiment 108463 PARAMETER Experiment Name: At_Germinating_Seeds_cDNA_P Parameter: Age (day) Value: 3 vs. 0
  misc_feature: MA Experiment 108463 PARAMETER Experiment Name: At_Germinating_Seeds_cDNA_P Parameter: Tissue Value: Germinating Seeds
  misc_feature: MA Experiment ID: 108464 Result: Down-regulated in Transcription
  misc_feature: MA Experiment 108464 PARAMETER Experiment Name: At_Germinating_Seeds_cDNA_P Parameter: Age (day) Value: 4 vs. 0
  misc_feature: MA Experiment 108464 PARAMETER Experiment Name: At_Germinating_Seeds_cDNA_P Parameter: Tissue Value: Germinating Seeds
  misc_feature: MA Experiment ID: 108474 Result: Up-regulated in Transcription
  misc_feature: MA Experiment 108474 PARAMETER Experiment Name: At_Drought_Flowers_cDNA_P Parameter: Timepoint (hr) Value: null
  misc_feature: MA Experiment 108474 PARAMETER Experiment Name: At_Drought_Flowers_cDNA_P Parameter: Treatment Value: Drought vs. No Drought
  misc_feature: MA Experiment ID: 108501 Result: Up-regulated in Transcription
  misc_feature: MA Experiment 108501 PARAMETER Experiment Name: At_ap2_floral_buds_cDNA_P Parameter: Plant Line Value: ap2 (Ler.)
  misc_feature: MA Experiment 108501 PARAMETER Experiment Name: At_ap2_floral_buds_cDNA_P Parameter: Tissue Value: Closed Flower
  misc_feature: MA Experiment ID: 108561 Result: Up-regulated in Transcription
  misc_feature: MA Experiment 108561 PARAMETER Experiment Name: At_100uM_ABA_cDNA_P Parameter: Timepoint (hr) Value: 6
  misc_feature: MA Experiment 108561 PARAMETER Experiment Name: At_100uM_ABA_cDNA_P Parameter: Tissue Value: Aerial
  misc_feature: MA Experiment 108561 PARAMETER Experiment Name: At_100uM_ABA_cDNA_P Parameter: Treatment Value: 100uM ABA vs. No Treatment
  misc_feature: MA Experiment ID: 108579 Result: Down-regulated in Transcription
  misc_feature: MA Experiment 108579 PARAMETER Experiment Name: At_4deg_Cold_cDNA_P Parameter: Temperature (deg C) Value: 4 vs. 22
  misc_feature: MA Experiment 108579 PARAMETER Experiment Name: At_4deg_Cold_cDNA_P Parameter: Timepoint (hr) Value: 6
  misc_feature: MA Experiment 108579 PARAMETER Experiment Name: At_4deg_Cold_cDNA_P Parameter: Tissue Value: Aerial
  misc_feature: MA Experiment ID: 108585 Result: Down-regulated in Transcription
  misc_feature: MA Experiment 108585 PARAMETER Experiment Name: At_5mM_NaNP_cDNA_P Parameter: Timepoint (hr) Value: 6
  misc_feature: MA Experiment 108585 PARAMETER Experiment Name: At_5mM_NaNP_cDNA_P Parameter: Tissue Value: Aerial
  misc_feature: MA Experiment 108585 PARAMETER Experiment Name: At_5mM_NaNP_cDNA_P Parameter: Treatment Value: null
  misc_feature: MA Experiment ID: 108605 Result: Up-regulated in Transcription
  misc_feature: MA Experiment 108605 PARAMETER Experiment Name: At_100uM_ABA_cDNA_P Parameter: Timepoint (hr) Value: 6
  misc_feature: MA Experiment 108605 PARAMETER Experiment Name: At_100uM_ABA_cDNA_P Parameter: Tissue Value: Aerial
  misc_feature: MA Experiment 108605 PARAMETER Experiment Name: At_100uM_ABA_cDNA_P Parameter: Treatment Value: 100uM ABA vs. No Treatment
  misc_feature: MA Experiment ID: 108607 Result: Up-regulated in Transcription
  misc_feature: MA Experiment 108607 PARAMETER Experiment Name: At_100uM_ABA_cDNA_P Parameter: Timepoint (hr) Value: 4
  misc_feature: MA Experiment 108607 PARAMETER Experiment Name: At_100uM_ABA_cDNA_P Parameter: Tissue Value: Aerial
  misc_feature: MA Experiment 108607 PARAMETER Experiment Name: At_100uM_ABA_cDNA_P Parameter: Treatment Value: 100uM ABA vs. No Treatment
  misc_feature: MA Experiment ID: 108609 Result: Up-regulated in Transcription
  misc_feature: MA Experiment 108609 PARAMETER Experiment Name: At_100uM_ABA_cDNA_P Parameter: Timepoint (hr) Value: 24
  misc_feature: MA Experiment 108609 PARAMETER Experiment Name: At_100uM_ABA_cDNA_P Parameter: Tissue Value: Aerial
  misc_feature: MA Experiment 108609 PARAMETER Experiment Name: At_100uM_ABA_cDNA_P Parameter: Treatment Value: 100uM ABA vs. No Treatment
  misc_feature: MA Experiment ID: 108668 Result: Down-regulated in Transcription
  misc_feature: MA Experiment 108668 PARAMETER Experiment Name: At_2mM_SA_cDNA_P Parameter: Plant Line Value: WS
  misc_feature: MA Experiment 108668 PARAMETER Experiment Name: At_2mM_SA_cDNA_P Parameter: Timepoint (hr) Value: 6
  misc_feature: MA Experiment 108668 PARAMETER Experiment Name: At_2mM_SA_cDNA_P Parameter: Treatment Value: 2mM SA vs. No Treatment
  misc_feature: MA Experiment ID: 20000069 Result: Up-regulated in Transcription
  misc_feature: MA Experiment 20000069 PARAMETER Experiment Name: At_100uM_ABA_Mutants_cDNA_P Parameter: Plant Line Value: CS23
  misc_feature: MA Experiment 20000069 PARAMETER Experiment Name: At_100uM_ABA_Mutants_cDNA_P Parameter: Timepoint (hr) Value: 6
  misc_feature: MA Experiment 20000069 PARAMETER Experiment Name: At_100uM_ABA_Mutants_cDNA_P Parameter: Tissue Value: Aerial
  misc_feature: MA Experiment 20000069 PARAMETER Experiment Name: At_100uM_ABA_Mutants_cDNA_P Parameter: Treatment Value: 100uM ABA vs. No Treatment
  misc_feature: MA Experiment ID: 20000070 Result: Up-regulated in Transcription
  misc_feature: MA Experiment 20000070 PARAMETER Experiment Name: At_100uM_ABA_Mutants_cDNA_P Parameter: Plant Line Value: CS24
  misc_feature: MA Experiment 20000070 PARAMETER Experiment Name: At_100uM_ABA_Mutants_cDNA_P Parameter: Timepoint (hr) Value: 6
  misc_feature: MA Experiment 20000070 PARAMETER Experiment Name: At_100uM_ABA_Mutants_cDNA_P Parameter: Tissue Value: Aerial
  misc_feature: MA Experiment 20000070 PARAMETER Experiment Name: At_100uM_ABA_Mutants_cDNA_P Parameter: Treatment Value: 100uM ABA vs. No Treatment
  misc_feature: MA Experiment ID: 20000071 Result: Up-regulated in Transcription
  misc_feature: MA Experiment 20000071 PARAMETER Experiment Name: At_100uM_ABA_Mutants_cDNA_P Parameter: Plant Line Value: CS8104
  misc_feature: MA Experiment 20000071 PARAMETER Experiment Name: At_100uM_ABA_Mutants_cDNA_P Parameter: Timepoint (hr) Value: 6
  misc_feature: MA Experiment 20000071 PARAMETER Experiment Name: At_100uM_ABA_Mutants_cDNA_P Parameter: Tissue Value: Aerial
  misc_feature: MA Experiment 20000071 PARAMETER Experiment Name: At_100uM_ABA_Mutants_cDNA_P Parameter: Treatment Value: 100uM ABA vs. No Treatment
  misc_feature: MA Experiment ID: 20000086 Result: Up-regulated in Transcription
  misc_feature: MA Experiment 20000086 PARAMETER Experiment Name: At_100uM_ABA_Mutants_cDNA_P Parameter: Plant Line Value: CS22
  misc_feature: MA Experiment 20000086 PARAMETER Experiment Name: At_100uM_ABA_Mutants_cDNA_P Parameter: Timepoint (hr) Value: 6
  misc_feature: MA Experiment 20000086 PARAMETER Experiment Name: At_100uM_ABA_Mutants_cDNA_P Parameter: Tissue Value: Aerial
  misc_feature: MA Experiment 20000086 PARAMETER Experiment Name: At_100uM_ABA_Mutants_cDNA_P Parameter: Treatment Value: 100uM ABA vs. No Treatment
  misc_feature: MA Experiment ID: 20000088 Result: Up-regulated in Transcription
  misc_feature: MA Experiment 20000088 PARAMETER Experiment Name: At_100uM_ABA_Mutants_cDNA_P Parameter: Plant Line Value: Landsberg
  misc_feature: MA Experiment 20000088 PARAMETER Experiment Name: At_100uM_ABA_Mutants_cDNA_P Parameter: Timepoint (hr) Value: 6
  misc_feature: MA Experiment 20000088 PARAMETER Experiment Name: At_100uM_ABA_Mutants_cDNA_P Parameter: Tissue Value: Aerial
  misc_feature: MA Experiment 20000088 PARAMETER Experiment Name: At_100uM_ABA_Mutants_cDNA_P Parameter: Treatment Value: 100uM ABA vs. No Treatment
  misc_feature: MA Experiment ID: 20000090 Result: Down-regulated in Transcription
  misc_feature: MA Experiment ID: 20000111 Result: Down-regulated in Transcription
  misc_feature: MA Experiment 20000111 PARAMETER Experiment Name: At_42deg_Heat_cDNA_P Parameter: Temperature (deg C) Value: 42 vs. 22
  misc_feature: MA Experiment 20000111 PARAMETER Experiment Name: At_42deg_Heat_cDNA_P Parameter: Timepoint (hr) Value: 6
  misc_feature: MA Experiment 20000111 PARAMETER Experiment Name: At_42deg_Heat_cDNA_P Parameter: Tissue Value: Aerial
  misc_feature: MA Experiment ID: 20000117 Result: Up-regulated in Transcription
  misc_feature: MA Experiment 20000117 PARAMETER Experiment Name: At_100uM_ABA_Mutants_cDNA_P Parameter: Plant Line Value: Columbia
  misc_feature: MA Experiment 20000117 PARAMETER Experiment Name: At_100uM_ABA_Mutants_cDNA_P Parameter: Timepoint (hr) Value: 6
  misc_feature: MA Experiment 20000117 PARAMETER Experiment Name: At_100uM_ABA_Mutants_cDNA_P Parameter: Tissue Value: Aerial
  misc_feature: MA Experiment 20000117 PARAMETER Experiment Name: At_100uM_ABA_Mutants_cDNA_P Parameter: Treatment Value: 100uM ABA vs. No Treatment
  misc_feature: MA Experiment ID: 20000144 Result: Down-regulated in Transcription
  misc_feature: MA Experiment 20000144 PARAMETER Experiment Name: At_42deg_Heat_cDNA_P Parameter: Temperature (deg C) Value: 42 vs. 22
  misc_feature: MA Experiment 20000144 PARAMETER Experiment Name: At_42deg_Heat_cDNA_P Parameter: Timepoint (hr) Value: 1
  misc_feature: MA Experiment 20000144 PARAMETER Experiment Name: At_42deg_Heat_cDNA_P Parameter: Tissue Value: Aerial
  misc_feature: MA Experiment ID: 20000169 Result: Up-regulated in Transcription
  misc_feature: MA Experiment 20000169 PARAMETER Experiment Name: At_100uM_ABA_P Parameter: Age (day) Value: 14
  misc_feature: MA Experiment 20000169 PARAMETER Experiment Name: At_100uM_ABA_P Parameter: Organism Value: A. thaliana
  misc_feature: MA Experiment 20000169 PARAMETER Experiment Name: At_100uM_ABA_P Parameter: Plant Line Value: WS
  misc_feature: MA Experiment 20000169 PARAMETER Experiment Name: At_100uM_ABA_P Parameter: Timepoint (hr) Value: 6
  misc_feature: MA Experiment 20000169 PARAMETER Experiment Name: At_100uM_ABA_P Parameter: Tissue Value: Aerial
  misc_feature: MA Experiment 20000169 PARAMETER Experiment Name: At_100uM_ABA_P Parameter: Treatment Value: 100uM ABA vs. No Treatment
  misc_feature: MA Experiment ID: 20000171 Result: Down-regulated in Transcription
  misc_feature: MA Experiment 20000171 PARAMETER Experiment Name: At_42deg_Heat_P Parameter: Age (day) Value: 14
  misc_feature: MA Experiment 20000171 PARAMETER Experiment Name: At_42deg_Heat_P Parameter: Organism Value: A. thaliana
  misc_feature: MA Experiment 20000171 PARAMETER Experiment Name: At_42deg_Heat_P Parameter: Plant Line Value: WS
  misc_feature: MA Experiment 20000171 PARAMETER Experiment Name: At_42deg_Heat_P Parameter: Temperature (deg C) Value: 42 vs. 22
  misc_feature: MA Experiment 20000171 PARAMETER Experiment Name: At_42deg_Heat_P Parameter: Timepoint (hr) Value: 1
  misc_feature: MA Experiment 20000171 PARAMETER Experiment Name: At_42deg_Heat_P Parameter: Tissue Value: Aerial
  misc_feature: MA Experiment ID: 20000173 Result: Down-regulated in Transcription
  misc_feature: MA Experiment 20000173 PARAMETER Experiment Name: At_42deg_Heat_P Parameter: Age (day) Value: 14
  misc_feature: MA Experiment 20000173 PARAMETER Experiment Name: At_42deg_Heat_P Parameter: Organism Value: A. thaliana
  misc_feature: MA Experiment 20000173 PARAMETER Experiment Name: At_42deg_Heat_P Parameter: Plant Line Value: WS
  misc_feature: MA Experiment 20000173 PARAMETER Experiment Name: At_42deg_Heat_P Parameter: Temperature (deg C) Value: 42 vs. 22
  misc_feature: MA Experiment 20000173 PARAMETER Experiment Name: At_42deg_Heat_P Parameter: Timepoint (hr) Value: 6
  misc_feature: MA Experiment 20000173 PARAMETER Experiment Name: At_42deg_Heat_P Parameter: Tissue Value: Aerial
  misc_feature: MA Experiment ID: 20000182 Result: Down-regulated in Transcription
  misc_feature: MA Experiment 20000182 PARAMETER Experiment Name: At_2mM_SA_P Parameter: Age (day) Value: 14
  misc_feature: MA Experiment 20000182 PARAMETER Experiment Name: At_2mM_SA_P Parameter: Organism Value: A. thaliana
  misc_feature: MA Experiment 20000182 PARAMETER Experiment Name: At_2mM_SA_P Parameter: Plant Line Value: WS
  misc_feature: MA Experiment 20000182 PARAMETER Experiment Name: At_2mM_SA_P Parameter: Timepoint (hr) Value: 6
  misc_feature: MA Experiment 20000182 PARAMETER Experiment Name: At_2mM_SA_P Parameter: Tissue Value: Aerial
  misc_feature: MA Experiment 20000182 PARAMETER Experiment Name: At_2mM_SA_P Parameter: Treatment Value: 2mM SA vs. No Treatment
  misc_feature: MA Experiment ID: 20000184 Result: Down-regulated in Transcription
  misc_feature: MA Experiment 20000184 PARAMETER Experiment Name: At_Shoots__P Parameter: Age (day) Value: 7
  misc_feature: MA Experiment 20000184 PARAMETER Experiment Name: At_Shoots__P Parameter: Tissue Value: Shoots vs. Whole Plant
  misc_feature: MA Experiment ID: 20000213 Result: Down-regulated in Transcription
  misc_feature: MA Experiment 20000213 PARAMETER Experiment Name: At_4deg_Cold_P Parameter: Timepoint (hr) Value: 2
  misc_feature: MA Experiment ID: 20000214 Result: Down-regulated in Transcription
  misc_feature: MA Experiment 20000214 PARAMETER Experiment Name: At_4deg_Cold_P Parameter: Timepoint (hr) Value: 6
  misc_feature: MA Experiment ID: 20000224 Result: Down-regulated in Transcription
  misc_feature: MA Experiment ID: 20000227 Result: Up-regulated in Transcription
  misc_feature: MA Experiment 20000227 PARAMETER Experiment Name: At_Root-Tips-vs-Tops_P Parameter: Tissue Value: Root Tips vs. Root Tops
  misc_feature: MA Experiment ID: 20000234 Result: Down-regulated in Transcription
  misc_feature: MA Experiment 20000234 PARAMETER Experiment Name: At_Siliques_P Parameter: Age (day) Value: 21
  misc_feature: MA Experiment 20000234 PARAMETER Experiment Name: At_Siliques_P Parameter: Organism Value: A. thaliana
  misc_feature: MA Experiment 20000234 PARAMETER Experiment Name: At_Siliques_P Parameter: Plant Line Value: WS
  misc_feature: MA Experiment 20000234 PARAMETER Experiment Name: At_Siliques_P Parameter: Tissue Value: Less Than 5mm Siliques vs. Whole Plant
  misc_feature: MA Experiment ID: 20000235 Result: Down-regulated in Transcription
  misc_feature: MA Experiment 20000235 PARAMETER Experiment Name: At_Siliques_P Parameter: Age (day) Value: 21
  misc_feature: MA Experiment 20000235 PARAMETER Experiment Name: At_Siliques_P Parameter: Organism Value: A. thaliana
  misc_feature: MA Experiment 20000235 PARAMETER Experiment Name: At_Siliques_P Parameter: Plant Line Value: WS
  misc_feature: MA Experiment 20000235 PARAMETER Experiment Name: At_Siliques_P Parameter: Tissue Value: 5-10mm Siliques vs. Whole Plant
  misc_feature: MA Experiment ID: 20000264 Result: Down-regulated in Transcription
  misc_feature: MA Experiment 20000264 PARAMETER Experiment Name: At_Open_Flower_P Parameter: Age (day) Value: 21
  misc_feature: MA Experiment 20000264 PARAMETER Experiment Name: At_Open_Flower_P Parameter: Plant Line Value: WS
  misc_feature: MA Experiment 20000264 PARAMETER Experiment Name: At_Open_Flower_P Parameter: Tissue Value: Open Flower vs. Whole Plant
  misc_feature: MA Experiment ID: 20000265 Result: Down-regulated in Transcription
  misc_feature: MA Experiment 20000265 PARAMETER Experiment Name: At_Open_Flower_P Parameter: Age (day) Value: 21
  misc_feature: MA Experiment 20000265 PARAMETER Experiment Name: At_Open_Flower_P Parameter: Plant Line Value: WS
  misc_feature: MA Experiment 20000265 PARAMETER Experiment Name: At_Open_Flower_P Parameter: Tissue Value: Closed Flower vs. Whole Plant
  misc_feature: MA Experiment ID: 20000267 Result: Down-regulated in Transcription
  misc_feature: MA Experiment 20000267 PARAMETER Experiment Name: At_Drought_P Parameter: Age (day) Value: 7
  misc_feature: MA Experiment 20000267 PARAMETER Experiment Name: At_Drought_P Parameter: Organism Value: A. thaliana
  misc_feature: MA Experiment 20000267 PARAMETER Experiment Name: At_Drought_P Parameter: Plant Line Value: WS
  misc_feature: MA Experiment 20000267 PARAMETER Experiment Name: At_Drought_P Parameter: Timepoint (hr) Value: 6
  misc_feature: MA Experiment 20000267 PARAMETER Experiment Name: At_Drought_P Parameter: Tissue Value: Whole Plant
  misc_feature: MA Experiment 20000267 PARAMETER Experiment Name: At_Drought_P Parameter: Treatment Value: Drought vs. No Drought
  misc_feature: MA Experiment ID: 20000286 Result: Down-regulated in Transcription
  misc_feature: MA Experiment 20000286 PARAMETER Experiment Name: At_Open_Flower_P Parameter: Age (day) Value: 21
  misc_feature: MA Experiment 20000286 PARAMETER Experiment Name: At_Open_Flower_P Parameter: Plant Line Value: WS
  misc_feature: MA Experiment 20000286 PARAMETER Experiment Name: At_Open_Flower_P Parameter: Tissue Value: Half Open vs. Whole Plant
  misc_feature: MA Experiment ID: 20000436 Result: Down-regulated in Transcription
  misc_feature: MA Experiment 20000436 PARAMETER Experiment Name: At_Drought_P Parameter: Age (day) Value: 7
  misc_feature: MA Experiment 20000436 PARAMETER Experiment Name: At_Drought_P Parameter: Organism Value: A. thaliana
  misc_feature: MA Experiment 20000436 PARAMETER Experiment Name: At_Drought_P Parameter: Plant Line Value: WS
  misc_feature: MA Experiment 20000436 PARAMETER Experiment Name: At_Drought_P Parameter: Timepoint (hr) Value: 12
  misc_feature: MA Experiment 20000436 PARAMETER Experiment Name: At_Drought_P Parameter: Tissue Value: Whole Plant
  misc_feature: MA Experiment 20000436 PARAMETER Experiment Name: At_Drought_P Parameter: Treatment Value: Drought vs. No Drought
  misc_feature: MA Experiment ID: 20000437 Result: Down-regulated in Transcription
  misc_feature: MA Experiment 20000437 PARAMETER Experiment Name: At_Drought_P Parameter: Age (day) Value: 8
  misc_feature: MA Experiment 20000437 PARAMETER Experiment Name: At_Drought_P Parameter: Organism Value: A. thaliana
  misc_feature: MA Experiment 20000437 PARAMETER Experiment Name: At_Drought_P Parameter: Plant Line Value: WS
  misc_feature: MA Experiment 20000437 PARAMETER Experiment Name: At_Drought_P Parameter: Timepoint (hr) Value: 24
  misc_feature: MA Experiment 20000437 PARAMETER Experiment Name: At_Drought_P Parameter: Tissue Value: Whole Plant
  misc_feature: MA Experiment 20000437 PARAMETER Experiment Name: At_Drought_P Parameter: Treatment Value: Drought vs. No Drought
  misc_feature: MA Experiment ID: 20000438 Result: Down-regulated in Transcription
  misc_feature: MA Experiment 20000438 PARAMETER Experiment Name: At_Shoots__P Parameter: Age (day) Value: 14
  misc_feature: MA Experiment 20000438 PARAMETER Experiment Name: At_Shoots__P Parameter: Tissue Value: Shoots vs. Whole Plant
  misc_feature: MA Experiment ID: 20000441 Result: Up-regulated in Transcription
  misc_feature: MA Experiment 20000441 PARAMETER Experiment Name: At_1uM_BR-BRZ__P Parameter: Tissue Value: Shoot Apices
  misc_feature: MA Experiment 20000441 PARAMETER Experiment Name: At_1uM_BR-BRZ__P Parameter: Treatment Value: 1uM BR vs. No Treatment
  misc_feature: MA Experiment ID: 20000445 Result: Up-regulated in Transcription
  misc_feature: MA Experiment 20000445 PARAMETER Experiment Name: At_100uM_NAA__P Parameter: Age (day) Value: 14
  misc_feature: MA Experiment 20000445 PARAMETER Experiment Name: At_100uM_NAA__P Parameter: Organism Value: A. thaliana
  misc_feature: MA Experiment 20000445 PARAMETER Experiment Name: At_100uM_NAA__P Parameter: Plant Line Value: WS
  misc_feature: MA Experiment 20000445 PARAMETER Experiment Name: At_100uM_NAA__P Parameter: Timepoint (hr) Value: 6
  misc_feature: MA Experiment 20000445 PARAMETER Experiment Name: At_100uM_NAA__P Parameter: Tissue Value: Aerial
  misc_feature: MA Experiment 20000445 PARAMETER Experiment Name: At_100uM_NAA__P Parameter: Treatment Value: 100uM NAA vs. No Treatment
  misc_feature: MA Experiment ID: 20000452 Result: Down-regulated in Transcription
  misc_feature: MA Experiment 20000452 PARAMETER Experiment Name: At_CS6879_Shoots-Roots_P Parameter: Age (day) Value: 14
  misc_feature: MA Experiment 20000452 PARAMETER Experiment Name: At_CS6879_Shoots-Roots_P Parameter: Organism Value: A. thaliana
  misc_feature: MA Experiment 20000452 PARAMETER Experiment Name: At_CS6879_Shoots-Roots_P Parameter: Plant Line Value: CS6879 vs. WS
  misc_feature: MA Experiment 20000452 PARAMETER Experiment Name: At_CS6879_Shoots-Roots_P Parameter: Tissue Value: Shoots
  misc_feature: MA Experiment ID: 20000453 Result: Up-regulated in Transcription
  misc_feature: MA Experiment 20000453 PARAMETER Experiment Name: At_100uM_ABA_P Parameter: Age (day) Value: 15
  misc_feature: MA Experiment 20000453 PARAMETER Experiment Name: At_100uM_ABA_P Parameter: Organism Value: A. thaliana
  misc_feature: MA Experiment 20000453 PARAMETER Experiment Name: At_100uM_ABA_P Parameter: Plant Line Value: WS
  misc_feature: MA Experiment 20000453 PARAMETER Experiment Name: At_100uM_ABA_P Parameter: Timepoint (hr) Value: 24
  misc_feature: MA Experiment 20000453 PARAMETER Experiment Name: At_100uM_ABA_P Parameter: Tissue Value: Aerial
  misc_feature: MA Experiment 20000453 PARAMETER Experiment Name: At_100uM_ABA_P Parameter: Treatment Value: 100uM ABA vs. No Treatment
  misc_feature: MA Experiment ID: 20000455 Result: Up-regulated in Transcription
  misc_feature: MA Experiment 20000455 PARAMETER Experiment Name: At_100uM_ABA_P Parameter: Age (day) Value: 16
  misc_feature: MA Experiment 20000455 PARAMETER Experiment Name: At_100uM_ABA_P Parameter: Organism Value: A. thaliana
  misc_feature: MA Experiment 20000455 PARAMETER Experiment Name: At_100uM_ABA_P Parameter: Plant Line Value: WS
  misc_feature: MA Experiment 20000455 PARAMETER Experiment Name: At_100uM_ABA_P Parameter: Timepoint (hr) Value: 48
  misc_feature: MA Experiment 20000455 PARAMETER Experiment Name: At_100uM_ABA_P Parameter: Tissue Value: Aerial
  misc_feature: MA Experiment 20000455 PARAMETER Experiment Name: At_100uM_ABA_P Parameter: Treatment Value: 100uM ABA vs. No Treatment
  misc_feature: MA Experiment ID: 20000456 Result: Down-regulated in Transcription
  misc_feature: MA Experiment 20000456 PARAMETER Experiment Name: At_100uM_BA_P Parameter: Age (day) Value: 14
  misc_feature: MA Experiment 20000456 PARAMETER Experiment Name: At_100uM_BA_P Parameter: Organism Value: A. thaliana
  misc_feature: MA Experiment 20000456 PARAMETER Experiment Name: At_100uM_BA_P Parameter: Plant Line Value: WS
  misc_feature: MA Experiment 20000456 PARAMETER Experiment Name: At_100uM_BA_P Parameter: Timepoint (hr) Value: 6
  misc_feature: MA Experiment 20000456 PARAMETER Experiment Name: At_100uM_BA_P Parameter: Tissue Value: Aerial
  misc_feature: MA Experiment 20000456 PARAMETER Experiment Name: At_100uM_BA_P Parameter: Treatment Value: 100uM BA vs. No Treatment
  misc_feature: MA Experiment ID: 20000495 Result: Up-regulated in Transcription
  misc_feature: MA Experiment 20000495 PARAMETER Experiment Name: At_Guard_Cells_P Parameter: Harvest Date Value: 8/2/2002
  misc_feature: MA Experiment 20000495 PARAMETER Experiment Name: At_Guard_Cells_P Parameter: Organism Value: A. thaliana
  misc_feature: MA Experiment 20000495 PARAMETER Experiment Name: At_Guard_Cells_P Parameter: Tissue Value: Guard Cells vs. Leaves
  misc_feature: MA Experiment ID: 20000527 Result: Down-regulated in Transcription
  misc_feature: MA Experiment 20000527 PARAMETER Experiment Name: At_10percent_PEG_P Parameter: Age (day) Value: 20
  misc_feature: MA Experiment 20000527 PARAMETER Experiment Name: At_10percent_PEG_P Parameter: Organism Value: A. thaliana
  misc_feature: MA Experiment 20000527 PARAMETER Experiment Name: At_10percent_PEG_P Parameter: Plant Line Value: WS
  misc_feature: MA Experiment 20000527 PARAMETER Experiment Name: At_10percent_PEG_P Parameter: Timepoint (day) Value: 20
  misc_feature: MA Experiment 20000527 PARAMETER Experiment Name: At_10percent_PEG_P Parameter: Tissue Value: Whole Plant
  misc_feature: MA Experiment 20000527 PARAMETER Experiment Name: At_10percent_PEG_P Parameter: Treatment Value: 10percent PEG vs. No Treatment
  misc_feature: MA Experiment ID: 20000573 Result: Up-regulated in Transcription
  misc_feature: MA Experiment 20000573 PARAMETER Experiment Name: At_100uM_ABA_Mutants__P Parameter: Organism Value: A. thaliana
  misc_feature: MA Experiment 20000573 PARAMETER Experiment Name: At_100uM_ABA_Mutants__P Parameter: Plant Line Value: CS22 vs. Ler wt
  misc_feature: MA Experiment 20000573 PARAMETER Experiment Name: At_100uM_ABA_Mutants__P Parameter: Timepoint (hr) Value: N/A
  misc_feature: MA Experiment 20000573 PARAMETER Experiment Name: At_100uM_ABA_Mutants__P Parameter: Tissue Value: Whole Plant
  misc_feature: MA Experiment 20000573 PARAMETER Experiment Name: At_100uM_ABA_Mutants__P Parameter: Treatment Value: None
  misc_feature: MA Experiment ID: 20000574 Result: Up-regulated in Transcription
  misc_feature: MA Experiment 20000574 PARAMETER Experiment Name: At_100uM_ABA_Mutants__P Parameter: Organism Value: A. thaliana
  misc_feature: MA Experiment 20000574 PARAMETER Experiment Name: At_100uM_ABA_Mutants__P Parameter: Plant Line Value: CS23 vs. Ler wt
  misc_feature: MA Experiment 20000574 PARAMETER Experiment Name: At_100uM_ABA_Mutants__P Parameter: Timepoint (hr) Value: N/A
  misc_feature: MA Experiment 20000574 PARAMETER Experiment Name: At_100uM_ABA_Mutants__P Parameter: Tissue Value: Whole Plant
  misc_feature: MA Experiment 20000574 PARAMETER Experiment Name: At_100uM_ABA_Mutants__P Parameter: Treatment Value: None
  misc_feature: MA Experiment ID: 20000794 Result: Down-regulated in Transcription
  misc_feature: MA Experiment 20000794 PARAMETER Experiment Name: At_Petals_P Parameter: Age (day) Value: 23-25 days
  misc_feature: MA Experiment 20000794 PARAMETER Experiment Name: At_Petals_P Parameter: Plant Line Value: WS
  misc_feature: MA Experiment 20000794 PARAMETER Experiment Name: At_Petals_P Parameter: Tissue Value: Petals vs. Whole plant
  misc_feature: MA Experiment ID: 20001248 Result: Up-regulated in Transcription
  misc_feature: MA Experiment 20001248 PARAMETER Experiment Name: At_Far-red-induction_P Parameter: Age (day) Value: 7
  misc_feature: MA Experiment 20001248 PARAMETER Experiment Name: At_Far-red-induction_P Parameter: Light Value: Far-red vs. White
  misc_feature: MA Experiment 20001248 PARAMETER Experiment Name: At_Far-red-induction_P Parameter: Organism Value: A. thaliana
  misc_feature: MA Experiment 20001248 PARAMETER Experiment Name: At_Far-red-induction_P Parameter: Plant Line Value: Columbia
  misc_feature: MA Experiment 20001248 PARAMETER Experiment Name: At_Far-red-induction_P Parameter: Timepoint (hr) Value: 4
  misc_feature: MA Experiment 20001248 PARAMETER Experiment Name: At_Far-red-induction_P Parameter: Tissue Value: Whole Plant
  misc_feature: MA Experiment ID: 20001450 Result: Up-regulated in Transcription
  misc_feature: MA Experiment 20001450 PARAMETER Experiment Name: At_Far-red-induction_P Parameter: Age (day) Value: 7
  misc_feature: MA Experiment 20001450 PARAMETER Experiment Name: At_Far-red-induction_P Parameter: Light Value: Far-red vs. White
  misc_feature: MA Experiment 20001450 PARAMETER Experiment Name: At_Far-red-induction_P Parameter: Organism Value: A. thaliana
  misc_feature: MA Experiment 20001450 PARAMETER Experiment Name: At_Far-red-induction_P Parameter: Plant Line Value: Columbia
  misc_feature: MA Experiment 20001450 PARAMETER Experiment Name: At_Far-red-induction_P Parameter: Timepoint (hr) Value: 8
  misc_feature: MA Experiment 20001450 PARAMETER Experiment Name: At_Far-red-induction_P Parameter: Tissue Value: Whole Plant
  misc_feature: MA Experiment ID: 20001451 Result: Up-regulated in Transcription
  misc_feature: MA Experiment 20001451 PARAMETER Experiment Name: At_Far-red-induction_P Parameter: Age (day) Value: 7
  misc_feature: MA Experiment 20001451 PARAMETER Experiment Name: At_Far-red-induction_P Parameter: Light Value: Far-red vs. White
  misc_feature: MA Experiment 20001451 PARAMETER Experiment Name: At_Far-red-induction_P Parameter: Organism Value: A. thaliana
  misc_feature: MA Experiment 20001451 PARAMETER Experiment Name: At_Far-red-induction_P Parameter: Plant Line Value: Columbia
  misc_feature: MA Experiment 20001451 PARAMETER Experiment Name: At_Far-red-induction_P Parameter: Timepoint (hr) Value: 24
  misc_feature: MA Experiment 20001451 PARAMETER Experiment Name: At_Far-red-induction_P Parameter: Tissue Value: Whole Plant
  misc_feature: MA Experiment ID: 20001503 Result: Up-regulated in Transcription
  misc_feature: MA Experiment 20001503 PARAMETER Experiment Name: At_Far-red-enriched_P Parameter: Age (day) Value: 7
  misc_feature: MA Experiment 20001503 PARAMETER Experiment Name: At_Far-red-enriched_P Parameter: Light Value: Far-red enriched vs. White
  misc_feature: MA Experiment 20001503 PARAMETER Experiment Name: At_Far-red-enriched_P Parameter: Organism Value: A. thaliana
  misc_feature: MA Experiment 20001503 PARAMETER Experiment Name: At_Far-red-enriched_P Parameter: Plant Line Value: Columbia
  misc_feature: MA Experiment 20001503 PARAMETER Experiment Name: At_Far-red-enriched_P Parameter: Timepoint (day) Value: 3
  misc_feature: MA Experiment 20001503 PARAMETER Experiment Name: At_Far-red-enriched_P Parameter: Tissue Value: Whole Plant
  misc_feature: MA Experiment ID: 20001504 Result: Up-regulated in Transcription
  misc_feature: MA Experiment 20001504 PARAMETER Experiment Name: At_Far-red-enriched_P Parameter: Age (day) Value: 10
  misc_feature: MA Experiment 20001504 PARAMETER Experiment Name: At_Far-red-enriched_P Parameter: Light Value: Far-red enriched vs. White
  misc_feature: MA Experiment 20001504 PARAMETER Experiment Name: At_Far-red-enriched_P Parameter: Organism Value: A. thaliana
  misc_feature: MA Experiment 20001504 PARAMETER Experiment Name: At_Far-red-enriched_P Parameter: Plant Line Value: Columbia
  misc_feature: MA Experiment 20001504 PARAMETER Experiment Name: At_Far-red-enriched_P Parameter: Timepoint (day) Value: 6
  misc_feature: MA Experiment 20001504 PARAMETER Experiment Name: At_Far-red-enriched_P Parameter: Tissue Value: Whole Plant
  misc_feature: MA Experiment ID: 20001554 Result: Down-regulated in Transcription
  misc_feature: MA Experiment 20001554 PARAMETER Experiment Name: At_Drought_Soil_Dry_P Parameter: Age (day) Value: 21
  misc_feature: MA Experiment 20001554 PARAMETER Experiment Name: At_Drought_Soil_Dry_P Parameter: Organism Value: A. thaliana
  misc_feature: MA Experiment 20001554 PARAMETER Experiment Name: At_Drought_Soil_Dry_P Parameter: Plant Line Value: WS
  misc_feature: MA Experiment 20001554 PARAMETER Experiment Name: At_Drought_Soil_Dry_P Parameter: Post Timepoint (hr) Value: None
  misc_feature: MA Experiment 20001554 PARAMETER Experiment Name: At_Drought_Soil_Dry_P Parameter: Post-Treatment Value: None
  misc_feature: MA Experiment 20001554 PARAMETER Experiment Name: At_Drought_Soil_Dry_P Parameter: Timepoint (day) Value: 7
  misc_feature: MA Experiment 20001554 PARAMETER Experiment Name: At_Drought_Soil_Dry_P Parameter: Treatment Value: Drought vs. No Drought
  misc_feature: MA Experiment ID: 20001555 Result: Down-regulated in Transcription
  misc_feature: MA Experiment 20001555 PARAMETER Experiment Name: At_Drought_Soil_Dry_P Parameter: Age (day) Value: 24
  misc_feature: MA Experiment 20001555 PARAMETER Experiment Name: At_Drought_Soil_Dry_P Parameter: Organism Value: A. thaliana
  misc_feature: MA Experiment 20001555 PARAMETER Experiment Name: At_Drought_Soil_Dry_P Parameter: Plant Line Value: WS
  misc_feature: MA Experiment 20001555 PARAMETER Experiment Name: At_Drought_Soil_Dry_P Parameter: Post Timepoint (hr) Value: None
  misc_feature: MA Experiment 20001555 PARAMETER Experiment Name: At_Drought_Soil_Dry_P Parameter: Post-Treatment Value: None
  misc_feature: MA Experiment 20001555 PARAMETER Experiment Name: At_Drought_Soil_Dry_P Parameter: Timepoint (day) Value: 10
  misc_feature: MA Experiment 20001555 PARAMETER Experiment Name: At_Drought_Soil_Dry_P Parameter: Treatment Value: Drought vs. No Drought
  misc_feature: MA Experiment ID: 20001560 Result: Up-regulated in Transcription
  misc_feature: MA Experiment 20001560 PARAMETER Experiment Name: At_Drought_Soil_Dry_P Parameter: Age (day) Value: 28
  misc_feature: MA Experiment 20001560 PARAMETER Experiment Name: At_Drought_Soil_Dry_P Parameter: Organism Value: A. thaliana
  misc_feature: MA Experiment 20001560 PARAMETER Experiment Name: At_Drought_Soil_Dry_P Parameter: Plant Line Value: WS
  misc_feature: MA Experiment 20001560 PARAMETER Experiment Name: At_Drought_Soil_Dry_P Parameter: Post Timepoint (hr) Value: None
  misc_feature: MA Experiment 20001560 PARAMETER Experiment Name: At_Drought_Soil_Dry_P Parameter: Post-Treatment Value: None
  misc_feature: MA Experiment 20001560 PARAMETER Experiment Name: At_Drought_Soil_Dry_P Parameter: Timepoint (day) Value: 14
  misc_feature: MA Experiment 20001560 PARAMETER Experiment Name: At_Drought_Soil_Dry_P Parameter: Treatment Value: Drought vs. No Drought
  misc_feature: MA Experiment ID: 20001761 Result: Up-regulated in Transcription
  misc_feature: MA Experiment 20001761 PARAMETER Experiment Name: At_50mM_NH4NO3_L-to-H_P Parameter: Timepoint (hr) Value: 4
  misc_feature: MA Experiment 20001761 PARAMETER Experiment Name: At_50mM_NH4NO3_L-to-H_P Parameter: Tissue Value: Siliques
  misc_feature: MA Experiment 20001761 PARAMETER Experiment Name: At_50mM_NH4NO3_L-to-H_P Parameter: Treatment Value: 50mM NH4NO3 vs 100mM Mannitol
  misc_feature: MA Experiment ID: 20001770 Result: Up-regulated in Transcription
  misc_feature: MA Experiment 20001770 PARAMETER Experiment Name: At_Far-red-enriched-adult_P Parameter: Age (day) Value: 28
  misc_feature: MA Experiment 20001770 PARAMETER Experiment Name: At_Far-red-enriched-adult_P Parameter: Light Value: Far-red enriched vs. White
  misc_feature: MA Experiment 20001770 PARAMETER Experiment Name: At_Far-red-enriched-adult_P Parameter: Organism Value: A. thaliana
  misc_feature: MA Experiment 20001770 PARAMETER Experiment Name: At_Far-red-enriched-adult_P Parameter: Plant Line Value: Columbia
  misc_feature: MA Experiment 20001770 PARAMETER Experiment Name: At_Far-red-enriched-adult_P Parameter: Timepoint (hr) Value: 8
  misc_feature: MA Experiment 20001770 PARAMETER Experiment Name: At_Far-red-enriched-adult_P Parameter: Tissue Value: Aerial
  misc_feature: MA Experiment ID: 20001771 Result: Up-regulated in Transcription
  misc_feature: MA Experiment 20001771 PARAMETER Experiment Name: At_Far-red-enriched-adult_P Parameter: Age (day) Value: 28
  misc_feature: MA Experiment 20001771 PARAMETER Experiment Name: At_Far-red-enriched-adult_P Parameter: Light Value: Far-red enriched vs. White
  misc_feature: MA Experiment 20001771 PARAMETER Experiment Name: At_Far-red-enriched-adult_P Parameter: Organism Value: A. thaliana
  misc_feature: MA Experiment 20001771 PARAMETER Experiment Name: At_Far-red-enriched-adult_P Parameter: Plant Line Value: Columbia
  misc_feature: MA Experiment 20001771 PARAMETER Experiment Name: At_Far-red-enriched-adult_P Parameter: Timepoint (hr) Value: 16
  misc_feature: MA Experiment 20001771 PARAMETER Experiment Name: At_Far-red-enriched-adult_P Parameter: Tissue Value: Aerial
  misc_feature: MA Experiment ID: 20001910 Result: Down-regulated in Transcription
  misc_feature: MA Experiment 20001910 PARAMETER Experiment Name: At_Drought_Reproduction_P Parameter: Age (day) Value: 37
  misc_feature: MA Experiment 20001910 PARAMETER Experiment Name: At_Drought_Reproduction_P Parameter: Organism Value: A. thaliana
  misc_feature: MA Experiment 20001910 PARAMETER Experiment Name: At_Drought_Reproduction_P Parameter: Plant Line Value: WS
  misc_feature: MA Experiment 20001910 PARAMETER Experiment Name: At_Drought_Reproduction_P Parameter: Timepoint (day) Value: 7
  misc_feature: MA Experiment 20001910 PARAMETER Experiment Name: At_Drought_Reproduction_P Parameter: Tissue Value: Flowers
  misc_feature: MA Experiment 20001910 PARAMETER Experiment Name: At_Drought_Reproduction_P Parameter: Treatment Value: Drought vs. No Drought

SEQ ID NO: 92434 - protein, 317 aa, Arabidopsis thaliana; identical to SEQ ID NO: 88678
  peptide (1)..(317): Ceres Seq. ID no. 12711516
  misc_feature (56)..(237): Pfam Name: Glycosyl hydrolases family 16 Pfam Description: Glycosyl hydrolases family 16
  misc_feature (29)..(317): Homolog of NCBI NO: 15236412 NR Description: xyloglucan endotransglycosylase (XTR7); protein At4g14130.1, supported by cDNA: 33554., supported by cDNA: supported by cDNA: gi_15028016 [Arabidopsis thaliana]
  misc_feature (29)..(317): Homolog of NCBI NO: 38605153 NR Description: Probable xyloglucan
  misc_feature (37)..(317): Homolog of NCBI NO: 18403867 NR Description: xyloglucan endotransglycosylase, putative; id: At3g23730.1, supported by cDNA: 10852. [Arabidopsis thaliana]
  misc_feature (37)..(317): Homolog of NCBI NO: 21536689 NR Description: xyloglucan endotransglycosylase, putative
  misc_feature (29)..(314): Homolog of NCBI NO: 543905 NR Description: Brassinosteroid-regulated protein BRU1 precursor
  misc_feature (35)..(312): Homolog of NCBI NO: 8886867 NR Description: xyloglucan endotransglycosylase XET2 [Asparagus
  misc_feature (32)..(313): Homolog of NCBI NO: 8886865 NR Description: xyloglucan endotransglycosylase XET1 [Asparagus

SEQ ID NO: 92435 - protein, 289 aa, Arabidopsis thaliana; identical to SEQ ID NO: 88679
  peptide (1)..(289): Ceres Seq. ID no. 12711517
  misc_feature (28)..(209): Pfam Name: Glycosyl hydrolases family 16 Pfam Description: Glycosyl hydrolases family 16
  misc_feature (1)..(289): Homolog of NCBI NO: 15236412 NR Description: xyloglucan endotransglycosylase (XTR7); protein At4g14130.1, supported by cDNA: 33554., supported by cDNA: supported by cDNA: gi_15028016 [Arabidopsis thaliana]
  misc_feature (1)..(289): Homolog of NCBI NO: 38605153 NR Description: Probable xyloglucan
  misc_feature (9)..(289): Homolog of NCBI NO: 18403867 NR Description: xyloglucan endotransglycosylase, putative; id: At3g23730.1, supported by cDNA: 10852. [Arabidopsis thaliana]
  misc_feature (9)..(289): Homolog of NCBI NO: 21536689 NR Description: xyloglucan endotransglycosylase, putative
  misc_feature (1)..(286): Homolog of NCBI NO: 543905 NR Description: Brassinosteroid-regulated protein BRU1 precursor
  misc_feature (7)..(284): Homolog of NCBI NO: 8886867 NR Description: xyloglucan endotransglycosylase XET2 [Asparagus
  misc_feature (4)..(285): Homolog of NCBI NO: 8886865 NR Description: xyloglucan endotransglycosylase XET1 [Asparagus

SEQ ID NO: 92436 - protein, 241 aa, Arabidopsis thaliana; identical to SEQ ID NO: 88680
  peptide (1)..(241): Ceres Seq. ID no. 12711518
  misc_feature (1)..(161): Pfam Name: Glycosyl hydrolases family 16 Pfam Description: Glycosyl hydrolases family 16
  misc_feature (1)..(241): Homolog of NCBI NO: 15236412 NR Description: xyloglucan endotransglycosylase (XTR7); protein At4g14130.1, supported by cDNA: 33554., supported by cDNA: supported by cDNA: gi_15028016 [Arabidopsis thaliana]
  misc_feature (1)..(241): Homolog of NCBI NO: 38605153 NR Description: Probable xyloglucan
  misc_feature (1)..(241): Homolog of NCBI NO: 18403867 NR Description: xyloglucan endotransglycosylase, putative; id: At3g23730.1, supported by cDNA: 10852. [Arabidopsis thaliana]
  misc_feature (1)..(241): Homolog of NCBI NO: 21536689 NR Description: xyloglucan endotransglycosylase, putative
  misc_feature (1)..(238): Homolog of NCBI NO: 543905 NR Description: Brassinosteroid-regulated protein BRU1 precursor
  misc_feature (1)..(236): Homolog of NCBI NO: 8886867 NR Description: xyloglucan endotransglycosylase XET2 [Asparagus
  misc_feature (1)..(237): Homolog of NCBI NO: 8886865 NR Description: xyloglucan endotransglycosylase XET1 [Asparagus

SEQ ID NO: 92437 - DNA, 1434 bp, Arabidopsis thaliana; identical to SEQ ID NO: 88681
  misc_feature (1)..(1434): Ceres Seq. ID no. 12711531
  misc_feature: MA Experiment ID: 20000327 Result: Up-regulated in Transcription
  misc_feature: MA Experiment 20000327 PARAMETER Experiment Name: At_42deg_Heat_Sub_P Parameter: Age (day) Value: 14
  misc_feature: MA Experiment 20000327 PARAMETER Experiment Name: At_42deg_Heat_Sub_P Parameter: Organism Value: A. thaliana
  misc_feature: MA Experiment 20000327 PARAMETER Experiment Name: At_42deg_Heat_Sub_P Parameter: Plant Line Value: WS
  misc_feature: MA Experiment 20000327 PARAMETER Experiment Name: At_42deg_Heat_Sub_P Parameter: Temperature (deg C) Value: 42 vs. 22
  misc_feature: MA Experiment 20000327 PARAMETER Experiment Name: At_42deg_Heat_Sub_P Parameter: Timepoint (hr) Value: 1
  misc_feature: MA Experiment 20000327 PARAMETER Experiment Name: At_42deg_Heat_Sub_P Parameter: Tissue Value: Aerial

SEQ ID NO: 92438 - protein, 477 aa, Arabidopsis thaliana; identical to SEQ ID NO: 88682
  peptide (1)..(477): Ceres Seq. ID no. 12711532
  misc_feature (99)..(133): Pfam Name: PPR repeat Pfam Description: PPR repeat
  misc_feature (201)..(477): Homolog of NCBI NO: 15236432 NR Description: hypothetical protein; protein id: At4g14170.1
  misc_feature (20)..(412): Homolog of NCBI NO: 15236432 NR Description: hypothetical protein; protein id: At4g14170.1
  misc_feature (179)..(477): Homolog of NCBI NO: 15239745 NR Description: selenium-binding protein-like; protein id:
  misc_feature (12)..(226): Homolog of NCBI NO: 15239745 NR Description: selenium-binding protein-like; protein id:
  misc_feature (53)..(477): Homolog of NCBI NO: 18483237 NR Description: putative vegetative storage protein [Sorghum
  misc_feature (8)..(477): Homolog of NCBI NO: 38175558 NR Description: putative pentatricopeptide (PPR)
  misc_feature (51)..(477): Homolog of NCBI NO: 15226150 NR Description: hypothetical protein; protein id: At2g33680.1
  misc_feature (24)..(477): Homolog of NCBI NO: 15226299 NR Description: hypothetical protein; protein id: At2g01510.1
  misc_feature (9)..(477): Homolog of NCBI NO: 34906110 NR Description: P0020E09.15 [Oryza sativa (japonica
  misc_feature (51)..(477): Homolog of NCBI NO: 15231358 NR Description: hypothetical protein; protein id: At3g13770.1

SEQ ID NO: 92439 - protein, 458 aa, Arabidopsis thaliana; identical to SEQ ID NO: 88683
  peptide (1)..(458): Ceres Seq. ID no. 12711533
  misc_feature (80)..(114): Pfam Name: PPR repeat Pfam Description: PPR repeat
  misc_feature (182)..(458): Homolog of NCBI NO: 15236432 NR Description: hypothetical protein; protein id: At4g14170.1
  misc_feature (1)..(393): Homolog of NCBI NO: 15236432 NR Description: hypothetical protein; protein id: At4g14170.1
  misc_feature (160)..(458): Homolog of NCBI NO: 15239745 NR Description: selenium-binding protein-like; protein id:
  misc_feature (1)..(207): Homolog of NCBI NO: 15239745 NR Description: selenium-binding protein-like; protein id:
  misc_feature (34)..(458): Homolog of NCBI NO: 18483237 NR Description: putative vegetative storage protein [Sorghum
  misc_feature (1)..(458): Homolog of NCBI NO: 38175558 NR Description: putative pentatricopeptide (PPR)
  misc_feature (32)..(458): Homolog of NCBI NO: 15226150 NR Description: hypothetical protein; protein id: At2g33680.1
  misc_feature (5)..(458): Homolog of NCBI NO: 15226299 NR Description: hypothetical protein; protein id: At2g01510.1
  misc_feature (1)..(458): Homolog of NCBI NO: 34906110 NR Description: P0020E09.15 [Oryza sativa (japonica
  misc_feature (32)..(458): Homolog of NCBI NO: 15231358 NR Description: hypothetical protein; protein id: At3g13770.1

SEQ ID NO: 92440 - protein, 385 aa, Arabidopsis thaliana; identical to SEQ ID NO: 88684
  peptide (1)..(385): Ceres Seq. ID no. 12711534
  misc_feature (7)..(41): Pfam Name: PPR repeat Pfam Description: PPR repeat
  misc_feature (109)..(385): Homolog of NCBI NO: 15236432 NR Description: hypothetical protein; protein id: At4g14170.1
  misc_feature (1)..(320): Homolog of NCBI NO: 15236432 NR Description: hypothetical protein; protein id: At4g14170.1
  misc_feature (87)..(385): Homolog of NCBI NO: 15239745 NR Description: selenium-binding protein-like; protein id:
  misc_feature (1)..(134): Homolog of NCBI NO: 15239745 NR Description: selenium-binding protein-like; protein id:
  misc_feature (1)..(385): Homolog of NCBI NO: 18483237 NR Description: putative vegetative storage protein [Sorghum
  misc_feature (1)..(385): Homolog of NCBI NO: 38175558 NR Description: putative pentatricopeptide (PPR)
  misc_feature (1)..(385): Homolog of NCBI NO: 15226150 NR Description: hypothetical protein; protein id: At2g33680.1
  misc_feature (1)..(385): Homolog of NCBI NO: 15226299 NR Description: hypothetical protein; protein id: At2g01510.1
  misc_feature (1)..(385): Homolog of NCBI NO: 34906110 NR Description: P0020E09.15 [Oryza sativa (japonica
  misc_feature (1)..(385): Homolog of NCBI NO: 15231358 NR Description: hypothetical protein; protein id: At3g13770.1

SEQ ID NO: 92441 - DNA, 687 bp, Arabidopsis thaliana; identical to SEQ ID NO: 88685
  misc_feature (1)..(687): Ceres Seq. ID no. 12711546
  misc_feature: MA Experiment ID: 20000169 Result: Up-regulated in Transcription
  misc_feature: MA Experiment 20000169 PARAMETER Experiment Name: At_100uM_ABA_P Parameter: Age (day) Value: 14
  misc_feature: MA Experiment 20000169 PARAMETER Experiment Name: At_100uM_ABA_P Parameter: Organism Value: A. thaliana
  misc_feature: MA Experiment 20000169 PARAMETER Experiment Name: At_100uM_ABA_P Parameter: Plant Line Value: WS
  misc_feature: MA Experiment 20000169 PARAMETER Experiment Name: At_100uM_ABA_P Parameter: Timepoint (hr) Value: 6
  misc_feature: MA Experiment 20000169 PARAMETER Experiment Name: At_100uM_ABA_P Parameter: Tissue Value: Aerial
  misc_feature: MA Experiment 20000169 PARAMETER Experiment Name: At_100uM_ABA_P Parameter: Treatment Value: 100uM ABA vs. No Treatment
  misc_feature: MA Experiment ID: 20000171 Result: Up-regulated in Transcription
  misc_feature: MA Experiment 20000171 PARAMETER Experiment Name: At_42deg_Heat_P Parameter: Age (day) Value: 14
  misc_feature: MA Experiment 20000171 PARAMETER Experiment Name: At_42deg_Heat_P Parameter: Organism Value: A. thaliana
  misc_feature: MA Experiment 20000171 PARAMETER Experiment Name: At_42deg_Heat_P Parameter: Plant Line Value: WS
  misc_feature: MA Experiment 20000171 PARAMETER Experiment Name: At_42deg_Heat_P Parameter: Temperature (deg C) Value: 42 vs. 22
  misc_feature: MA Experiment 20000171 PARAMETER Experiment Name: At_42deg_Heat_P Parameter: Timepoint (hr) Value: 1
  misc_feature: MA Experiment 20000171 PARAMETER Experiment Name: At_42deg_Heat_P Parameter: Tissue Value: Aerial
  misc_feature: MA Experiment ID: 20000179 Result: Up-regulated in Transcription
  misc_feature: MA Experiment 20000179 PARAMETER Experiment Name: At_Germinating_Seeds_P Parameter: Age (hr) Value: 6 vs. 0
  misc_feature: MA Experiment 20000179 PARAMETER Experiment Name: At_Germinating_Seeds_P Parameter: Tissue Value: Germinating Seeds
  misc_feature: MA Experiment ID: 20000214 Result: Down-regulated in Transcription
  misc_feature: MA Experiment 20000214 PARAMETER Experiment Name: At_4deg_Cold_P Parameter: Timepoint (hr) Value: 6
  misc_feature: MA Experiment ID: 20000227 Result: Down-regulated in Transcription
  misc_feature: MA Experiment 20000227 PARAMETER Experiment Name: At_Root-Tips-vs-Tops_P Parameter: Tissue Value: Root Tips vs. Root Tops
  misc_feature: MA Experiment ID: 20000234 Result: Down-regulated in Transcription
  misc_feature: MA Experiment 20000234 PARAMETER Experiment Name: At_Siliques_P Parameter: Age (day) Value: 21
  misc_feature: MA Experiment 20000234 PARAMETER Experiment Name: At_Siliques_P Parameter: Organism Value: A. thaliana
  misc_feature: MA Experiment 20000234 PARAMETER Experiment Name: At_Siliques_P Parameter: Plant Line Value: WS
  misc_feature: MA Experiment 20000234 PARAMETER Experiment Name: At_Siliques_P Parameter: Tissue Value: Less Than 5mm Siliques vs. Whole Plant
  misc_feature: MA Experiment ID: 20000267 Result: Up-regulated in Transcription
  misc_feature: MA Experiment 20000267 PARAMETER Experiment Name: At_Drought_P Parameter: Age (day) Value: 7
  misc_feature: MA Experiment 20000267 PARAMETER Experiment Name: At_Drought_P Parameter: Organism Value: A. thaliana
  misc_feature: MA Experiment 20000267 PARAMETER Experiment Name: At_Drought_P Parameter: Plant Line Value: WS
  misc_feature: MA Experiment 20000267 PARAMETER Experiment Name: At_Drought_P Parameter: Timepoint (hr) Value: 6
  misc_feature: MA Experiment 20000267 PARAMETER Experiment Name: At_Drought_P Parameter: Tissue Value: Whole Plant
  misc_feature: MA Experiment 20000267 PARAMETER Experiment Name: At_Drought_P Parameter: Treatment Value: Drought vs. No Drought
  misc_feature: MA Experiment ID: 20000286 Result: Down-regulated in Transcription
  misc_feature: MA Experiment 20000286 PARAMETER Experiment Name: At_Open_Flower_P Parameter: Age (day) Value: 21
  misc_feature: MA Experiment 20000286 PARAMETER Experiment Name: At_Open_Flower_P Parameter: Plant Line Value: WS
  misc_feature: MA Experiment 20000286 PARAMETER Experiment Name: At_Open_Flower_P Parameter: Tissue Value: Half Open vs. Whole Plant
  misc_feature: MA Experiment ID: 20000437 Result: Up-regulated in Transcription
  misc_feature: MA Experiment 20000437 PARAMETER Experiment Name: At_Drought_P Parameter: Age (day) Value: 8
  misc_feature: MA Experiment 20000437 PARAMETER Experiment Name: At_Drought_P Parameter: Organism Value: A. thaliana
  misc_feature: MA Experiment 20000437 PARAMETER Experiment Name: At_Drought_P Parameter: Plant Line Value: WS
  misc_feature: MA Experiment 20000437 PARAMETER Experiment Name: At_Drought_P Parameter: Timepoint (hr) Value: 24
  misc_feature: MA Experiment 20000437 PARAMETER Experiment Name: At_Drought_P Parameter: Tissue Value: Whole Plant
  misc_feature: MA Experiment 20000437 PARAMETER Experiment Name: At_Drought_P Parameter: Treatment Value: Drought vs. No Drought
  misc_feature: MA Experiment ID: 20000453 Result: Up-regulated in Transcription
  misc_feature: MA Experiment 20000453 PARAMETER Experiment Name: At_100uM_ABA_P Parameter: Age (day) Value: 15
  misc_feature: MA Experiment 20000453 PARAMETER Experiment Name: At_100uM_ABA_P Parameter: Organism Value: A. thaliana
  misc_feature: MA Experiment 20000453 PARAMETER Experiment Name: At_100uM_ABA_P Parameter: Plant Line Value: WS
  misc_feature: MA Experiment 20000453 PARAMETER Experiment Name: At_100uM_ABA_P Parameter: Timepoint (hr) Value: 24
  misc_feature: MA Experiment 20000453 PARAMETER Experiment Name: At_100uM_ABA_P Parameter: Tissue Value: Aerial
  misc_feature: MA Experiment 20000453 PARAMETER Experiment Name: At_100uM_ABA_P Parameter: Treatment Value: 100uM ABA vs. No Treatment
  misc_feature: MA Experiment ID: 20000794 Result: Down-regulated in Transcription
  misc_feature: MA Experiment 20000794 PARAMETER Experiment Name: At_Petals_P Parameter: Age (day) Value: 23-25 days
  misc_feature: MA Experiment 20000794 PARAMETER Experiment Name: At_Petals_P Parameter: Plant Line Value: WS
  misc_feature: MA Experiment 20000794 PARAMETER Experiment Name: At_Petals_P Parameter: Tissue Value: Petals vs. Whole plant
  misc_feature: MA Experiment ID: 20001459 Result: Down-regulated in Transcription
  misc_feature: MA Experiment 20001459 PARAMETER Experiment Name: At_50mM_NH4NO3_L-to-H_P Parameter: Age (day) Value: Undefined
  misc_feature: MA Experiment 20001459 PARAMETER Experiment Name: At_50mM_NH4NO3_L-to-H_P Parameter: Organism Value: Undefined
  misc_feature: MA Experiment 20001459 PARAMETER Experiment Name: At_50mM_NH4NO3_L-to-H_P Parameter: Plant Line Value: Undefined
  misc_feature: MA Experiment 20001459 PARAMETER Experiment Name: At_50mM_NH4NO3_L-to-H_P Parameter: Timepoint (hr) Value: 4
  misc_feature: MA Experiment 20001459 PARAMETER Experiment Name: At_50mM_NH4NO3_L-to-H_P Parameter: Tissue Value: Siliques
  misc_feature: MA Experiment 20001459 PARAMETER Experiment Name: At_50mM_NH4NO3_L-to-H_P Parameter: Treatment Value: 50mM NH4NO3 vs. 100mM Manitol
  misc_feature: MA Experiment ID: 20001554 Result: Up-regulated in Transcription
  misc_feature: MA Experiment 20001554 PARAMETER Experiment Name: At_Drought_Soil_Dry_P Parameter: Age (day) Value: 21
  misc_feature: MA Experiment 20001554 PARAMETER Experiment Name: At_Drought_Soil_Dry_P Parameter: Organism Value: A. thaliana
  misc_feature: MA Experiment 20001554 PARAMETER Experiment Name: At_Drought_Soil_Dry_P Parameter: Plant Line Value: WS
  misc_feature: MA Experiment 20001554 PARAMETER Experiment Name: At_Drought_Soil_Dry_P Parameter: Post Timepoint (hr) Value: None
  misc_feature: MA Experiment 20001554 PARAMETER Experiment Name: At_Drought_Soil_Dry_P Parameter: Post-Treatment Value: None
  misc_feature: MA Experiment 20001554 PARAMETER Experiment Name: At_Drought_Soil_Dry_P Parameter: Timepoint (day) Value: 7
  misc_feature: MA Experiment 20001554 PARAMETER Experiment Name: At_Drought_Soil_Dry_P Parameter: Treatment Value: Drought vs. No Drought
  misc_feature: MA Experiment ID: 20001555 Result: Up-regulated in Transcription
  misc_feature: MA Experiment 20001555 PARAMETER Experiment Name: At_Drought_Soil_Dry_P Parameter: Age (day) Value: 24
  misc_feature: MA Experiment 20001555 PARAMETER Experiment Name: At_Drought_Soil_Dry_P Parameter: Organism Value: A. thaliana
  misc_feature: MA Experiment 20001555 PARAMETER Experiment Name: At_Drought_Soil_Dry_P Parameter: Plant Line Value: WS
  misc_feature: MA Experiment 20001555 PARAMETER Experiment Name: At_Drought_Soil_Dry_P Parameter: Post Timepoint (hr) Value: None
  misc_feature: MA Experiment 20001555 PARAMETER Experiment Name: At_Drought_Soil_Dry_P Parameter: Post-Treatment Value: None
  misc_feature: MA Experiment 20001555 PARAMETER Experiment Name: At_Drought_Soil_Dry_P Parameter: Timepoint (day) Value: 10
  misc_feature: MA Experiment 20001555 PARAMETER Experiment Name: At_Drought_Soil_Dry_P Parameter: Treatment Value: Drought vs. No Drought
  misc_feature: MA Experiment ID: 20001556 Result: Up-regulated in Transcription
  misc_feature: MA Experiment 20001556 PARAMETER Experiment Name: At_Drought_Soil_Dry_P Parameter: Age (day) Value: 26
  misc_feature: MA Experiment 20001556 PARAMETER Experiment Name: At_Drought_Soil_Dry_P Parameter: Organism Value: A. thaliana
  misc_feature: MA Experiment 20001556 PARAMETER Experiment Name: At_Drought_Soil_Dry_P Parameter: Plant Line Value: WS
  misc_feature: MA Experiment 20001556 PARAMETER Experiment Name: At_Drought_Soil_Dry_P Parameter: Post Timepoint (hr) Value: None
  misc_feature: MA Experiment 20001556 PARAMETER Experiment Name: At_Drought_Soil_Dry_P Parameter: Post-Treatment Value: None
  misc_feature: MA Experiment 20001556 PARAMETER Experiment Name: At_Drought_Soil_Dry_P Parameter: Timepoint (day) Value: 12
  misc_feature: MA Experiment 20001556 PARAMETER Experiment Name: At_Drought_Soil_Dry_P Parameter: Treatment Value: Drought vs. No Drought
  misc_feature: MA Experiment ID: 20001557 Result: Down-regulated in Transcription
  misc_feature: MA Experiment 20001557 PARAMETER Experiment Name: At_Drought_Soil_Dry_P Parameter: Age (day) Value: 27
  misc_feature: MA Experiment 20001557 PARAMETER Experiment Name: At_Drought_Soil_Dry_P Parameter: Organism Value: A. thaliana
  misc_feature: MA Experiment 20001557 PARAMETER Experiment Name: At_Drought_Soil_Dry_P Parameter: Plant Line Value: WS
  misc_feature: MA Experiment 20001557 PARAMETER Experiment Name: At_Drought_Soil_Dry_P Parameter: Post Timepoint (hr) Value: 3
  misc_feature: MA Experiment 20001557 PARAMETER Experiment Name: At_Drought_Soil_Dry_P Parameter: Post-Treatment Value: Re-Water vs. No Drought
  misc_feature: MA Experiment 20001557 PARAMETER Experiment Name: At_Drought_Soil_Dry_P Parameter: Timepoint (day) Value: 13
  misc_feature: MA Experiment 20001557 PARAMETER Experiment Name: At_Drought_Soil_Dry_P Parameter: Treatment Value: Drought vs. No Drought
  misc_feature: MA Experiment ID: 20001558 Result: Down-regulated in Transcription
  misc_feature: MA Experiment 20001558 PARAMETER Experiment Name: At_Drought_Soil_Dry_P Parameter: Age (day) Value: 27
  misc_feature: MA Experiment 20001558 PARAMETER Experiment Name: At_Drought_Soil_Dry_P Parameter: Organism Value: A. thaliana
  misc_feature: MA Experiment 20001558 PARAMETER Experiment Name: At_Drought_Soil_Dry_P Parameter: Plant Line Value: WS
  misc_feature: MA Experiment 20001558 PARAMETER Experiment Name: At_Drought_Soil_Dry_P Parameter: Post Timepoint (hr) Value: 6
  misc_feature: MA Experiment 20001558 PARAMETER Experiment Name: At_Drought_Soil_Dry_P Parameter: Post-Treatment Value: Re-Water vs. No Drought
  misc_feature: MA Experiment 20001558 PARAMETER Experiment Name: At_Drought_Soil_Dry_P Parameter: Timepoint (day) Value: 13
  misc_feature: MA Experiment 20001558 PARAMETER Experiment Name: At_Drought_Soil_Dry_P Parameter: Treatment Value: Drought vs. No Drought
  misc_feature: MA Experiment ID: 20001560 Result: Down-regulated in Transcription
  misc_feature: MA Experiment 20001560 PARAMETER Experiment Name: At_Drought_Soil_Dry_P Parameter: Age (day) Value: 28
  misc_feature: MA Experiment 20001560 PARAMETER Experiment Name: At_Drought_Soil_Dry_P Parameter: Organism Value: A. thaliana
  misc_feature: MA Experiment 20001560 PARAMETER Experiment Name: At_Drought_Soil_Dry_P Parameter: Plant Line Value: WS
  misc_feature: MA Experiment 20001560 PARAMETER Experiment Name: At_Drought_Soil_Dry_P Parameter: Post Timepoint (hr) Value: None
  misc_feature: MA Experiment 20001560 PARAMETER Experiment Name: At_Drought_Soil_Dry_P Parameter: Post-Treatment Value: None
  misc_feature: MA Experiment 20001560 PARAMETER Experiment Name: At_Drought_Soil_Dry_P Parameter: Timepoint (day) Value: 14
  misc_feature: MA Experiment 20001560 PARAMETER Experiment Name: At_Drought_Soil_Dry_P Parameter: Treatment Value: Drought vs. No Drought

SEQ ID NO: 92442 - protein, 143 aa, Arabidopsis thaliana; identical to SEQ ID NO: 21510
  peptide (1)..(143): Ceres Seq. ID no. 12711547
  misc_feature (1)..(143): Homolog of NCBI NO: 18414176 NR Description: Expressed protein; protein id: At4g14270.1, by cDNA: 30129., supported by cDNA: gi_15028002, supported by gi_20259214 [Arabidopsis thaliana] >gi|15028003|gb|AAK76532.1|
  misc_feature (1)..(143): Homolog of NCBI NO: 21592596 NR Description: unknown [Arabidopsis thaliana]
  misc_feature (1)..(124): Homolog of NCBI NO: 7485087 NR Description: hypothetical protein - Arabidopsis thaliana hypothetical protein [Arabidopsis thaliana]
  misc_feature (10)..(110): Homolog of NCBI NO: 8489786 NR Description: dehydration-induced protein ERD15 [Lycopersicon
  misc_feature (3)..(71): Homolog of NCBI NO: 15227351 NR Description: ERD15 protein; protein id: At2g41430.1, supported cDNA: 31388., supported by cDNA: gi_13926319, supported by cDNA: supported by cDNA: gi_17473678, supported by cDNA:
  misc_feature (3)..(63): Homolog of NCBI NO: 21592689 NR Description: ERD15 protein [Arabidopsis thaliana]
  misc_feature (9)..(91): Homolog of NCBI NO: 34395186 NR Description: unknown protein [Oryza sativa (japonica
  misc_feature (9)..(91): Homolog of NCBI NO: 34899128 NR Description: P0496C02.30 [Oryza sativa (japonica

SEQ ID NO: 92443 - protein, 78 aa, Arabidopsis thaliana; identical to SEQ ID NO: 21511
  peptide (1)..(78): Ceres Seq. ID no. 12711548
  misc_feature (1)..(78): Homolog of NCBI NO: 18414176 NR Description: Expressed protein; protein id: At4g14270.1, by cDNA: 30129., supported by cDNA: gi_15028002, supported by gi_20259214 [Arabidopsis thaliana] >gi|15028003|gb|AAK76532.1|
  misc_feature (1)..(78): Homolog of NCBI NO: 21592596 NR Description: unknown [Arabidopsis thaliana]
  misc_feature (1)..(59): Homolog of NCBI NO: 7485087 NR Description: hypothetical protein - Arabidopsis thaliana hypothetical protein [Arabidopsis thaliana]
  misc_feature (1)..(45): Homolog of NCBI NO: 8489786 NR Description: dehydration-induced protein ERD15 [Lycopersicon
  misc_feature (1)..(26): Homolog of NCBI NO: 34395186 NR Description: unknown protein [Oryza sativa (japonica
  misc_feature (1)..(26): Homolog of NCBI NO: 34899128 NR Description: P0496C02.30 [Oryza sativa (japonica

SEQ ID NO: 92444 - protein, 71 aa, Arabidopsis thaliana; identical to SEQ ID NO: 21512
  peptide (1)..(71): Ceres Seq. ID no. 12711549
  misc_feature (1)..(71): Homolog of NCBI NO: 18414176 NR Description: Expressed protein; protein id: At4g14270.1, by cDNA: 30129., supported by cDNA: gi_15028002, supported by gi_20259214 [Arabidopsis thaliana] >gi|15028003|gb|AAK76532.1|
  misc_feature (1)..(71): Homolog of NCBI NO: 21592596 NR Description: unknown [Arabidopsis thaliana]
  misc_feature (1)..(52): Homolog of NCBI NO: 7485087 NR Description: hypothetical protein - Arabidopsis thaliana hypothetical protein [Arabidopsis thaliana]
  misc_feature (1)..(38): Homolog of NCBI NO: 8489786 NR Description: dehydration-induced protein ERD15 [Lycopersicon
  misc_feature (1)..(19): Homolog of NCBI NO: 34395186 NR Description: unknown protein [Oryza sativa (japonica
  misc_feature (1)..(19): Homolog of NCBI NO: 34899128 NR Description: P0496C02.30 [Oryza sativa (japonica

SEQ ID NO: 92445 - DNA, 558 bp, Arabidopsis thaliana; identical to SEQ ID NO: 88689
  misc_feature (1)..(558): Ceres Seq. ID no. 12711560
  misc_feature: MA Experiment ID: 20000185 Result: Up-regulated in Transcription
  misc_feature: MA Experiment 20000185 PARAMETER Experiment Name: At_Roots__P Parameter: Age (day) Value: 7 vs. 21
  misc_feature: MA Experiment 20000185 PARAMETER Experiment Name: At_Roots__P Parameter: Organism Value: A. thaliana
  misc_feature: MA Experiment 20000185 PARAMETER Experiment Name: At_Roots__P Parameter: Tissue Value: Roots vs. Whole Plant

SEQ ID NO: 92446 - protein, 185 aa, Arabidopsis thaliana; identical to SEQ ID NO: 88690
  peptide (1)..(185): Ceres Seq. ID no. 12711561
  misc_feature (111)..(179): Pfam Name: Mpv17 / PMP22 family Pfam Description: Mpv17 / PMP22 family
  misc_feature (28)..(185): Homolog of NCBI NO: 30682784 NR Description: expressed protein [Arabidopsis thaliana]
  misc_feature (6)..(179): Homolog of NCBI NO: 15233520 NR Description: PEROXISOMAL MEMBRANE PROTEIN PMP22; protein id: [Arabidopsis thaliana] >gi|11282649|pir||T51590 membrane protein,
  misc_feature (28)..(165): Homolog of NCBI NO: 7485192 NR Description: hypothetical protein d13195c - Arabidopsis >gi|2244787|emb|CAB10210.1| hypothetical protein [Arabidopsis >gi|7268136|emb|CAB78473.1| hypothetical protein [Arabidopsis
  misc_feature (47)..(174): Homolog of NCBI NO: 15230132 NR Description: unknown protein; protein id: At3g24570.1 thaliana] >gi|9294052|dbj|BAB02009.1|
  misc_feature (9)..(56): Homolog of NCBI NO: 15230132 NR Description: unknown protein; protein id: At3g24570.1 thaliana] >gi|9294052|dbj|BAB02009.1|
  misc_feature (47)..(174): Homolog of NCBI NO: 38454114 NR Description: At3g24570 [Arabidopsis thaliana]
  misc_feature (9)..(56): Homolog of NCBI NO: 38454114 NR Description: At3g24570 [Arabidopsis thaliana]
  misc_feature (1)..(173): Homolog of NCBI NO: 10954089 NR Description: 22 kDa peroxisomal membrane protein PMP22 [Mus >gi|12833578|dbj|BAB22578.1| unnamed protein product [Mus
  misc_feature (1)..(173): Homolog of NCBI NO: 6679577 NR Description: peroxisomal membrane protein 2; peroxisomal protein 2, 22 kDa [Mus musculus] >gi|1172540|sp|P42925|PMP2_MOUSE kDa peroxisomal membrane protein (Peroxisomal membrane protein 2)
  misc_feature (47)..(174): Homolog of NCBI NO: 34904256 NR Description: P0452F10.16 [Oryza sativa (japonica

SEQ ID NO: 92447 - protein, 129 aa, Arabidopsis thaliana; identical to SEQ ID NO: 88691
  peptide (1)..(129): Ceres Seq. ID no. 12711562
  misc_feature (55)..(123): Pfam Name: Mpv17 / PMP22 family Pfam Description: Mpv17 / PMP22 family
  misc_feature (1)..(129): Homolog of NCBI NO: 30682784 NR Description: expressed protein [Arabidopsis thaliana]
  misc_feature (1)..(123): Homolog of NCBI NO: 15233520 NR Description: PEROXISOMAL MEMBRANE PROTEIN PMP22; protein id: [Arabidopsis thaliana] >gi|11282649|pir||T51590 membrane protein,
  misc_feature (1)..(109): Homolog of NCBI NO: 7485192 NR Description: hypothetical protein d13195c - Arabidopsis >gi|2244787|emb|CAB10210.1| hypothetical protein [Arabidopsis >gi|7268136|emb|CAB78473.1| hypothetical protein [Arabidopsis
  misc_feature (1)..(118): Homolog of NCBI NO: 15230132 NR Description: unknown protein; protein id: At3g24570.1 thaliana] >gi|9294052|dbj|BAB02009.1|
  misc_feature (1)..(118): Homolog of NCBI NO: 38454114 NR Description: At3g24570 [Arabidopsis thaliana]
  misc_feature (1)..(117): Homolog of NCBI NO: 10954089 NR Description: 22 kDa peroxisomal membrane protein PMP22 [Mus >gi|12833578|dbj|BAB22578.1| unnamed protein product [Mus
  misc_feature (1)..(117): Homolog of NCBI NO: 6679577 NR Description: peroxisomal membrane protein 2; peroxisomal protein 2, 22 kDa [Mus musculus] >gi|1172540|sp|P42925|PMP2_MOUSE kDa peroxisomal membrane protein (Peroxisomal membrane protein 2)
  misc_feature (1)..(118): Homolog of NCBI NO: 34904256 NR Description: P0452F10.16 [Oryza sativa (japonica
  misc_feature (1)..(117): Homolog of NCBI NO: 13928796 NR Description: peroxisomal membrane protein 2; peroxisomal protein 2, 22 kDa [Rattus norvegicus]
  misc_feature (1)..(121): Homolog of NCBI NO: 6678926 NR Description: Mpv17 transgene, kidney disease mutant [Mus >gi|127297|sp|P19258|MPV1_MOUSE MPV17 PROTEIN

SEQ ID NO: 92448 - protein, 111 aa, Arabidopsis thaliana; identical to SEQ ID NO: 88692
  peptide (1)..(111): Ceres Seq. ID no. 12711563
  misc_feature (37)..(105): Pfam Name: Mpv17 / PMP22 family Pfam Description: Mpv17 / PMP22 family
  misc_feature (1)..(111): Homolog of NCBI NO: 30682784 NR Description: expressed protein [Arabidopsis thaliana]
  misc_feature (1)..(105): Homolog of NCBI NO: 15233520 NR Description: PEROXISOMAL MEMBRANE PROTEIN PMP22; protein id: [Arabidopsis thaliana] >gi|11282649|pir||T51590 membrane protein,
  misc_feature (1)..(91): Homolog of NCBI NO: 7485192 NR Description: hypothetical protein d13195c - Arabidopsis >gi|2244787|emb|CAB10210.1| hypothetical protein [Arabidopsis >gi|7268136|emb|CAB78473.1| hypothetical protein [Arabidopsis
  misc_feature (1)..(100): Homolog of NCBI NO: 15230132 NR Description: unknown protein; protein id: At3g24570.1 thaliana] >gi|9294052|dbj|BAB02009.1|
  misc_feature (1)..(100): Homolog of NCBI NO: 38454114 NR Description: At3g24570 [Arabidopsis thaliana]
  misc_feature (1)..(99): Homolog of NCBI NO: 10954089 NR Description: 22 kDa peroxisomal membrane protein PMP22 [Mus >gi|12833578|dbj|BAB22578.1| unnamed protein product [Mus
  misc_feature (1)..(99): Homolog of NCBI NO: 6679577 NR Description: peroxisomal membrane protein 2; peroxisomal protein 2, 22 kDa [Mus musculus] >gi|1172540|sp|P42925|PMP2_MOUSE kDa peroxisomal membrane protein (Peroxisomal membrane protein 2)
  misc_feature (1)..(100): Homolog of NCBI NO: 34904256 NR Description: P0452F10.16 [Oryza sativa (japonica
  misc_feature (1)..(99): Homolog of NCBI NO: 13928796 NR Description: peroxisomal membrane protein 2; peroxisomal protein 2, 22 kDa [Rattus norvegicus]
  misc_feature (1)..(103): Homolog of NCBI NO: 6678926 NR Description: Mpv17 transgene, kidney disease mutant [Mus >gi|127297|sp|P19258|MPV1_MOUSE MPV17 PROTEIN

SEQ ID NO: 92449 - DNA, 2130 bp, Arabidopsis thaliana; identical to SEQ ID NO: 88693
  misc_feature (1)..(2130): Ceres Seq. ID no. 12711630
  misc_feature: MA Experiment ID: 20000184 Result: Down-regulated in Transcription
  misc_feature: MA Experiment 20000184 PARAMETER Experiment Name: At_Shoots__P Parameter: Age (day) Value: 7
  misc_feature: MA Experiment 20000184 PARAMETER Experiment Name: At_Shoots__P Parameter: Tissue Value: Shoots vs. Whole Plant
  misc_feature: MA Experiment ID: 20000495 Result: Down-regulated in Transcription
  misc_feature: MA Experiment 20000495 PARAMETER Experiment Name: At_Guard_Cells_P Parameter: Harvest Date Value: 8/2/2002
  misc_feature: MA Experiment 20000495 PARAMETER Experiment Name: At_Guard_Cells_P Parameter: Organism Value: A. thaliana
  misc_feature: MA Experiment 20000495 PARAMETER Experiment Name: At_Guard_Cells_P Parameter: Tissue Value: Guard Cells vs. Leaves

SEQ ID NO: 92450 - protein, 709 aa, Arabidopsis thaliana; identical to SEQ ID NO: 88694
  peptide (1)..(709): Ceres Seq. ID no. 12711631
  misc_feature (27)..(295): Pfam Name: Protein kinase domain Pfam Description: Protein kinase domain
  misc_feature (1)..(601): Homolog of NCBI NO: 7486904 NR Description: hypothetical protein T12H20.4 - Arabidopsis >gi|3600036|gb|AAC35524.1| contains similarity to protein kinase
  misc_feature (1)..(709): Homolog of NCBI NO: 25407517 NR Description: hypothetical protein AT4g10730 [imported] - thaliana >gi|7267771|emb|CAB81174.1| putative protein kinase
  misc_feature (2)..(707): Homolog of NCBI NO: 22328895 NR Description: putative protein; protein id: At4g24100.1, by cDNA: gi_20268685 [Arabidopsis thaliana] unknown protein [Arabidopsis thaliana]
  misc_feature (2)..(414): Homolog of NCBI NO: 7487178 NR Description: hypothetical protein T19F6.90 - Arabidopsis >gi|5668638|emb|CAB51653.1| putative protein [Arabidopsis >gi|7269259|emb|CAB81328.1| putative protein [Arabidopsis
  misc_feature (393)..(660): Homolog of NCBI NO: 7487178 NR Description: hypothetical protein T19F6.90 - Arabidopsis >gi|5668638|emb|CAB51653.1| putative protein [Arabidopsis >gi|7269259|emb|CAB81328.1| putative protein [Arabidopsis
  misc_feature (1)..(662): Homolog of NCBI NO: 30681538 NR Description: protein kinase family [Arabidopsis thaliana]
  misc_feature (2)..(404): Homolog of NCBI NO: 2262107 NR Description: Ser/Thr protein kinase isolog [Arabidopsis
  misc_feature (20)..(529): Homolog of NCBI NO: 17998578 NR Description: putative Ste-20 related kinase, 3'-partial [Oryza
  misc_feature (20)..(344): Homolog of NCBI NO: 34902170 NR Description: Putative Ste20-related protein kinase [Oryza
  misc_feature (474)..(662): Homolog of NCBI NO: 34902170 NR Description: Putative Ste20-related protein kinase [Oryza

SEQ ID NO: 92451 - protein, 680 aa, Arabidopsis thaliana; identical to SEQ ID NO: 88695
  peptide (1)..(680): Ceres Seq. ID no. 12711632
  misc_feature (1)..(266): Pfam Name: Protein kinase domain Pfam Description: Protein kinase domain
  misc_feature (1)..(572): Homolog of NCBI NO: 7486904 NR Description: hypothetical protein T12H20.4 - Arabidopsis >gi|3600036|gb|AAC35524.1| contains similarity to protein kinase
  misc_feature (1)..(680): Homolog of NCBI NO: 25407517 NR Description: hypothetical protein AT4g10730 [imported] - thaliana >gi|7267771|emb|CAB81174.1| putative protein kinase
  misc_feature (1)..(678): Homolog of NCBI NO: 22328895 NR Description: putative protein; protein id: At4g24100.1, by cDNA: gi_20268685 [Arabidopsis thaliana] unknown protein [Arabidopsis thaliana]
  misc_feature (1)..(385): Homolog of NCBI NO: 7487178 NR Description: hypothetical protein T19F6.90 - Arabidopsis >gi|5668638|emb|CAB51653.1| putative protein [Arabidopsis >gi|7269259|emb|CAB81328.1| putative protein [Arabidopsis
  misc_feature (364)..(631): Homolog of NCBI NO: 7487178 NR Description: hypothetical protein T19F6.90 - Arabidopsis >gi|5668638|emb|CAB51653.1| putative protein [Arabidopsis >gi|7269259|emb|CAB81328.1| putative protein [Arabidopsis
  misc_feature (1)..(633): Homolog of NCBI NO: 30681538 NR Description: protein kinase family [Arabidopsis thaliana]
  misc_feature (1)..(375): Homolog of NCBI NO: 2262107 NR Description: Ser/Thr protein kinase isolog [Arabidopsis
  misc_feature (1)..(500): Homolog of NCBI NO: 17998578 NR Description: putative Ste-20 related kinase, 3'-partial [Oryza
  misc_feature (1)..(315): Homolog of NCBI NO: 34902170 NR Description: Putative Ste20-related protein kinase [Oryza
  misc_feature (445)..(633): Homolog of NCBI NO: 34902170 NR Description: Putative Ste20-related protein kinase [Oryza

SEQ ID NO: 92452 - protein, 633 aa, Arabidopsis thaliana; identical to SEQ ID NO: 88696
  peptide (1)..(633): Ceres Seq. ID no. 12711633
  misc_feature (1)..(219): Pfam Name: Protein kinase domain Pfam Description: Protein kinase domain
  misc_feature (1)..(525): Homolog of NCBI NO: 7486904 NR Description: hypothetical protein T12H20.4 - Arabidopsis >gi|3600036|gb|AAC35524.1| contains similarity to protein kinase
  misc_feature (1)..(633): Homolog of NCBI NO: 25407517 NR Description: hypothetical protein AT4g10730 [imported] - thaliana >gi|7267771|emb|CAB81174.1| putative protein kinase
  misc_feature (1)..(631): Homolog of NCBI NO: 22328895 NR Description: putative protein; protein id: At4g24100.1, by cDNA: gi_20268685 [Arabidopsis thaliana] unknown protein [Arabidopsis thaliana]
  misc_feature (1)..(338): Homolog of NCBI NO: 7487178 NR Description: hypothetical protein T19F6.90 - Arabidopsis >gi|5668638|emb|CAB51653.1| putative protein [Arabidopsis >gi|7269259|emb|CAB81328.1| putative protein [Arabidopsis
  misc_feature (317)..(584): Homolog of NCBI NO: 7487178 NR Description: hypothetical protein T19F6.90 - Arabidopsis >gi|5668638|emb|CAB51653.1| putative protein [Arabidopsis >gi|7269259|emb|CAB81328.1| putative protein [Arabidopsis
  misc_feature (1)..(586): Homolog of NCBI NO: 30681538 NR Description: protein kinase family [Arabidopsis thaliana]
  misc_feature (1)..(328): Homolog of NCBI NO: 2262107 NR Description: Ser/Thr protein kinase isolog [Arabidopsis
  misc_feature (1)..(453): Homolog of NCBI NO: 17998578 NR Description: putative Ste-20 related kinase, 3'-partial [Oryza
  misc_feature (1)..(268): Homolog of NCBI NO: 34902170 NR Description: Putative Ste20-related protein kinase [Oryza
  misc_feature (398)..(586): Homolog of NCBI NO: 34902170 NR Description: Putative Ste20-related protein kinase [Oryza

SEQ ID NO: 92453 - DNA, 2117 bp, Arabidopsis thaliana; identical to SEQ ID NO: 88697
  misc_feature (1)..(2117): Ceres Seq. ID no. 12711647
  misc_feature: MA Experiment ID: 20000264 Result: Down-regulated in Transcription
  misc_feature: MA Experiment 20000264 PARAMETER Experiment Name: At_Open_Flower_P Parameter: Age (day) Value: 21
  misc_feature: MA Experiment 20000264 PARAMETER Experiment Name: At_Open_Flower_P Parameter: Plant Line Value: WS
  misc_feature: MA Experiment 20000264 PARAMETER Experiment Name: At_Open_Flower_P Parameter: Tissue Value: Open Flower vs. Whole Plant
  misc_feature: MA Experiment ID: 20000265 Result: Down-regulated in Transcription
  misc_feature: MA Experiment 20000265 PARAMETER Experiment Name: At_Open_Flower_P Parameter: Age (day) Value: 21
  misc_feature: MA Experiment 20000265 PARAMETER Experiment Name: At_Open_Flower_P Parameter: Plant Line Value: WS
  misc_feature: MA Experiment 20000265 PARAMETER Experiment Name: At_Open_Flower_P Parameter: Tissue Value: Closed Flower vs. Whole Plant

SEQ ID NO: 92454 - protein, 628 aa, Arabidopsis thaliana; identical to SEQ ID NO: 88698
  peptide (1)..(628): Ceres Seq. ID no. 12711648
  misc_feature (244)..(277): Pfam Name: TPR Domain Pfam Description: TPR Domain
  misc_feature (94)..(608): Homolog of NCBI NO: 19387245 NR Description: putative kinesin light chain gene [Oryza sativa
  misc_feature (71)..(608): Homolog of NCBI NO: 20152971 NR Description: similar to A. thaliana protein BAB01483 similar
  misc_feature (52)..(608): Homolog of NCBI NO: 15232873 NR Description: hypothetical protein; protein id: At3g27960.1 thaliana] >gi|9294312|dbj|BAB01483.1| contains similarity to
  misc_feature (52)..(608): Homolog of NCBI NO: 33589662 NR Description: At3g27960 [Arabidopsis thaliana]
  misc_feature (94)..(606): Homolog of NCBI NO: 9802538 NR Description: F17L21.29 [Arabidopsis thaliana]
  misc_feature (94)..(606): Homolog of NCBI NO: 15223528 NR Description: hypothetical protein; protein id: At1g27500.1
  misc_feature (94)..(606): Homolog of NCBI NO: 26450936 NR Description: unknown protein [Arabidopsis thaliana]
  misc_feature (97)..(611): Homolog of NCBI NO: 25408142 NR Description: probable kinesin light chain [imported] - thaliana >gi|4432819|gb|AAD20669.1| putative kinesin light chain
  misc_feature (97)..(611): Homolog of NCBI NO: 30684882 NR Description: tetratricopeptide repeat (TPR)-containing protein thaliana] >gi|17380952|gb|AAL36288.1| putative kinesin light
  misc_feature (150)..(613): Homolog of NCBI NO: 27261475 NR Description: Hypothetical protein [Oryza sativa (japonica

SEQ ID NO: 92455 - protein, 609 aa, Arabidopsis thaliana; identical to SEQ ID NO: 26334
  peptide (1)..(609): Ceres Seq. ID no. 12711649
  misc_feature (225)..(258): Pfam Name: TPR Domain Pfam Description: TPR Domain
  misc_feature (75)..(589): Homolog of NCBI NO: 19387245 NR Description: putative kinesin light chain gene [Oryza sativa
  misc_feature (52)..(589): Homolog of NCBI NO: 20152971 NR Description: similar to A. thaliana protein BAB01483 similar
  misc_feature (33)..(589): Homolog of NCBI NO: 15232873 NR Description: hypothetical protein; protein id: At3g27960.1 thaliana] >gi|9294312|dbj|BAB01483.1| contains similarity to
  misc_feature (33)..(589): Homolog of NCBI NO: 33589662 NR Description: At3g27960 [Arabidopsis thaliana]
  misc_feature (75)..(587): Homolog of NCBI NO: 9802538 NR Description: F17L21.29 [Arabidopsis thaliana]
  misc_feature (75)..(587): Homolog of NCBI NO: 15223528 NR Description: hypothetical protein; protein id: At1g27500.1
  misc_feature (75)..(587): Homolog of NCBI NO: 26450936 NR Description: unknown protein [Arabidopsis thaliana]
  misc_feature (78)..(592): Homolog of NCBI NO: 25408142 NR Description: probable kinesin light chain [imported] - thaliana >gi|4432819|gb|AAD20669.1| putative kinesin light chain
  misc_feature (78)..(592): Homolog of NCBI NO: 30684882 NR Description: tetratricopeptide repeat (TPR)-containing protein thaliana] >gi|17380952|gb|AAL36288.1| putative kinesin light
  misc_feature (131)..(594): Homolog of NCBI NO: 27261475 NR Description: Hypothetical protein [Oryza sativa (japonica

SEQ ID NO: 92456 - protein, 606 aa, Arabidopsis thaliana; identical to SEQ ID NO: 26335
  peptide (1)..(606): Ceres Seq. ID no. 12711650
  misc_feature (222)..(255): Pfam Name: TPR Domain Pfam Description: TPR Domain
  misc_feature (72)..(586): Homolog of NCBI NO: 19387245 NR Description: putative kinesin light chain gene [Oryza sativa
  misc_feature (49)..(586): Homolog of NCBI NO: 20152971 NR Description: similar to A. thaliana protein BAB01483 similar
  misc_feature (30)..(586): Homolog of NCBI NO: 15232873 NR Description: hypothetical protein; protein id: At3g27960.1 thaliana] >gi|9294312|dbj|BAB01483.1| contains similarity to
  misc_feature (30)..(586): Homolog of NCBI NO: 33589662 NR Description: At3g27960 [Arabidopsis thaliana]
  misc_feature (72)..(584): Homolog of NCBI NO: 9802538 NR Description: F17L21.29 [Arabidopsis thaliana]
  misc_feature (72)..(584): Homolog of NCBI NO: 15223528 NR Description: hypothetical protein; protein id: At1g27500.1
  misc_feature (72)..(584): Homolog of NCBI NO: 26450936 NR Description: unknown protein [Arabidopsis thaliana]
  misc_feature (75)..(589): Homolog of NCBI NO: 25408142 NR Description: probable kinesin light chain [imported] - thaliana >gi|4432819|gb|AAD20669.1| putative kinesin light chain
  misc_feature (75)..(589): Homolog of NCBI NO: 30684882 NR Description: tetratricopeptide repeat (TPR)-containing protein thaliana] >gi|17380952|gb|AAL36288.1| putative kinesin light
  misc_feature (128)..(591): Homolog of NCBI NO: 27261475 NR Description: Hypothetical protein [Oryza sativa (japonica

SEQ ID NO: 92457 - DNA, 1053 bp, Arabidopsis thaliana; identical to SEQ ID NO: 88701
  misc_feature (1)..(1053): Ceres Seq. ID no. 12711675
  misc_feature: MA Experiment ID: 20000166 Result: Up-regulated in Transcription
  misc_feature: MA Experiment 20000166 PARAMETER Experiment Name: At_100uM_ABA_P Parameter: Age (day) Value: 14
  misc_feature: MA Experiment 20000166 PARAMETER Experiment Name: At_100uM_ABA_P Parameter: Organism Value: A. thaliana
  misc_feature: MA Experiment 20000166 PARAMETER Experiment Name: At_100uM_ABA_P Parameter: Plant Line Value: WS
  misc_feature: MA Experiment 20000166 PARAMETER Experiment Name: At_100uM_ABA_P Parameter: Timepoint (hr) Value: 1
  misc_feature: MA Experiment 20000166 PARAMETER Experiment Name: At_100uM_ABA_P Parameter: Tissue Value: Aerial
  misc_feature: MA Experiment 20000166 PARAMETER Experiment Name: At_100uM_ABA_P Parameter: Treatment Value: 100uM ABA vs. No Treatment
  misc_feature: MA Experiment ID: 20000169 Result: Up-regulated in Transcription
  misc_feature: MA Experiment 20000169 PARAMETER Experiment Name: At_100uM_ABA_P Parameter: Age (day) Value: 14
  misc_feature: MA Experiment 20000169 PARAMETER Experiment Name: At_100uM_ABA_P Parameter: Organism Value: A. thaliana
  misc_feature: MA Experiment 20000169 PARAMETER Experiment Name: At_100uM_ABA_P Parameter: Plant Line Value: WS
  misc_feature: MA Experiment 20000169 PARAMETER Experiment Name: At_100uM_ABA_P Parameter: Timepoint (hr) Value: 6
  misc_feature: MA Experiment 20000169 PARAMETER Experiment Name: At_100uM_ABA_P Parameter: Tissue Value: Aerial
  misc_feature: MA Experiment 20000169 PARAMETER Experiment Name: At_100uM_ABA_P Parameter: Treatment Value: 100uM ABA vs. No Treatment
  misc_feature: MA Experiment ID: 20000182 Result: Up-regulated in Transcription
  misc_feature: MA Experiment 20000182 PARAMETER Experiment Name: At_2mM_SA_P Parameter: Age (day) Value: 14
  misc_feature: MA Experiment 20000182 PARAMETER Experiment Name: At_2mM_SA_P Parameter: Organism Value: A. thaliana
  misc_feature: MA Experiment 20000182 PARAMETER Experiment Name: At_2mM_SA_P Parameter: Plant Line Value: WS
  misc_feature: MA Experiment 20000182 PARAMETER Experiment Name: At_2mM_SA_P Parameter: Timepoint (hr) Value: 6
  misc_feature: MA Experiment 20000182 PARAMETER Experiment Name: At_2mM_SA_P Parameter: Tissue Value: Aerial
  misc_feature: MA Experiment 20000182 PARAMETER Experiment Name: At_2mM_SA_P Parameter: Treatment Value: 2mM SA vs. No Treatment
  misc_feature: MA Experiment ID: 20000184 Result: Down-regulated in Transcription
  misc_feature: MA Experiment 20000184 PARAMETER Experiment Name: At_Shoots__P Parameter: Age (day) Value: 7
  misc_feature: MA Experiment 20000184 PARAMETER Experiment Name: At_Shoots__P Parameter: Tissue Value: Shoots vs. Whole Plant
  misc_feature: MA Experiment ID: 20000185 Result: Up-regulated in Transcription
  misc_feature: MA Experiment 20000185 PARAMETER Experiment Name: At_Roots__P Parameter: Age (day) Value: 7 vs. 21
  misc_feature: MA Experiment 20000185 PARAMETER Experiment Name: At_Roots__P Parameter: Organism Value: A. thaliana
  misc_feature: MA Experiment 20000185 PARAMETER Experiment Name: At_Roots__P Parameter: Tissue Value: Roots vs. Whole Plant
  misc_feature: MA Experiment ID: 20000234 Result: Down-regulated in Transcription
  misc_feature: MA Experiment 20000234 PARAMETER Experiment Name: At_Siliques_P Parameter: Age (day) Value: 21
  misc_feature: MA Experiment 20000234 PARAMETER Experiment Name: At_Siliques_P Parameter: Organism Value: A. thaliana
  misc_feature: MA Experiment 20000234 PARAMETER Experiment Name: At_Siliques_P Parameter: Plant Line Value: WS
  misc_feature: MA Experiment 20000234 PARAMETER Experiment Name: At_Siliques_P Parameter: Tissue Value: Less Than 5mm Siliques vs. Whole Plant
  misc_feature: MA Experiment ID: 20000235 Result: Down-regulated in Transcription
  misc_feature: MA Experiment 20000235 PARAMETER Experiment Name: At_Siliques_P Parameter: Age (day) Value: 21
  misc_feature: MA Experiment 20000235 PARAMETER Experiment Name: At_Siliques_P Parameter: Organism Value: A. thaliana
  misc_feature: MA Experiment 20000235 PARAMETER Experiment Name: At_Siliques_P Parameter: Plant Line Value: WS
  misc_feature: MA Experiment 20000235 PARAMETER Experiment Name: At_Siliques_P Parameter: Tissue Value: 5-10mm Siliques vs. Whole Plant
  misc_feature: MA Experiment ID: 20000264 Result: Up-regulated in Transcription
  misc_feature: MA Experiment 20000264 PARAMETER Experiment Name: At_Open_Flower_P Parameter: Age (day) Value: 21
  misc_feature: MA Experiment 20000264 PARAMETER Experiment Name: At_Open_Flower_P Parameter: Plant Line Value: WS
  misc_feature: MA Experiment 20000264 PARAMETER Experiment Name: At_Open_Flower_P Parameter: Tissue Value: Open Flower vs. Whole Plant
  misc_feature: MA Experiment ID: 20000267 Result: Up-regulated in Transcription
  misc_feature: MA Experiment 20000267 PARAMETER Experiment Name: At_Drought_P Parameter: Age (day) Value: 7
  misc_feature: MA Experiment 20000267 PARAMETER Experiment Name: At_Drought_P Parameter: Organism Value: A. thaliana
  misc_feature: MA Experiment 20000267 PARAMETER Experiment Name: At_Drought_P Parameter: Plant Line Value: WS
  misc_feature: MA Experiment 20000267 PARAMETER Experiment Name: At_Drought_P Parameter: Timepoint (hr) Value: 6
  misc_feature: MA Experiment 20000267 PARAMETER Experiment Name: At_Drought_P Parameter: Tissue Value: Whole Plant
  misc_feature: MA Experiment 20000267 PARAMETER Experiment Name: At_Drought_P Parameter: Treatment Value: Drought vs. No Drought
  misc_feature: MA Experiment ID: 20000268 Result: Up-regulated in Transcription
  misc_feature: MA Experiment 20000268 PARAMETER Experiment Name: At_100mM_NaCl__P Parameter: Age (day) Value: 14
  misc_feature: MA Experiment 20000268 PARAMETER Experiment Name: At_100mM_NaCl__P Parameter: Organism Value: A. thaliana
  misc_feature: MA Experiment 20000268 PARAMETER Experiment Name: At_100mM_NaCl__P Parameter: Plant Line Value: WS
  misc_feature: MA Experiment 20000268 PARAMETER Experiment Name: At_100mM_NaCl__P Parameter: Timepoint (hr) Value: 6
  misc_feature: MA Experiment 20000268 PARAMETER Experiment Name: At_100mM_NaCl__P Parameter: Tissue Value: Whole Plant
  misc_feature: MA Experiment 20000268 PARAMETER Experiment Name: At_100mM_NaCl__P Parameter: Treatment Value: 100mM NaCl vs. No Treatment
  misc_feature: MA Experiment ID: 20000436 Result: Up-regulated in Transcription
  misc_feature: MA Experiment 20000436 PARAMETER Experiment Name: At_Drought_P Parameter: Age (day) Value: 7
  misc_feature: MA Experiment 20000436 PARAMETER Experiment Name: At_Drought_P Parameter: Organism Value: A. thaliana
  misc_feature: MA Experiment 20000436 PARAMETER Experiment Name: At_Drought_P Parameter: Plant Line Value: WS
  misc_feature: MA Experiment 20000436 PARAMETER Experiment Name: At_Drought_P Parameter: Timepoint (hr) Value: 12
  misc_feature: MA Experiment 20000436 PARAMETER Experiment Name: At_Drought_P Parameter: Tissue Value: Whole Plant
  misc_feature: MA Experiment 20000436 PARAMETER Experiment Name: At_Drought_P Parameter: Treatment Value: Drought vs. No Drought
  misc_feature: MA Experiment ID: 20000437 Result: Up-regulated in Transcription
  misc_feature: MA Experiment 20000437 PARAMETER Experiment Name: At_Drought_P Parameter: Age (day) Value: 8
  misc_feature: MA Experiment 20000437 PARAMETER Experiment Name: At_Drought_P Parameter: Organism Value: A. thaliana
  misc_feature: MA Experiment 20000437 PARAMETER Experiment Name: At_Drought_P Parameter: Plant Line Value: WS
  misc_feature: MA Experiment 20000437 PARAMETER Experiment Name: At_Drought_P Parameter: Timepoint (hr) Value: 24
  misc_feature: MA Experiment 20000437 PARAMETER Experiment Name: At_Drought_P Parameter: Tissue Value: Whole Plant
  misc_feature: MA Experiment 20000437 PARAMETER Experiment Name: At_Drought_P Parameter: Treatment Value: Drought vs. No Drought
  misc_feature: MA Experiment ID: 20000438 Result: Down-regulated in Transcription
  misc_feature: MA Experiment 20000438 PARAMETER Experiment Name: At_Shoots__P Parameter: Age (day) Value: 14
  misc_feature: MA Experiment 20000438 PARAMETER Experiment Name: At_Shoots__P Parameter: Tissue Value: Shoots vs. Whole Plant
  misc_feature: MA Experiment ID: 20000445 Result: Up-regulated in Transcription
  misc_feature: MA Experiment 20000445 PARAMETER Experiment Name: At_100uM_NAA__P Parameter: Age (day) Value: 14
  misc_feature: MA Experiment 20000445 PARAMETER Experiment Name: At_100uM_NAA__P Parameter: Organism Value: A. thaliana
  misc_feature: MA Experiment 20000445 PARAMETER Experiment Name: At_100uM_NAA__P Parameter: Plant Line Value: WS
  misc_feature: MA Experiment 20000445 PARAMETER Experiment Name: At_100uM_NAA__P Parameter: Timepoint (hr) Value: 6
  misc_feature: MA Experiment 20000445 PARAMETER Experiment Name: At_100uM_NAA__P Parameter: Tissue Value: Aerial
  misc_feature: MA Experiment 20000445 PARAMETER Experiment Name: At_100uM_NAA__P Parameter: Treatment Value: 100uM NAA vs. No Treatment
  misc_feature: MA Experiment ID: 20000453 Result: Up-regulated in Transcription
  misc_feature: MA Experiment 20000453 PARAMETER Experiment Name: At_100uM_ABA_P Parameter: Age (day) Value: 15
  misc_feature: MA Experiment 20000453 PARAMETER Experiment Name: At_100uM_ABA_P Parameter: Organism Value: A. thaliana
  misc_feature: MA Experiment 20000453 PARAMETER Experiment Name: At_100uM_ABA_P Parameter: Plant Line Value: WS
  misc_feature: MA Experiment 20000453 PARAMETER Experiment Name: At_100uM_ABA_P Parameter: Timepoint (hr) Value: 24
  misc_feature: MA Experiment 20000453 PARAMETER Experiment Name: At_100uM_ABA_P Parameter: Tissue Value: Aerial
  misc_feature: MA Experiment 20000453 PARAMETER Experiment Name: At_100uM_ABA_P Parameter: Treatment Value: 100uM ABA vs. No Treatment
  misc_feature: MA Experiment ID: 20000527 Result: Down-regulated in Transcription
  misc_feature: MA Experiment 20000527 PARAMETER Experiment Name: At_10percent_PEG_P Parameter: Age (day) Value: 20
  misc_feature: MA Experiment 20000527 PARAMETER Experiment Name: At_10percent_PEG_P Parameter: Organism Value: A. thaliana
  misc_feature: MA Experiment 20000527 PARAMETER Experiment Name: At_10percent_PEG_P Parameter: Plant Line Value: WS
  misc_feature: MA Experiment 20000527 PARAMETER Experiment Name: At_10percent_PEG_P Parameter: Timepoint (day) Value: 20
  misc_feature: MA Experiment 20000527 PARAMETER Experiment Name: At_10percent_PEG_P Parameter: Tissue Value: Whole Plant
  misc_feature: MA Experiment 20000527 PARAMETER Experiment Name: At_10percent_PEG_P Parameter: Treatment Value: 10percent PEG vs. No Treatment
  misc_feature: MA Experiment ID: 20000794 Result: Up-regulated in Transcription
  misc_feature: MA Experiment 20000794 PARAMETER Experiment Name: At_Petals_P Parameter: Age (day) Value: 23-25 days
  misc_feature: MA Experiment 20000794 PARAMETER Experiment Name: At_Petals_P Parameter: Plant Line Value: WS
  misc_feature: MA Experiment 20000794 PARAMETER Experiment Name: At_Petals_P Parameter: Tissue Value: Petals vs. Whole plant
  misc_feature: MA Experiment ID: 20001757 Result: Down-regulated in Transcription
  misc_feature: MA Experiment 20001757 PARAMETER Experiment Name: At_50mM_NH4NO3_L-to-H_P Parameter: Timepoint (hr) Value: 6
  misc_feature: MA Experiment 20001757 PARAMETER Experiment Name: At_50mM_NH4NO3_L-to-H_P Parameter: Tissue Value: Leaf
  misc_feature: MA Experiment 20001757 PARAMETER Experiment Name: At_50mM_NH4NO3_L-to-H_P Parameter: Treatment Value: 50mM NH4NO3 vs 100mM Mannitol
  misc_feature: MA Experiment ID: 20001904 Result: Up-regulated in Transcription
  misc_feature: MA Experiment 20001904 PARAMETER Experiment Name: At_Drought_Reproduction_P Parameter: Age (day) Value: 37
  misc_feature: MA Experiment 20001904 PARAMETER Experiment Name: At_Drought_Reproduction_P Parameter: Organism Value: A. thaliana
  misc_feature: MA Experiment 20001904 PARAMETER Experiment Name: At_Drought_Reproduction_P Parameter: Plant Line Value: WS
  misc_feature: MA Experiment 20001904 PARAMETER Experiment Name: At_Drought_Reproduction_P Parameter: Timepoint (day) Value: 7
  misc_feature: MA Experiment 20001904 PARAMETER Experiment Name: At_Drought_Reproduction_P Parameter: Tissue Value: Rosettes
  misc_feature: MA Experiment 20001904 PARAMETER Experiment Name: At_Drought_Reproduction_P Parameter: Treatment Value: Drought vs. No Drought
  misc_feature: MA Experiment ID: 20001906 Result: Up-regulated in Transcription
  misc_feature: MA Experiment 20001906 PARAMETER Experiment Name: At_Drought_Reproduction_P Parameter: Age (day) Value: 35
  misc_feature: MA Experiment 20001906 PARAMETER Experiment Name: At_Drought_Reproduction_P Parameter: Organism Value: A. thaliana
  misc_feature: MA Experiment 20001906 PARAMETER Experiment Name: At_Drought_Reproduction_P Parameter: Plant Line Value: WS
  misc_feature: MA Experiment 20001906 PARAMETER Experiment Name: At_Drought_Reproduction_P Parameter: Timepoint (day) Value: 5
  misc_feature: MA Experiment 20001906 PARAMETER Experiment Name: At_Drought_Reproduction_P Parameter: Tissue Value: Siliques
  misc_feature: MA Experiment 20001906 PARAMETER Experiment Name: At_Drought_Reproduction_P Parameter: Treatment Value: Drought vs. No Drought
  misc_feature: MA Experiment ID: 20001908 Result: Up-regulated in Transcription
  misc_feature: MA Experiment 20001908 PARAMETER Experiment Name: At_Drought_Reproduction_P Parameter: Age (day) Value: 40
  misc_feature: MA Experiment 20001908 PARAMETER Experiment Name: At_Drought_Reproduction_P Parameter: Organism Value: A. thaliana
  misc_feature: MA Experiment 20001908 PARAMETER Experiment Name: At_Drought_Reproduction_P Parameter: Plant Line Value: WS
  misc_feature: MA Experiment 20001908 PARAMETER Experiment Name: At_Drought_Reproduction_P Parameter: Timepoint (day) Value: 10
  misc_feature: MA Experiment 20001908 PARAMETER Experiment Name: At_Drought_Reproduction_P Parameter: Tissue Value: Siliques
  misc_feature: MA Experiment 20001908 PARAMETER Experiment Name: At_Drought_Reproduction_P Parameter: Treatment Value: Drought vs. No Drought

SEQ ID NO: 92458 - protein, 350 aa, Arabidopsis thaliana; identical to SEQ ID NO: 29867
  peptide (1)..(350): Ceres Seq. ID no. 12711676
  misc_feature (5)..(338): Pfam Name: NAD dependent epimerase/dehydratase family Pfam Description: NAD dependent epimerase/dehydratase family
  misc_feature (1)..(350): Homolog of NCBI NO: 12643850 NR Description: Probable UDP-glucose 4-epimerase At4g10960
  misc_feature (1)..(350): Homolog of NCBI NO: 15236988 NR Description: UDP-galactose 4-epimerase - like protein; protein At4g10960.1, supported by cDNA: 15608., supported by cDNA:
  misc_feature (1)..(350): Homolog of NCBI NO: 21553659 NR Description: UDP-galactose 4-epimerase-like protein
  misc_feature (1)..(349): Homolog of NCBI NO: 15236663 NR Description: UDPglucose 4-epimerase - like protein; protein
  misc_feature (1)..(349): Homolog of NCBI NO: 21536846 NR Description: UDPglucose 4-epimerase-like protein [Arabidopsis
  misc_feature (2)..(350): Homolog of NCBI NO: 11386775 NR Description: UDP-glucose 4-epimerase GEPI48 (Galactowaldenase)
  misc_feature (1)..(344): Homolog of NCBI NO: 15217653 NR Description: UDP-galactose 4-epimerase, putative; protein id:
  misc_feature (62)..(235): Homolog of NCBI NO: 6633809 NR Description: F1N19.2 [Arabidopsis thaliana]
  misc_feature (234)..(344): Homolog of NCBI NO: 6633809 NR Description: F1N19.2 [Arabidopsis thaliana]
  misc_feature (1)..(62): Homolog of NCBI NO: 6633809 NR Description: F1N19.2 [Arabidopsis thaliana]

SEQ ID NO: 92459 - protein, 235 aa, Arabidopsis thaliana; identical to SEQ ID NO: 88703
  peptide (1)..(235): Ceres Seq. ID no. 12711677
  misc_feature (1)..(223): Pfam Name: NAD dependent epimerase/dehydratase family Pfam Description: NAD dependent epimerase/dehydratase family
  misc_feature (1)..(235): Homolog of NCBI NO: 12643850 NR Description: Probable UDP-glucose 4-epimerase At4g10960
  misc_feature (1)..(235): Homolog of NCBI NO: 15236988 NR Description: UDP-galactose 4-epimerase - like protein; protein At4g10960.1, supported by cDNA: 15608., supported by cDNA:
  misc_feature (1)..(235): Homolog of NCBI NO: 21553659 NR Description: UDP-galactose 4-epimerase-like protein
  misc_feature (1)..(234): Homolog of NCBI NO: 15236663 NR Description: UDPglucose 4-epimerase - like protein; protein
  misc_feature (1)..(234): Homolog of NCBI NO: 21536846 NR Description: UDPglucose 4-epimerase-like protein [Arabidopsis
  misc_feature (1)..(235): Homolog of NCBI NO: 11386775 NR Description: UDP-glucose 4-epimerase GEPI48 (Galactowaldenase)
  misc_feature (1)..(229): Homolog of NCBI NO: 15217653 NR Description: UDP-galactose 4-epimerase, putative; protein id:
  misc_feature (1)..(120): Homolog of NCBI NO: 6633809 NR Description: F1N19.2 [Arabidopsis thaliana]
  misc_feature (119)..(229): Homolog of NCBI NO: 6633809 NR Description: F1N19.2 [Arabidopsis thaliana]
  misc_feature (1)..(234): Homolog of NCBI NO: 32130594 NR Description: UDP-glucose-4-epimerase [Zea mays]

SEQ ID NO: 92460 - DNA, 693 bp, Arabidopsis thaliana; identical to SEQ ID NO: 88704
  misc_feature (1)..(693): Ceres Seq. ID no. 12711694
  misc_feature: MA Experiment ID: 20000180 Result: Down-regulated in Transcription
  misc_feature: MA Experiment 20000180 PARAMETER Experiment Name: At_Germinating_Seeds_P Parameter: Age (hr) Value: 24 vs. 0
  misc_feature: MA Experiment 20000180 PARAMETER Experiment Name: At_Germinating_Seeds_P Parameter: Tissue Value: Germinating Seeds
  misc_feature: MA Experiment ID: 20000439 Result: Up-regulated in Transcription
  misc_feature: MA Experiment 20000439 PARAMETER Experiment Name: At_Roots__P Parameter: Age (day) Value: 14 vs. 21
  misc_feature: MA Experiment 20000439 PARAMETER Experiment Name: At_Roots__P Parameter: Organism Value: A. thaliana
  misc_feature: MA Experiment 20000439 PARAMETER Experiment Name: At_Roots__P Parameter: Tissue Value: Roots vs. Whole Plant
  misc_feature: MA Experiment ID: 20000794 Result: Down-regulated in Transcription
  misc_feature: MA Experiment 20000794 PARAMETER Experiment Name: At_Petals_P Parameter: Age (day) Value: 23-25 days
  misc_feature: MA Experiment 20000794 PARAMETER Experiment Name: At_Petals_P Parameter: Plant Line Value: WS
  misc_feature: MA Experiment 20000794 PARAMETER Experiment Name: At_Petals_P Parameter: Tissue Value: Petals vs. Whole plant
  misc_feature: MA Experiment ID: 20001556 Result: Up-regulated in Transcription
  misc_feature: MA Experiment 20001556 PARAMETER Experiment Name: At_Drought_Soil_Dry_P Parameter: Age (day) Value: 26
  misc_feature: MA Experiment 20001556 PARAMETER Experiment Name: At_Drought_Soil_Dry_P Parameter: Organism Value: A. thaliana
  misc_feature: MA Experiment 20001556 PARAMETER Experiment Name: At_Drought_Soil_Dry_P Parameter: Plant Line Value: WS
  misc_feature: MA Experiment 20001556 PARAMETER Experiment Name: At_Drought_Soil_Dry_P Parameter: Post Timepoint (hr) Value: None
  misc_feature: MA Experiment 20001556 PARAMETER Experiment Name: At_Drought_Soil_Dry_P Parameter: Post-Treatment Value: None
  misc_feature: MA Experiment 20001556 PARAMETER Experiment Name: At_Drought_Soil_Dry_P Parameter: Timepoint (day) Value: 12
  misc_feature: MA Experiment 20001556 PARAMETER Experiment Name: At_Drought_Soil_Dry_P Parameter: Treatment Value: Drought vs. No Drought
  misc_feature: MA Experiment ID: 20001558 Result: Up-regulated in Transcription
  misc_feature: MA Experiment 20001558 PARAMETER Experiment Name: At_Drought_Soil_Dry_P Parameter: Age (day) Value: 27
  misc_feature: MA Experiment 20001558 PARAMETER Experiment Name: At_Drought_Soil_Dry_P Parameter: Organism Value: A. thaliana
  misc_feature: MA Experiment 20001558 PARAMETER Experiment Name: At_Drought_Soil_Dry_P Parameter: Plant Line Value: WS
  misc_feature: MA Experiment 20001558 PARAMETER Experiment Name: At_Drought_Soil_Dry_P Parameter: Post Timepoint (hr) Value: 6
  misc_feature: MA Experiment 20001558 PARAMETER Experiment Name: At_Drought_Soil_Dry_P Parameter: Post-Treatment Value: Re-Water vs. No Drought
  misc_feature: MA Experiment 20001558 PARAMETER Experiment Name: At_Drought_Soil_Dry_P Parameter: Timepoint (day) Value: 13
  misc_feature: MA Experiment 20001558 PARAMETER Experiment Name: At_Drought_Soil_Dry_P Parameter: Treatment Value: Drought vs. No Drought
  misc_feature: MA Experiment ID: 20001757 Result: Up-regulated in Transcription
  misc_feature: MA Experiment 20001757 PARAMETER Experiment Name: At_50mM_NH4NO3_L-to-H_P Parameter: Timepoint (hr) Value: 6
  misc_feature: MA Experiment 20001757 PARAMETER Experiment Name: At_50mM_NH4NO3_L-to-H_P Parameter: Tissue Value: Leaf
  misc_feature: MA Experiment 20001757 PARAMETER Experiment Name: At_50mM_NH4NO3_L-to-H_P Parameter: Treatment Value: 50mM NH4NO3 vs 100mM Mannitol

SEQ ID NO: 92461 - protein, 230 aa, Arabidopsis thaliana; identical to SEQ ID NO: 88705
  peptide (1)..(230): Ceres Seq. ID no. 12711695
  misc_feature (71)..(177): Pfam Name: Single-strand binding protein family Pfam Description: Single-strand binding protein family
  misc_feature (1)..(177): Homolog of NCBI NO: 7487337 NR Description: hypothetical protein T22B4.40 - Arabidopsis >gi|4850285|emb|CAB43041.1| putative protein [Arabidopsis >gi|7267804|emb|CAB81207.1| putative protein [Arabidopsis
  misc_feature (1)..(196): Homolog of NCBI NO: 30681642 NR Description: expressed protein [Arabidopsis thaliana] unknown protein [Arabidopsis thaliana]
  misc_feature (105)..(177): Homolog of NCBI NO: 3600051 NR Description: contains similarity to the single-strand binding
  misc_feature (46)..(199): Homolog of NCBI NO: 15229675 NR Description: hypothetical protein; protein id: At3g18580.1 thaliana] >gi|9294319|dbj|BAB02216.1| contains similarity to
  misc_feature (8)..(179): Homolog of NCBI NO: 34911652 NR Description: P0510C12.16 [Oryza sativa (japonica
  misc_feature (69)..(192): Homolog of NCBI NO: 37525024 NR Description: hypothetical protein [Photorhabdus luminescens laumondii TTO1] >gi|36784450|emb|CAE13334.1| unnamed protein
  misc_feature (71)..(182): Homolog of NCBI NO: 23014489 NR Description: hypothetical protein [Magnetospirillum
  misc_feature (71)..(174): Homolog of NCBI NO: 22959712 NR Description: hypothetical protein [Rhodobacter sphaeroides]
  misc_feature (71)..(182): Homolog of NCBI NO: 22964744 NR Description: hypothetical protein [Rhodopseudomonas palustris]
  misc_feature (71)..(182): Homolog of NCBI NO: 16125716 NR Description: single-strand binding protein [Caulobacter

SEQ ID NO: 92462 - protein, 126 aa, Arabidopsis thaliana; identical to SEQ ID NO: 88706
  peptide (1)..(126): Ceres Seq. ID no. 12711696
  misc_feature (1)..(73): Pfam Name: Single-strand binding protein family Pfam Description: Single-strand binding protein family
  misc_feature (1)..(73): Homolog of NCBI NO: 7487337 NR Description: hypothetical protein T22B4.40 - Arabidopsis >gi|4850285|emb|CAB43041.1| putative protein [Arabidopsis >gi|7267804|emb|CAB81207.1| putative protein [Arabidopsis
  misc_feature (1)..(92): Homolog of NCBI NO: 30681642 NR Description: expressed protein [Arabidopsis thaliana] unknown protein [Arabidopsis thaliana]
  misc_feature (1)..(73): Homolog of NCBI NO: 3600051 NR Description: contains similarity to the single-strand binding
  misc_feature (1)..(95): Homolog of NCBI NO: 15229675 NR Description: hypothetical protein; protein id: At3g18580.1 thaliana] >gi|9294319|dbj|BAB02216.1| contains similarity to
  misc_feature (1)..(75): Homolog of NCBI NO: 34911652 NR Description: P0510C12.16 [Oryza sativa (japonica
  misc_feature (1)..(88): Homolog of NCBI NO: 37525024 NR Description: hypothetical protein [Photorhabdus luminescens laumondii TTO1] >gi|36784450|emb|CAE13334.1| unnamed protein
  misc_feature (1)..(78): Homolog of NCBI NO: 23014489 NR Description: hypothetical protein [Magnetospirillum
  misc_feature (1)..(70): Homolog of NCBI NO: 22959712 NR Description: hypothetical protein [Rhodobacter sphaeroides]
  misc_feature (1)..(78): Homolog of NCBI NO: 22964744 NR Description: hypothetical protein [Rhodopseudomonas palustris]
  misc_feature (1)..(78): Homolog of NCBI NO: 16125716 NR Description: single-strand binding protein [Caulobacter

SEQ ID NO: 92463 - DNA, 2790 bp, Arabidopsis thaliana; identical to SEQ ID NO: 88707
  misc_feature (1)..(2790): Ceres Seq. ID no. 12711701
  misc_feature: MA Experiment ID: 20000495 Result: Down-regulated in Transcription
  misc_feature: MA Experiment 20000495 PARAMETER Experiment Name: At_Guard_Cells_P Parameter: Harvest Date Value: 8/2/2002
  misc_feature: MA Experiment 20000495 PARAMETER Experiment Name: At_Guard_Cells_P Parameter: Organism Value: A. thaliana
  misc_feature: MA Experiment 20000495 PARAMETER Experiment Name: At_Guard_Cells_P Parameter: Tissue Value: Guard Cells vs. Leaves
  misc_feature: MA Experiment ID: 20000496 Result: Down-regulated in Transcription
  misc_feature: MA Experiment 20000496 PARAMETER Experiment Name: At_Guard_Cells_P Parameter: Harvest Date Value: 7/19/2002
  misc_feature: MA Experiment 20000496 PARAMETER Experiment Name: At_Guard_Cells_P Parameter: Organism Value: Canola
  misc_feature: MA Experiment 20000496 PARAMETER Experiment Name: At_Guard_Cells_P Parameter: Tissue Value: Guard Cells vs. Leaves
  misc_feature: MA Experiment ID: 20001451 Result: Down-regulated in Transcription
  misc_feature: MA Experiment 20001451 PARAMETER Experiment Name: At_Far-red-induction_P Parameter: Age (day) Value: 7
  misc_feature: MA Experiment 20001451 PARAMETER Experiment Name: At_Far-red-induction_P Parameter: Light Value: Far-red vs. White
  misc_feature: MA Experiment 20001451 PARAMETER Experiment Name: At_Far-red-induction_P Parameter: Organism Value: A. thaliana
  misc_feature: MA Experiment 20001451 PARAMETER Experiment Name: At_Far-red-induction_P Parameter: Plant Line Value: Columbia
  misc_feature: MA Experiment 20001451 PARAMETER Experiment Name: At_Far-red-induction_P Parameter: Timepoint (hr) Value: 24
  misc_feature: MA Experiment 20001451 PARAMETER Experiment Name: At_Far-red-induction_P Parameter: Tissue Value: Whole Plant
  misc_feature: MA Experiment ID: 20001560 Result: Down-regulated in Transcription
  misc_feature: MA Experiment 20001560 PARAMETER Experiment Name: At_Drought_Soil_Dry_P Parameter: Age (day) Value: 28
  misc_feature: MA Experiment 20001560 PARAMETER Experiment Name: At_Drought_Soil_Dry_P Parameter: Organism Value: A. thaliana
  misc_feature: MA Experiment 20001560 PARAMETER Experiment Name: At_Drought_Soil_Dry_P Parameter: Plant Line Value: WS
  misc_feature: MA Experiment 20001560 PARAMETER Experiment Name: At_Drought_Soil_Dry_P Parameter: Post Timepoint (hr) Value: None
  misc_feature: MA Experiment 20001560 PARAMETER Experiment Name: At_Drought_Soil_Dry_P Parameter: Post-Treatment Value: None
  misc_feature: MA Experiment 20001560 PARAMETER Experiment Name: At_Drought_Soil_Dry_P Parameter: Timepoint (day) Value: 14
  misc_feature: MA Experiment 20001560 PARAMETER Experiment Name: At_Drought_Soil_Dry_P Parameter: Treatment Value: Drought vs. No Drought

SEQ ID NO: 92464 - protein, 929 aa, Arabidopsis thaliana; identical to SEQ ID NO: 88708
  peptide (1)..(929): Ceres Seq. ID no. 12711702
  misc_feature (371)..(453): Pfam Name: Protein kinase domain Pfam Description: Protein kinase domain
  misc_feature (552)..(929): Homolog of NCBI NO: 30681665 NR Description: WD-40 repeat protein family [Arabidopsis thaliana]
  misc_feature (552)..(929): Homolog of NCBI NO: 7487340 NR Description: hypothetical protein T22B4.90 - Arabidopsis >gi|4850290|emb|CAB43046.1| COP1 like protein [Arabidopsis >gi|7267810|emb|CAB81212.1| COP1 like protein [Arabidopsis
  misc_feature (1)..(274): Homolog of NCBI NO: 7486346 NR Description: hypothetical protein F2P3.14 - Arabidopsis >gi|3600060|gb|AAC35547.1| contains similarity to protein kinases
  misc_feature (271)..(453): Homolog of NCBI NO: 7486346 NR Description: hypothetical protein F2P3.14 - Arabidopsis >gi|3600060|gb|AAC35547.1| contains similarity to protein kinases
  misc_feature (455)..(929): Homolog of NCBI NO: 30690337 NR Description: photomorphogenesis repressor protein -related thaliana] >gi|4809171|gb|AAD30124.1|AF135455_1 phytochrome A
  misc_feature (362)..(503): Homolog of NCBI NO: 30690337 NR Description: photomorphogenesis repressor protein -related thaliana] >gi|4809171|gb|AAD30124.1|AF135455_1 phytochrome A
  misc_feature (455)..(929): Homolog of NCBI NO: 25408984 NR Description: probable photomorphogenesis repressor protein - Arabidopsis thaliana >gi|4559377|gb|AAD23037.1| putative
  misc_feature (465)..(503): Homolog of NCBI NO: 25408984 NR Description: probable photomorphogenesis repressor protein - Arabidopsis thaliana >gi|4559377|gb|AAD23037.1| putative
  misc_feature (487)..(740): Homolog of NCBI NO: 7486345 NR Description: hypothetical protein F2P3.13 - Arabidopsis
  misc_feature (409)..(929): Homolog of NCBI NO: 15219179 NR Description: phytochrome A supressor spa1, putative; protein At1g53090.1 [Arabidopsis thaliana] >gi|14532798|gb|AAK64180.1| phytochrome A supressor spa1 protein [Arabidopsis thaliana]

SEQ ID NO: 92465 - protein, 825 aa, Arabidopsis thaliana; identical to SEQ ID NO: 88709
  peptide (1)..(825): Ceres Seq. ID no. 12711703
  misc_feature (267)..(349): Pfam Name: Protein kinase domain Pfam Description: Protein kinase domain
  misc_feature (448)..(825): Homolog of NCBI NO: 30681665 NR Description: WD-40 repeat protein family [Arabidopsis thaliana]
  misc_feature (448)..(825): Homolog of NCBI NO: 7487340 NR Description: hypothetical protein T22B4.90 - Arabidopsis >gi|4850290|emb|CAB43046.1| COP1 like protein [Arabidopsis >gi|7267810|emb|CAB81212.1| COP1 like protein [Arabidopsis
  misc_feature (1)..(170): Homolog of NCBI NO: 7486346 NR Description: hypothetical protein F2P3.14 - Arabidopsis >gi|3600060|gb|AAC35547.1| contains similarity to protein kinases
  misc_feature (167)..(349): Homolog of NCBI NO: 7486346 NR Description: hypothetical protein F2P3.14 - Arabidopsis >gi|3600060|gb|AAC35547.1| contains similarity to protein kinases
  misc_feature (351)..(825): Homolog of NCBI NO: 30690337 NR Description: photomorphogenesis repressor protein -related thaliana] >gi|4809171|gb|AAD30124.1|AF135455_1 phytochrome A
  misc_feature (258)..(399): Homolog of NCBI NO: 30690337 NR Description: photomorphogenesis repressor protein -related thaliana] >gi|4809171|gb|AAD30124.1|AF135455_1 phytochrome A
  misc_feature (351)..(825): Homolog of NCBI NO: 25408984 NR Description: probable photomorphogenesis repressor protein - Arabidopsis thaliana >gi|4559377|gb|AAD23037.1| putative
  misc_feature (361)..(399): Homolog of NCBI NO: 25408984 NR Description: probable photomorphogenesis repressor protein - Arabidopsis thaliana >gi|4559377|gb|AAD23037.1| putative
  misc_feature (383)..(636): Homolog of NCBI NO: 7486345 NR Description: hypothetical protein F2P3.13 - Arabidopsis
  misc_feature (305)..(825): Homolog of NCBI NO: 15219179 NR Description: phytochrome A supressor spa1, putative; protein At1g53090.1 [Arabidopsis thaliana] >gi|14532798|gb|AAK64180.1| phytochrome A supressor spa1 protein [Arabidopsis thaliana]

SEQ ID NO: 92466 - protein, 811 aa, Arabidopsis thaliana; identical to SEQ ID NO: 88710
  peptide (1)..(811): Ceres Seq. ID no. 12711704
  misc_feature (253)..(335): Pfam Name: Protein kinase domain Pfam Description: Protein kinase domain
  misc_feature (434)..(811): Homolog of NCBI NO: 30681665 NR Description: WD-40 repeat protein family [Arabidopsis thaliana]
  misc_feature (434)..(811): Homolog of NCBI NO: 7487340 NR Description: hypothetical protein T22B4.90 - Arabidopsis >gi|4850290|emb|CAB43046.1| COP1 like protein [Arabidopsis >gi|7267810|emb|CAB81212.1| COP1 like protein [Arabidopsis
  misc_feature (1)..(156): Homolog of NCBI NO: 7486346 NR Description: hypothetical protein F2P3.14 - Arabidopsis >gi|3600060|gb|AAC35547.1| contains similarity to protein kinases
  misc_feature (153)..(335): Homolog of NCBI NO: 7486346 NR Description: hypothetical protein F2P3.14 - Arabidopsis >gi|3600060|gb|AAC35547.1| contains similarity to protein kinases
  misc_feature (337)..(811): Homolog of NCBI NO: 30690337 NR Description: photomorphogenesis repressor protein -related thaliana] >gi|4809171|gb|AAD30124.1|AF135455_1 phytochrome A
  misc_feature (244)..(385): Homolog of NCBI NO: 30690337 NR Description: photomorphogenesis repressor protein -related thaliana] >gi|4809171|gb|AAD30124.1|AF135455_1 phytochrome A
  misc_feature (337)..(811): Homolog of NCBI NO: 25408984 NR Description: probable photomorphogenesis repressor protein - Arabidopsis thaliana >gi|4559377|gb|AAD23037.1| putative
  misc_feature (347)..(385): Homolog of NCBI NO: 25408984 NR Description: probable photomorphogenesis repressor protein - Arabidopsis thaliana >gi|4559377|gb|AAD23037.1| putative
  misc_feature (369)..(622): Homolog of NCBI NO: 7486345 NR Description: hypothetical protein F2P3.13 - Arabidopsis
  misc_feature (291)..(811): Homolog of NCBI NO: 15219179 NR Description: phytochrome A supressor spa1, putative; protein At1g53090.1 [Arabidopsis thaliana] >gi|14532798|gb|AAK64180.1| phytochrome A supressor spa1 protein [Arabidopsis thaliana]

SEQ ID NO: 92467 - DNA, 2829 bp, Arabidopsis thaliana; identical to SEQ ID NO: 88711
  misc_feature (1)..(2829): Ceres Seq. ID no. 12711713
  misc_feature: MA Experiment ID: 20000439 Result: Up-regulated in Transcription
  misc_feature: MA Experiment 20000439 PARAMETER Experiment Name: At_Roots__P Parameter: Age (day) Value: 14 vs. 21
  misc_feature: MA Experiment 20000439 PARAMETER Experiment Name: At_Roots__P Parameter: Organism Value: A. thaliana
  misc_feature: MA Experiment 20000439 PARAMETER Experiment Name: At_Roots__P Parameter: Tissue Value: Roots vs. Whole Plant

SEQ ID NO: 92468 - protein, 942 aa, Arabidopsis thaliana; identical to SEQ ID NO: 88712
  peptide (1)..(942): Ceres Seq. ID no. 12711714
  misc_feature (406)..(941): Pfam Name: Ferric reductase like transmembrane component Pfam Description: Ferric reductase like transmembrane component
  misc_feature (45)..(942): Homolog of NCBI NO: 28268678 NR Description: respiratory burst oxidase homolog [Nicotiana
  misc_feature (55)..(942): Homolog of NCBI NO: 17384016 NR Description: NADPH oxidase [Nicotiana tabacum]
  misc_feature (65)..(942): Homolog of NCBI NO: 16549087 NR Description: respiratory burst oxidase homolog [Solanum
  misc_feature (215)..(942): Homolog of NCBI NO: 4585142 NR Description: NADPH oxidase; gp91; phox homolog [Lycopersicon
  misc_feature (66)..(211): Homolog of NCBI NO: 4585142 NR Description: NADPH oxidase; gp91; phox homolog [Lycopersicon
  misc_feature (11)..(942): Homolog of NCBI NO: 18407959 NR Description: cytochrome b245 beta chain homolog RbohAp108, protein id: At1g64060.1, supported by cDNA: gi_2654867, supported
  misc_feature (11)..(942): Homolog of NCBI NO: 3242456 NR Description: Atrboh F [Arabidopsis thaliana]
  misc_feature (11)..(846): Homolog of NCBI NO: 25354658 NR Description: protein F22C12.18 [imported] - Arabidopsis >gi|6692109|gb|AAF24574.1|AC007764_16 F22C12.18 [Arabidopsis
  misc_feature (837)..(942): Homolog of NCBI NO: 25354658 NR Description: protein F22C12.18 [imported] - Arabidopsis >gi|6692109|gb|AAF24574.1|AC007764_16 F22C12.18 [Arabidopsis
  misc_feature (7)..(942): Homolog of NCBI NO: 34910200 NR Description: cytochrome b245 beta chain homolog rbohA [Oryza

SEQ ID NO: 92469 - protein, 940 aa, Arabidopsis thaliana; identical to SEQ ID NO: 88713
  peptide (1)..(940): Ceres Seq. ID no. 12711715
  misc_feature (404)..(939): Pfam Name: Ferric reductase like transmembrane component Pfam Description: Ferric reductase like transmembrane component
  misc_feature (43)..(940): Homolog of NCBI NO: 28268678 NR Description: respiratory burst oxidase homolog [Nicotiana
  misc_feature (53)..(940): Homolog of NCBI NO: 17384016 NR Description: NADPH oxidase [Nicotiana tabacum]
  misc_feature (63)..(940): Homolog of NCBI NO: 16549087 NR Description: respiratory burst oxidase homolog [Solanum
  misc_feature (213)..(940): Homolog of NCBI NO: 4585142 NR Description: NADPH oxidase; gp91; phox homolog [Lycopersicon
  misc_feature (64)..(209): Homolog of NCBI NO: 4585142 NR Description: NADPH oxidase; gp91; phox homolog [Lycopersicon
  misc_feature (9)..(940): Homolog of NCBI NO: 18407959 NR Description: cytochrome b245 beta chain homolog RbohAp108, protein id: At1g64060.1, supported by cDNA: gi_2654867, supported
  misc_feature (9)..(940): Homolog of NCBI NO: 3242456 NR Description: Atrboh F [Arabidopsis thaliana]
  misc_feature (9)..(844): Homolog of NCBI NO: 25354658 NR Description: protein F22C12.18 [imported] - Arabidopsis >gi|6692109|gb|AAF24574.1|AC007764_16 F22C12.18 [Arabidopsis
  misc_feature (835)..(940): Homolog of NCBI NO: 25354658 NR Description: protein F22C12.18 [imported] - Arabidopsis >gi|6692109|gb|AAF24574.1|AC007764_16 F22C12.18 [Arabidopsis
  misc_feature (5)..(940): Homolog of NCBI NO: 34910200 NR Description: cytochrome b245 beta chain homolog rbohA [Oryza

SEQ ID NO: 92470 - protein, 708 aa, Arabidopsis thaliana; identical to SEQ ID NO: 88714
  peptide (1)..(708): Ceres Seq. ID no. 12711716
  misc_feature (172)..(707): Pfam Name: Ferric reductase like transmembrane component Pfam Description: Ferric reductase like transmembrane component
  misc_feature (1)..(708): Homolog of NCBI NO: 28268678 NR Description: respiratory burst oxidase homolog [Nicotiana
  misc_feature (1)..(708): Homolog of NCBI NO: 17384016 NR Description: NADPH oxidase [Nicotiana tabacum]
  misc_feature (1)..(708): Homolog of NCBI NO: 16549087 NR Description: respiratory burst oxidase homolog [Solanum
  misc_feature (1)..(708): Homolog of NCBI NO: 4585142 NR Description: NADPH oxidase; gp91; phox homolog [Lycopersicon
  misc_feature (1)..(708): Homolog of NCBI NO: 18407959 NR Description: cytochrome b245 beta chain homolog RbohAp108, protein id: At1g64060.1, supported by cDNA: gi_2654867, supported
  misc_feature (1)..(708): Homolog of NCBI NO: 3242456 NR Description: Atrboh F [Arabidopsis thaliana]
  misc_feature (1)..(612): Homolog of NCBI NO: 25354658 NR Description: protein F22C12.18 [imported] - Arabidopsis >gi|6692109|gb|AAF24574.1|AC007764_16 F22C12.18 [Arabidopsis
  misc_feature (603)..(708): Homolog of NCBI NO: 25354658 NR Description: protein F22C12.18 [imported] - Arabidopsis >gi|6692109|gb|AAF24574.1|AC007764_16 F22C12.18 [Arabidopsis
  misc_feature (1)..(708): Homolog of NCBI NO: 34910200 NR Description: cytochrome b245 beta chain homolog rbohA [Oryza
  misc_feature (1)..(708): Homolog of NCBI NO: 18389310 NR Description: respiratory burst oxidase protein F [Solanum

SEQ ID NO: 92471 - DNA, 954 bp, Arabidopsis thaliana; identical to SEQ ID NO: 88715
  misc_feature (1)..(954): Ceres Seq. ID no. 12711753
  misc_feature: MA Experiment ID: 20000173 Result: Down-regulated in Transcription
  misc_feature: MA Experiment 20000173 PARAMETER Experiment Name: At_42deg_Heat_P Parameter: Age (day) Value: 14
  misc_feature: MA Experiment 20000173 PARAMETER Experiment Name: At_42deg_Heat_P Parameter: Organism Value: A. thaliana
  misc_feature: MA Experiment 20000173 PARAMETER Experiment Name: At_42deg_Heat_P Parameter: Plant Line Value: WS
  misc_feature: MA Experiment 20000173 PARAMETER Experiment Name: At_42deg_Heat_P Parameter: Temperature (deg C) Value: 42 vs. 22
  misc_feature: MA Experiment 20000173 PARAMETER Experiment Name: At_42deg_Heat_P Parameter: Timepoint (hr) Value: 6
  misc_feature: MA Experiment 20000173 PARAMETER Experiment Name: At_42deg_Heat_P Parameter: Tissue Value: Aerial
  misc_feature: MA Experiment ID: 20000179 Result: Up-regulated in Transcription
  misc_feature: MA Experiment 20000179 PARAMETER Experiment Name: At_Germinating_Seeds_P Parameter: Age (hr) Value: 6 vs. 0
  misc_feature: MA Experiment 20000179 PARAMETER Experiment Name: At_Germinating_Seeds_P Parameter: Tissue Value: Germinating Seeds
  misc_feature: MA Experiment ID: 20000184 Result: Down-regulated in Transcription
  misc_feature: MA Experiment 20000184 PARAMETER Experiment Name: At_Shoots__P Parameter: Age (day) Value: 7
  misc_feature: MA Experiment 20000184 PARAMETER Experiment Name: At_Shoots__P Parameter: Tissue Value: Shoots vs. Whole Plant
  misc_feature: MA Experiment ID: 20000224 Result: Down-regulated in Transcription
  misc_feature: MA Experiment ID: 20000234 Result: Down-regulated in Transcription
  misc_feature: MA Experiment 20000234 PARAMETER Experiment Name: At_Siliques_P Parameter: Age (day) Value: 21
  misc_feature: MA Experiment 20000234 PARAMETER Experiment Name: At_Siliques_P Parameter: Organism Value: A. thaliana
  misc_feature: MA Experiment 20000234 PARAMETER Experiment Name: At_Siliques_P Parameter: Plant Line Value: WS
  misc_feature: MA Experiment 20000234 PARAMETER Experiment Name: At_Siliques_P Parameter: Tissue Value: Less Than 5mm Siliques vs. Whole Plant
  misc_feature: MA Experiment ID: 20000235 Result: Down-regulated in Transcription
  misc_feature: MA Experiment 20000235 PARAMETER Experiment Name: At_Siliques_P Parameter: Age (day) Value: 21
  misc_feature: MA Experiment 20000235 PARAMETER Experiment Name: At_Siliques_P Parameter: Organism Value: A. thaliana
  misc_feature: MA Experiment 20000235 PARAMETER Experiment Name: At_Siliques_P Parameter: Plant Line Value: WS
  misc_feature: MA Experiment 20000235 PARAMETER Experiment Name: At_Siliques_P Parameter: Tissue Value: 5-10mm Siliques vs. Whole Plant
  misc_feature: MA Experiment ID: 20000264 Result: Down-regulated in Transcription
  misc_feature: MA Experiment 20000264 PARAMETER Experiment Name: At_Open_Flower_P Parameter: Age (day) Value: 21
  misc_feature: MA Experiment 20000264 PARAMETER Experiment Name: At_Open_Flower_P Parameter: Plant Line Value: WS
  misc_feature: MA Experiment 20000264 PARAMETER Experiment Name: At_Open_Flower_P Parameter: Tissue Value: Open Flower vs. Whole Plant
  misc_feature: MA Experiment ID: 20000265 Result: Down-regulated in Transcription
  misc_feature: MA Experiment 20000265 PARAMETER Experiment Name: At_Open_Flower_P Parameter: Age (day) Value: 21
  misc_feature: MA Experiment 20000265 PARAMETER Experiment Name: At_Open_Flower_P Parameter: Plant Line Value: WS
  misc_feature: MA Experiment 20000265 PARAMETER Experiment Name: At_Open_Flower_P Parameter: Tissue Value: Closed Flower vs. Whole Plant
  misc_feature: MA Experiment ID: 20000286 Result: Down-regulated in Transcription
  misc_feature: MA Experiment 20000286 PARAMETER Experiment Name: At_Open_Flower_P Parameter: Age (day) Value: 21
  misc_feature: MA Experiment 20000286 PARAMETER Experiment Name: At_Open_Flower_P Parameter: Plant Line Value: WS
  misc_feature: MA Experiment 20000286 PARAMETER Experiment Name: At_Open_Flower_P Parameter: Tissue Value: Half Open vs. Whole Plant
  misc_feature: MA Experiment ID: 20000451 Result: Up-regulated in Transcription
  misc_feature: MA Experiment 20000451 PARAMETER Experiment Name: At_CS6879_Shoots-Roots_P Parameter: Age (day) Value: 14
  misc_feature: MA Experiment 20000451 PARAMETER Experiment Name: At_CS6879_Shoots-Roots_P Parameter: Organism Value: A. thaliana
  misc_feature: MA Experiment 20000451 PARAMETER Experiment Name: At_CS6879_Shoots-Roots_P Parameter: Plant Line Value: CS6879 vs. WS
  misc_feature: MA Experiment 20000451 PARAMETER Experiment Name: At_CS6879_Shoots-Roots_P Parameter: Tissue Value: Roots
  misc_feature: MA Experiment ID: 20000452 Result: Up-regulated in Transcription
  misc_feature: MA Experiment 20000452 PARAMETER Experiment Name: At_CS6879_Shoots-Roots_P Parameter: Age (day) Value: 14
  misc_feature: MA Experiment 20000452 PARAMETER Experiment Name: At_CS6879_Shoots-Roots_P Parameter: Organism Value: A. thaliana
  misc_feature: MA Experiment 20000452 PARAMETER Experiment Name: At_CS6879_Shoots-Roots_P Parameter: Plant Line Value: CS6879 vs. WS
  misc_feature: MA Experiment 20000452 PARAMETER Experiment Name: At_CS6879_Shoots-Roots_P Parameter: Tissue Value: Shoots
  misc_feature: MA Experiment ID: 20000496 Result: Up-regulated in Transcription
  misc_feature: MA Experiment 20000496 PARAMETER Experiment Name: At_Guard_Cells_P Parameter: Harvest Date Value: 7/19/2002
  misc_feature: MA Experiment 20000496 PARAMETER Experiment Name: At_Guard_Cells_P Parameter: Organism Value: Canola
  misc_feature: MA Experiment 20000496 PARAMETER Experiment Name: At_Guard_Cells_P Parameter: Tissue Value: Guard Cells vs. Leaves
  misc_feature: MA Experiment ID: 20000573 Result: Down-regulated in Transcription
  misc_feature: MA Experiment 20000573 PARAMETER Experiment Name: At_100uM_ABA_Mutants__P Parameter: Organism Value: A. thaliana
  misc_feature: MA Experiment 20000573 PARAMETER Experiment Name: At_100uM_ABA_Mutants__P Parameter: Plant Line Value: CS22 vs. Ler wt
  misc_feature: MA Experiment 20000573 PARAMETER Experiment Name: At_100uM_ABA_Mutants__P Parameter: Timepoint (hr) Value: N/A
  misc_feature: MA Experiment 20000573 PARAMETER Experiment Name: At_100uM_ABA_Mutants__P Parameter: Tissue Value: Whole Plant
  misc_feature: MA Experiment 20000573 PARAMETER Experiment Name: At_100uM_ABA_Mutants__P Parameter: Treatment Value: None
  misc_feature: MA Experiment ID: 20000574 Result: Down-regulated in Transcription
  misc_feature: MA Experiment 20000574 PARAMETER Experiment Name: At_100uM_ABA_Mutants__P Parameter: Organism Value: A. thaliana
  misc_feature: MA Experiment 20000574 PARAMETER Experiment Name: At_100uM_ABA_Mutants__P Parameter: Plant Line Value: CS23 vs. Ler wt
  misc_feature: MA Experiment 20000574 PARAMETER Experiment Name: At_100uM_ABA_Mutants__P Parameter: Timepoint (hr) Value: N/A
  misc_feature: MA Experiment 20000574 PARAMETER Experiment Name: At_100uM_ABA_Mutants__P Parameter: Tissue Value: Whole Plant
  misc_feature: MA Experiment 20000574 PARAMETER Experiment Name: At_100uM_ABA_Mutants__P Parameter: Treatment Value: None
  misc_feature: MA Experiment ID: 20000794 Result: Down-regulated in Transcription
  misc_feature: MA Experiment 20000794 PARAMETER Experiment Name: At_Petals_P Parameter: Age (day) Value: 23-25 days
  misc_feature: MA Experiment 20000794 PARAMETER Experiment Name: At_Petals_P Parameter: Plant Line Value: WS
  misc_feature: MA Experiment 20000794 PARAMETER Experiment Name: At_Petals_P Parameter: Tissue Value: Petals vs. Whole plant

SEQ ID NO: 92472 - protein, 317 aa, Arabidopsis thaliana; identical to SEQ ID NO: 88716
  peptide (1)..(317): Ceres Seq. ID no. 12711754
  misc_feature (1)..(317): Homolog of NCBI NO: 15233359 NR Description: putative protein; protein id: At4g11410.1
  misc_feature (1)..(315): Homolog of NCBI NO: 30686197 NR Description: short-chain dehydrogenase/reductase family
  misc_feature (1)..(315): Homolog of NCBI NO: 23297050 NR Description: unknown protein [Arabidopsis thaliana]
  misc_feature (1)..(315): Homolog of NCBI NO: 18416145 NR Description: putative protein; protein id: At4g23430.1,
  misc_feature (8)..(311): Homolog of NCBI NO: 34895876 NR Description: P0009G03.18 [Oryza sativa (japonica
  misc_feature (1)..(308): Homolog of NCBI NO: 37536622 NR Description: putative WW-domain oxidoreductase [Oryza sativa
  misc_feature (7)..(311): Homolog of NCBI NO: 18413950 NR Description: putative protein; protein id: At5g02540.1, by cDNA: 26538., supported by cDNA: gi_20260301 [Arabidopsis
  misc_feature (7)..(311): Homolog of NCBI NO: 21554820 NR Description: putativepod-specific dehydrogenase SAC25
  misc_feature (7)..(311): Homolog of NCBI NO: 20260302 NR Description: putative protein [Arabidopsis thaliana]
  misc_feature (8)..(311): Homolog of NCBI NO: 629592 NR Description: hypothetical protein - rape

SEQ ID NO: 92473 - protein, 260 aa, Arabidopsis thaliana; identical to SEQ ID NO: 88717
  peptide (1)..(260): Ceres Seq. ID no. 12711755
  misc_feature (1)..(260): Homolog of NCBI NO: 15233359 NR Description: putative protein; protein id: At4g11410.1
  misc_feature (1)..(258): Homolog of NCBI NO: 30686197 NR Description: short-chain dehydrogenase/reductase family
  misc_feature (1)..(258): Homolog of NCBI NO: 23297050 NR Description: unknown protein [Arabidopsis thaliana]
  misc_feature (1)..(258): Homolog of NCBI NO: 18416145 NR Description: putative protein; protein id: At4g23430.1,
  misc_feature (1)..(254): Homolog of NCBI NO: 34895876 NR Description: P0009G03.18 [Oryza sativa (japonica
  misc_feature (1)..(251): Homolog of NCBI NO: 37536622 NR Description: putative WW-domain oxidoreductase [Oryza sativa
  misc_feature (1)..(254): Homolog of NCBI NO: 18413950 NR Description: putative protein; protein id: At5g02540.1, by cDNA: 26538., supported by cDNA: gi_20260301 [Arabidopsis
  misc_feature (1)..(254): Homolog of NCBI NO: 21554820 NR Description: putativepod-specific dehydrogenase SAC25
  misc_feature (1)..(254): Homolog of NCBI NO: 20260302 NR Description: putative protein [Arabidopsis thaliana]
  misc_feature (1)..(254): Homolog of NCBI NO: 629592 NR Description: hypothetical protein - rape

SEQ ID NO: 92474 - protein, 233 aa, Arabidopsis thaliana; identical to SEQ ID NO: 88718
  peptide (1)..(233): Ceres Seq. ID no. 12711756
  misc_feature (1)..(233): Homolog of NCBI NO: 15233359 NR Description: putative protein; protein id: At4g11410.1
  misc_feature (1)..(231): Homolog of NCBI NO: 30686197 NR Description: short-chain dehydrogenase/reductase family
  misc_feature (1)..(231): Homolog of NCBI NO: 23297050 NR Description: unknown protein [Arabidopsis thaliana]
  misc_feature (1)..(231): Homolog of NCBI NO: 18416145 NR Description: putative protein; protein id: At4g23430.1,
  misc_feature (1)..(227): Homolog of NCBI NO: 34895876 NR Description: P0009G03.18 [Oryza sativa (japonica
  misc_feature (1)..(224): Homolog of NCBI NO: 37536622 NR Description: putative WW-domain oxidoreductase [Oryza sativa
  misc_feature (1)..(227): Homolog of NCBI NO: 18413950 NR Description: putative protein; protein id: At5g02540.1, by cDNA: 26538., supported by cDNA: gi_20260301 [Arabidopsis
  misc_feature (1)..(227): Homolog of NCBI NO: 21554820 NR Description: putativepod-specific dehydrogenase SAC25
  misc_feature (1)..(227): Homolog of NCBI NO: 20260302 NR Description: putative protein [Arabidopsis thaliana]
  misc_feature (1)..(227): Homolog of NCBI NO: 629592 NR Description: hypothetical protein - rape

SEQ ID NO: 92475 - DNA, 2094 bp, Arabidopsis thaliana; identical to SEQ ID NO: 88719
  misc_feature (1)..(2094): Ceres Seq. ID no. 12711764
  misc_feature: MA Experiment ID: 20000166 Result: Down-regulated in Transcription
  misc_feature: MA Experiment 20000166 PARAMETER Experiment Name: At_100uM_ABA_P Parameter: Age (day) Value: 14
  misc_feature: MA Experiment 20000166 PARAMETER Experiment Name: At_100uM_ABA_P Parameter: Organism Value: A. thaliana
  misc_feature: MA Experiment 20000166 PARAMETER Experiment Name: At_100uM_ABA_P Parameter: Plant Line Value: WS
  misc_feature: MA Experiment 20000166 PARAMETER Experiment Name: At_100uM_ABA_P Parameter: Timepoint (hr) Value: 1
  misc_feature: MA Experiment 20000166 PARAMETER Experiment Name: At_100uM_ABA_P Parameter: Tissue Value: Aerial
  misc_feature: MA Experiment 20000166 PARAMETER Experiment Name: At_100uM_ABA_P Parameter: Treatment Value: 100uM ABA vs. No Treatment
  misc_feature: MA Experiment ID: 20000184 Result: Up-regulated in Transcription
  misc_feature: MA Experiment 20000184 PARAMETER Experiment Name: At_Shoots__P Parameter: Age (day) Value: 7
  misc_feature: MA Experiment 20000184 PARAMETER Experiment Name: At_Shoots__P Parameter: Tissue Value: Shoots vs. Whole Plant
  misc_feature: MA Experiment ID: 20000436 Result: Down-regulated in Transcription
  misc_feature: MA Experiment 20000436 PARAMETER Experiment Name: At_Drought_P Parameter: Age (day) Value: 7
  misc_feature: MA Experiment 20000436 PARAMETER Experiment Name: At_Drought_P Parameter: Organism Value: A. thaliana
  misc_feature: MA Experiment 20000436 PARAMETER Experiment Name: At_Drought_P Parameter: Plant Line Value: WS
  misc_feature: MA Experiment 20000436 PARAMETER Experiment Name: At_Drought_P Parameter: Timepoint (hr) Value: 12
  misc_feature: MA Experiment 20000436 PARAMETER Experiment Name: At_Drought_P Parameter: Tissue Value: Whole Plant
  misc_feature: MA Experiment 20000436 PARAMETER Experiment Name: At_Drought_P Parameter: Treatment Value: Drought vs. No Drought
  misc_feature: MA Experiment ID: 20000453 Result: Down-regulated in Transcription
  misc_feature: MA Experiment 20000453 PARAMETER Experiment Name: At_100uM_ABA_P Parameter: Age (day) Value: 15
  misc_feature: MA Experiment 20000453 PARAMETER Experiment Name: At_100uM_ABA_P Parameter: Organism Value: A. thaliana
  misc_feature: MA Experiment 20000453 PARAMETER Experiment Name: At_100uM_ABA_P Parameter: Plant Line Value: WS
  misc_feature: MA Experiment 20000453 PARAMETER Experiment Name: At_100uM_ABA_P Parameter: Timepoint (hr) Value: 24
  misc_feature: MA Experiment 20000453 PARAMETER Experiment Name: At_100uM_ABA_P Parameter: Tissue Value: Aerial
  misc_feature: MA Experiment 20000453 PARAMETER Experiment Name: At_100uM_ABA_P Parameter: Treatment Value: 100uM ABA vs. No Treatment
  misc_feature: MA Experiment ID: 20001554 Result: Down-regulated in Transcription
  misc_feature: MA Experiment 20001554 PARAMETER Experiment Name: At_Drought_Soil_Dry_P Parameter: Age (day) Value: 21
  misc_feature: MA Experiment 20001554 PARAMETER Experiment Name: At_Drought_Soil_Dry_P Parameter: Organism Value: A. thaliana
  misc_feature: MA Experiment 20001554 PARAMETER Experiment Name: At_Drought_Soil_Dry_P Parameter: Plant Line Value: WS
  misc_feature: MA Experiment 20001554 PARAMETER Experiment Name: At_Drought_Soil_Dry_P Parameter: Post Timepoint (hr) Value: None
  misc_feature: MA Experiment 20001554 PARAMETER Experiment Name: At_Drought_Soil_Dry_P Parameter: Post-Treatment Value: None
  misc_feature: MA Experiment 20001554 PARAMETER Experiment Name: At_Drought_Soil_Dry_P Parameter: Timepoint (day) Value: 7
  misc_feature: MA Experiment 20001554 PARAMETER Experiment Name: At_Drought_Soil_Dry_P Parameter: Treatment Value: Drought vs. No Drought
  misc_feature: MA Experiment ID: 20001555 Result: Down-regulated in Transcription
  misc_feature: MA Experiment 20001555 PARAMETER Experiment Name: At_Drought_Soil_Dry_P Parameter: Age (day) Value: 24
  misc_feature: MA Experiment 20001555 PARAMETER Experiment Name: At_Drought_Soil_Dry_P Parameter: Organism Value: A. thaliana
  misc_feature: MA Experiment 20001555 PARAMETER Experiment Name: At_Drought_Soil_Dry_P Parameter: Plant Line Value: WS
  misc_feature: MA Experiment 20001555 PARAMETER Experiment Name: At_Drought_Soil_Dry_P Parameter: Post Timepoint (hr) Value: None
  misc_feature: MA Experiment 20001555 PARAMETER Experiment Name: At_Drought_Soil_Dry_P Parameter: Post-Treatment Value: None
  misc_feature: MA Experiment 20001555 PARAMETER Experiment Name: At_Drought_Soil_Dry_P Parameter: Timepoint (day) Value: 10
  misc_feature: MA Experiment 20001555 PARAMETER Experiment Name: At_Drought_Soil_Dry_P Parameter: Treatment Value: Drought vs. No Drought
  misc_feature: MA Experiment ID: 20001556 Result: Down-regulated in Transcription
  misc_feature: MA Experiment 20001556 PARAMETER Experiment Name: At_Drought_Soil_Dry_P Parameter: Age (day) Value: 26
  misc_feature: MA Experiment 20001556 PARAMETER Experiment Name: At_Drought_Soil_Dry_P Parameter: Organism Value: A. thaliana
  misc_feature: MA Experiment 20001556 PARAMETER Experiment Name: At_Drought_Soil_Dry_P Parameter: Plant Line Value: WS
  misc_feature: MA Experiment 20001556 PARAMETER Experiment Name: At_Drought_Soil_Dry_P Parameter: Post Timepoint (hr) Value: None
  misc_feature: MA Experiment 20001556 PARAMETER Experiment Name: At_Drought_Soil_Dry_P Parameter: Post-Treatment Value: None
  misc_feature: MA Experiment 20001556 PARAMETER Experiment Name: At_Drought_Soil_Dry_P Parameter: Timepoint (day) Value: 12
  misc_feature: MA Experiment 20001556 PARAMETER Experiment Name: At_Drought_Soil_Dry_P Parameter: Treatment Value: Drought vs. No Drought

SEQ ID NO: 92476 - protein, 697 aa, Arabidopsis thaliana; identical to SEQ ID NO: 88720
  peptide (1)..(697): Ceres Seq. ID no. 12711765
  misc_feature (4)..(668): Homolog of NCBI NO: 15233389 NR Description: serine/threonine kinase-like protein; protein id:
  misc_feature (1)..(661): Homolog of NCBI NO: 30686091 NR Description: serine/threonine kinase - like protein
  misc_feature (310)..(670): Homolog of NCBI NO: 30686129 NR Description: serine/threonine kinase - like protein
  misc_feature (1)..(321): Homolog of NCBI NO: 30686129 NR Description: serine/threonine kinase - like protein
  misc_feature (1)..(661): Homolog of NCBI NO: 4127461 NR Description: receptor-like protein kinase, RLK3 [Arabidopsis
  misc_feature (11)..(668): Homolog of NCBI NO: 7488201 NR Description: probable serine/threonine-specific protein kinase
  misc_feature (11)..(668): Homolog of NCBI NO: 15233396 NR Description: serine/threonine kinase-like protein (fragment);
  misc_feature (22)..(668): Homolog of NCBI NO: 15233391 NR Description: serine/threonine kinase-like protein; protein id:
  misc_feature (6)..(668): Homolog of NCBI NO: 4008012 NR Description: receptor-like protein kinase [Arabidopsis
  misc_feature (6)..(690): Homolog of NCBI NO: 15236444 NR Description: protein kinase - like protein; protein id:

SEQ ID NO: 92477 - protein, 622 aa, Arabidopsis thaliana; identical to SEQ ID NO: 88721
  peptide (1)..(622): Ceres Seq. ID no. 12711766
  misc_feature (1)..(593): Homolog of NCBI NO: 15233389 NR Description: serine/threonine kinase-like protein; protein id:
  misc_feature (1)..(586): Homolog of NCBI NO: 30686091 NR Description: serine/threonine kinase - like protein
  misc_feature (235)..(595): Homolog of NCBI NO: 30686129 NR Description: serine/threonine kinase - like protein
  misc_feature (1)..(246): Homolog of NCBI NO: 30686129 NR Description: serine/threonine kinase - like protein
  misc_feature (1)..(586): Homolog of NCBI NO: 4127461 NR Description: receptor-like protein kinase, RLK3 [Arabidopsis
  misc_feature (1)..(593): Homolog of NCBI NO: 7488201 NR Description: probable serine/threonine-specific protein kinase
  misc_feature (1)..(593): Homolog of NCBI NO: 15233396 NR Description: serine/threonine kinase-like protein (fragment);
  misc_feature (1)..(593): Homolog of NCBI NO: 15233391 NR Description: serine/threonine kinase-like protein; protein id:
  misc_feature (1)..(593): Homolog of NCBI NO: 4008012 NR Description: receptor-like protein kinase [Arabidopsis
  misc_feature (1)..(615): Homolog of NCBI NO: 15236444 NR Description: protein kinase - like protein; protein id:

SEQ ID NO: 92478 - protein, 620 aa, Arabidopsis thaliana; identical to SEQ ID NO: 88722
  peptide (1)..(620): Ceres Seq. ID no. 12711767
  misc_feature (1)..(591): Homolog of NCBI NO: 15233389 NR Description: serine/threonine kinase-like protein; protein id:
  misc_feature (1)..(584): Homolog of NCBI NO: 30686091 NR Description: serine/threonine kinase - like protein
  misc_feature (233)..(593): Homolog of NCBI NO: 30686129 NR Description: serine/threonine kinase - like protein
  misc_feature (1)..(244): Homolog of NCBI NO: 30686129 NR Description: serine/threonine kinase - like protein
  misc_feature (1)..(584): Homolog of NCBI NO: 4127461 NR Description: receptor-like protein kinase, RLK3 [Arabidopsis
  misc_feature (1)..(591): Homolog of NCBI NO: 7488201 NR Description: probable serine/threonine-specific protein kinase
  misc_feature (1)..(591): Homolog of NCBI NO: 15233396 NR Description: serine/threonine kinase-like protein (fragment);
  misc_feature (1)..(591): Homolog of NCBI NO: 15233391 NR Description: serine/threonine kinase-like protein; protein id:
  misc_feature (1)..(591): Homolog of NCBI NO: 4008012 NR Description: receptor-like protein kinase [Arabidopsis
  misc_feature (1)..(613): Homolog of NCBI NO: 15236444 NR Description: protein kinase - like protein; protein id:

SEQ ID NO: 92479 - DNA, 2007 bp, Arabidopsis thaliana; identical to SEQ ID NO: 88723
  misc_feature (1)..(2007): Ceres Seq. ID no. 12711778
  misc_feature: MA Experiment ID: 20000171 Result: Down-regulated in Transcription
  misc_feature: MA Experiment 20000171 PARAMETER Experiment Name: At_42deg_Heat_P Parameter: Age (day) Value: 14
  misc_feature: MA Experiment 20000171 PARAMETER Experiment Name: At_42deg_Heat_P Parameter: Organism Value: A. thaliana
  misc_feature: MA Experiment 20000171 PARAMETER Experiment Name: At_42deg_Heat_P Parameter: Plant Line Value: WS
  misc_feature: MA Experiment 20000171 PARAMETER Experiment Name: At_42deg_Heat_P Parameter: Temperature (deg C) Value: 42 vs. 22
  misc_feature: MA Experiment 20000171 PARAMETER Experiment Name: At_42deg_Heat_P Parameter: Timepoint (hr) Value: 1
  misc_feature: MA Experiment 20000171 PARAMETER Experiment Name: At_42deg_Heat_P Parameter: Tissue Value: Aerial
  misc_feature: MA Experiment ID: 20000173 Result: Down-regulated in Transcription
  misc_feature: MA Experiment 20000173 PARAMETER Experiment Name: At_42deg_Heat_P Parameter: Age (day) Value: 14
  misc_feature: MA Experiment 20000173 PARAMETER Experiment Name: At_42deg_Heat_P Parameter: Organism Value: A. thaliana
  misc_feature: MA Experiment 20000173 PARAMETER Experiment Name: At_42deg_Heat_P Parameter: Plant Line Value: WS
  misc_feature: MA Experiment 20000173 PARAMETER Experiment Name: At_42deg_Heat_P Parameter: Temperature (deg C) Value: 42 vs. 22
  misc_feature: MA Experiment 20000173 PARAMETER Experiment Name: At_42deg_Heat_P Parameter: Timepoint (hr) Value: 6
  misc_feature: MA Experiment 20000173 PARAMETER Experiment Name: At_42deg_Heat_P Parameter: Tissue Value: Aerial
  misc_feature: MA Experiment ID: 20000182 Result: Up-regulated in Transcription
  misc_feature: MA Experiment 20000182 PARAMETER Experiment Name: At_2mM_SA_P Parameter: Age (day) Value: 14
  misc_feature: MA Experiment 20000182 PARAMETER Experiment Name: At_2mM_SA_P Parameter: Organism Value: A. thaliana
  misc_feature: MA Experiment 20000182 PARAMETER Experiment Name: At_2mM_SA_P Parameter: Plant Line Value: WS
  misc_feature: MA Experiment 20000182 PARAMETER Experiment Name: At_2mM_SA_P Parameter: Timepoint (hr) Value: 6
  misc_feature: MA Experiment 20000182 PARAMETER Experiment Name: At_2mM_SA_P Parameter: Tissue Value: Aerial
  misc_feature: MA Experiment 20000182 PARAMETER Experiment Name: At_2mM_SA_P Parameter: Treatment Value: 2mM SA vs. No Treatment
  misc_feature: MA Experiment ID: 20000185 Result: Up-regulated in Transcription
  misc_feature: MA Experiment 20000185 PARAMETER Experiment Name: At_Roots__P Parameter: Age (day) Value: 7 vs. 21
  misc_feature: MA Experiment 20000185 PARAMETER Experiment Name: At_Roots__P Parameter: Organism Value: A. thaliana
  misc_feature: MA Experiment 20000185 PARAMETER Experiment Name: At_Roots__P Parameter: Tissue Value: Roots vs. Whole Plant
  misc_feature: MA Experiment ID: 20000436 Result: Down-regulated in Transcription
  misc_feature: MA Experiment 20000436 PARAMETER Experiment Name: At_Drought_P Parameter: Age (day) Value: 7
  misc_feature: MA Experiment 20000436 PARAMETER Experiment Name: At_Drought_P Parameter: Organism Value: A. thaliana
  misc_feature: MA Experiment 20000436 PARAMETER Experiment Name: At_Drought_P Parameter: Plant Line Value: WS
  misc_feature: MA Experiment 20000436 PARAMETER Experiment Name: At_Drought_P Parameter: Timepoint (hr) Value: 12
  misc_feature: MA Experiment 20000436 PARAMETER Experiment Name: At_Drought_P Parameter: Tissue Value: Whole Plant
  misc_feature: MA Experiment 20000436 PARAMETER Experiment Name: At_Drought_P Parameter: Treatment Value: Drought vs. No Drought
  misc_feature: MA Experiment ID: 20000437 Result: Down-regulated in Transcription
  misc_feature: MA Experiment 20000437 PARAMETER Experiment Name: At_Drought_P Parameter: Age (day) Value: 8
  misc_feature: MA Experiment 20000437 PARAMETER Experiment Name: At_Drought_P Parameter: Organism Value: A. thaliana
  misc_feature: MA Experiment 20000437 PARAMETER Experiment Name: At_Drought_P Parameter: Plant Line Value: WS
  misc_feature: MA Experiment 20000437 PARAMETER Experiment Name: At_Drought_P Parameter: Timepoint (hr) Value: 24
  misc_feature: MA Experiment 20000437 PARAMETER Experiment Name: At_Drought_P Parameter: Tissue Value: Whole Plant
  misc_feature: MA Experiment 20000437 PARAMETER Experiment Name: At_Drought_P Parameter: Treatment Value: Drought vs. No Drought
  misc_feature: MA Experiment ID: 20000439 Result: Up-regulated in Transcription
  misc_feature: MA Experiment 20000439 PARAMETER Experiment Name: At_Roots__P Parameter: Age (day) Value: 14 vs. 21
  misc_feature: MA Experiment 20000439 PARAMETER Experiment Name: At_Roots__P Parameter: Organism Value: A. thaliana
  misc_feature: MA Experiment 20000439 PARAMETER Experiment Name: At_Roots__P Parameter: Tissue Value: Roots vs. Whole Plant
  misc_feature: MA Experiment ID: 20001555 Result: Down-regulated in Transcription
  misc_feature: MA Experiment 20001555 PARAMETER Experiment Name: At_Drought_Soil_Dry_P Parameter: Age (day) Value: 24
  misc_feature: MA Experiment 20001555 PARAMETER Experiment Name: At_Drought_Soil_Dry_P Parameter: Organism Value: A. thaliana
  misc_feature: MA Experiment 20001555 PARAMETER Experiment Name: At_Drought_Soil_Dry_P Parameter: Plant Line Value: WS
  misc_feature: MA Experiment 20001555 PARAMETER Experiment Name: At_Drought_Soil_Dry_P Parameter: Post Timepoint (hr) Value: None
  misc_feature: MA Experiment 20001555 PARAMETER Experiment Name: At_Drought_Soil_Dry_P Parameter: Post-Treatment Value: None
  misc_feature: MA Experiment 20001555 PARAMETER Experiment Name: At_Drought_Soil_Dry_P Parameter: Timepoint (day) Value: 10
  misc_feature: MA Experiment 20001555 PARAMETER Experiment Name: At_Drought_Soil_Dry_P Parameter: Treatment Value: Drought vs. No Drought
  misc_feature: MA Experiment ID: 20001556 Result: Down-regulated in Transcription
  misc_feature: MA Experiment 20001556 PARAMETER Experiment Name: At_Drought_Soil_Dry_P Parameter: Age (day) Value: 26
  misc_feature: MA Experiment 20001556 PARAMETER Experiment Name: At_Drought_Soil_Dry_P Parameter: Organism Value: A. thaliana
  misc_feature: MA Experiment 20001556 PARAMETER Experiment Name: At_Drought_Soil_Dry_P Parameter: Plant Line Value: WS
  misc_feature: MA Experiment 20001556 PARAMETER Experiment Name: At_Drought_Soil_Dry_P Parameter: Post Timepoint (hr) Value: None
  misc_feature: MA Experiment 20001556 PARAMETER Experiment Name: At_Drought_Soil_Dry_P Parameter: Post-Treatment Value: None
  misc_feature: MA Experiment 20001556 PARAMETER Experiment Name: At_Drought_Soil_Dry_P Parameter: Timepoint (day) Value: 12
  misc_feature: MA Experiment 20001556 PARAMETER Experiment Name: At_Drought_Soil_Dry_P Parameter: Treatment Value: Drought vs. No Drought
  misc_feature: MA Experiment ID: 20001904 Result: Down-regulated in Transcription
  misc_feature: MA Experiment 20001904 PARAMETER Experiment Name: At_Drought_Reproduction_P Parameter: Age (day) Value: 37
  misc_feature: MA Experiment 20001904 PARAMETER Experiment Name: At_Drought_Reproduction_P Parameter: Organism Value: A. thaliana
  misc_feature: MA Experiment 20001904 PARAMETER Experiment Name: At_Drought_Reproduction_P Parameter: Plant Line Value: WS
  misc_feature: MA Experiment 20001904 PARAMETER Experiment Name: At_Drought_Reproduction_P Parameter: Timepoint (day) Value: 7
  misc_feature: MA Experiment 20001904 PARAMETER Experiment Name: At_Drought_Reproduction_P Parameter: Tissue Value: Rosettes
  misc_feature: MA Experiment 20001904 PARAMETER Experiment Name: At_Drought_Reproduction_P Parameter: Treatment Value: Drought vs. No Drought

SEQ ID NO: 92480 - protein, 668 aa, Arabidopsis thaliana; identical to SEQ ID NO: 88724
  peptide (1)..(668): Ceres Seq. ID no. 12711779
  misc_feature (19)..(652): Homolog of NCBI NO: 4127461 NR Description: receptor-like protein kinase, RLK3 [Arabidopsis
  misc_feature (24)..(664): Homolog of NCBI NO: 15236444 NR Description: protein kinase - like protein; protein id:
  misc_feature (26)..(668): Homolog of NCBI NO: 15233389 NR Description: serine/threonine kinase-like protein; protein id:
  misc_feature (183)..(668): Homolog of NCBI NO: 4008012 NR Description: receptor-like protein kinase [Arabidopsis
  misc_feature (24)..(180): Homolog of NCBI NO: 4008012 NR Description: receptor-like protein kinase [Arabidopsis
  misc_feature (26)..(668): Homolog of NCBI NO: 15233391 NR Description: serine/threonine kinase-like protein; protein id:
  misc_feature (324)..(668): Homolog of NCBI NO: 15236421 NR Description: serine /threonine kinase - like protein; protein At4g23200.1 [Arabidopsis thaliana] >gi|7488197|pir||T04837
  misc_feature (24)..(270): Homolog of NCBI NO: 15236421 NR Description: serine /threonine kinase - like protein; protein At4g23200.1 [Arabidopsis thaliana] >gi|7488197|pir||T04837
  misc_feature (43)..(663): Homolog of NCBI NO: 15233387 NR Description: serine/threonine kinase-like protein; protein id:
  misc_feature (24)..(644): Homolog of NCBI NO: 15236451 NR Description: serine/threonine kinase - like protein; protein At4g23300.1 [Arabidopsis thaliana] >gi|7488191|pir||T04847

SEQ ID NO: 92481 - protein, 580 aa, Arabidopsis thaliana; identical to SEQ ID NO: 88725
  peptide (1)..(580): Ceres Seq. ID no. 12711780
  misc_feature (1)..(564): Homolog of NCBI NO: 4127461 NR Description: receptor-like protein kinase, RLK3 [Arabidopsis
  misc_feature (1)..(576): Homolog of NCBI NO: 15236444 NR Description: protein kinase - like protein; protein id:
  misc_feature (1)..(580): Homolog of NCBI NO: 15233389 NR Description: serine/threonine kinase-like protein; protein id:
  misc_feature (95)..(580): Homolog of NCBI NO: 4008012 NR Description: receptor-like protein kinase [Arabidopsis
  misc_feature (1)..(92): Homolog of NCBI NO: 4008012 NR Description: receptor-like protein kinase [Arabidopsis
  misc_feature (1)..(580): Homolog of NCBI NO: 15233391 NR Description: serine/threonine kinase-like protein; protein id:
  misc_feature (236)..(580): Homolog of NCBI NO: 15236421 NR Description: serine /threonine kinase - like protein; protein At4g23200.1 [Arabidopsis thaliana] >gi|7488197|pir||T04837
  misc_feature (1)..(182): Homolog of NCBI NO: 15236421 NR Description: serine /threonine kinase - like protein; protein At4g23200.1 [Arabidopsis thaliana] >gi|7488197|pir||T04837
  misc_feature (1)..(575): Homolog of NCBI NO: 15233387 NR Description: serine/threonine kinase-like protein; protein id:
  misc_feature (1)..(556): Homolog of NCBI NO: 15236451 NR Description: serine/threonine kinase - like protein; protein At4g23300.1 [Arabidopsis thaliana] >gi|7488191|pir||T04847

SEQ ID NO: 92482 - protein, 541 aa, Arabidopsis thaliana; identical to SEQ ID NO: 88726
  peptide (1)..(541): Ceres Seq. ID no. 12711781
  misc_feature (1)..(525): Homolog of NCBI NO: 4127461 NR Description: receptor-like protein kinase, RLK3 [Arabidopsis
  misc_feature (1)..(537): Homolog of NCBI NO: 15236444 NR Description: protein kinase - like protein; protein id:
  misc_feature (1)..(541): Homolog of NCBI NO: 15233389 NR Description: serine/threonine kinase-like protein; protein id:
  misc_feature (56)..(541): Homolog of NCBI NO: 4008012 NR Description: receptor-like protein kinase [Arabidopsis
  misc_feature (1)..(53): Homolog of NCBI NO: 4008012 NR Description: receptor-like protein kinase [Arabidopsis
  misc_feature (1)..(541): Homolog of NCBI NO: 15233391 NR Description: serine/threonine kinase-like protein; protein id:
  misc_feature (197)..(541): Homolog of NCBI NO: 15236421 NR Description: serine /threonine kinase - like protein; protein At4g23200.1 [Arabidopsis thaliana] >gi|7488197|pir||T04837
  misc_feature (1)..(143): Homolog of NCBI NO: 15236421 NR Description: serine /threonine kinase - like protein; protein At4g23200.1 [Arabidopsis thaliana] >gi|7488197|pir||T04837
  misc_feature (1)..(536): Homolog of NCBI NO: 15233387 NR Description: serine/threonine kinase-like protein; protein id:
  misc_feature (1)..(517): Homolog of NCBI NO: 15236451 NR Description: serine/threonine kinase - like protein; protein At4g23300.1 [Arabidopsis thaliana] >gi|7488191|pir||T04847

SEQ ID NO: 92483 - DNA, 624 bp, Arabidopsis thaliana; identical to SEQ ID NO: 88727
  misc_feature (1)..(624): Ceres Seq. ID no. 12711851
  misc_feature: MA Experiment ID: 20000185 Result: Down-regulated in Transcription
  misc_feature: MA Experiment 20000185 PARAMETER Experiment Name: At_Roots__P Parameter: Age (day) Value: 7 vs. 21
  misc_feature: MA Experiment 20000185 PARAMETER Experiment Name: At_Roots__P Parameter: Organism Value: A. thaliana
  misc_feature: MA Experiment 20000185 PARAMETER Experiment Name: At_Roots__P Parameter: Tissue Value: Roots vs. Whole Plant
  misc_feature: MA Experiment ID: 20000234 Result: Down-regulated in Transcription
  misc_feature: MA Experiment 20000234 PARAMETER Experiment Name: At_Siliques_P Parameter: Age (day) Value: 21
  misc_feature: MA Experiment 20000234 PARAMETER Experiment Name: At_Siliques_P Parameter: Organism Value: A. thaliana
  misc_feature: MA Experiment 20000234 PARAMETER Experiment Name: At_Siliques_P Parameter: Plant Line Value: WS
  misc_feature: MA Experiment 20000234 PARAMETER Experiment Name: At_Siliques_P Parameter: Tissue Value: Less Than 5mm Siliques vs. Whole Plant
  misc_feature: MA Experiment ID: 20000235 Result: Down-regulated in Transcription
  misc_feature: MA Experiment 20000235 PARAMETER Experiment Name: At_Siliques_P Parameter: Age (day) Value: 21
  misc_feature: MA Experiment 20000235 PARAMETER Experiment Name: At_Siliques_P Parameter: Organism Value: A. thaliana
  misc_feature: MA Experiment 20000235 PARAMETER Experiment Name: At_Siliques_P Parameter: Plant Line Value: WS
  misc_feature: MA Experiment 20000235 PARAMETER Experiment Name: At_Siliques_P Parameter: Tissue Value: 5-10mm Siliques vs. Whole Plant
  misc_feature: MA Experiment ID: 20000264 Result: Down-regulated in Transcription
  misc_feature: MA Experiment 20000264 PARAMETER Experiment Name: At_Open_Flower_P Parameter: Age (day) Value: 21
  misc_feature: MA Experiment 20000264 PARAMETER Experiment Name: At_Open_Flower_P Parameter: Plant Line Value: WS
  misc_feature: MA Experiment 20000264 PARAMETER Experiment Name: At_Open_Flower_P Parameter: Tissue Value: Open Flower vs. Whole Plant
  misc_feature: MA Experiment ID: 20000265 Result: Down-regulated in Transcription
  misc_feature: MA Experiment 20000265 PARAMETER Experiment Name: At_Open_Flower_P Parameter: Age (day) Value: 21
  misc_feature: MA Experiment 20000265 PARAMETER Experiment Name: At_Open_Flower_P Parameter: Plant Line Value: WS
  misc_feature: MA Experiment 20000265 PARAMETER Experiment Name: At_Open_Flower_P Parameter: Tissue Value: Closed Flower vs. Whole Plant
  misc_feature: MA Experiment ID: 20000286 Result: Down-regulated in Transcription
  misc_feature: MA Experiment 20000286 PARAMETER Experiment Name: At_Open_Flower_P Parameter: Age (day) Value: 21
  misc_feature: MA Experiment 20000286 PARAMETER Experiment Name: At_Open_Flower_P Parameter: Plant Line Value: WS
  misc_feature: MA Experiment 20000286 PARAMETER Experiment Name: At_Open_Flower_P Parameter: Tissue Value: Half Open vs. Whole Plant
  misc_feature: MA Experiment ID: 20000794 Result: Down-regulated in Transcription
  misc_feature: MA Experiment 20000794 PARAMETER Experiment Name: At_Petals_P Parameter: Age (day) Value: 23-25 days
  misc_feature: MA Experiment 20000794 PARAMETER Experiment Name: At_Petals_P Parameter: Plant Line Value: WS
  misc_feature: MA Experiment 20000794 PARAMETER Experiment Name: At_Petals_P Parameter: Tissue Value: Petals vs. Whole plant
  misc_feature: MA Experiment ID: 20001248 Result: Up-regulated in Transcription
  misc_feature: MA Experiment 20001248 PARAMETER Experiment Name: At_Far-red-induction_P Parameter: Age (day) Value: 7
  misc_feature: MA Experiment 20001248 PARAMETER Experiment Name: At_Far-red-induction_P Parameter: Light Value: Far-red vs. White
  misc_feature: MA Experiment 20001248 PARAMETER Experiment Name: At_Far-red-induction_P Parameter: Organism Value: A. thaliana
  misc_feature: MA Experiment 20001248 PARAMETER Experiment Name: At_Far-red-induction_P Parameter: Plant Line Value: Columbia
  misc_feature: MA Experiment 20001248 PARAMETER Experiment Name: At_Far-red-induction_P Parameter: Timepoint (hr) Value: 4
  misc_feature: MA Experiment 20001248 PARAMETER Experiment Name: At_Far-red-induction_P Parameter: Tissue Value: Whole Plant
  misc_feature: MA Experiment ID: 20001450 Result: Up-regulated in Transcription
  misc_feature: MA Experiment 20001450 PARAMETER Experiment Name: At_Far-red-induction_P Parameter: Age (day) Value: 7
  misc_feature: MA Experiment 20001450 PARAMETER Experiment Name: At_Far-red-induction_P Parameter: Light Value: Far-red vs. White
  misc_feature: MA Experiment 20001450 PARAMETER Experiment Name: At_Far-red-induction_P Parameter: Organism Value: A. thaliana
  misc_feature: MA Experiment 20001450 PARAMETER Experiment Name: At_Far-red-induction_P Parameter: Plant Line Value: Columbia
  misc_feature: MA Experiment 20001450 PARAMETER Experiment Name: At_Far-red-induction_P Parameter: Timepoint (hr) Value: 8
  misc_feature: MA Experiment 20001450 PARAMETER Experiment Name: At_Far-red-induction_P Parameter: Tissue Value: Whole Plant
  misc_feature: MA Experiment ID: 20001555 Result: Down-regulated in Transcription
  misc_feature: MA Experiment 20001555 PARAMETER Experiment Name: At_Drought_Soil_Dry_P Parameter: Age (day) Value: 24
  misc_feature: MA Experiment 20001555 PARAMETER Experiment Name: At_Drought_Soil_Dry_P Parameter: Organism Value: A. thaliana
  misc_feature: MA Experiment 20001555 PARAMETER Experiment Name: At_Drought_Soil_Dry_P Parameter: Plant Line Value: WS
  misc_feature: MA Experiment 20001555 PARAMETER Experiment Name: At_Drought_Soil_Dry_P Parameter: Post Timepoint (hr) Value: None
  misc_feature: MA Experiment 20001555 PARAMETER Experiment Name: At_Drought_Soil_Dry_P Parameter: Post-Treatment Value: None
  misc_feature: MA Experiment 20001555 PARAMETER Experiment Name: At_Drought_Soil_Dry_P Parameter: Timepoint (day) Value: 10
  misc_feature: MA Experiment 20001555 PARAMETER Experiment Name: At_Drought_Soil_Dry_P Parameter: Treatment Value: Drought vs. No Drought
  misc_feature: MA Experiment ID: 20001556 Result: Down-regulated in Transcription
  misc_feature: MA Experiment 20001556 PARAMETER Experiment Name: At_Drought_Soil_Dry_P Parameter: Age (day) Value: 26
  misc_feature: MA Experiment 20001556 PARAMETER Experiment Name: At_Drought_Soil_Dry_P Parameter: Organism Value: A. thaliana
  misc_feature: MA Experiment 20001556 PARAMETER Experiment Name: At_Drought_Soil_Dry_P Parameter: Plant Line Value: WS
  misc_feature: MA Experiment 20001556 PARAMETER Experiment Name: At_Drought_Soil_Dry_P Parameter: Post Timepoint (hr) Value: None
  misc_feature: MA Experiment 20001556 PARAMETER Experiment Name: At_Drought_Soil_Dry_P Parameter: Post-Treatment Value: None
  misc_feature: MA Experiment 20001556 PARAMETER Experiment Name: At_Drought_Soil_Dry_P Parameter: Timepoint (day) Value: 12
  misc_feature: MA Experiment 20001556 PARAMETER Experiment Name: At_Drought_Soil_Dry_P Parameter: Treatment Value: Drought vs. No Drought
  misc_feature: MA Experiment ID: 20001557 Result: Down-regulated in Transcription
  misc_feature: MA Experiment 20001557 PARAMETER Experiment Name: At_Drought_Soil_Dry_P Parameter: Age (day) Value: 27
  misc_feature: MA Experiment 20001557 PARAMETER Experiment Name: At_Drought_Soil_Dry_P Parameter: Organism Value: A. thaliana
  misc_feature: MA Experiment 20001557 PARAMETER Experiment Name: At_Drought_Soil_Dry_P Parameter: Plant Line Value: WS
  misc_feature: MA Experiment 20001557 PARAMETER Experiment Name: At_Drought_Soil_Dry_P Parameter: Post Timepoint (hr) Value: 3
  misc_feature: MA Experiment 20001557 PARAMETER Experiment Name: At_Drought_Soil_Dry_P Parameter: Post-Treatment Value: Re-Water vs. No Drought
  misc_feature: MA Experiment 20001557 PARAMETER Experiment Name: At_Drought_Soil_Dry_P Parameter: Timepoint (day) Value: 13
  misc_feature: MA Experiment 20001557 PARAMETER Experiment Name: At_Drought_Soil_Dry_P Parameter: Treatment Value: Drought vs. No Drought

SEQ ID NO: 92484 - protein, 207 aa, Arabidopsis thaliana; identical to SEQ ID NO: 88728
  peptide (1)..(207): Ceres Seq. ID no. 12711852
  misc_feature (1)..(193): Pfam Name: Partner of SLD five, PSF1 Pfam Description: Partner of SLD five, PSF1
  misc_feature (1)..(193): Homolog of NCBI NO: 15220076 NR Description: unknown protein; protein id: At1g80190.1
  misc_feature (1)..(191): Homolog of NCBI NO: 29365479 NR Description: Psf1 [Xenopus laevis]
  misc_feature (1)..(191): Homolog of NCBI NO: 10800148 NR Description: KIAA0186 gene product [Homo sapiens] Hypothetical protein KIAA0186 >gi|1136432|dbj|BAA11503.1|
  misc_feature (1)..(191): Homolog of NCBI NO: 40788899 NR Description: KIAA0186 [Homo sapiens]
  misc_feature (1)..(191): Homolog of NCBI NO: 15214812 NR Description: KIAA0186 gene product [Homo sapiens]
  misc_feature (1)..(191): Homolog of NCBI NO: 28487734 NR Description: RIKEN cDNA 2810418N01 [Mus musculus]
  misc_feature (20)..(191): Homolog of NCBI NO: 24655047 NR Description: CG9187-PA [Drosophila melanogaster]
  misc_feature (1)..(155): Homolog of NCBI NO: 9407835 NR Description: bA384D7.3 (KIAA0186 protein) [Homo sapiens]
  misc_feature (5)..(191): Homolog of NCBI NO: 39589214 NR Description: Hypothetical protein CBG01004 [Caenorhabditis
  misc_feature (1)..(155): Homolog of NCBI NO: 20380632 NR Description: Similar to RIKEN cDNA 2810418N01 gene [Mus

SEQ ID NO: 92485 - protein, 158 aa, Arabidopsis thaliana; identical to SEQ ID NO: 88729
  peptide (1)..(158): Ceres Seq. ID no. 12711853
  misc_feature (1)..(144): Pfam Name: Partner of SLD five, PSF1 Pfam Description: Partner of SLD five, PSF1
  misc_feature (1)..(144): Homolog of NCBI NO: 15220076 NR Description: unknown protein; protein id: At1g80190.1
  misc_feature (1)..(142): Homolog of NCBI NO: 29365479 NR Description: Psf1 [Xenopus laevis]
  misc_feature (1)..(142): Homolog of NCBI NO: 10800148 NR Description: KIAA0186 gene product [Homo sapiens] Hypothetical protein KIAA0186 >gi|1136432|dbj|BAA11503.1|
  misc_feature (1)..(142): Homolog of NCBI NO: 40788899 NR Description: KIAA0186 [Homo sapiens]
  misc_feature (1)..(142): Homolog of NCBI NO: 15214812 NR Description: KIAA0186 gene product [Homo sapiens]
  misc_feature (1)..(142): Homolog of NCBI NO: 28487734 NR Description: RIKEN cDNA 2810418N01 [Mus musculus]
  misc_feature (1)..(142): Homolog of NCBI NO: 24655047 NR Description: CG9187-PA [Drosophila melanogaster]
  misc_feature (1)..(106): Homolog of NCBI NO: 9407835 NR Description: bA384D7.3 (KIAA0186 protein) [Homo sapiens]
  misc_feature (1)..(142): Homolog of NCBI NO: 39589214 NR Description: Hypothetical protein CBG01004 [Caenorhabditis
  misc_feature (1)..(106): Homolog of NCBI NO: 20380632 NR Description: Similar to RIKEN cDNA 2810418N01 gene [Mus

SEQ ID NO: 92486 - protein, 125 aa, Arabidopsis thaliana; identical to SEQ ID NO: 88730
  peptide (1)..(125): Ceres Seq. ID no. 12711854
  misc_feature (1)..(111): Pfam Name: Partner of SLD five, PSF1 Pfam Description: Partner of SLD five, PSF1
  misc_feature (1)..(111): Homolog of NCBI NO: 15220076 NR Description: unknown protein; protein id: At1g80190.1
  misc_feature (1)..(109): Homolog of NCBI NO: 29365479 NR Description: Psf1 [Xenopus laevis]
  misc_feature (1)..(109): Homolog of NCBI NO: 10800148 NR Description: KIAA0186 gene product [Homo sapiens] Hypothetical protein KIAA0186 >gi|1136432|dbj|BAA11503.1|
  misc_feature (1)..(109): Homolog of NCBI NO: 40788899 NR Description: KIAA0186 [Homo sapiens]
  misc_feature (1)..(109): Homolog of NCBI NO: 15214812 NR Description: KIAA0186 gene product [Homo sapiens]
  misc_feature (1)..(109): Homolog of NCBI NO: 28487734 NR Description: RIKEN cDNA 2810418N01 [Mus musculus]
  misc_feature (1)..(109): Homolog of NCBI NO: 24655047 NR Description: CG9187-PA [Drosophila melanogaster]
  misc_feature (1)..(73): Homolog of NCBI NO: 9407835 NR Description: bA384D7.3 (KIAA0186 protein) [Homo sapiens]
  misc_feature (1)..(109): Homolog of NCBI NO: 39589214 NR Description: Hypothetical protein CBG01004 [Caenorhabditis
  misc_feature (1)..(73): Homolog of NCBI NO: 20380632 NR Description: Similar to RIKEN cDNA 2810418N01 gene [Mus

SEQ ID NO: 92487 - DNA, 1153 bp, Arabidopsis thaliana; identical to SEQ ID NO: 88731
  misc_feature (1)..(1153): Ceres Seq. ID no. 12711908
  misc_feature: MA Experiment ID: 20000182 Result: Up-regulated in Transcription
  misc_feature: MA Experiment 20000182 PARAMETER Experiment Name: At_2mM_SA_P Parameter: Age (day) Value: 14
  misc_feature: MA Experiment 20000182 PARAMETER Experiment Name: At_2mM_SA_P Parameter: Organism Value: A. thaliana
  misc_feature: MA Experiment 20000182 PARAMETER Experiment Name: At_2mM_SA_P Parameter: Plant Line Value: WS
  misc_feature: MA Experiment 20000182 PARAMETER Experiment Name: At_2mM_SA_P Parameter: Timepoint (hr) Value: 6
  misc_feature: MA Experiment 20000182 PARAMETER Experiment Name: At_2mM_SA_P Parameter: Tissue Value: Aerial
  misc_feature: MA Experiment 20000182 PARAMETER Experiment Name: At_2mM_SA_P Parameter: Treatment Value: 2mM SA vs. No Treatment
  misc_feature: MA Experiment ID: 20000184 Result: Down-regulated in Transcription
  misc_feature: MA Experiment 20000184 PARAMETER Experiment Name: At_Shoots__P Parameter: Age (day) Value: 7
  misc_feature: MA Experiment 20000184 PARAMETER Experiment Name: At_Shoots__P Parameter: Tissue Value: Shoots vs. Whole Plant
  misc_feature: MA Experiment ID: 20000227 Result: Down-regulated in Transcription
  misc_feature: MA Experiment 20000227 PARAMETER Experiment Name: At_Root-Tips-vs-Tops_P Parameter: Tissue Value: Root Tips vs. Root Tops
  misc_feature: MA Experiment ID: 20000235 Result: Down-regulated in Transcription
  misc_feature: MA Experiment 20000235 PARAMETER Experiment Name: At_Siliques_P Parameter: Age (day) Value: 21
  misc_feature: MA Experiment 20000235 PARAMETER Experiment Name: At_Siliques_P Parameter: Organism Value: A. thaliana
  misc_feature: MA Experiment 20000235 PARAMETER Experiment Name: At_Siliques_P Parameter: Plant Line Value: WS
  misc_feature: MA Experiment 20000235 PARAMETER Experiment Name: At_Siliques_P Parameter: Tissue Value: 5-10mm Siliques vs. Whole Plant
  misc_feature: MA Experiment ID: 20000436 Result: Up-regulated in Transcription
  misc_feature: MA Experiment 20000436 PARAMETER Experiment Name: At_Drought_P Parameter: Age (day) Value: 7
  misc_feature: MA Experiment 20000436 PARAMETER Experiment Name: At_Drought_P Parameter: Organism Value: A. thaliana
  misc_feature: MA Experiment 20000436 PARAMETER Experiment Name: At_Drought_P Parameter: Plant Line Value: WS
  misc_feature: MA Experiment 20000436 PARAMETER Experiment Name: At_Drought_P Parameter: Timepoint (hr) Value: 12
  misc_feature: MA Experiment 20000436 PARAMETER Experiment Name: At_Drought_P Parameter: Tissue Value: Whole Plant
  misc_feature: MA Experiment 20000436 PARAMETER Experiment Name: At_Drought_P Parameter: Treatment Value: Drought vs. No Drought
  misc_feature: MA Experiment ID: 20000437 Result: Up-regulated in Transcription
  misc_feature: MA Experiment 20000437 PARAMETER Experiment Name: At_Drought_P Parameter: Age (day) Value: 8
  misc_feature: MA Experiment 20000437 PARAMETER Experiment Name: At_Drought_P Parameter: Organism Value: A. thaliana
  misc_feature: MA Experiment 20000437 PARAMETER Experiment Name: At_Drought_P Parameter: Plant Line Value: WS
  misc_feature: MA Experiment 20000437 PARAMETER Experiment Name: At_Drought_P Parameter: Timepoint (hr) Value: 24
  misc_feature: MA Experiment 20000437 PARAMETER Experiment Name: At_Drought_P Parameter: Tissue Value: Whole Plant
  misc_feature: MA Experiment 20000437 PARAMETER Experiment Name: At_Drought_P Parameter: Treatment Value: Drought vs. No Drought
  misc_feature: MA Experiment ID: 20000438 Result: Down-regulated in Transcription
  misc_feature: MA Experiment 20000438 PARAMETER Experiment Name: At_Shoots__P Parameter: Age (day) Value: 14
  misc_feature: MA Experiment 20000438 PARAMETER Experiment Name: At_Shoots__P Parameter: Tissue Value: Shoots vs. Whole Plant
  misc_feature: MA Experiment ID: 20000460 Result: Up-regulated in Transcription
  misc_feature: MA Experiment 20000460 PARAMETER Experiment Name: At_10percent_PEG_P Parameter: Age (day) Value: 12
  misc_feature: MA Experiment 20000460 PARAMETER Experiment Name: At_10percent_PEG_P Parameter: Organism Value: A. thaliana
  misc_feature: MA Experiment 20000460 PARAMETER Experiment Name: At_10percent_PEG_P Parameter: Plant Line Value: WS
  misc_feature: MA Experiment 20000460 PARAMETER Experiment Name: At_10percent_PEG_P Parameter: Timepoint (day) Value: 12
  misc_feature: MA Experiment 20000460 PARAMETER Experiment Name: At_10percent_PEG_P Parameter: Tissue Value: Whole Plant
  misc_feature: MA Experiment 20000460 PARAMETER Experiment Name: At_10percent_PEG_P Parameter: Treatment Value: 10percent PEG vs. No Treatment
  misc_feature: MA Experiment ID: 20000495 Result: Down-regulated in Transcription
  misc_feature: MA Experiment 20000495 PARAMETER Experiment Name: At_Guard_Cells_P Parameter: Harvest Date Value: 8/2/2002
  misc_feature: MA Experiment 20000495 PARAMETER Experiment Name: At_Guard_Cells_P Parameter: Organism Value: A. thaliana
  misc_feature: MA Experiment 20000495 PARAMETER Experiment Name: At_Guard_Cells_P Parameter: Tissue Value: Guard Cells vs. Leaves
  misc_feature: MA Experiment ID: 20000527 Result: Up-regulated in Transcription
  misc_feature: MA Experiment 20000527 PARAMETER Experiment Name: At_10percent_PEG_P Parameter: Age (day) Value: 20
  misc_feature: MA Experiment 20000527 PARAMETER Experiment Name: At_10percent_PEG_P Parameter: Organism Value: A. thaliana
  misc_feature: MA Experiment 20000527 PARAMETER Experiment Name: At_10percent_PEG_P Parameter: Plant Line Value: WS
  misc_feature: MA Experiment 20000527 PARAMETER Experiment Name: At_10percent_PEG_P Parameter: Timepoint (day) Value: 20
  misc_feature: MA Experiment 20000527 PARAMETER Experiment Name: At_10percent_PEG_P Parameter: Tissue Value: Whole Plant
  misc_feature: MA Experiment 20000527 PARAMETER Experiment Name: At_10percent_PEG_P Parameter: Treatment Value: 10percent PEG vs. No Treatment
  misc_feature: MA Experiment ID: 20000794 Result: Down-regulated in Transcription
  misc_feature: MA Experiment 20000794 PARAMETER Experiment Name: At_Petals_P Parameter: Age (day) Value: 23-25 days
  misc_feature: MA Experiment 20000794 PARAMETER Experiment Name: At_Petals_P Parameter: Plant Line Value: WS
  misc_feature: MA Experiment 20000794 PARAMETER Experiment Name: At_Petals_P Parameter: Tissue Value: Petals vs. Whole plant
  misc_feature: MA Experiment ID: 20001905 Result: Up-regulated in Transcription
  misc_feature: MA Experiment 20001905 PARAMETER Experiment Name: At_Drought_Reproduction_P Parameter: Age (day) Value: 40
  misc_feature: MA Experiment 20001905 PARAMETER Experiment Name: At_Drought_Reproduction_P Parameter: Organism Value: A. thaliana
  misc_feature: MA Experiment 20001905 PARAMETER Experiment Name: At_Drought_Reproduction_P Parameter: Plant Line Value: WS
  misc_feature: MA Experiment 20001905 PARAMETER Experiment Name: At_Drought_Reproduction_P Parameter: Timepoint (day) Value: 10
  misc_feature: MA Experiment 20001905 PARAMETER Experiment Name: At_Drought_Reproduction_P Parameter: Tissue Value: Rosettes
  misc_feature: MA Experiment 20001905 PARAMETER Experiment Name: At_Drought_Reproduction_P Parameter: Treatment Value: Drought vs. No Drought

SEQ ID NO: 92488 - protein, 211 aa, Arabidopsis thaliana; identical to SEQ ID NO: 43692
  peptide (1)..(211): Ceres Seq. ID no. 12711909
  misc_feature (1)..(211): Homolog of NCBI NO: 22330774 NR Description: hypothetical protein; protein id: At1g80610.1, by cDNA: gi_17979499, supported by cDNA: gi_20147292 [Arabidopsis >gi|17979500|gb|AAL50086.1| At1g80610/T21F11_6 [Arabidopsis
  misc_feature (1)..(107): Homolog of NCBI NO: 15218326 NR Description: hypothetical protein; protein id: At1g15800.1
  misc_feature (103)..(208): Homolog of NCBI NO: 15218326 NR Description: hypothetical protein; protein id: At1g15800.1
  misc_feature (1)..(107): Homolog of NCBI NO: 25406677 NR Description: hypothetical protein T21F11.6 [imported] -
  misc_feature (85)..(208): Homolog of NCBI NO: 25402801 NR Description: protein F7H2.14 [imported] - Arabidopsis thaliana
  misc_feature (1)..(125): Homolog of NCBI NO: 25402801 NR Description: protein F7H2.14 [imported] - Arabidopsis thaliana
  misc_feature (4)..(178): Homolog of NCBI NO: 15236647 NR Description: putative protein; protein id: At4g32030.1, by cDNA: 37881. [Arabidopsis thaliana] >gi|7459474|pir||T04642
  misc_feature (1)..(146): Homolog of NCBI NO: 18420894 NR Description: putative protein; protein id: At5g25210.1, by cDNA: 13660. [Arabidopsis thaliana]

SEQ ID NO: 92489 - protein, 201 aa, Arabidopsis thaliana; identical to SEQ ID NO: 43693
  peptide (1)..(201): Ceres Seq. ID no. 12711910
  misc_feature (1)..(201): Homolog of NCBI NO: 22330774 NR Description: hypothetical protein; protein id: At1g80610.1, by cDNA: gi_17979499, supported by cDNA: gi_20147292 [Arabidopsis >gi|17979500|gb|AAL50086.1| At1g80610/T21F11_6 [Arabidopsis
  misc_feature (1)..(97): Homolog of NCBI NO: 15218326 NR Description: hypothetical protein; protein id: At1g15800.1
  misc_feature (93)..(198): Homolog of NCBI NO: 15218326 NR Description: hypothetical protein; protein id: At1g15800.1
  misc_feature (1)..(97): Homolog of NCBI NO: 25406677 NR Description: hypothetical protein T21F11.6 [imported] -
  misc_feature (75)..(198): Homolog of NCBI NO: 25402801 NR Description: protein F7H2.14 [imported] - Arabidopsis thaliana
  misc_feature (1)..(115): Homolog of NCBI NO: 25402801 NR Description: protein F7H2.14 [imported] - Arabidopsis thaliana
  misc_feature (1)..(168): Homolog of NCBI NO: 15236647 NR Description: putative protein; protein id: At4g32030.1, by cDNA: 37881. [Arabidopsis thaliana] >gi|7459474|pir||T04642
  misc_feature (1)..(136): Homolog of NCBI NO: 18420894 NR Description: putative protein; protein id: At5g25210.1, by cDNA: 13660. [Arabidopsis thaliana]

SEQ ID NO: 92490 - protein, 196 aa, Arabidopsis thaliana; identical to SEQ ID NO: 43694
  peptide (1)..(196): Ceres Seq. ID no. 12711911
  misc_feature (1)..(196): Homolog of NCBI NO: 22330774 NR Description: hypothetical protein; protein id: At1g80610.1, by cDNA: gi_17979499, supported by cDNA: gi_20147292 [Arabidopsis >gi|17979500|gb|AAL50086.1| At1g80610/T21F11_6 [Arabidopsis
  misc_feature (1)..(92): Homolog of NCBI NO: 15218326 NR Description: hypothetical protein; protein id: At1g15800.1
  misc_feature (88)..(193): Homolog of NCBI NO: 15218326 NR Description: hypothetical protein; protein id: At1g15800.1
  misc_feature (1)..(92): Homolog of NCBI NO: 25406677 NR Description: hypothetical protein T21F11.6 [imported] -
  misc_feature (70)..(193): Homolog of NCBI NO: 25402801 NR Description: protein F7H2.14 [imported] - Arabidopsis thaliana
  misc_feature (1)..(110): Homolog of NCBI NO: 25402801 NR Description: protein F7H2.14 [imported] - Arabidopsis thaliana
  misc_feature (1)..(163): Homolog of NCBI NO: 15236647 NR Description: putative protein; protein id: At4g32030.1, by cDNA: 37881. [Arabidopsis thaliana] >gi|7459474|pir||T04642
  misc_feature (1)..(131): Homolog of NCBI NO: 18420894 NR Description: putative protein; protein id: At5g25210.1, by cDNA: 13660. [Arabidopsis thaliana]

SEQ ID NO: 92491 - DNA, 918 bp, Arabidopsis thaliana; identical to SEQ ID NO: 88735
  misc_feature (1)..(918): Ceres Seq. ID no. 12711931
  misc_feature: MA Experiment ID: 108435 Result: Up-regulated in Transcription
  misc_feature: MA Experiment 108435 PARAMETER Experiment Name: At_stm_Mutants_cDNA_P Parameter: Plant Line Value: wt Landsburg vs stm
  misc_feature: MA Experiment 108435 PARAMETER Experiment Name: At_stm_Mutants_cDNA_P Parameter: Tissue Value: Shoot Apical Meristem Region
  misc_feature: MA Experiment ID: 108464 Result: Up-regulated in Transcription
  misc_feature: MA Experiment 108464 PARAMETER Experiment Name: At_Germinating_Seeds_cDNA_P Parameter: Age (day) Value: 4 vs. 0
  misc_feature: MA Experiment 108464 PARAMETER Experiment Name: At_Germinating_Seeds_cDNA_P Parameter: Tissue Value: Germinating Seeds
  misc_feature: MA Experiment ID: 108501 Result: Up-regulated in Transcription
  misc_feature: MA Experiment 108501 PARAMETER Experiment Name: At_ap2_floral_buds_cDNA_P Parameter: Plant Line Value: ap2 (Ler.)
  misc_feature: MA Experiment 108501 PARAMETER Experiment Name: At_ap2_floral_buds_cDNA_P Parameter: Tissue Value: Closed Flower
  misc_feature: MA Experiment ID: 108579 Result: Up-regulated in Transcription
  misc_feature: MA Experiment 108579 PARAMETER Experiment Name: At_4deg_Cold_cDNA_P Parameter: Temperature (deg C) Value: 4 vs. 22
  misc_feature: MA Experiment 108579 PARAMETER Experiment Name: At_4deg_Cold_cDNA_P Parameter: Timepoint (hr) Value: 6
  misc_feature: MA Experiment 108579 PARAMETER Experiment Name: At_4deg_Cold_cDNA_P Parameter: Tissue Value: Aerial
  misc_feature: MA Experiment ID: 108595 Result: Up-regulated in Transcription
  misc_feature: MA Experiment 108595 PARAMETER Experiment Name: At_Ler-pi_Ovule_cDNA_P Parameter: Plant Line Value: null
  misc_feature: MA Experiment ID: 20000069 Result: Down-regulated in Transcription
  misc_feature: MA Experiment 20000069 PARAMETER Experiment Name: At_100uM_ABA_Mutants_cDNA_P Parameter: Plant Line Value: CS23
  misc_feature: MA Experiment 20000069 PARAMETER Experiment Name: At_100uM_ABA_Mutants_cDNA_P Parameter: Timepoint (hr) Value: 6
  misc_feature: MA Experiment 20000069 PARAMETER Experiment Name: At_100uM_ABA_Mutants_cDNA_P Parameter: Tissue Value: Aerial
  misc_feature: MA Experiment 20000069 PARAMETER Experiment Name: At_100uM_ABA_Mutants_cDNA_P Parameter: Treatment Value: 100uM ABA vs. No Treatment
  misc_feature: MA Experiment ID: 20000070 Result: Down-regulated in Transcription
  misc_feature: MA Experiment 20000070 PARAMETER Experiment Name: At_100uM_ABA_Mutants_cDNA_P Parameter: Plant Line Value: CS24
  misc_feature: MA Experiment 20000070 PARAMETER Experiment Name: At_100uM_ABA_Mutants_cDNA_P Parameter: Timepoint (hr) Value: 6
  misc_feature: MA Experiment 20000070 PARAMETER Experiment Name: At_100uM_ABA_Mutants_cDNA_P Parameter: Tissue Value: Aerial
  misc_feature: MA Experiment 20000070 PARAMETER Experiment Name: At_100uM_ABA_Mutants_cDNA_P Parameter: Treatment Value: 100uM ABA vs. No Treatment
  misc_feature: MA Experiment ID: 20000071 Result: Down-regulated in Transcription
  misc_feature: MA Experiment 20000071 PARAMETER Experiment Name: At_100uM_ABA_Mutants_cDNA_P Parameter: Plant Line Value: CS8104
  misc_feature: MA Experiment 20000071 PARAMETER Experiment Name: At_100uM_ABA_Mutants_cDNA_P Parameter: Timepoint (hr) Value: 6
  misc_feature: MA Experiment 20000071 PARAMETER Experiment Name: At_100uM_ABA_Mutants_cDNA_P Parameter: Tissue Value: Aerial
  misc_feature: MA Experiment 20000071 PARAMETER Experiment Name: At_100uM_ABA_Mutants_cDNA_P Parameter: Treatment Value: 100uM ABA vs. No Treatment
  misc_feature: MA Experiment ID: 20000086 Result: Down-regulated in Transcription
  misc_feature: MA Experiment 20000086 PARAMETER Experiment Name: At_100uM_ABA_Mutants_cDNA_P Parameter: Plant Line Value: CS22
  misc_feature: MA Experiment 20000086 PARAMETER Experiment Name: At_100uM_ABA_Mutants_cDNA_P Parameter: Timepoint (hr) Value: 6
  misc_feature: MA Experiment 20000086 PARAMETER Experiment Name: At_100uM_ABA_Mutants_cDNA_P Parameter: Tissue Value: Aerial
  misc_feature: MA Experiment 20000086 PARAMETER Experiment Name: At_100uM_ABA_Mutants_cDNA_P Parameter: Treatment Value: 100uM ABA vs. No Treatment
  misc_feature: MA Experiment ID: 20000087 Result: Down-regulated in Transcription
  misc_feature: MA Experiment 20000087 PARAMETER Experiment Name: At_100uM_ABA_Mutants_cDNA_P Parameter: Plant Line Value: WS
  misc_feature: MA Experiment 20000087 PARAMETER Experiment Name: At_100uM_ABA_Mutants_cDNA_P Parameter: Timepoint (hr) Value: 6
  misc_feature: MA Experiment 20000087 PARAMETER Experiment Name: At_100uM_ABA_Mutants_cDNA_P Parameter: Tissue Value: Aerial
  misc_feature: MA Experiment 20000087 PARAMETER Experiment Name: At_100uM_ABA_Mutants_cDNA_P Parameter: Treatment Value: 100uM ABA vs. No Treatment
  misc_feature: MA Experiment ID: 20000088 Result: Down-regulated in Transcription
  misc_feature: MA Experiment 20000088 PARAMETER Experiment Name: At_100uM_ABA_Mutants_cDNA_P Parameter: Plant Line Value: Landsberg
  misc_feature: MA Experiment 20000088 PARAMETER Experiment Name: At_100uM_ABA_Mutants_cDNA_P Parameter: Timepoint (hr) Value: 6
  misc_feature: MA Experiment 20000088 PARAMETER Experiment Name: At_100uM_ABA_Mutants_cDNA_P Parameter: Tissue Value: Aerial
  misc_feature: MA Experiment 20000088 PARAMETER Experiment Name: At_100uM_ABA_Mutants_cDNA_P Parameter: Treatment Value: 100uM ABA vs. No Treatment
  misc_feature: MA Experiment ID: 20000089 Result: Down-regulated in Transcription
  misc_feature: MA Experiment ID: 20000090 Result: Down-regulated in Transcription
  misc_feature: MA Experiment ID: 20000117 Result: Down-regulated in Transcription
  misc_feature: MA Experiment 20000117 PARAMETER Experiment Name: At_100uM_ABA_Mutants_cDNA_P Parameter: Plant Line Value: Columbia
  misc_feature: MA Experiment 20000117 PARAMETER Experiment Name: At_100uM_ABA_Mutants_cDNA_P Parameter: Timepoint (hr) Value: 6
  misc_feature: MA Experiment 20000117 PARAMETER Experiment Name: At_100uM_ABA_Mutants_cDNA_P Parameter: Tissue Value: Aerial
  misc_feature: MA Experiment 20000117 PARAMETER Experiment Name: At_100uM_ABA_Mutants_cDNA_P Parameter: Treatment Value: 100uM ABA vs. No Treatment
  misc_feature: MA Experiment ID: 20000224 Result: Up-regulated in Transcription
  misc_feature: MA Experiment ID: 20000227 Result: Up-regulated in Transcription
  misc_feature: MA Experiment 20000227 PARAMETER Experiment Name: At_Root-Tips-vs-Tops_P Parameter: Tissue Value: Root Tips vs. Root Tops
  misc_feature: MA Experiment ID: 20000234 Result: Up-regulated in Transcription
  misc_feature: MA Experiment 20000234 PARAMETER Experiment Name: At_Siliques_P Parameter: Age (day) Value: 21
  misc_feature: MA Experiment 20000234 PARAMETER Experiment Name: At_Siliques_P Parameter: Organism Value: A. thaliana
  misc_feature: MA Experiment 20000234 PARAMETER Experiment Name: At_Siliques_P Parameter: Plant Line Value: WS
  misc_feature: MA Experiment 20000234 PARAMETER Experiment Name: At_Siliques_P Parameter: Tissue Value: Less Than 5mm Siliques vs. Whole Plant
  misc_feature: MA Experiment ID: 20000264 Result: Up-regulated in Transcription
  misc_feature: MA Experiment 20000264 PARAMETER Experiment Name: At_Open_Flower_P Parameter: Age (day) Value: 21
  misc_feature: MA Experiment 20000264 PARAMETER Experiment Name: At_Open_Flower_P Parameter: Plant Line Value: WS
  misc_feature: MA Experiment 20000264 PARAMETER Experiment Name: At_Open_Flower_P Parameter: Tissue Value: Open Flower vs. Whole Plant
  misc_feature: MA Experiment ID: 20000286 Result: Up-regulated in Transcription
  misc_feature: MA Experiment 20000286 PARAMETER Experiment Name: At_Open_Flower_P Parameter: Age (day) Value: 21
  misc_feature: MA Experiment 20000286 PARAMETER Experiment Name: At_Open_Flower_P Parameter: Plant Line Value: WS
  misc_feature: MA Experiment 20000286 PARAMETER Experiment Name: At_Open_Flower_P Parameter: Tissue Value: Half Open vs. Whole Plant
  misc_feature: MA Experiment ID: 20000437 Result: Down-regulated in Transcription
  misc_feature: MA Experiment 20000437 PARAMETER Experiment Name: At_Drought_P Parameter: Age (day) Value: 8
  misc_feature: MA Experiment 20000437 PARAMETER Experiment Name: At_Drought_P Parameter: Organism Value: A. thaliana
  misc_feature: MA Experiment 20000437 PARAMETER Experiment Name: At_Drought_P Parameter: Plant Line Value: WS
  misc_feature: MA Experiment 20000437 PARAMETER Experiment Name: At_Drought_P Parameter: Timepoint (hr) Value: 24
  misc_feature: MA Experiment 20000437 PARAMETER Experiment Name: At_Drought_P Parameter: Tissue Value: Whole Plant
  misc_feature: MA Experiment 20000437 PARAMETER Experiment Name: At_Drought_P Parameter: Treatment Value: Drought vs. No Drought
  misc_feature: MA Experiment ID: 20000438 Result: Up-regulated in Transcription
  misc_feature: MA Experiment 20000438 PARAMETER Experiment Name: At_Shoots__P Parameter: Age (day) Value: 14
  misc_feature: MA Experiment 20000438 PARAMETER Experiment Name: At_Shoots__P Parameter: Tissue Value: Shoots vs. Whole Plant
  misc_feature: MA Experiment ID: 20000451 Result: Down-regulated in Transcription
  misc_feature: MA Experiment 20000451 PARAMETER Experiment Name: At_CS6879_Shoots-Roots_P Parameter: Age (day) Value: 14
  misc_feature: MA Experiment 20000451 PARAMETER Experiment Name: At_CS6879_Shoots-Roots_P Parameter: Organism Value: A. thaliana
  misc_feature: MA Experiment 20000451 PARAMETER Experiment Name: At_CS6879_Shoots-Roots_P Parameter: Plant Line Value: CS6879 vs. WS
  misc_feature: MA Experiment 20000451 PARAMETER Experiment Name: At_CS6879_Shoots-Roots_P Parameter: Tissue Value: Roots
  misc_feature: MA Experiment ID: 20000495 Result: Up-regulated in Transcription
  misc_feature: MA Experiment 20000495 PARAMETER Experiment Name: At_Guard_Cells_P Parameter: Harvest Date Value: 8/2/2002
  misc_feature: MA Experiment 20000495 PARAMETER Experiment Name: At_Guard_Cells_P Parameter: Organism Value: A. thaliana
  misc_feature: MA Experiment 20000495 PARAMETER Experiment Name: At_Guard_Cells_P Parameter: Tissue Value: Guard Cells vs. Leaves
  misc_feature: MA Experiment ID: 20000576 Result: Up-regulated in Transcription
  misc_feature: MA Experiment 20000576 PARAMETER Experiment Name: At_100uM_ABA_Mutants__P Parameter: Organism Value: A. thaliana
  misc_feature: MA Experiment 20000576 PARAMETER Experiment Name: At_100uM_ABA_Mutants__P Parameter: Plant Line Value: CS23
  misc_feature: MA Experiment 20000576 PARAMETER Experiment Name: At_100uM_ABA_Mutants__P Parameter: Timepoint (hr) Value: 6
  misc_feature: MA Experiment 20000576 PARAMETER Experiment Name: At_100uM_ABA_Mutants__P Parameter: Tissue Value: Whole Plant
  misc_feature: MA Experiment 20000576 PARAMETER Experiment Name: At_100uM_ABA_Mutants__P Parameter: Treatment Value: 1uM ABA vs. No Treatment
  misc_feature: MA Experiment ID: 20000794 Result: Up-regulated in Transcription
  misc_feature: MA Experiment 20000794 PARAMETER Experiment Name: At_Petals_P Parameter: Age (day) Value: 23-25 days
  misc_feature: MA Experiment 20000794 PARAMETER Experiment Name: At_Petals_P Parameter: Plant Line Value: WS
  misc_feature: MA Experiment 20000794 PARAMETER Experiment Name: At_Petals_P Parameter: Tissue Value: Petals vs. Whole plant
  misc_feature: MA Experiment ID: 20001248 Result: Down-regulated in Transcription
  misc_feature: MA Experiment 20001248 PARAMETER Experiment Name: At_Far-red-induction_P Parameter: Age (day) Value: 7
  misc_feature: MA Experiment 20001248 PARAMETER Experiment Name: At_Far-red-induction_P Parameter: Light Value: Far-red vs. White
  misc_feature: MA Experiment 20001248 PARAMETER Experiment Name: At_Far-red-induction_P Parameter: Organism Value: A. thaliana
  misc_feature: MA Experiment 20001248 PARAMETER Experiment Name: At_Far-red-induction_P Parameter: Plant Line Value: Columbia
  misc_feature: MA Experiment 20001248 PARAMETER Experiment Name: At_Far-red-induction_P Parameter: Timepoint (hr) Value: 4
  misc_feature: MA Experiment 20001248 PARAMETER Experiment Name: At_Far-red-induction_P Parameter: Tissue Value: Whole Plant
  misc_feature: MA Experiment ID: 20001458 Result: Down-regulated in Transcription
  misc_feature: MA Experiment 20001458 PARAMETER Experiment Name: At_50mM_NH4NO3_L-to-H_P Parameter: Age (day) Value: Undefined
  misc_feature: MA Experiment 20001458 PARAMETER Experiment Name: At_50mM_NH4NO3_L-to-H_P Parameter: Organism Value: Undefined
  misc_feature: MA Experiment 20001458 PARAMETER Experiment Name: At_50mM_NH4NO3_L-to-H_P Parameter: Plant Line Value: Undefined
  misc_feature: MA Experiment 20001458 PARAMETER Experiment Name: At_50mM_NH4NO3_L-to-H_P Parameter: Timepoint (hr) Value: 2
  misc_feature: MA Experiment 20001458 PARAMETER Experiment Name: At_50mM_NH4NO3_L-to-H_P Parameter: Tissue Value: Siliques
  misc_feature: MA Experiment 20001458 PARAMETER Experiment Name: At_50mM_NH4NO3_L-to-H_P Parameter: Treatment Value: 50mM NH4NO3 vs. 100mM Manitol
  misc_feature: MA Experiment ID: 20001556 Result: Down-regulated in Transcription
  misc_feature: MA Experiment 20001556 PARAMETER Experiment Name: At_Drought_Soil_Dry_P Parameter: Age (day) Value: 26
  misc_feature: MA Experiment 20001556 PARAMETER Experiment Name: At_Drought_Soil_Dry_P Parameter: Organism Value: A. thaliana
  misc_feature: MA Experiment 20001556 PARAMETER Experiment Name: At_Drought_Soil_Dry_P Parameter: Plant Line Value: WS
  misc_feature: MA Experiment 20001556 PARAMETER Experiment Name: At_Drought_Soil_Dry_P Parameter: Post Timepoint (hr) Value: None
  misc_feature: MA Experiment 20001556 PARAMETER Experiment Name: At_Drought_Soil_Dry_P Parameter: Post-Treatment Value: None
  misc_feature: MA Experiment 20001556 PARAMETER Experiment Name: At_Drought_Soil_Dry_P Parameter: Timepoint (day) Value: 12
  misc_feature: MA Experiment 20001556 PARAMETER Experiment Name: At_Drought_Soil_Dry_P Parameter: Treatment Value: Drought vs. No Drought
  misc_feature: MA Experiment ID: 20001557 Result: Down-regulated in Transcription
  misc_feature: MA Experiment 20001557 PARAMETER Experiment Name: At_Drought_Soil_Dry_P Parameter: Age (day) Value: 27
  misc_feature: MA Experiment 20001557 PARAMETER Experiment Name: At_Drought_Soil_Dry_P Parameter: Organism Value: A. thaliana
  misc_feature: MA Experiment 20001557 PARAMETER Experiment Name: At_Drought_Soil_Dry_P Parameter: Plant Line Value: WS
  misc_feature: MA Experiment 20001557 PARAMETER Experiment Name: At_Drought_Soil_Dry_P Parameter: Post Timepoint (hr) Value: 3
  misc_feature: MA Experiment 20001557 PARAMETER Experiment Name: At_Drought_Soil_Dry_P Parameter: Post-Treatment Value: Re-Water vs. No Drought
  misc_feature: MA Experiment 20001557 PARAMETER Experiment Name: At_Drought_Soil_Dry_P Parameter: Timepoint (day) Value: 13
  misc_feature: MA Experiment 20001557 PARAMETER Experiment Name: At_Drought_Soil_Dry_P Parameter: Treatment Value: Drought vs. No Drought
  misc_feature: MA Experiment ID: 20001558 Result: Down-regulated in Transcription
  misc_feature: MA Experiment 20001558 PARAMETER Experiment Name: At_Drought_Soil_Dry_P Parameter: Age (day) Value: 27
  misc_feature: MA Experiment 20001558 PARAMETER Experiment Name: At_Drought_Soil_Dry_P Parameter: Organism Value: A. thaliana
  misc_feature: MA Experiment 20001558 PARAMETER Experiment Name: At_Drought_Soil_Dry_P Parameter: Plant Line Value: WS
  misc_feature: MA Experiment 20001558 PARAMETER Experiment Name: At_Drought_Soil_Dry_P Parameter: Post Timepoint (hr) Value: 6
  misc_feature: MA Experiment 20001558 PARAMETER Experiment Name: At_Drought_Soil_Dry_P Parameter: Post-Treatment Value: Re-Water vs. No Drought
  misc_feature: MA Experiment 20001558 PARAMETER Experiment Name: At_Drought_Soil_Dry_P Parameter: Timepoint (day) Value: 13
  misc_feature: MA Experiment 20001558 PARAMETER Experiment Name: At_Drought_Soil_Dry_P Parameter: Treatment Value: Drought vs. No Drought
  misc_feature: MA Experiment ID: 20001905 Result: Down-regulated in Transcription
  misc_feature: MA Experiment 20001905 PARAMETER Experiment Name: At_Drought_Reproduction_P Parameter: Age (day) Value: 40
  misc_feature: MA Experiment 20001905 PARAMETER Experiment Name: At_Drought_Reproduction_P Parameter: Organism Value: A. thaliana
  misc_feature: MA Experiment 20001905 PARAMETER Experiment Name: At_Drought_Reproduction_P Parameter: Plant Line Value: WS
  misc_feature: MA Experiment 20001905 PARAMETER Experiment Name: At_Drought_Reproduction_P Parameter: Timepoint (day) Value: 10
  misc_feature: MA Experiment 20001905 PARAMETER Experiment Name: At_Drought_Reproduction_P Parameter: Tissue Value: Rosettes
  misc_feature: MA Experiment 20001905 PARAMETER Experiment Name: At_Drought_Reproduction_P Parameter: Treatment Value: Drought vs. No Drought
  misc_feature: MA Experiment ID: 20001906 Result: Down-regulated in Transcription
  misc_feature: MA Experiment 20001906 PARAMETER Experiment Name: At_Drought_Reproduction_P Parameter: Age (day) Value: 35
  misc_feature: MA Experiment 20001906 PARAMETER Experiment Name: At_Drought_Reproduction_P Parameter: Organism Value: A. thaliana
  misc_feature: MA Experiment 20001906 PARAMETER Experiment Name: At_Drought_Reproduction_P Parameter: Plant Line Value: WS
  misc_feature: MA Experiment 20001906 PARAMETER Experiment Name: At_Drought_Reproduction_P Parameter: Timepoint (day) Value: 5
  misc_feature: MA Experiment 20001906 PARAMETER Experiment Name: At_Drought_Reproduction_P Parameter: Tissue Value: Siliques
  misc_feature: MA Experiment 20001906 PARAMETER Experiment Name: At_Drought_Reproduction_P Parameter: Treatment Value: Drought vs. No Drought
  misc_feature: MA Experiment ID: 20001907 Result: Down-regulated in Transcription
  misc_feature: MA Experiment 20001907 PARAMETER Experiment Name: At_Drought_Reproduction_P Parameter: Age (day) Value: 37
  misc_feature: MA Experiment 20001907 PARAMETER Experiment Name: At_Drought_Reproduction_P Parameter: Organism Value: A. thaliana
  misc_feature: MA Experiment 20001907 PARAMETER Experiment Name: At_Drought_Reproduction_P Parameter: Plant Line Value: WS
  misc_feature: MA Experiment 20001907 PARAMETER Experiment Name: At_Drought_Reproduction_P Parameter: Timepoint (day) Value: 7
  misc_feature: MA Experiment 20001907 PARAMETER Experiment Name: At_Drought_Reproduction_P Parameter: Tissue Value: Siliques
  misc_feature: MA Experiment 20001907 PARAMETER Experiment Name: At_Drought_Reproduction_P Parameter: Treatment Value: Drought vs. No Drought

SEQ ID NO: 92492 - protein, 305 aa, Arabidopsis thaliana; identical to SEQ ID NO: 88736
  peptide (1)..(305): Ceres Seq. ID no. 12711932
  misc_feature (75)..(285): Pfam Name: Major intrinsic protein Pfam Description: Major intrinsic protein
  misc_feature (1)..(305): Homolog of NCBI NO: 15220826 NR Description: nodulin-like protein; protein id: At1g80760.1
  misc_feature (10)..(305): Homolog of NCBI NO: 15235034 NR Description: major intrinsic protein (MIP) - like; protein id:
  misc_feature (1)..(305): Homolog of NCBI NO: 13447791 NR Description: NOD26-like membrane integral protein ZmNIP3-1
  misc_feature (74)..(305): Homolog of NCBI NO: 37536006 NR Description: putative nodulin-26 [Oryza sativa (japonica
  misc_feature (62)..(295): Homolog of NCBI NO: 9971217 NR Description: MIP [Adiantum capillus-veneris]
  misc_feature (73)..(290): Homolog of NCBI NO: 28971941 NR Description: putative nodulin [Oryza sativa (japonica
  misc_feature (66)..(290): Homolog of NCBI NO: 37573042 NR Description: putative nodulin [Oryza sativa (japonica
  misc_feature (59)..(289): Homolog of NCBI NO: 15777893 NR Description: early embryogenesis aquaglyceroporin [Pinus taeda]
  misc_feature (75)..(289): Homolog of NCBI NO: 17025880 NR Description: multifunctional aquaporin [Medicago truncatula]
  misc_feature (77)..(293): Homolog of NCBI NO: 5139541 NR Description: nodulin26-like major intrinsic protein [Pisum

SEQ ID NO: 92493 - protein, 182 aa, Arabidopsis thaliana; identical to SEQ ID NO: 88737
  peptide (1)..(182): Ceres Seq. ID no. 12711933
  misc_feature (1)..(162): Pfam Name: Major intrinsic protein Pfam Description: Major intrinsic protein
  misc_feature (1)..(182): Homolog of NCBI NO: 15220826 NR Description: nodulin-like protein; protein id: At1g80760.1
  misc_feature (1)..(182): Homolog of NCBI NO: 15235034 NR Description: major intrinsic protein (MIP) - like; protein id:
  misc_feature (1)..(182): Homolog of NCBI NO: 13447791 NR Description: NOD26-like membrane integral protein ZmNIP3-1
  misc_feature (1)..(182): Homolog of NCBI NO: 37536006 NR Description: putative nodulin-26 [Oryza sativa (japonica
  misc_feature (1)..(172): Homolog of NCBI NO: 9971217 NR Description: MIP [Adiantum capillus-veneris]
  misc_feature (1)..(167): Homolog of NCBI NO: 28971941 NR Description: putative nodulin [Oryza sativa (japonica
  misc_feature (1)..(167): Homolog of NCBI NO: 37573042 NR Description: putative nodulin [Oryza sativa (japonica
  misc_feature (1)..(166): Homolog of NCBI NO: 15777893 NR Description: early embryogenesis aquaglyceroporin [Pinus taeda]
  misc_feature (1)..(166): Homolog of NCBI NO: 17025880 NR Description: multifunctional aquaporin [Medicago truncatula]
  misc_feature (1)..(170): Homolog of NCBI NO: 5139541 NR Description: nodulin26-like major intrinsic protein [Pisum

SEQ ID NO: 92494 - DNA, 1734 bp, Arabidopsis thaliana; identical to SEQ ID NO: 88738
  misc_feature (1)..(1734): Ceres Seq. ID no. 12712097
  misc_feature: MA Experiment ID: 20000328 Result: Down-regulated in Transcription
  misc_feature: MA Experiment 20000328 PARAMETER Experiment Name: At_42deg_Heat_Sub_P Parameter: Age (day) Value: 14
  misc_feature: MA Experiment 20000328 PARAMETER Experiment Name: At_42deg_Heat_Sub_P Parameter: Organism Value: A. thaliana
  misc_feature: MA Experiment 20000328 PARAMETER Experiment Name: At_42deg_Heat_Sub_P Parameter: Plant Line Value: WS
  misc_feature: MA Experiment 20000328 PARAMETER Experiment Name: At_42deg_Heat_Sub_P Parameter: Temperature (deg C) Value: 42 vs. 22
  misc_feature: MA Experiment 20000328 PARAMETER Experiment Name: At_42deg_Heat_Sub_P Parameter: Timepoint (hr) Value: 6
  misc_feature: MA Experiment 20000328 PARAMETER Experiment Name: At_42deg_Heat_Sub_P Parameter: Tissue Value: Aerial

SEQ ID NO: 92495 - protein, 577 aa, Arabidopsis thaliana; identical to SEQ ID NO: 88739
  peptide (1)..(577): Ceres Seq. ID no. 12712098
  misc_feature (159)..(526): Pfam Name: Plant protein family Pfam Description: Plant protein family
  misc_feature (1)..(577): Homolog of NCBI NO: 15226282 NR Description: similar to axi 1 protein from Nicotiana tabacum; id: At2g01480.1, supported by cDNA: gi_20260419 [Arabidopsis >gi|25410909|pir||C84425 similar to axi 1 protein from Nicotiana
  misc_feature (20)..(567): Homolog of NCBI NO: 15221017 NR Description: auxin-independent growth promoter, putative;
  misc_feature (79)..(567): Homolog of NCBI NO: 8778220 NR Description: F10B6.36 [Arabidopsis thaliana]
  misc_feature (9)..(571): Homolog of NCBI NO: 34908166 NR Description: axi 1-like protein [Oryza sativa (japonica
  misc_feature (15)..(576): Homolog of NCBI NO: 18399706 NR Description: growth regulator, putative; protein id: supported by cDNA: gi_15293042 [Arabidopsis thaliana]
  misc_feature (17)..(576): Homolog of NCBI NO: 15293043 NR Description: putative growth regulator protein [Arabidopsis
  misc_feature (15)..(204): Homolog of NCBI NO: 25403440 NR Description: protein F15O4.45 [imported] - Arabidopsis >gi|8778357|gb|AAF79365.1|AC007887_24 F15O4.45 [Arabidopsis
  misc_feature (403)..(576): Homolog of NCBI NO: 25403440 NR Description: protein F15O4.45 [imported] - Arabidopsis >gi|8778357|gb|AAF79365.1|AC007887_24 F15O4.45 [Arabidopsis
  misc_feature (238)..(405): Homolog of NCBI NO: 25403440 NR Description: protein F15O4.45 [imported] - Arabidopsis >gi|8778357|gb|AAF79365.1|AC007887_24 F15O4.45 [Arabidopsis
  misc_feature (41)..(559): Homolog of NCBI NO: 22329977 NR Description: similar to growth regulator, putative; protein At1g38131.1 [Arabidopsis thaliana] >gi|27311577|gb|AAO00754.1|

SEQ ID NO: 92496 - protein, 499 aa, Arabidopsis thaliana; identical to SEQ ID NO: 88740
  peptide (1)..(499): Ceres Seq. ID no. 12712099
  misc_feature (81)..(448): Pfam Name: Plant protein family Pfam Description: Plant protein family
  misc_feature (1)..(499): Homolog of NCBI NO: 15226282 NR Description: similar to axi 1 protein from Nicotiana tabacum; id: At2g01480.1, supported by cDNA: gi_20260419 [Arabidopsis >gi|25410909|pir||C84425 similar to axi 1 protein from Nicotiana
  misc_feature (1)..(489): Homolog of NCBI NO: 15221017 NR Description: auxin-independent growth promoter, putative;
  misc_feature (1)..(489): Homolog of NCBI NO: 8778220 NR Description: F10B6.36 [Arabidopsis thaliana]
  misc_feature (1)..(493): Homolog of NCBI NO: 34908166 NR Description: axi 1-like protein [Oryza sativa (japonica
  misc_feature (1)..(498): Homolog of NCBI NO: 18399706 NR Description: growth regulator, putative; protein id: supported by cDNA: gi_15293042 [Arabidopsis thaliana]
  misc_feature (1)..(498): Homolog of NCBI NO: 15293043 NR Description: putative growth regulator protein [Arabidopsis
  misc_feature (1)..(126): Homolog of NCBI NO: 25403440 NR Description: protein F15O4.45 [imported] - Arabidopsis >gi|8778357|gb|AAF79365.1|AC007887_24 F15O4.45 [Arabidopsis
  misc_feature (325)..(498): Homolog of NCBI NO: 25403440 NR Description: protein F15O4.45 [imported] - Arabidopsis >gi|8778357|gb|AAF79365.1|AC007887_24 F15O4.45 [Arabidopsis
  misc_feature (160)..(327): Homolog of NCBI NO: 25403440 NR Description: protein F15O4.45 [imported] - Arabidopsis >gi|8778357|gb|AAF79365.1|AC007887_24 F15O4.45 [Arabidopsis
  misc_feature (1)..(481): Homolog of NCBI NO: 22329977 NR Description: similar to growth regulator, putative; protein At1g38131.1 [Arabidopsis thaliana] >gi|27311577|gb|AAO00754.1|

SEQ ID NO: 92497 - protein, 495 aa, Arabidopsis thaliana; identical to SEQ ID NO: 88741
  peptide (1)..(495): Ceres Seq. ID no. 12712100
  misc_feature (77)..(444): Pfam Name: Plant protein family Pfam Description: Plant protein family
  misc_feature (1)..(495): Homolog of NCBI NO: 15226282 NR Description: similar to axi 1 protein from Nicotiana tabacum; id: At2g01480.1, supported by cDNA: gi_20260419 [Arabidopsis >gi|25410909|pir||C84425 similar to axi 1 protein from Nicotiana
  misc_feature (1)..(485): Homolog of NCBI NO: 15221017 NR Description: auxin-independent growth promoter, putative;
  misc_feature (1)..(485): Homolog of NCBI NO: 8778220 NR Description: F10B6.36 [Arabidopsis thaliana]
  misc_feature (1)..(489): Homolog of NCBI NO: 34908166 NR Description: axi 1-like protein [Oryza sativa (japonica
  misc_feature (1)..(494): Homolog of NCBI NO: 18399706 NR Description: growth regulator, putative; protein id: supported by cDNA: gi_15293042 [Arabidopsis thaliana]
  misc_feature (1)..(494): Homolog of NCBI NO: 15293043 NR Description: putative growth regulator protein [Arabidopsis
  misc_feature (1)..(122): Homolog of NCBI NO: 25403440 NR Description: protein F15O4.45 [imported] - Arabidopsis >gi|8778357|gb|AAF79365.1|AC007887_24 F15O4.45 [Arabidopsis
  misc_feature (321)..(494): Homolog of NCBI NO: 25403440 NR Description: protein F15O4.45 [imported] - Arabidopsis >gi|8778357|gb|AAF79365.1|AC007887_24 F15O4.45 [Arabidopsis
  misc_feature (156)..(323): Homolog of NCBI NO: 25403440 NR Description: protein F15O4.45 [imported] - Arabidopsis >gi|8778357|gb|AAF79365.1|AC007887_24 F15O4.45 [Arabidopsis
  misc_feature (1)..(477): Homolog of NCBI NO: 22329977 NR Description: similar to growth regulator, putative; protein At1g38131.1 [Arabidopsis thaliana] >gi|27311577|gb|AAO00754.1|

SEQ ID NO: 92498 - DNA, 1202 bp, Arabidopsis thaliana; identical to SEQ ID NO: 88742
  misc_feature (1)..(1202): Ceres Seq. ID no. 12712124
  misc_feature: MA Experiment ID: 108434 Result: Down-regulated in Transcription
  misc_feature: MA Experiment 108434 PARAMETER Experiment Name: At_Root_Tips_cDNA_P Parameter: Tissue Value: Root Tips
  misc_feature: MA Experiment ID: 108462 Result: Up-regulated in Transcription
  misc_feature: MA Experiment 108462 PARAMETER Experiment Name: At_Germinating_Seeds_cDNA_P Parameter: Age (day) Value: 2 vs. 0
  misc_feature: MA Experiment 108462 PARAMETER Experiment Name: At_Germinating_Seeds_cDNA_P Parameter: Tissue Value: Germinating Seeds
  misc_feature: MA Experiment ID: 108463 Result: Up-regulated in Transcription
  misc_feature: MA Experiment 108463 PARAMETER Experiment Name: At_Germinating_Seeds_cDNA_P Parameter: Age (day) Value: 3 vs. 0
  misc_feature: MA Experiment 108463 PARAMETER Experiment Name: At_Germinating_Seeds_cDNA_P Parameter: Tissue Value: Germinating Seeds
  misc_feature: MA Experiment ID: 108464 Result: Up-regulated in Transcription
  misc_feature: MA Experiment 108464 PARAMETER Experiment Name: At_Germinating_Seeds_cDNA_P Parameter: Age (day) Value: 4 vs. 0
  misc_feature: MA Experiment 108464 PARAMETER Experiment Name: At_Germinating_Seeds_cDNA_P Parameter: Tissue Value: Germinating Seeds
  misc_feature: MA Experiment ID: 108488 Result: Down-regulated in Transcription
  misc_feature: MA Experiment ID: 108573 Result: Down-regulated in Transcription
  misc_feature: MA Experiment 108573 PARAMETER Experiment Name: At_Drought_cDNA_P Parameter: Timepoint (hr) Value: 6
  misc_feature: MA Experiment 108573 PARAMETER Experiment Name: At_Drought_cDNA_P Parameter: Tissue Value: Aerial
  misc_feature: MA Experiment 108573 PARAMETER Experiment Name: At_Drought_cDNA_P Parameter: Treatment Value: Drought vs. No Drought
  misc_feature: MA Experiment ID: 108577 Result: Down-regulated in Transcription
  misc_feature: MA Experiment 108577 PARAMETER Experiment Name: At_42deg_Heat_cDNA_P Parameter: Temperature (deg C) Value: 42 vs. 22
  misc_feature: MA Experiment 108577 PARAMETER Experiment Name: At_42deg_Heat_cDNA_P Parameter: Timepoint (hr) Value: 6
  misc_feature: MA Experiment 108577 PARAMETER Experiment Name: At_42deg_Heat_cDNA_P Parameter: Tissue Value: Aerial
  misc_feature: MA Experiment ID: 108668 Result: Up-regulated in Transcription
  misc_feature: MA Experiment 108668 PARAMETER Experiment Name: At_2mM_SA_cDNA_P Parameter: Plant Line Value: WS
  misc_feature: MA Experiment 108668 PARAMETER Experiment Name: At_2mM_SA_cDNA_P Parameter: Timepoint (hr) Value: 6
  misc_feature: MA Experiment 108668 PARAMETER Experiment Name: At_2mM_SA_cDNA_P Parameter: Treatment Value: 2mM SA vs. No Treatment
  misc_feature: MA Experiment ID: 20000087 Result: Down-regulated in Transcription
  misc_feature: MA Experiment 20000087 PARAMETER Experiment Name: At_100uM_ABA_Mutants_cDNA_P Parameter: Plant Line Value: WS
  misc_feature: MA Experiment 20000087 PARAMETER Experiment Name: At_100uM_ABA_Mutants_cDNA_P Parameter: Timepoint (hr) Value: 6
  misc_feature: MA Experiment 20000087 PARAMETER Experiment Name: At_100uM_ABA_Mutants_cDNA_P Parameter: Tissue Value: Aerial
  misc_feature: MA Experiment 20000087 PARAMETER Experiment Name: At_100uM_ABA_Mutants_cDNA_P Parameter: Treatment Value: 100uM ABA vs. No Treatment
  misc_feature: MA Experiment ID: 20000093 Result: Down-regulated in Transcription
  misc_feature: MA Experiment 20000093 PARAMETER Experiment Name: At_42deg_Heat_cDNA_P Parameter: Temperature (deg C) Value: 42 vs. 22
  misc_feature: MA Experiment 20000093 PARAMETER Experiment Name: At_42deg_Heat_cDNA_P Parameter: Timepoint (hr) Value: 0.5
  misc_feature: MA Experiment 20000093 PARAMETER Experiment Name: At_42deg_Heat_cDNA_P Parameter: Tissue Value: Aerial
  misc_feature: MA Experiment ID: 20000111 Result: Down-regulated in Transcription
  misc_feature: MA Experiment 20000111 PARAMETER Experiment Name: At_42deg_Heat_cDNA_P Parameter: Temperature (deg C) Value: 42 vs. 22
  misc_feature: MA Experiment 20000111 PARAMETER Experiment Name: At_42deg_Heat_cDNA_P Parameter: Timepoint (hr) Value: 6
  misc_feature: MA Experiment 20000111 PARAMETER Experiment Name: At_42deg_Heat_cDNA_P Parameter: Tissue Value: Aerial
  misc_feature: MA Experiment ID: 20000113 Result: Down-regulated in Transcription
  misc_feature: MA Experiment 20000113 PARAMETER Experiment Name: At_42deg_Heat_cDNA_P Parameter: Temperature (deg C) Value: 42 vs. 22
  misc_feature: MA Experiment 20000113 PARAMETER Experiment Name: At_42deg_Heat_cDNA_P Parameter: Timepoint (hr) Value: 8
  misc_feature: MA Experiment 20000113 PARAMETER Experiment Name: At_42deg_Heat_cDNA_P Parameter: Tissue Value: Aerial
  misc_feature: MA Experiment ID: 20000144 Result: Down-regulated in Transcription
  misc_feature: MA Experiment 20000144 PARAMETER Experiment Name: At_42deg_Heat_cDNA_P Parameter: Temperature (deg C) Value: 42 vs. 22
  misc_feature: MA Experiment 20000144 PARAMETER Experiment Name: At_42deg_Heat_cDNA_P Parameter: Timepoint (hr) Value: 1
  misc_feature: MA Experiment 20000144 PARAMETER Experiment Name: At_42deg_Heat_cDNA_P Parameter: Tissue Value: Aerial
  misc_feature: MA Experiment ID: 20000171 Result: Down-regulated in Transcription
  misc_feature: MA Experiment 20000171 PARAMETER Experiment Name: At_42deg_Heat_P Parameter: Age (day) Value: 14
  misc_feature: MA Experiment 20000171 PARAMETER Experiment Name: At_42deg_Heat_P Parameter: Organism Value: A. thaliana
  misc_feature: MA Experiment 20000171 PARAMETER Experiment Name: At_42deg_Heat_P Parameter: Plant Line Value: WS
  misc_feature: MA Experiment 20000171 PARAMETER Experiment Name: At_42deg_Heat_P Parameter: Temperature (deg C) Value: 42 vs. 22
  misc_feature: MA Experiment 20000171 PARAMETER Experiment Name: At_42deg_Heat_P Parameter: Timepoint (hr) Value: 1
  misc_feature: MA Experiment 20000171 PARAMETER Experiment Name: At_42deg_Heat_P Parameter: Tissue Value: Aerial
  misc_feature: MA Experiment ID: 20000173 Result: Down-regulated in Transcription
  misc_feature: MA Experiment 20000173 PARAMETER Experiment Name: At_42deg_Heat_P Parameter: Age (day) Value: 14
  misc_feature: MA Experiment 20000173 PARAMETER Experiment Name: At_42deg_Heat_P Parameter: Organism Value: A. thaliana
  misc_feature: MA Experiment 20000173 PARAMETER Experiment Name: At_42deg_Heat_P Parameter: Plant Line Value: WS
  misc_feature: MA Experiment 20000173 PARAMETER Experiment Name: At_42deg_Heat_P Parameter: Temperature (deg C) Value: 42 vs. 22
  misc_feature: MA Experiment 20000173 PARAMETER Experiment Name: At_42deg_Heat_P Parameter: Timepoint (hr) Value: 6
  misc_feature: MA Experiment 20000173 PARAMETER Experiment Name: At_42deg_Heat_P Parameter: Tissue Value: Aerial
  misc_feature: MA Experiment ID: 20000179 Result: Up-regulated in Transcription
  misc_feature: MA Experiment 20000179 PARAMETER Experiment Name: At_Germinating_Seeds_P Parameter: Age (hr) Value: 6 vs. 0
  misc_feature: MA Experiment 20000179 PARAMETER Experiment Name: At_Germinating_Seeds_P Parameter: Tissue Value: Germinating Seeds
  misc_feature: MA Experiment ID: 20000182 Result: Up-regulated in Transcription
  misc_feature: MA Experiment 20000182 PARAMETER Experiment Name: At_2mM_SA_P Parameter: Age (day) Value: 14
  misc_feature: MA Experiment 20000182 PARAMETER Experiment Name: At_2mM_SA_P Parameter: Organism Value: A. thaliana
  misc_feature: MA Experiment 20000182 PARAMETER Experiment Name: At_2mM_SA_P Parameter: Plant Line Value: WS
  misc_feature: MA Experiment 20000182 PARAMETER Experiment Name: At_2mM_SA_P Parameter: Timepoint (hr) Value: 6
  misc_feature: MA Experiment 20000182 PARAMETER Experiment Name: At_2mM_SA_P Parameter: Tissue Value: Aerial
  misc_feature: MA Experiment 20000182 PARAMETER Experiment Name: At_2mM_SA_P Parameter: Treatment Value: 2mM SA vs. No Treatment
  misc_feature: MA Experiment ID: 20000184 Result: Down-regulated in Transcription
  misc_feature: MA Experiment 20000184 PARAMETER Experiment Name: At_Shoots__P Parameter: Age (day) Value: 7
  misc_feature: MA Experiment 20000184 PARAMETER Experiment Name: At_Shoots__P Parameter: Tissue Value: Shoots vs. Whole Plant
  misc_feature: MA Experiment ID: 20000185 Result: Down-regulated in Transcription
  misc_feature: MA Experiment 20000185 PARAMETER Experiment Name: At_Roots__P Parameter: Age (day) Value: 7 vs. 21
  misc_feature: MA Experiment 20000185 PARAMETER Experiment Name: At_Roots__P Parameter: Organism Value: A. thaliana
  misc_feature: MA Experiment 20000185 PARAMETER Experiment Name: At_Roots__P Parameter: Tissue Value: Roots vs. Whole Plant
  misc_feature: MA Experiment ID: 20000227 Result: Down-regulated in Transcription
  misc_feature: MA Experiment 20000227 PARAMETER Experiment Name: At_Root-Tips-vs-Tops_P Parameter: Tissue Value: Root Tips vs. Root Tops
  misc_feature: MA Experiment ID: 20000234 Result: Down-regulated in Transcription
  misc_feature: MA Experiment 20000234 PARAMETER Experiment Name: At_Siliques_P Parameter: Age (day) Value: 21
  misc_feature: MA Experiment 20000234 PARAMETER Experiment Name: At_Siliques_P Parameter: Organism Value: A. thaliana
  misc_feature: MA Experiment 20000234 PARAMETER Experiment Name: At_Siliques_P Parameter: Plant Line Value: WS
  misc_feature: MA Experiment 20000234 PARAMETER Experiment Name: At_Siliques_P Parameter: Tissue Value: Less Than 5mm Siliques vs. Whole Plant
  misc_feature: MA Experiment ID: 20000264 Result: Down-regulated in Transcription
  misc_feature: MA Experiment 20000264 PARAMETER Experiment Name: At_Open_Flower_P Parameter: Age (day) Value: 21
  misc_feature: MA Experiment 20000264 PARAMETER Experiment Name: At_Open_Flower_P Parameter: Plant Line Value: WS
  misc_feature: MA Experiment 20000264 PARAMETER Experiment Name: At_Open_Flower_P Parameter: Tissue Value: Open Flower vs. Whole Plant
  misc_feature: MA Experiment ID: 20000265 Result: Down-regulated in Transcription
  misc_feature: MA Experiment 20000265 PARAMETER Experiment Name: At_Open_Flower_P Parameter: Age (day) Value: 21
  misc_feature: MA Experiment 20000265 PARAMETER Experiment Name: At_Open_Flower_P Parameter: Plant Line Value: WS
  misc_feature: MA Experiment 20000265 PARAMETER Experiment Name: At_Open_Flower_P Parameter: Tissue Value: Closed Flower vs. Whole Plant
  misc_feature: MA Experiment ID: 20000286 Result: Down-regulated in Transcription
  misc_feature: MA Experiment 20000286 PARAMETER Experiment Name: At_Open_Flower_P Parameter: Age (day) Value: 21
  misc_feature: MA Experiment 20000286 PARAMETER Experiment Name: At_Open_Flower_P Parameter: Plant Line Value: WS
  misc_feature: MA Experiment 20000286 PARAMETER Experiment Name: At_Open_Flower_P Parameter: Tissue Value: Half Open vs. Whole Plant
  misc_feature: MA Experiment ID: 20000437 Result: Down-regulated in Transcription
  misc_feature: MA Experiment 20000437 PARAMETER Experiment Name: At_Drought_P Parameter: Age (day) Value: 8
  misc_feature: MA Experiment 20000437 PARAMETER Experiment Name: At_Drought_P Parameter: Organism Value: A. thaliana
  misc_feature: MA Experiment 20000437 PARAMETER Experiment Name: At_Drought_P Parameter: Plant Line Value: WS
  misc_feature: MA Experiment 20000437 PARAMETER Experiment Name: At_Drought_P Parameter: Timepoint (hr) Value: 24
  misc_feature: MA Experiment 20000437 PARAMETER Experiment Name: At_Drought_P Parameter: Tissue Value: Whole Plant
  misc_feature: MA Experiment 20000437 PARAMETER Experiment Name: At_Drought_P Parameter: Treatment Value: Drought vs. No Drought
  misc_feature: MA Experiment ID: 20000495 Result: Down-regulated in Transcription
  misc_feature: MA Experiment 20000495 PARAMETER Experiment Name: At_Guard_Cells_P Parameter: Harvest Date Value: 8/2/2002
  misc_feature: MA Experiment 20000495 PARAMETER Experiment Name: At_Guard_Cells_P Parameter: Organism Value: A. thaliana
  misc_feature: MA Experiment 20000495 PARAMETER Experiment Name: At_Guard_Cells_P Parameter: Tissue Value: Guard Cells vs. Leaves
  misc_feature: MA Experiment ID: 20000709 Result: Down-regulated in Transcription
  misc_feature: MA Experiment 20000709 PARAMETER Experiment Name: At_15mM_NH4NO3_L-to-H_P Parameter: Age (hr) Value: 14
  misc_feature: MA Experiment 20000709 PARAMETER Experiment Name: At_15mM_NH4NO3_L-to-H_P Parameter: Organism Value: A. thaliana
  misc_feature: MA Experiment 20000709 PARAMETER Experiment Name: At_15mM_NH4NO3_L-to-H_P Parameter: Plant Line Value: WS
  misc_feature: MA Experiment 20000709 PARAMETER Experiment Name: At_15mM_NH4NO3_L-to-H_P Parameter: Timepoint (hr) Value: 4
  misc_feature: MA Experiment 20000709 PARAMETER Experiment Name: At_15mM_NH4NO3_L-to-H_P Parameter: Tissue Value: Aerial
  misc_feature: MA Experiment 20000709 PARAMETER Experiment Name: At_15mM_NH4NO3_L-to-H_P Parameter: Treatment Value: 15mM NH4NO3 vs. 30mM Mannitol
  misc_feature: MA Experiment ID: 20000794 Result: Down-regulated in Transcription
  misc_feature: MA Experiment 20000794 PARAMETER Experiment Name: At_Petals_P Parameter: Age (day) Value: 23-25 days
  misc_feature: MA Experiment 20000794 PARAMETER Experiment Name: At_Petals_P Parameter: Plant Line Value: WS
  misc_feature: MA Experiment 20000794 PARAMETER Experiment Name: At_Petals_P Parameter: Tissue Value: Petals vs. Whole plant
  misc_feature: MA Experiment ID: 20001905 Result: Down-regulated in Transcription
  misc_feature: MA Experiment 20001905 PARAMETER Experiment Name: At_Drought_Reproduction_P Parameter: Age (day) Value: 40
  misc_feature: MA Experiment 20001905 PARAMETER Experiment Name: At_Drought_Reproduction_P Parameter: Organism Value: A. thaliana
  misc_feature: MA Experiment 20001905 PARAMETER Experiment Name: At_Drought_Reproduction_P Parameter: Plant Line Value: WS
  misc_feature: MA Experiment 20001905 PARAMETER Experiment Name: At_Drought_Reproduction_P Parameter: Timepoint (day) Value: 10
  misc_feature: MA Experiment 20001905 PARAMETER Experiment Name: At_Drought_Reproduction_P Parameter: Tissue Value: Rosettes
  misc_feature: MA Experiment 20001905 PARAMETER Experiment Name: At_Drought_Reproduction_P Parameter: Treatment Value: Drought vs. No Drought

SEQ ID NO: 92499 - protein, 182 aa, Arabidopsis thaliana; identical to SEQ ID NO: 28006
  peptide (1)..(182): Ceres Seq. ID no. 12712125
  misc_feature (24)..(160): Pfam Name: NUDIX domain Pfam Description: NUDIX domain
  misc_feature (1)..(182): Homolog of NCBI NO: 18379275 NR Description: expressed protein; protein id: At2g01670.1, by cDNA: 8247., supported by cDNA: gi_13272382, supported by gi_15293192, supported by cDNA: gi_15724325 [Arabidopsis
  misc_feature (6)..(182): Homolog of NCBI NO: 21595695 NR Description: unknown [Arabidopsis thaliana]
  misc_feature (6)..(171): Homolog of NCBI NO: 15223919 NR Description: hypothetical protein; protein id: At1g14860.1
  misc_feature (27)..(167): Homolog of NCBI NO: 31747031 NR Description: MutT-like protein [Cucumis sativus]
  misc_feature (3)..(158): Homolog of NCBI NO: 15221055 NR Description: unknown protein; protein id: At1g18300.1 thaliana] >gi|6714298|gb|AAF25994.1|AC013354_13 F15H18.18 thaliana] >gi|8671772|gb|AAF78378.1|AC069551_11 T10O22.27
  misc_feature (4)..(160): Homolog of NCBI NO: 22330598 NR Description: unknown protein; protein id: At1g73540.1, by cDNA: gi_18252868 [Arabidopsis thaliana] unknown protein [Arabidopsis thaliana]
  misc_feature (4)..(160): Homolog of NCBI NO: 25367539 NR Description: unknown protein [imported] - Arabidopsis thaliana
  misc_feature (7)..(154): Homolog of NCBI NO: 38175436 NR Description: MutT-like protein [Oryza sativa (japonica
  misc_feature (7)..(154): Homolog of NCBI NO: 34900054 NR Description: MutT-like protein~contains ESTs
  misc_feature (6)..(174): Homolog of NCBI NO: 18391450 NR Description: expressed protein; protein id: At1g12880.1, by cDNA: gi_15810278, supported by cDNA: gi_20258974 [Arabidopsis >gi|15810279|gb|AAL07027.1| unknown protein [Arabidopsis

SEQ ID NO: 92500 - protein, 177 aa, Arabidopsis thaliana; identical to SEQ ID NO: 28007
  peptide (1)..(177): Ceres Seq. ID no. 12712126
  misc_feature (19)..(155): Pfam Name: NUDIX domain Pfam Description: NUDIX domain
  misc_feature (1)..(177): Homolog of NCBI NO: 18379275 NR Description: expressed protein; protein id: At2g01670.1, by cDNA: 8247., supported by cDNA: gi_13272382, supported by gi_15293192, supported by cDNA: gi_15724325 [Arabidopsis
  misc_feature (1)..(177): Homolog of NCBI NO: 21595695 NR Description: unknown [Arabidopsis thaliana]
  misc_feature (1)..(166): Homolog of NCBI NO: 15223919 NR Description: hypothetical protein; protein id: At1g14860.1
  misc_feature (22)..(162): Homolog of NCBI NO: 31747031 NR Description: MutT-like protein [Cucumis sativus]
  misc_feature (1)..(153): Homolog of NCBI NO: 15221055 NR Description: unknown protein; protein id: At1g18300.1 thaliana] >gi|6714298|gb|AAF25994.1|AC013354_13 F15H18.18 thaliana] >gi|8671772|gb|AAF78378.1|AC069551_11 T10O22.27
  misc_feature (1)..(155): Homolog of NCBI NO: 22330598 NR Description: unknown protein; protein id: At1g73540.1, by cDNA: gi_18252868 [Arabidopsis thaliana] unknown protein [Arabidopsis thaliana]
  misc_feature (1)..(155): Homolog of NCBI NO: 25367539 NR Description: unknown protein [imported] - Arabidopsis thaliana
  misc_feature (2)..(149): Homolog of NCBI NO: 38175436 NR Description: MutT-like protein [Oryza sativa (japonica
  misc_feature (2)..(149): Homolog of NCBI NO: 34900054 NR Description: MutT-like protein~contains ESTs
  misc_feature (1)..(169): Homolog of NCBI NO: 18391450 NR Description: expressed protein; protein id: At1g12880.1, by cDNA: gi_15810278, supported by cDNA: gi_20258974 [Arabidopsis >gi|15810279|gb|AAL07027.1| unknown protein [Arabidopsis

SEQ ID NO: 92501 - protein, 122 aa, Arabidopsis thaliana; identical to SEQ ID NO: 28008
  peptide (1)..(122): Ceres Seq. ID no. 12712127
  misc_feature (1)..(100): Pfam Name: NUDIX domain Pfam Description: NUDIX domain
  misc_feature (1)..(122): Homolog of NCBI NO: 18379275 NR Description: expressed protein; protein id: At2g01670.1, by cDNA: 8247., supported by cDNA: gi_13272382, supported by gi_15293192, supported by cDNA: gi_15724325 [Arabidopsis
  misc_feature (1)..(122): Homolog of NCBI NO: 21595695 NR Description: unknown [Arabidopsis thaliana]
  misc_feature (1)..(111): Homolog of NCBI NO: 15223919 NR Description: hypothetical protein; protein id: At1g14860.1
  misc_feature (1)..(107): Homolog of NCBI NO: 31747031 NR Description: MutT-like protein [Cucumis sativus]
  misc_feature (1)..(98): Homolog of NCBI NO: 15221055 NR Description: unknown protein; protein id: At1g18300.1 thaliana] >gi|6714298|gb|AAF25994.1|AC013354_13 F15H18.18 thaliana] >gi|8671772|gb|AAF78378.1|AC069551_11 T10O22.27
  misc_feature (1)..(100): Homolog of NCBI NO: 22330598 NR Description: unknown protein; protein id: At1g73540.1, by cDNA: gi_18252868 [Arabidopsis thaliana] unknown protein [Arabidopsis thaliana]
  misc_feature (1)..(100): Homolog of NCBI NO: 25367539 NR Description: unknown protein [imported] - Arabidopsis thaliana
  misc_feature (1)..(94): Homolog of NCBI NO: 38175436 NR Description: MutT-like protein [Oryza sativa (japonica
  misc_feature (1)..(94): Homolog of NCBI NO: 34900054 NR Description: MutT-like protein~contains ESTs
  misc_feature (1)..(114): Homolog of NCBI NO: 18391450 NR Description: expressed protein; protein id: At1g12880.1, by cDNA: gi_15810278, supported by cDNA: gi_20258974 [Arabidopsis >gi|15810279|gb|AAL07027.1| unknown protein [Arabidopsis

SEQ ID NO: 92502 - DNA, 1491 bp, Arabidopsis thaliana; identical to SEQ ID NO: 88746
  misc_feature (1)..(1491): Ceres Seq. ID no. 12712203
  misc_feature: MA Experiment ID: 20000306 Result: Up-regulated in Transcription
  misc_feature: MA Experiment 20000306 PARAMETER Experiment Name: At_Germinating_Seeds_Sub_P Parameter: Age (hr) Value: 6 vs. 0
  misc_feature: MA Experiment 20000306 PARAMETER Experiment Name: At_Germinating_Seeds_Sub_P Parameter: Organism Value: A. thaliana
  misc_feature: MA Experiment 20000306 PARAMETER Experiment Name: At_Germinating_Seeds_Sub_P Parameter: Plant Line Value: WS
  misc_feature: MA Experiment 20000306 PARAMETER Experiment Name: At_Germinating_Seeds_Sub_P Parameter: Tissue Value: Germinating Seeds
  misc_feature: MA Experiment ID: 20000307 Result: Up-regulated in Transcription
  misc_feature: MA Experiment 20000307 PARAMETER Experiment Name: At_Germinating_Seeds_Sub_P Parameter: Age (hr) Value: 24 vs. 0
  misc_feature: MA Experiment 20000307 PARAMETER Experiment Name: At_Germinating_Seeds_Sub_P Parameter: Organism Value: A. thaliana
  misc_feature: MA Experiment 20000307 PARAMETER Experiment Name: At_Germinating_Seeds_Sub_P Parameter: Plant Line Value: WS
  misc_feature: MA Experiment 20000307 PARAMETER Experiment Name: At_Germinating_Seeds_Sub_P Parameter: Tissue Value: Germinating Seeds
  misc_feature: MA Experiment ID: 20000315 Result: Down-regulated in Transcription
  misc_feature: MA Experiment 20000315 PARAMETER Experiment Name: At_14day_Shoots-Roots_Sub_P Parameter: Age (day) Value: 14
  misc_feature: MA Experiment 20000315 PARAMETER Experiment Name: At_14day_Shoots-Roots_Sub_P Parameter: Organism Value: A. thaliana
  misc_feature: MA Experiment 20000315 PARAMETER Experiment Name: At_14day_Shoots-Roots_Sub_P Parameter: Plant Line Value: WS
  misc_feature: MA Experiment 20000315 PARAMETER Experiment Name: At_14day_Shoots-Roots_Sub_P Parameter: Tissue Value: Shoots vs. Whole Plant

SEQ ID NO: 92503 - protein, 496 aa, Arabidopsis thaliana; identical to SEQ ID NO: 88747
  peptide (1)..(496): Ceres Seq. ID no. 12712204
  misc_feature (155)..(396): Homolog of NCBI NO: 15223242 NR Description: unknown protein; protein id: At1g70770.1
  misc_feature (1)..(167): Homolog of NCBI NO: 15223242 NR Description: unknown protein; protein id: At1g70770.1
  misc_feature (1)..(473): Homolog of NCBI NO: 25518112 NR Description: T26J12.6 protein - Arabidopsis thaliana
  misc_feature (352)..(496): Homolog of NCBI NO: 15223242 NR Description: unknown protein; protein id: At1g70770.1
  misc_feature (1)..(494): Homolog of NCBI NO: 15220663 NR Description: unknown protein; protein id: At1g23170.1
  misc_feature (160)..(410): Homolog of NCBI NO: 34895518 NR Description: unnamed protein product [Oryza sativa (japonica group)] >gi|9558458|dbj|BAB03379.1| unnamed protein product
  misc_feature (21)..(159): Homolog of NCBI NO: 34895518 NR Description: unnamed protein product [Oryza sativa (japonica group)] >gi|9558458|dbj|BAB03379.1| unnamed protein product
  misc_feature (160)..(372): Homolog of NCBI NO: 6671944 NR Description: unknown protein [Arabidopsis thaliana]
  misc_feature (160)..(372): Homolog of NCBI NO: 18399392 NR Description: expressed protein; protein id: At3g11880.1, by cDNA: gi_16226859 [Arabidopsis thaliana]
  misc_feature (352)..(463): Homolog of NCBI NO: 6671944 NR Description: unknown protein [Arabidopsis thaliana]

SEQ ID NO: 92504 - protein, 415 aa, Arabidopsis thaliana; identical to SEQ ID NO: 88748
  peptide (1)..(415): Ceres Seq. ID no. 12712205
  misc_feature (74)..(315): Homolog of NCBI NO: 15223242 NR Description: unknown protein; protein id: At1g70770.1
  misc_feature (1)..(86): Homolog of NCBI NO: 15223242 NR Description: unknown protein; protein id: At1g70770.1
  misc_feature (1)..(392): Homolog of NCBI NO: 25518112 NR Description: T26J12.6 protein - Arabidopsis thaliana
  misc_feature (271)..(415): Homolog of NCBI NO: 15223242 NR Description: unknown protein; protein id: At1g70770.1
  misc_feature (1)..(413): Homolog of NCBI NO: 15220663 NR Description: unknown protein; protein id: At1g23170.1
  misc_feature (79)..(329): Homolog of NCBI NO: 34895518 NR Description: unnamed protein product [Oryza sativa (japonica group)] >gi|9558458|dbj|BAB03379.1| unnamed protein product
  misc_feature (1)..(78): Homolog of NCBI NO: 34895518 NR Description: unnamed protein product [Oryza sativa (japonica group)] >gi|9558458|dbj|BAB03379.1| unnamed protein product
  misc_feature (79)..(291): Homolog of NCBI NO: 6671944 NR Description: unknown protein [Arabidopsis thaliana]
  misc_feature (79)..(291): Homolog of NCBI NO: 18399392 NR Description: expressed protein; protein id: At3g11880.1, by cDNA: gi_16226859 [Arabidopsis thaliana]
  misc_feature (271)..(382): Homolog of NCBI NO: 6671944 NR Description: unknown protein [Arabidopsis thaliana]

SEQ ID NO: 92505 - protein, 266 aa, Arabidopsis thaliana; identical to SEQ ID NO: 88749
  peptide (1)..(266): Ceres Seq. ID no. 12712206
  misc_feature (1)..(166): Homolog of NCBI NO: 15223242 NR Description: unknown protein; protein id: At1g70770.1
  misc_feature (1)..(243): Homolog of NCBI NO: 25518112 NR Description: T26J12.6 protein - Arabidopsis thaliana
  misc_feature (122)..(266): Homolog of NCBI NO: 15223242 NR Description: unknown protein; protein id: At1g70770.1
  misc_feature (1)..(264): Homolog of NCBI NO: 15220663 NR Description: unknown protein; protein id: At1g23170.1
  misc_feature (1)..(180): Homolog of NCBI NO: 34895518 NR Description: unnamed protein product [Oryza sativa (japonica group)] >gi|9558458|dbj|BAB03379.1| unnamed protein product
  misc_feature (1)..(142): Homolog of NCBI NO: 6671944 NR Description: unknown protein [Arabidopsis thaliana]
  misc_feature (1)..(142): Homolog of NCBI NO: 18399392 NR Description: expressed protein; protein id: At3g11880.1, by cDNA: gi_16226859 [Arabidopsis thaliana]
  misc_feature (122)..(233): Homolog of NCBI NO: 6671944 NR Description: unknown protein [Arabidopsis thaliana]
  misc_feature (122)..(233): Homolog of NCBI NO: 18399392 NR Description: expressed protein; protein id: At3g11880.1, by cDNA: gi_16226859 [Arabidopsis thaliana]
  misc_feature (122)..(265): Homolog of NCBI NO: 15220663 NR Description: unknown protein; protein id: At1g23170.1

SEQ ID NO: 92506 - DNA, 941 bp, Arabidopsis thaliana; identical to SEQ ID NO: 88750
  misc_feature (1)..(941): Ceres Seq. ID no. 12712232
  misc_feature: MA Experiment ID: 108434 Result: Down-regulated in Transcription
  misc_feature: MA Experiment 108434 PARAMETER Experiment Name: At_Root_Tips_cDNA_P Parameter: Tissue Value: Root Tips
  misc_feature: MA Experiment ID: 108462 Result: Down-regulated in Transcription
  misc_feature: MA Experiment 108462 PARAMETER Experiment Name: At_Germinating_Seeds_cDNA_P Parameter: Age (day) Value: 2 vs. 0
  misc_feature: MA Experiment 108462 PARAMETER Experiment Name: At_Germinating_Seeds_cDNA_P Parameter: Tissue Value: Germinating Seeds
  misc_feature: MA Experiment ID: 108463 Result: Down-regulated in Transcription
  misc_feature: MA Experiment 108463 PARAMETER Experiment Name: At_Germinating_Seeds_cDNA_P Parameter: Age (day) Value: 3 vs. 0
  misc_feature: MA Experiment 108463 PARAMETER Experiment Name: At_Germinating_Seeds_cDNA_P Parameter: Tissue Value: Germinating Seeds
  misc_feature: MA Experiment ID: 108469 Result: Up-regulated in Transcription
  misc_feature: MA Experiment ID: 108488 Result: Down-regulated in Transcription
  misc_feature: MA Experiment ID: 108585 Result: Up-regulated in Transcription
  misc_feature: MA Experiment 108585 PARAMETER Experiment Name: At_5mM_NaNP_cDNA_P Parameter: Timepoint (hr) Value: 6
  misc_feature: MA Experiment 108585 PARAMETER Experiment Name: At_5mM_NaNP_cDNA_P Parameter: Tissue Value: Aerial
  misc_feature: MA Experiment 108585 PARAMETER Experiment Name: At_5mM_NaNP_cDNA_P Parameter: Treatment Value: null
  misc_feature: MA Experiment ID: 108668 Result: Up-regulated in Transcription
  misc_feature: MA Experiment 108668 PARAMETER Experiment Name: At_2mM_SA_cDNA_P Parameter: Plant Line Value: WS
  misc_feature: MA Experiment 108668 PARAMETER Experiment Name: At_2mM_SA_cDNA_P Parameter: Timepoint (hr) Value: 6
  misc_feature: MA Experiment 108668 PARAMETER Experiment Name: At_2mM_SA_cDNA_P Parameter: Treatment Value: 2mM SA vs. No Treatment
  misc_feature: MA Experiment ID: 20000182 Result: Up-regulated in Transcription
  misc_feature: MA Experiment 20000182 PARAMETER Experiment Name: At_2mM_SA_P Parameter: Age (day) Value: 14
  misc_feature: MA Experiment 20000182 PARAMETER Experiment Name: At_2mM_SA_P Parameter: Organism Value: A. thaliana
  misc_feature: MA Experiment 20000182 PARAMETER Experiment Name: At_2mM_SA_P Parameter: Plant Line Value: WS
  misc_feature: MA Experiment 20000182 PARAMETER Experiment Name: At_2mM_SA_P Parameter: Timepoint (hr) Value: 6
  misc_feature: MA Experiment 20000182 PARAMETER Experiment Name: At_2mM_SA_P Parameter: Tissue Value: Aerial
  misc_feature: MA Experiment 20000182 PARAMETER Experiment Name: At_2mM_SA_P Parameter: Treatment Value: 2mM SA vs. No Treatment
  misc_feature: MA Experiment ID: 20000185 Result: Down-regulated in Transcription
  misc_feature: MA Experiment 20000185 PARAMETER Experiment Name: At_Roots__P Parameter: Age (day) Value: 7 vs. 21
  misc_feature: MA Experiment 20000185 PARAMETER Experiment Name: At_Roots__P Parameter: Organism Value: A. thaliana
  misc_feature: MA Experiment 20000185 PARAMETER Experiment Name: At_Roots__P Parameter: Tissue Value: Roots vs. Whole Plant
  misc_feature: MA Experiment ID: 20001557 Result: Up-regulated in Transcription
  misc_feature: MA Experiment 20001557 PARAMETER Experiment Name: At_Drought_Soil_Dry_P Parameter: Age (day) Value: 27
  misc_feature: MA Experiment 20001557 PARAMETER Experiment Name: At_Drought_Soil_Dry_P Parameter: Organism Value: A. thaliana
  misc_feature: MA Experiment 20001557 PARAMETER Experiment Name: At_Drought_Soil_Dry_P Parameter: Plant Line Value: WS
  misc_feature: MA Experiment 20001557 PARAMETER Experiment Name: At_Drought_Soil_Dry_P Parameter: Post Timepoint (hr) Value: 3
  misc_feature: MA Experiment 20001557 PARAMETER Experiment Name: At_Drought_Soil_Dry_P Parameter: Post-Treatment Value: Re-Water vs. No Drought
  misc_feature: MA Experiment 20001557 PARAMETER Experiment Name: At_Drought_Soil_Dry_P Parameter: Timepoint (day) Value: 13
  misc_feature: MA Experiment 20001557 PARAMETER Experiment Name: At_Drought_Soil_Dry_P Parameter: Treatment Value: Drought vs. No Drought

SEQ ID NO: 92507 - protein, 275 aa, Arabidopsis thaliana; identical to SEQ ID NO: 26595
  peptide (1)..(275): Ceres Seq. ID no. 12712233
  misc_feature (85)..(269): Pfam Name: Ribose 5-phosphate isomerase A (phosphoriboisomerase A) Pfam Description: Ribose 5-phosphate isomerase A
  misc_feature (9)..(275): Homolog of NCBI NO: 15223936 NR Description: putative ribose 5-phosphate isomerase; protein At1g71100.1, supported by cDNA: 3116., supported by cDNA: [Arabidopsis thaliana] >gi|25329397|pir||E96735 hypothetical
  misc_feature (9)..(275): Homolog of NCBI NO: 13430836 NR Description: putative ribose 5-phosphate isomerase
  misc_feature (9)..(275): Homolog of NCBI NO: 21592672 NR Description: putative ribose 5-phosphate isomerase
  misc_feature (9)..(273): Homolog of NCBI NO: 15226223 NR Description: putative ribose 5-phosphate isomerase; protein At2g01290.1, supported by cDNA: gi_15809809, supported by cDNA:
  misc_feature (15)..(273): Homolog of NCBI NO: 18654317 NR Description: ribose-5-phosphate isomerase [Spinacia oleracea]
  misc_feature (8)..(273): Homolog of NCBI NO: 34393836 NR Description: putative ribose-5-phosphate isomerase [Oryza
  misc_feature (35)..(273): Homolog of NCBI NO: 34393835 NR Description: putative ribose-5-phosphate isomerase [Oryza
  misc_feature (35)..(270): Homolog of NCBI NO: 21594002 NR Description: putative ribose 5-phosphate isomerase
  misc_feature (35)..(270): Homolog of NCBI NO: 15229349 NR Description: putative ribose 5-phosphate isomerase; protein At3g04790.1, supported by cDNA: 6349., supported by cDNA:
  misc_feature (9)..(267): Homolog of NCBI NO: 38347196 NR Description: OSJNBa0023J03.8 [Oryza sativa (japonica

SEQ ID NO: 92508 - protein, 267 aa, Arabidopsis thaliana; identical to SEQ ID NO: 26596
  peptide (1)..(267): Ceres Seq. ID no. 12712234
  misc_feature (77)..(261): Pfam Name: Ribose 5-phosphate isomerase A (phosphoriboisomerase A) Pfam Description: Ribose 5-phosphate isomerase A
  misc_feature (1)..(267): Homolog of NCBI NO: 15223936 NR Description: putative ribose 5-phosphate isomerase; protein At1g71100.1, supported by cDNA: 3116., supported by cDNA: [Arabidopsis thaliana] >gi|25329397|pir||E96735 hypothetical
  misc_feature (1)..(267): Homolog of NCBI NO: 13430836 NR Description: putative ribose 5-phosphate isomerase
  misc_feature (1)..(267): Homolog of NCBI NO: 21592672 NR Description: putative ribose 5-phosphate isomerase
  misc_feature (1)..(265): Homolog of NCBI NO: 15226223 NR Description: putative ribose 5-phosphate isomerase; protein At2g01290.1, supported by cDNA: gi_15809809, supported by cDNA:
  misc_feature (7)..(265): Homolog of NCBI NO: 18654317 NR Description: ribose-5-phosphate isomerase [Spinacia oleracea]
  misc_feature (1)..(265): Homolog of NCBI NO: 34393836 NR Description: putative ribose-5-phosphate isomerase [Oryza
  misc_feature (27)..(265): Homolog of NCBI NO: 34393835 NR Description: putative ribose-5-phosphate isomerase [Oryza
  misc_feature (27)..(262): Homolog of NCBI NO: 21594002 NR Description: putative ribose 5-phosphate isomerase
  misc_feature (27)..(262): Homolog of NCBI NO: 15229349 NR Description: putative ribose 5-phosphate isomerase; protein At3g04790.1, supported by cDNA: 6349., supported by cDNA:
  misc_feature (1)..(259): Homolog of NCBI NO: 38347196 NR Description: OSJNBa0023J03.8 [Oryza sativa (japonica

SEQ ID NO: 92509 - protein, 220 aa, Arabidopsis thaliana; identical to SEQ ID NO: 26597
  peptide (1)..(220): Ceres Seq. ID no. 12712235
  misc_feature (30)..(214): Pfam Name: Ribose 5-phosphate isomerase A (phosphoriboisomerase A) Pfam Description: Ribose 5-phosphate isomerase A
  misc_feature (1)..(220): Homolog of NCBI NO: 15223936 NR Description: putative ribose 5-phosphate isomerase; protein At1g71100.1, supported by cDNA: 3116., supported by cDNA: [Arabidopsis thaliana] >gi|25329397|pir||E96735 hypothetical
  misc_feature (1)..(220): Homolog of NCBI NO: 13430836 NR Description: putative ribose 5-phosphate isomerase
  misc_feature (1)..(220): Homolog of NCBI NO: 21592672 NR Description: putative ribose 5-phosphate isomerase
  misc_feature (1)..(218): Homolog of NCBI NO: 15226223 NR Description: putative ribose 5-phosphate isomerase; protein At2g01290.1, supported by cDNA: gi_15809809, supported by cDNA:
  misc_feature (1)..(218): Homolog of NCBI NO: 18654317 NR Description: ribose-5-phosphate isomerase [Spinacia oleracea]
  misc_feature (1)..(218): Homolog of NCBI NO: 34393836 NR Description: putative ribose-5-phosphate isomerase [Oryza
  misc_feature (1)..(218): Homolog of NCBI NO: 34393835 NR Description: putative ribose-5-phosphate isomerase [Oryza
  misc_feature (1)..(215): Homolog of NCBI NO: 21594002 NR Description: putative ribose 5-phosphate isomerase
  misc_feature (1)..(215): Homolog of NCBI NO: 15229349 NR Description: putative ribose 5-phosphate isomerase; protein At3g04790.1, supported by cDNA: 6349., supported by cDNA:
  misc_feature (1)..(212): Homolog of NCBI NO: 38347196 NR Description: OSJNBa0023J03.8 [Oryza sativa (japonica

SEQ ID NO: 92510 - DNA, 1143 bp, Arabidopsis thaliana; identical to SEQ ID NO: 88754
  misc_feature (1)..(1143): Ceres Seq. ID no. 12712236
  misc_feature: MA Experiment ID: 20000306 Result: Down-regulated in Transcription
  misc_feature: MA Experiment 20000306 PARAMETER Experiment Name: At_Germinating_Seeds_Sub_P Parameter: Age (hr) Value: 6 vs. 0
  misc_feature: MA Experiment 20000306 PARAMETER Experiment Name: At_Germinating_Seeds_Sub_P Parameter: Organism Value: A. thaliana
  misc_feature: MA Experiment 20000306 PARAMETER Experiment Name: At_Germinating_Seeds_Sub_P Parameter: Plant Line Value: WS
  misc_feature: MA Experiment 20000306 PARAMETER Experiment Name: At_Germinating_Seeds_Sub_P Parameter: Tissue Value: Germinating Seeds
  misc_feature: MA Experiment ID: 20000307 Result: Down-regulated in Transcription
  misc_feature: MA Experiment 20000307 PARAMETER Experiment Name: At_Germinating_Seeds_Sub_P Parameter: Age (hr) Value: 24 vs. 0
  misc_feature: MA Experiment 20000307 PARAMETER Experiment Name: At_Germinating_Seeds_Sub_P Parameter: Organism Value: A. thaliana
  misc_feature: MA Experiment 20000307 PARAMETER Experiment Name: At_Germinating_Seeds_Sub_P Parameter: Plant Line Value: WS
  misc_feature: MA Experiment 20000307 PARAMETER Experiment Name: At_Germinating_Seeds_Sub_P Parameter: Tissue Value: Germinating Seeds
  misc_feature: MA Experiment ID: 20000347 Result: Up-regulated in Transcription
  misc_feature: MA Experiment 20000347 PARAMETER Experiment Name: At_2mM_SA_Sub_P Parameter: Age (day) Value: 14
  misc_feature: MA Experiment 20000347 PARAMETER Experiment Name: At_2mM_SA_Sub_P Parameter: Organism Value: A. thaliana
  misc_feature: MA Experiment 20000347 PARAMETER Experiment Name: At_2mM_SA_Sub_P Parameter: Plant Line Value: WS
  misc_feature: MA Experiment 20000347 PARAMETER Experiment Name: At_2mM_SA_Sub_P Parameter: Timepoint (hr) Value: 6
  misc_feature: MA Experiment 20000347 PARAMETER Experiment Name: At_2mM_SA_Sub_P Parameter: Tissue Value: Aerial
  misc_feature: MA Experiment 20000347 PARAMETER Experiment Name: At_2mM_SA_Sub_P Parameter: Treatment Value: 2mM SA vs. No Treatment

SEQ ID NO: 92511 - protein, 380 aa, Arabidopsis thaliana; identical to SEQ ID NO: 88755
  peptide (1)..(380): Ceres Seq. ID no. 12712237
  misc_feature (41)..(380): Homolog of NCBI NO: 15223962 NR Description: unknown protein; protein id: At1g71150.1
  misc_feature (1)..(27): Homolog of NCBI NO: 15223962 NR Description: unknown protein; protein id: At1g71150.1
  misc_feature (41)..(380): Homolog of NCBI NO: 15219987 NR Description: unknown protein; protein id: At1g22970.1,
  misc_feature (36)..(377): Homolog of NCBI NO: 18395185 NR Description: unknown protein; protein id: At1g22980.1
  misc_feature (85)..(377): Homolog of NCBI NO: 25372690 NR Description: F19G10.7 protein - Arabidopsis thaliana

SEQ ID NO: 92512 - protein, 342 aa, Arabidopsis thaliana; identical to SEQ ID NO: 88756
  peptide (1)..(342): Ceres Seq. ID no. 12712238
  misc_feature (3)..(342): Homolog of NCBI NO: 15223962 NR Description: unknown protein; protein id: At1g71150.1
  misc_feature (3)..(342): Homolog of NCBI NO: 15219987 NR Description: unknown protein; protein id: At1g22970.1,
  misc_feature (1)..(339): Homolog of NCBI NO: 18395185 NR Description: unknown protein; protein id: At1g22980.1
  misc_feature (47)..(339): Homolog of NCBI NO: 25372690 NR Description: F19G10.7 protein - Arabidopsis thaliana

SEQ ID NO: 92513 - protein, 293 aa, Arabidopsis thaliana; identical to SEQ ID NO: 88757
  peptide (1)..(293): Ceres Seq. ID no. 12712239
  misc_feature (1)..(293): Homolog of NCBI NO: 15223962 NR Description: unknown protein; protein id: At1g71150.1
  misc_feature (1)..(293): Homolog of NCBI NO: 15219987 NR Description: unknown protein; protein id: At1g22970.1,
  misc_feature (1)..(290): Homolog of NCBI NO: 18395185 NR Description: unknown protein; protein id: At1g22980.1
  misc_feature (1)..(290): Homolog of NCBI NO: 25372690 NR Description: F19G10.7 protein - Arabidopsis thaliana

SEQ ID NO: 92514 - DNA, 894 bp, Arabidopsis thaliana; identical to SEQ ID NO: 88758
  misc_feature (1)..(894): Ceres Seq. ID no. 12712240
  misc_feature: MA Experiment ID: 108579 Result: Down-regulated in Transcription
  misc_feature: MA Experiment 108579 PARAMETER Experiment Name: At_4deg_Cold_cDNA_P Parameter: Temperature (deg C) Value: 4 vs. 22
  misc_feature: MA Experiment 108579 PARAMETER Experiment Name: At_4deg_Cold_cDNA_P Parameter: Timepoint (hr) Value: 6
  misc_feature: MA Experiment 108579 PARAMETER Experiment Name: At_4deg_Cold_cDNA_P Parameter: Tissue Value: Aerial

SEQ ID NO: 92515 - protein, 297 aa, Arabidopsis thaliana; identical to SEQ ID NO: 77114
  peptide (1)..(297): Ceres Seq. ID no. 12712241
  misc_feature (13)..(174): Pfam Name: NAD binding domain of 6-phosphogluconate dehydrogenase Pfam Description: NAD binding domain of 6-phosphogluconate
  misc_feature (1)..(297): Homolog of NCBI NO: 18409781 NR Description: putative dehydrogenase; protein id: At1g71180.1, by cDNA: gi_15293142, supported by cDNA: gi_21281067 [Arabidopsis >gi|15293143|gb|AAK93682.1| putative dehydrogenase dehydrogenase
  misc_feature (1)..(297): Homolog of NCBI NO: 25283629 NR Description: probable dehydrogenase F23N20.17 [imported] -
  misc_feature (1)..(297): Homolog of NCBI NO: 30698779 NR Description: dehydrogenase -related [Arabidopsis thaliana]
  misc_feature (8)..(297): Homolog of NCBI NO: 15233455 NR Description: putative protein; protein id: At4g29120.1, by cDNA: gi_13877868, supported by cDNA: gi_17065607 [Arabidopsis
  misc_feature (9)..(294): Homolog of NCBI NO: 34909392 NR Description: putative dehydrogenase [Oryza sativa (japonica group)] >gi|20521418|dbj|BAB91928.1| putative dehydrogenase
  misc_feature (14)..(286): Homolog of NCBI NO: 15896585 NR Description: Dehydrogenase related to 3-hydroxyisobutyrate YKWC B.subtilis ortholog [Clostridium acetobutylicum]
  misc_feature (16)..(284): Homolog of NCBI NO: 30022129 NR Description: 3-hydroxyisobutyrate dehydrogenase [Bacillus
  misc_feature (15)..(291): Homolog of NCBI NO: 16803045 NR Description: similar to 3-hydroxyisobutyrate dehydrogenase (B.
  misc_feature (13)..(286): Homolog of NCBI NO: 16078460 NR Description: similar to 3-hydroxyisobutyrate dehydrogenase subtilis] >gi|3183454|sp|O34948|YKWC_BACSU Hypothetical
  misc_feature (15)..(293): Homolog of NCBI NO: 15898379 NR Description: Oxidoreductase [Sulfolobus solfataricus]

SEQ ID NO: 92516 - protein, 274 aa, Arabidopsis thaliana; identical to SEQ ID NO: 77115
  peptide (1)..(274): Ceres Seq. ID no. 12712242
  misc_feature (1)..(151): Pfam Name: NAD binding domain of 6-phosphogluconate dehydrogenase Pfam Description: NAD binding domain of 6-phosphogluconate
  misc_feature (1)..(274): Homolog of NCBI NO: 18409781 NR Description: putative dehydrogenase; protein id: At1g71180.1, by cDNA: gi_15293142, supported by cDNA: gi_21281067 [Arabidopsis >gi|15293143|gb|AAK93682.1| putative dehydrogenase dehydrogenase
  misc_feature (1)..(274): Homolog of NCBI NO: 25283629 NR Description: probable dehydrogenase F23N20.17 [imported] -
  misc_feature (1)..(274): Homolog of NCBI NO: 30698779 NR Description: dehydrogenase -related [Arabidopsis thaliana]
  misc_feature (1)..(274): Homolog of NCBI NO: 15233455 NR Description: putative protein; protein id: At4g29120.1, by cDNA: gi_13877868, supported by cDNA: gi_17065607 [Arabidopsis
  misc_feature (1)..(271): Homolog of NCBI NO: 34909392 NR Description: putative dehydrogenase [Oryza sativa (japonica group)] >gi|20521418|dbj|BAB91928.1| putative dehydrogenase
  misc_feature (1)..(263): Homolog of NCBI NO: 15896585 NR Description: Dehydrogenase related to 3-hydroxyisobutyrate YKWC B.subtilis ortholog [Clostridium acetobutylicum]
  misc_feature (1)..(261): Homolog of NCBI NO: 30022129 NR Description: 3-hydroxyisobutyrate dehydrogenase [Bacillus
  misc_feature (1)..(268): Homolog of NCBI NO: 16803045 NR Description: similar to 3-hydroxyisobutyrate dehydrogenase (B.
  misc_feature (1)..(263): Homolog of NCBI NO: 16078460 NR Description: similar to 3-hydroxyisobutyrate dehydrogenase subtilis] >gi|3183454|sp|O34948|YKWC_BACSU Hypothetical
  misc_feature (1)..(270): Homolog of NCBI NO: 15898379 NR Description: Oxidoreductase [Sulfolobus solfataricus]

SEQ ID NO: 92517 - protein, 270 aa, Arabidopsis thaliana; identical to SEQ ID NO: 88761
  peptide (1)..(270): Ceres Seq. ID no. 12712243
  misc_feature (1)..(147): Pfam Name: NAD binding domain of 6-phosphogluconate dehydrogenase Pfam Description: NAD binding domain of 6-phosphogluconate
  misc_feature (1)..(270): Homolog of NCBI NO: 18409781 NR Description: putative dehydrogenase; protein id: At1g71180.1, by cDNA: gi_15293142, supported by cDNA: gi_21281067 [Arabidopsis >gi|15293143|gb|AAK93682.1| putative dehydrogenase dehydrogenase
  misc_feature (1)..(270): Homolog of NCBI NO: 25283629 NR Description: probable dehydrogenase F23N20.17 [imported] -
  misc_feature (1)..(270): Homolog of NCBI NO: 30698779 NR Description: dehydrogenase -related [Arabidopsis thaliana]
  misc_feature (1)..(270): Homolog of NCBI NO: 15233455 NR Description: putative protein; protein id: At4g29120.1, by cDNA: gi_13877868, supported by cDNA: gi_17065607 [Arabidopsis
  misc_feature (1)..(267): Homolog of NCBI NO: 34909392 NR Description: putative dehydrogenase [Oryza sativa (japonica group)] >gi|20521418|dbj|BAB91928.1| putative dehydrogenase
  misc_feature (1)..(259): Homolog of NCBI NO: 15896585 NR Description: Dehydrogenase related to 3-hydroxyisobutyrate YKWC B.subtilis ortholog [Clostridium acetobutylicum]
  misc_feature (1)..(257): Homolog of NCBI NO: 30022129 NR Description: 3-hydroxyisobutyrate dehydrogenase [Bacillus
  misc_feature (1)..(264): Homolog of NCBI NO: 16803045 NR Description: similar to 3-hydroxyisobutyrate dehydrogenase (B.
  misc_feature (1)..(259): Homolog of NCBI NO: 16078460 NR Description: similar to 3-hydroxyisobutyrate dehydrogenase subtilis] >gi|3183454|sp|O34948|YKWC_BACSU Hypothetical
  misc_feature (1)..(266): Homolog of NCBI NO: 15898379 NR Description: Oxidoreductase [Sulfolobus solfataricus]

SEQ ID NO: 92518 - DNA, 1061 bp, Arabidopsis thaliana; identical to SEQ ID NO: 88762
  misc_feature (1)..(1061): Ceres Seq. ID no. 12712255
  misc_feature: MA Experiment ID: 108501 Result: Down-regulated in Transcription
  misc_feature: MA Experiment 108501 PARAMETER Experiment Name: At_ap2_floral_buds_cDNA_P Parameter: Plant Line Value: ap2 (Ler.)
  misc_feature: MA Experiment 108501 PARAMETER Experiment Name: At_ap2_floral_buds_cDNA_P Parameter: Tissue Value: Closed Flower
  misc_feature: MA Experiment ID: 20000111 Result: Up-regulated in Transcription
  misc_feature: MA Experiment 20000111 PARAMETER Experiment Name: At_42deg_Heat_cDNA_P Parameter: Temperature (deg C) Value: 42 vs. 22
  misc_feature: MA Experiment 20000111 PARAMETER Experiment Name: At_42deg_Heat_cDNA_P Parameter: Timepoint (hr) Value: 6
  misc_feature: MA Experiment 20000111 PARAMETER Experiment Name: At_42deg_Heat_cDNA_P Parameter: Tissue Value: Aerial
  misc_feature: MA Experiment ID: 20000112 Result: Up-regulated in Transcription
  misc_feature: MA Experiment 20000112 PARAMETER Experiment Name: At_42deg_Heat_cDNA_P Parameter: Temperature (deg C) Value: 42 vs. 22
  misc_feature: MA Experiment 20000112 PARAMETER Experiment Name: At_42deg_Heat_cDNA_P Parameter: Timepoint (hr) Value: 2
  misc_feature: MA Experiment 20000112 PARAMETER Experiment Name: At_42deg_Heat_cDNA_P Parameter: Tissue Value: Aerial
  misc_feature: MA Experiment ID: 20000144 Result: Up-regulated in Transcription
  misc_feature: MA Experiment 20000144 PARAMETER Experiment Name: At_42deg_Heat_cDNA_P Parameter: Temperature (deg C) Value: 42 vs. 22
  misc_feature: MA Experiment 20000144 PARAMETER Experiment Name: At_42deg_Heat_cDNA_P Parameter: Timepoint (hr) Value: 1
  misc_feature: MA Experiment 20000144 PARAMETER Experiment Name: At_42deg_Heat_cDNA_P Parameter: Tissue Value: Aerial
  misc_feature: MA Experiment ID: 20000173 Result: Up-regulated in Transcription
  misc_feature: MA Experiment 20000173 PARAMETER Experiment Name: At_42deg_Heat_P Parameter: Age (day) Value: 14
  misc_feature: MA Experiment 20000173 PARAMETER Experiment Name: At_42deg_Heat_P Parameter: Organism Value: A. thaliana
  misc_feature: MA Experiment 20000173 PARAMETER Experiment Name: At_42deg_Heat_P Parameter: Plant Line Value: WS
  misc_feature: MA Experiment 20000173 PARAMETER Experiment Name: At_42deg_Heat_P Parameter: Temperature (deg C) Value: 42 vs. 22
  misc_feature: MA Experiment 20000173 PARAMETER Experiment Name: At_42deg_Heat_P Parameter: Timepoint (hr) Value: 6
  misc_feature: MA Experiment 20000173 PARAMETER Experiment Name: At_42deg_Heat_P Parameter: Tissue Value: Aerial
  misc_feature: MA Experiment ID: 20000224 Result: Down-regulated in Transcription
  misc_feature: MA Experiment ID: 20000438 Result: Down-regulated in Transcription
  misc_feature: MA Experiment 20000438 PARAMETER Experiment Name: At_Shoots__P Parameter: Age (day) Value: 14
  misc_feature: MA Experiment 20000438 PARAMETER Experiment Name: At_Shoots__P Parameter: Tissue Value: Shoots vs. Whole Plant
  misc_feature: MA Experiment ID: 20001451 Result: Up-regulated in Transcription
  misc_feature: MA Experiment 20001451 PARAMETER Experiment Name: At_Far-red-induction_P Parameter: Age (day) Value: 7
  misc_feature: MA Experiment 20001451 PARAMETER Experiment Name: At_Far-red-induction_P Parameter: Light Value: Far-red vs. White
  misc_feature: MA Experiment 20001451 PARAMETER Experiment Name: At_Far-red-induction_P Parameter: Organism Value: A. thaliana
  misc_feature: MA Experiment 20001451 PARAMETER Experiment Name: At_Far-red-induction_P Parameter: Plant Line Value: Columbia
  misc_feature: MA Experiment 20001451 PARAMETER Experiment Name: At_Far-red-induction_P Parameter: Timepoint (hr) Value: 24
  misc_feature: MA Experiment 20001451 PARAMETER Experiment Name: At_Far-red-induction_P Parameter: Tissue Value: Whole Plant

SEQ ID NO: 92519 - protein, 299 aa, Arabidopsis thaliana; identical to SEQ ID NO: 88763
  peptide (1)..(299): Ceres Seq. ID no. 12712256
  misc_feature (13)..(175): Pfam Name: NAD binding domain of 6-phosphogluconate dehydrogenase Pfam Description: NAD binding domain of 6-phosphogluconate
  misc_feature (1)..(299): Homolog of NCBI NO: 30698779 NR Description: dehydrogenase -related [Arabidopsis thaliana]
  misc_feature (1)..(299): Homolog of NCBI NO: 18409781 NR Description: putative dehydrogenase; protein id: At1g71180.1, by cDNA: gi_15293142, supported by cDNA: gi_21281067 [Arabidopsis >gi|15293143|gb|AAK93682.1| putative dehydrogenase dehydrogenase
  misc_feature (1)..(299): Homolog of NCBI NO: 25283629 NR Description: probable dehydrogenase F23N20.17 [imported] -
  misc_feature (8)..(299): Homolog of NCBI NO: 15233455 NR Description: putative protein; protein id: At4g29120.1, by cDNA: gi_13877868, supported by cDNA: gi_17065607 [Arabidopsis
  misc_feature (9)..(296): Homolog of NCBI NO: 34909392 NR Description: putative dehydrogenase [Oryza sativa (japonica group)] >gi|20521418|dbj|BAB91928.1| putative dehydrogenase
  misc_feature (9)..(286): Homolog of NCBI NO: 30022129 NR Description: 3-hydroxyisobutyrate dehydrogenase [Bacillus
  misc_feature (12)..(290): Homolog of NCBI NO: 22982959 NR Description: hypothetical protein [Burkholderia fungorum]
  misc_feature (13)..(288): Homolog of NCBI NO: 16078460 NR Description: similar to 3-hydroxyisobutyrate dehydrogenase subtilis] >gi|3183454|sp|O34948|YKWC_BACSU Hypothetical
  misc_feature (15)..(291): Homolog of NCBI NO: 28379084 NR Description: 3-hydroxyisobutyrate dehydrogenase [Lactobacillus
  misc_feature (14)..(288): Homolog of NCBI NO: 15896585 NR Description: Dehydrogenase related to 3-hydroxyisobutyrate YKWC B.subtilis ortholog [Clostridium acetobutylicum]

SEQ ID NO: 92520 - protein, 276 aa, Arabidopsis thaliana; identical to SEQ ID NO: 88764
  peptide (1)..(276): Ceres Seq. ID no. 12712257
  misc_feature (1)..(152): Pfam Name: NAD binding domain of 6-phosphogluconate dehydrogenase Pfam Description: NAD binding domain of 6-phosphogluconate
  misc_feature (1)..(276): Homolog of NCBI NO: 30698779 NR Description: dehydrogenase -related [Arabidopsis thaliana]
  misc_feature (1)..(276): Homolog of NCBI NO: 18409781 NR Description: putative dehydrogenase; protein id: At1g71180.1, by cDNA: gi_15293142, supported by cDNA: gi_21281067 [Arabidopsis >gi|15293143|gb|AAK93682.1| putative dehydrogenase dehydrogenase
  misc_feature (1)..(276): Homolog of NCBI NO: 25283629 NR Description: probable dehydrogenase F23N20.17 [imported] -
  misc_feature (1)..(276): Homolog of NCBI NO: 15233455 NR Description: putative protein; protein id: At4g29120.1, by cDNA: gi_13877868, supported by cDNA: gi_17065607 [Arabidopsis
  misc_feature (1)..(273): Homolog of NCBI NO: 34909392 NR Description: putative dehydrogenase [Oryza sativa (japonica group)] >gi|20521418|dbj|BAB91928.1| putative dehydrogenase
  misc_feature (1)..(263): Homolog of NCBI NO: 30022129 NR Description: 3-hydroxyisobutyrate dehydrogenase [Bacillus
  misc_feature (1)..(267): Homolog of NCBI NO: 22982959 NR Description: hypothetical protein [Burkholderia fungorum]
  misc_feature (1)..(265): Homolog of NCBI NO: 16078460 NR Description: similar to 3-hydroxyisobutyrate dehydrogenase subtilis] >gi|3183454|sp|O34948|YKWC_BACSU Hypothetical
  misc_feature (1)..(268): Homolog of NCBI NO: 28379084 NR Description: 3-hydroxyisobutyrate dehydrogenase [Lactobacillus
  misc_feature (1)..(265): Homolog of NCBI NO: 15896585 NR Description: Dehydrogenase related to 3-hydroxyisobutyrate YKWC B.subtilis ortholog [Clostridium acetobutylicum]

SEQ ID NO: 92521 - protein, 272 aa, Arabidopsis thaliana; identical to SEQ ID NO: 88765
  peptide (1)..(272): Ceres Seq. ID no. 12712258
  misc_feature (1)..(148): Pfam Name: NAD binding domain of 6-phosphogluconate dehydrogenase Pfam Description: NAD binding domain of 6-phosphogluconate
  misc_feature (1)..(272): Homolog of NCBI NO: 30698779 NR Description: dehydrogenase -related [Arabidopsis thaliana]
  misc_feature (1)..(272): Homolog of NCBI NO: 18409781 NR Description: putative dehydrogenase; protein id: At1g71180.1, by cDNA: gi_15293142, supported by cDNA: gi_21281067 [Arabidopsis >gi|15293143|gb|AAK93682.1| putative dehydrogenase dehydrogenase
  misc_feature (1)..(272): Homolog of NCBI NO: 25283629 NR Description: probable dehydrogenase F23N20.17 [imported] -
  misc_feature (1)..(272): Homolog of NCBI NO: 15233455 NR Description: putative protein; protein id: At4g29120.1, by cDNA: gi_13877868, supported by cDNA: gi_17065607 [Arabidopsis
  misc_feature (1)..(269): Homolog of NCBI NO: 34909392 NR Description: putative dehydrogenase [Oryza sativa (japonica group)] >gi|20521418|dbj|BAB91928.1| putative dehydrogenase
  misc_feature (1)..(259): Homolog of NCBI NO: 30022129 NR Description: 3-hydroxyisobutyrate dehydrogenase [Bacillus
  misc_feature (1)..(263): Homolog of NCBI NO: 22982959 NR Description: hypothetical protein [Burkholderia fungorum]
  misc_feature (1)..(261): Homolog of NCBI NO: 16078460 NR Description: similar to 3-hydroxyisobutyrate dehydrogenase subtilis] >gi|3183454|sp|O34948|YKWC_BACSU Hypothetical
  misc_feature (1)..(264): Homolog of NCBI NO: 28379084 NR Description: 3-hydroxyisobutyrate dehydrogenase [Lactobacillus
  misc_feature (1)..(261): Homolog of NCBI NO: 15896585 NR Description: Dehydrogenase related to 3-hydroxyisobutyrate YKWC B.subtilis ortholog [Clostridium acetobutylicum]

SEQ ID NO: 92522 - DNA, 2169 bp, Arabidopsis thaliana; identical to SEQ ID NO: 88766
  misc_feature (1)..(2169): Ceres Seq. ID no. 12712287
  misc_feature: MA Experiment ID: 20000307 Result: Down-regulated in Transcription
  misc_feature: MA Experiment 20000307 PARAMETER Experiment Name: At_Germinating_Seeds_Sub_P Parameter: Age (hr) Value: 24 vs. 0
  misc_feature: MA Experiment 20000307 PARAMETER Experiment Name: At_Germinating_Seeds_Sub_P Parameter: Organism Value: A. thaliana
  misc_feature: MA Experiment 20000307 PARAMETER Experiment Name: At_Germinating_Seeds_Sub_P Parameter: Plant Line Value: WS
  misc_feature: MA Experiment 20000307 PARAMETER Experiment Name: At_Germinating_Seeds_Sub_P Parameter: Tissue Value: Germinating Seeds

SEQ ID NO: 92523 - protein, 722 aa, Arabidopsis thaliana; identical to SEQ ID NO: 88767
  peptide (1)..(722): Ceres Seq. ID no. 12712288
  misc_feature (60)..(94): Pfam Name: PPR repeat Pfam Description: PPR repeat
  misc_feature (1)..(640): Homolog of NCBI NO: 15217470 NR Description: hypothetical protein; protein id: At1g71420.1
  misc_feature (358)..(722): Homolog of NCBI NO: 15217470 NR Description: hypothetical protein; protein id: At1g71420.1
  misc_feature (368)..(722): Homolog of NCBI NO: 15229561 NR Description: hypothetical protein; protein id: At3g24000.1 thaliana] >gi|9294669|dbj|BAB03018.1| contains similarity to
  misc_feature (62)..(346): Homolog of NCBI NO: 15229561 NR Description: hypothetical protein; protein id: At3g24000.1 thaliana] >gi|9294669|dbj|BAB03018.1| contains similarity to
  misc_feature (368)..(722): Homolog of NCBI NO: 15236324 NR Description: putative protein; protein id: At4g13650.1
  misc_feature (58)..(352): Homolog of NCBI NO: 15236324 NR Description: putative protein; protein id: At4g13650.1
  misc_feature (368)..(722): Homolog of NCBI NO: 34896896 NR Description: hypothetical protein [Oryza sativa (japonica group)] >gi|24899461|gb|AAN65031.1| hypothetical protein [Oryza
  misc_feature (94)..(346): Homolog of NCBI NO: 34896896 NR Description: hypothetical protein [Oryza sativa (japonica group)] >gi|24899461|gb|AAN65031.1| hypothetical protein [Oryza
  misc_feature (58)..(438): Homolog of NCBI NO: 15234831 NR Description: putative protein; protein id: At4g30700.1
  misc_feature (368)..(722): Homolog of NCBI NO: 15234831 NR Description: putative protein; protein id: At4g30700.1

SEQ ID NO: 92524 - protein, 638 aa, Arabidopsis thaliana; identical to SEQ ID NO: 88768
  peptide (1)..(638): Ceres Seq. ID no. 12712289
  misc_feature (1)..(556): Homolog of NCBI NO: 15217470 NR Description: hypothetical protein; protein id: At1g71420.1
  misc_feature (274)..(638): Homolog of NCBI NO: 15217470 NR Description: hypothetical protein; protein id: At1g71420.1
  misc_feature (284)..(638): Homolog of NCBI NO: 15229561 NR Description: hypothetical protein; protein id: At3g24000.1 thaliana] >gi|9294669|dbj|BAB03018.1| contains similarity to
  misc_feature (1)..(262): Homolog of NCBI NO: 15229561 NR Description: hypothetical protein; protein id: At3g24000.1 thaliana] >gi|9294669|dbj|BAB03018.1| contains similarity to
  misc_feature (284)..(638): Homolog of NCBI NO: 15236324 NR Description: putative protein; protein id: At4g13650.1
  misc_feature (1)..(268): Homolog of NCBI NO: 15236324 NR Description: putative protein; protein id: At4g13650.1
  misc_feature (284)..(638): Homolog of NCBI NO: 34896896 NR Description: hypothetical protein [Oryza sativa (japonica group)] >gi|24899461|gb|AAN65031.1| hypothetical protein [Oryza
  misc_feature (10)..(262): Homolog of NCBI NO: 34896896 NR Description: hypothetical protein [Oryza sativa (japonica group)] >gi|24899461|gb|AAN65031.1| hypothetical protein [Oryza
  misc_feature (1)..(354): Homolog of NCBI NO: 15234831 NR Description: putative protein; protein id: At4g30700.1
  misc_feature (284)..(638): Homolog of NCBI NO: 15234831 NR Description: putative protein; protein id: At4g30700.1

SEQ ID NO: 92525 - protein, 618 aa, Arabidopsis thaliana; identical to SEQ ID NO: 88769
  peptide (1)..(618): Ceres Seq. ID no. 12712290
  misc_feature (1)..(536): Homolog of NCBI NO: 15217470 NR Description: hypothetical protein; protein id: At1g71420.1
  misc_feature (254)..(618): Homolog of NCBI NO: 15217470 NR Description: hypothetical protein; protein id: At1g71420.1
  misc_feature (264)..(618): Homolog of NCBI NO: 15229561 NR Description: hypothetical protein; protein id: At3g24000.1 thaliana] >gi|9294669|dbj|BAB03018.1| contains similarity to
  misc_feature (1)..(242): Homolog of NCBI NO: 15229561 NR Description: hypothetical protein; protein id: At3g24000.1 thaliana] >gi|9294669|dbj|BAB03018.1| contains similarity to
  misc_feature (264)..(618): Homolog of NCBI NO: 15236324 NR Description: putative protein; protein id: At4g13650.1
  misc_feature (1)..(248): Homolog of NCBI NO: 15236324 NR Description: putative protein; protein id: At4g13650.1
  misc_feature (264)..(618): Homolog of NCBI NO: 34896896 NR Description: hypothetical protein [Oryza sativa (japonica group)] >gi|24899461|gb|AAN65031.1| hypothetical protein [Oryza
  misc_feature (1)..(242): Homolog of NCBI NO: 34896896 NR Description: hypothetical protein [Oryza sativa (japonica group)] >gi|24899461|gb|AAN65031.1| hypothetical protein [Oryza
  misc_feature (1)..(334): Homolog of NCBI NO: 15234831 NR Description: putative protein; protein id: At4g30700.1
  misc_feature (264)..(618): Homolog of NCBI NO: 15234831 NR Description: putative protein; protein id: At4g30700.1

SEQ ID NO: 92526 - DNA, 1908 bp, Arabidopsis thaliana; identical to SEQ ID NO: 88770
  misc_feature (1)..(1908): Ceres Seq. ID no. 12712302
  misc_feature: MA Experiment ID: 20000179 Result: Down-regulated in Transcription
  misc_feature: MA Experiment 20000179 PARAMETER Experiment Name: At_Germinating_Seeds_P Parameter: Age (hr) Value: 6 vs. 0
  misc_feature: MA Experiment 20000179 PARAMETER Experiment Name: At_Germinating_Seeds_P Parameter: Tissue Value: Germinating Seeds

SEQ ID NO: 92527 - protein, 635 aa, Arabidopsis thaliana; identical to SEQ ID NO: 88771
  peptide (1)..(635): Ceres Seq. ID no. 12712303
  misc_feature (474)..(508): Pfam Name: PPR repeat Pfam Description: PPR repeat
  misc_feature (183)..(635): Homolog of NCBI NO: 15217514 NR Description: unknown protein; protein id: At1g71490.1
  misc_feature (209)..(583): Homolog of NCBI NO: 15220977 NR Description: hypothetical protein; protein id: At1g22830.1
  misc_feature (6)..(243): Homolog of NCBI NO: 15220977 NR Description: hypothetical protein; protein id: At1g22830.1
  misc_feature (30)..(156): Homolog of NCBI NO: 15220977 NR Description: hypothetical protein; protein id: At1g22830.1
  misc_feature (1)..(471): Homolog of NCBI NO: 15217514 NR Description: unknown protein; protein id: At1g71490.1
  misc_feature (6)..(243): Homolog of NCBI NO: 7487353 NR Description: hypothetical protein T22J18.1 - Arabidopsis
  misc_feature (209)..(347): Homolog of NCBI NO: 7487353 NR Description: hypothetical protein T22J18.1 - Arabidopsis
  misc_feature (183)..(614): Homolog of NCBI NO: 34904686 NR Description: P0446G09.7 [Oryza sativa (japonica
  misc_feature (268)..(628): Homolog of NCBI NO: 15225445 NR Description: hypothetical protein; protein id: At2g13600.1
  misc_feature (84)..(323): Homolog of NCBI NO: 15225445 NR Description: hypothetical protein; protein id: At2g13600.1

SEQ ID NO: 92528 - protein, 501 aa, Arabidopsis thaliana; identical to SEQ ID NO: 88772
  peptide (1)..(501): Ceres Seq. ID no. 12712304
  misc_feature (340)..(374): Pfam Name: PPR repeat Pfam Description: PPR repeat
  misc_feature (49)..(501): Homolog of NCBI NO: 15217514 NR Description: unknown protein; protein id: At1g71490.1
  misc_feature (75)..(449): Homolog of NCBI NO: 15220977 NR Description: hypothetical protein; protein id: At1g22830.1
  misc_feature (1)..(109): Homolog of NCBI NO: 15220977 NR Description: hypothetical protein; protein id: At1g22830.1
  misc_feature (1)..(22): Homolog of NCBI NO: 15220977 NR Description: hypothetical protein; protein id: At1g22830.1
  misc_feature (1)..(337): Homolog of NCBI NO: 15217514 NR Description: unknown protein; protein id: At1g71490.1
  misc_feature (1)..(109): Homolog of NCBI NO: 7487353 NR Description: hypothetical protein T22J18.1 - Arabidopsis
  misc_feature (75)..(213): Homolog of NCBI NO: 7487353 NR Description: hypothetical protein T22J18.1 - Arabidopsis
  misc_feature (49)..(480): Homolog of NCBI NO: 34904686 NR Description: P0446G09.7 [Oryza sativa (japonica
  misc_feature (134)..(494): Homolog of NCBI NO: 15225445 NR Description: hypothetical protein; protein id: At2g13600.1
  misc_feature (1)..(189): Homolog of NCBI NO: 15225445 NR Description: hypothetical protein; protein id: At2g13600.1

SEQ ID NO: 92529 - protein, 448 aa, Arabidopsis thaliana; identical to SEQ ID NO: 88773
  peptide (1)..(448): Ceres Seq. ID no. 12712305
  misc_feature (287)..(321): Pfam Name: PPR repeat Pfam Description: PPR repeat
  misc_feature (1)..(448): Homolog of NCBI NO: 15217514 NR Description: unknown protein; protein id: At1g71490.1
  misc_feature (22)..(396): Homolog of NCBI NO: 15220977 NR Description: hypothetical protein; protein id: At1g22830.1
  misc_feature (1)..(56): Homolog of NCBI NO: 15220977 NR Description: hypothetical protein; protein id: At1g22830.1
  misc_feature (1)..(284): Homolog of NCBI NO: 15217514 NR Description: unknown protein; protein id: At1g71490.1
  misc_feature (1)..(56): Homolog of NCBI NO: 7487353 NR Description: hypothetical protein T22J18.1 - Arabidopsis
  misc_feature (22)..(160): Homolog of NCBI NO: 7487353 NR Description: hypothetical protein T22J18.1 - Arabidopsis
  misc_feature (1)..(427): Homolog of NCBI NO: 34904686 NR Description: P0446G09.7 [Oryza sativa (japonica
  misc_feature (81)..(441): Homolog of NCBI NO: 15225445 NR Description: hypothetical protein; protein id: At2g13600.1
  misc_feature (1)..(136): Homolog of NCBI NO: 15225445 NR Description: hypothetical protein; protein id: At2g13600.1
  misc_feature (52)..(431): Homolog of NCBI NO: 21741755 NR Description: OSJNBa0060B20.9 [Oryza sativa (japonica

SEQ ID NO: 92530 - DNA, 1932 bp, Arabidopsis thaliana; identical to SEQ ID NO: 88774
  misc_feature (1)..(1932): Ceres Seq. ID no. 12712309
  misc_feature: MA Experiment ID: 20000439 Result: Up-regulated in Transcription
  misc_feature: MA Experiment 20000439 PARAMETER Experiment Name: At_Roots__P Parameter: Age (day) Value: 14 vs. 21
  misc_feature: MA Experiment 20000439 PARAMETER Experiment Name: At_Roots__P Parameter: Organism Value: A. thaliana
  misc_feature: MA Experiment 20000439 PARAMETER Experiment Name: At_Roots__P Parameter: Tissue Value: Roots vs. Whole Plant
  misc_feature: MA Experiment ID: 20000456 Result: Up-regulated in Transcription
  misc_feature: MA Experiment 20000456 PARAMETER Experiment Name: At_100uM_BA_P Parameter: Age (day) Value: 14
  misc_feature: MA Experiment 20000456 PARAMETER Experiment Name: At_100uM_BA_P Parameter: Organism Value: A. thaliana
  misc_feature: MA Experiment 20000456 PARAMETER Experiment Name: At_100uM_BA_P Parameter: Plant Line Value: WS
  misc_feature: MA Experiment 20000456 PARAMETER Experiment Name: At_100uM_BA_P Parameter: Timepoint (hr) Value: 6
  misc_feature: MA Experiment 20000456 PARAMETER Experiment Name: At_100uM_BA_P Parameter: Tissue Value: Aerial
  misc_feature: MA Experiment 20000456 PARAMETER Experiment Name: At_100uM_BA_P Parameter: Treatment Value: 100uM BA vs. No Treatment
  misc_feature: MA Experiment ID: 20000709 Result: Up-regulated in Transcription
  misc_feature: MA Experiment 20000709 PARAMETER Experiment Name: At_15mM_NH4NO3_L-to-H_P Parameter: Age (hr) Value: 14
  misc_feature: MA Experiment 20000709 PARAMETER Experiment Name: At_15mM_NH4NO3_L-to-H_P Parameter: Organism Value: A. thaliana
  misc_feature: MA Experiment 20000709 PARAMETER Experiment Name: At_15mM_NH4NO3_L-to-H_P Parameter: Plant Line Value: WS
  misc_feature: MA Experiment 20000709 PARAMETER Experiment Name: At_15mM_NH4NO3_L-to-H_P Parameter: Timepoint (hr) Value: 4
  misc_feature: MA Experiment 20000709 PARAMETER Experiment Name: At_15mM_NH4NO3_L-to-H_P Parameter: Tissue Value: Aerial
  misc_feature: MA Experiment 20000709 PARAMETER Experiment Name: At_15mM_NH4NO3_L-to-H_P Parameter: Treatment Value: 15mM NH4NO3 vs. 30mM Mannitol
  misc_feature: MA Experiment ID: 20001905 Result: Up-regulated in Transcription
  misc_feature: MA Experiment 20001905 PARAMETER Experiment Name: At_Drought_Reproduction_P Parameter: Age (day) Value: 40
  misc_feature: MA Experiment 20001905 PARAMETER Experiment Name: At_Drought_Reproduction_P Parameter: Organism Value: A. thaliana
  misc_feature: MA Experiment 20001905 PARAMETER Experiment Name: At_Drought_Reproduction_P Parameter: Plant Line Value: WS
  misc_feature: MA Experiment 20001905 PARAMETER Experiment Name: At_Drought_Reproduction_P Parameter: Timepoint (day) Value: 10
  misc_feature: MA Experiment 20001905 PARAMETER Experiment Name: At_Drought_Reproduction_P Parameter: Tissue Value: Rosettes
  misc_feature: MA Experiment 20001905 PARAMETER Experiment Name: At_Drought_Reproduction_P Parameter: Treatment Value: Drought vs. No Drought

SEQ ID NO: 92531 - protein, 643 aa, Arabidopsis thaliana; identical to SEQ ID NO: 88775
  peptide (1)..(643): Ceres Seq. ID no. 12712310
  misc_feature (135)..(419): Pfam Name: Protein kinase domain Pfam Description: Protein kinase domain
  misc_feature (255)..(643): Homolog of NCBI NO: 25406116 NR Description: hypothetical protein F14O23.1 [imported] - thaliana >gi|7239515|gb|AAF43241.1|AC012654_25 Strong similarity the putative protein kinase F26A9.10 gi|6682614 from A. thaliana
  misc_feature (38)..(625): Homolog of NCBI NO: 7488162 NR Description: probable protein kinase T5L19.140 (EC 2.7.1.-) - thaliana >gi|4539004|emb|CAB39625.1| putative protein kinase thaliana] >gi|7267697|emb|CAB78124.1| putative protein kinase
  misc_feature (1)..(533): Homolog of NCBI NO: 15217643 NR Description: protein kinase, putative; protein id: At1g33770.1
  misc_feature (524)..(629): Homolog of NCBI NO: 15217643 NR Description: protein kinase, putative; protein id: At1g33770.1
  misc_feature (160)..(625): Homolog of NCBI NO: 30681286 NR Description: protein kinase -related [Arabidopsis thaliana]
  misc_feature (85)..(580): Homolog of NCBI NO: 15217565 NR Description: putative protein kinase; protein id: At1g09600.1
  misc_feature (85)..(580): Homolog of NCBI NO: 25402555 NR Description: hypothetical protein [imported] - Arabidopsis >gi|3482933|gb|AAC33218.1| Similar to cdc2 protein kinases
  misc_feature (570)..(643): Homolog of NCBI NO: 15217565 NR Description: putative protein kinase; protein id: At1g09600.1
  misc_feature (570)..(643): Homolog of NCBI NO: 25402555 NR Description: hypothetical protein [imported] - Arabidopsis >gi|3482933|gb|AAC33218.1| Similar to cdc2 protein kinases
  misc_feature (85)..(585): Homolog of NCBI NO: 15223647 NR Description: CRK1 protein, putative; protein id: At1g57700.1

SEQ ID NO: 92532 - protein, 481 aa, Arabidopsis thaliana; identical to SEQ ID NO: 70663
  peptide (1)..(481): Ceres Seq. ID no. 12712311
  misc_feature (1)..(257): Pfam Name: Protein kinase domain Pfam Description: Protein kinase domain
  misc_feature (93)..(481): Homolog of NCBI NO: 25406116 NR Description: hypothetical protein F14O23.1 [imported] - thaliana >gi|7239515|gb|AAF43241.1|AC012654_25 Strong similarity the putative protein kinase F26A9.10 gi|6682614 from A. thaliana
  misc_feature (1)..(463): Homolog of NCBI NO: 7488162 NR Description: probable protein kinase T5L19.140 (EC 2.7.1.-) - thaliana >gi|4539004|emb|CAB39625.1| putative protein kinase thaliana] >gi|7267697|emb|CAB78124.1| putative protein kinase
  misc_feature (1)..(371): Homolog of NCBI NO: 15217643 NR Description: protein kinase, putative; protein id: At1g33770.1
  misc_feature (362)..(467): Homolog of NCBI NO: 15217643 NR Description: protein kinase, putative; protein id: At1g33770.1
  misc_feature (1)..(463): Homolog of NCBI NO: 30681286 NR Description: protein kinase -related [Arabidopsis thaliana]
  misc_feature (1)..(418): Homolog of NCBI NO: 15217565 NR Description: putative protein kinase; protein id: At1g09600.1
  misc_feature (1)..(418): Homolog of NCBI NO: 25402555 NR Description: hypothetical protein [imported] - Arabidopsis >gi|3482933|gb|AAC33218.1| Similar to cdc2 protein kinases
  misc_feature (408)..(481): Homolog of NCBI NO: 15217565 NR Description: putative protein kinase; protein id: At1g09600.1
  misc_feature (408)..(481): Homolog of NCBI NO: 25402555 NR Description: hypothetical protein [imported] - Arabidopsis >gi|3482933|gb|AAC33218.1| Similar to cdc2 protein kinases
  misc_feature (1)..(423): Homolog of NCBI NO: 15223647 NR Description: CRK1 protein, putative; protein id: At1g57700.1

SEQ ID NO: 92533 - protein, 473 aa, Arabidopsis thaliana; identical to SEQ ID NO: 70664
  peptide (1)..(473): Ceres Seq. ID no. 12712312
  misc_feature (1)..(249): Pfam Name: Protein kinase domain Pfam Description: Protein kinase domain
  misc_feature (85)..(473): Homolog of NCBI NO: 25406116 NR Description: hypothetical protein F14O23.1 [imported] - thaliana >gi|7239515|gb|AAF43241.1|AC012654_25 Strong similarity the putative protein kinase F26A9.10 gi|6682614 from A. thaliana
  misc_feature (1)..(455): Homolog of NCBI NO: 7488162 NR Description: probable protein kinase T5L19.140 (EC 2.7.1.-) - thaliana >gi|4539004|emb|CAB39625.1| putative protein kinase thaliana] >gi|7267697|emb|CAB78124.1| putative protein kinase
  misc_feature (1)..(363): Homolog of NCBI NO: 15217643 NR Description: protein kinase, putative; protein id: At1g33770.1
  misc_feature (354)..(459): Homolog of NCBI NO: 15217643 NR Description: protein kinase, putative; protein id: At1g33770.1
  misc_feature (1)..(455): Homolog of NCBI NO: 30681286 NR Description: protein kinase -related [Arabidopsis thaliana]
  misc_feature (1)..(410): Homolog of NCBI NO: 15217565 NR Description: putative protein kinase; protein id: At1g09600.1
  misc_feature (1)..(410): Homolog of NCBI NO: 25402555 NR Description: hypothetical protein [imported] - Arabidopsis >gi|3482933|gb|AAC33218.1| Similar to cdc2 protein kinases
  misc_feature (400)..(473): Homolog of NCBI NO: 15217565 NR Description: putative protein kinase; protein id: At1g09600.1
  misc_feature (400)..(473): Homolog of NCBI NO: 25402555 NR Description: hypothetical protein [imported] - Arabidopsis >gi|3482933|gb|AAC33218.1| Similar to cdc2 protein kinases
  misc_feature (1)..(415): Homolog of NCBI NO: 15223647 NR Description: CRK1 protein, putative; protein id: At1g57700.1

SEQ ID NO: 92534 - DNA, 1248 bp, Arabidopsis thaliana; identical to SEQ ID NO: 88778
  misc_feature (1)..(1248): Ceres Seq. ID no. 12712313
  misc_feature: MA Experiment ID: 108462 Result: Up-regulated in Transcription
  misc_feature: MA Experiment 108462 PARAMETER Experiment Name: At_Germinating_Seeds_cDNA_P Parameter: Age (day) Value: 2 vs. 0
  misc_feature: MA Experiment 108462 PARAMETER Experiment Name: At_Germinating_Seeds_cDNA_P Parameter: Tissue Value: Germinating Seeds
  misc_feature: MA Experiment ID: 108463 Result: Up-regulated in Transcription
  misc_feature: MA Experiment 108463 PARAMETER Experiment Name: At_Germinating_Seeds_cDNA_P Parameter: Age (day) Value: 3 vs. 0
  misc_feature: MA Experiment 108463 PARAMETER Experiment Name: At_Germinating_Seeds_cDNA_P Parameter: Tissue Value: Germinating Seeds
  misc_feature: MA Experiment ID: 108464 Result: Up-regulated in Transcription
  misc_feature: MA Experiment 108464 PARAMETER Experiment Name: At_Germinating_Seeds_cDNA_P Parameter: Age (day) Value: 4 vs. 0
  misc_feature: MA Experiment 108464 PARAMETER Experiment Name: At_Germinating_Seeds_cDNA_P Parameter: Tissue Value: Germinating Seeds
  misc_feature: MA Experiment ID: 108573 Result: Up-regulated in Transcription
  misc_feature: MA Experiment 108573 PARAMETER Experiment Name: At_Drought_cDNA_P Parameter: Timepoint (hr) Value: 6
  misc_feature: MA Experiment 108573 PARAMETER Experiment Name: At_Drought_cDNA_P Parameter: Tissue Value: Aerial
  misc_feature: MA Experiment 108573 PARAMETER Experiment Name: At_Drought_cDNA_P Parameter: Treatment Value: Drought vs. No Drought
  misc_feature: MA Experiment ID: 108577 Result: Down-regulated in Transcription
  misc_feature: MA Experiment 108577 PARAMETER Experiment Name: At_42deg_Heat_cDNA_P Parameter: Temperature (deg C) Value: 42 vs. 22
  misc_feature: MA Experiment 108577 PARAMETER Experiment Name: At_42deg_Heat_cDNA_P Parameter: Timepoint (hr) Value: 6
  misc_feature: MA Experiment 108577 PARAMETER Experiment Name: At_42deg_Heat_cDNA_P Parameter: Tissue Value: Aerial
  misc_feature: MA Experiment ID: 20000112 Result: Down-regulated in Transcription
  misc_feature: MA Experiment 20000112 PARAMETER Experiment Name: At_42deg_Heat_cDNA_P Parameter: Temperature (deg C) Value: 42 vs. 22
  misc_feature: MA Experiment 20000112 PARAMETER Experiment Name: At_42deg_Heat_cDNA_P Parameter: Timepoint (hr) Value: 2
  misc_feature: MA Experiment 20000112 PARAMETER Experiment Name: At_42deg_Heat_cDNA_P Parameter: Tissue Value: Aerial
  misc_feature: MA Experiment ID: 20000180 Result: Up-regulated in Transcription
  misc_feature: MA Experiment 20000180 PARAMETER Experiment Name: At_Germinating_Seeds_P Parameter: Age (hr) Value: 24 vs. 0
  misc_feature: MA Experiment 20000180 PARAMETER Experiment Name: At_Germinating_Seeds_P Parameter: Tissue Value: Germinating Seeds
  misc_feature: MA Experiment ID: 20000185 Result: Down-regulated in Transcription
  misc_feature: MA Experiment 20000185 PARAMETER Experiment Name: At_Roots__P Parameter: Age (day) Value: 7 vs. 21
  misc_feature: MA Experiment 20000185 PARAMETER Experiment Name: At_Roots__P Parameter: Organism Value: A. thaliana
  misc_feature: MA Experiment 20000185 PARAMETER Experiment Name: At_Roots__P Parameter: Tissue Value: Roots vs. Whole Plant
  misc_feature: MA Experiment ID: 20000438 Result: Up-regulated in Transcription
  misc_feature: MA Experiment 20000438 PARAMETER Experiment Name: At_Shoots__P Parameter: Age (day) Value: 14
  misc_feature: MA Experiment 20000438 PARAMETER Experiment Name: At_Shoots__P Parameter: Tissue Value: Shoots vs. Whole Plant
  misc_feature: MA Experiment ID: 20000439 Result: Down-regulated in Transcription
  misc_feature: MA Experiment 20000439 PARAMETER Experiment Name: At_Roots__P Parameter: Age (day) Value: 14 vs. 21
  misc_feature: MA Experiment 20000439 PARAMETER Experiment Name: At_Roots__P Parameter: Organism Value: A. thaliana
  misc_feature: MA Experiment 20000439 PARAMETER Experiment Name: At_Roots__P Parameter: Tissue Value: Roots vs. Whole Plant
  misc_feature: MA Experiment ID: 20001557 Result: Down-regulated in Transcription
  misc_feature: MA Experiment 20001557 PARAMETER Experiment Name: At_Drought_Soil_Dry_P Parameter: Age (day) Value: 27
  misc_feature: MA Experiment 20001557 PARAMETER Experiment Name: At_Drought_Soil_Dry_P Parameter: Organism Value: A. thaliana
  misc_feature: MA Experiment 20001557 PARAMETER Experiment Name: At_Drought_Soil_Dry_P Parameter: Plant Line Value: WS
  misc_feature: MA Experiment 20001557 PARAMETER Experiment Name: At_Drought_Soil_Dry_P Parameter: Post Timepoint (hr) Value: 3
  misc_feature: MA Experiment 20001557 PARAMETER Experiment Name: At_Drought_Soil_Dry_P Parameter: Post-Treatment Value: Re-Water vs. No Drought
  misc_feature: MA Experiment 20001557 PARAMETER Experiment Name: At_Drought_Soil_Dry_P Parameter: Timepoint (day) Value: 13
  misc_feature: MA Experiment 20001557 PARAMETER Experiment Name: At_Drought_Soil_Dry_P Parameter: Treatment Value: Drought vs. No Drought
  misc_feature: MA Experiment ID: 20001558 Result: Down-regulated in Transcription
  misc_feature: MA Experiment 20001558 PARAMETER Experiment Name: At_Drought_Soil_Dry_P Parameter: Age (day) Value: 27
  misc_feature: MA Experiment 20001558 PARAMETER Experiment Name: At_Drought_Soil_Dry_P Parameter: Organism Value: A. thaliana
  misc_feature: MA Experiment 20001558 PARAMETER Experiment Name: At_Drought_Soil_Dry_P Parameter: Plant Line Value: WS
  misc_feature: MA Experiment 20001558 PARAMETER Experiment Name: At_Drought_Soil_Dry_P Parameter: Post Timepoint (hr) Value: 6
  misc_feature: MA Experiment 20001558 PARAMETER Experiment Name: At_Drought_Soil_Dry_P Parameter: Post-Treatment Value: Re-Water vs. No Drought
  misc_feature: MA Experiment 20001558 PARAMETER Experiment Name: At_Drought_Soil_Dry_P Parameter: Timepoint (day) Value: 13
  misc_feature: MA Experiment 20001558 PARAMETER Experiment Name: At_Drought_Soil_Dry_P Parameter: Treatment Value: Drought vs. No Drought

SEQ ID NO: 92535 - protein, 358 aa, Arabidopsis thaliana; identical to SEQ ID NO: 25159
  peptide (1)..(358): Ceres Seq. ID no. 12712314
  misc_feature (60)..(303): Pfam Name: Peroxidase Pfam Description: Peroxidase
  misc_feature (1)..(358): Homolog of NCBI NO: 15217539 NR Description: peroxidase, putative; protein id: At1g71695.1, by cDNA: 39968., supported by cDNA: gi_12248036 [Arabidopsis >gi|25453205|sp|Q96520|PE12_ARATH Peroxidase 12 precursor
  misc_feature (1)..(358): Homolog of NCBI NO: 1402914 NR Description: peroxidase [Arabidopsis thaliana]
  misc_feature (18)..(353): Homolog of NCBI NO: 14031049 NR Description: peroxidase [Nicotiana tabacum]
  misc_feature (18)..(358): Homolog of NCBI NO: 1389835 NR Description: peroxidase [Linum usitatissimum]
  misc_feature (9)..(357): Homolog of NCBI NO: 478409 NR Description: peroxidase (EC 1.11.1.7), cationic - adzuki bean
  misc_feature (12)..(342): Homolog of NCBI NO: 1084393 NR Description: peroxidase (EC 1.11.1.7) precursor - parsley
  misc_feature (39)..(342): Homolog of NCBI NO: 7433081 NR Description: probable peroxidase (EC 1.11.1.7) (clone PC42) -
  misc_feature (9)..(339): Homolog of NCBI NO: 7433084 NR Description: probable peroxidase (EC 1.11.1.7) prxr1 - spinach
  misc_feature (35)..(339): Homolog of NCBI NO: 34905838 NR Description: putative peroxidase [Oryza sativa (japonica >gi|15289934|dbj|BAB63629.1| putative peroxidase [Oryza sativa
  misc_feature (31)..(339): Homolog of NCBI NO: 34905826 NR Description: putative peroxidase [Oryza sativa (japonica >gi|15289928|dbj|BAB63623.1| putative peroxidase [Oryza sativa

SEQ ID NO: 92536 - protein, 340 aa, Arabidopsis thaliana; identical to SEQ ID NO: 25160
  peptide (1)..(340): Ceres Seq. ID no. 12712315
  misc_feature (42)..(285): Pfam Name: Peroxidase Pfam Description: Peroxidase
  misc_feature (1)..(340): Homolog of NCBI NO: 15217539 NR Description: peroxidase, putative; protein id: At1g71695.1, by cDNA: 39968., supported by cDNA: gi_12248036 [Arabidopsis >gi|25453205|sp|Q96520|PE12_ARATH Peroxidase 12 precursor
  misc_feature (1)..(340): Homolog of NCBI NO: 1402914 NR Description: peroxidase [Arabidopsis thaliana]
  misc_feature (1)..(335): Homolog of NCBI NO: 14031049 NR Description: peroxidase [Nicotiana tabacum]
  misc_feature (1)..(340): Homolog of NCBI NO: 1389835 NR Description: peroxidase [Linum usitatissimum]
  misc_feature (1)..(339): Homolog of NCBI NO: 478409 NR Description: peroxidase (EC 1.11.1.7), cationic - adzuki bean
  misc_feature (1)..(324): Homolog of NCBI NO: 1084393 NR Description: peroxidase (EC 1.11.1.7) precursor - parsley
  misc_feature (21)..(324): Homolog of NCBI NO: 7433081 NR Description: probable peroxidase (EC 1.11.1.7) (clone PC42) -
  misc_feature (1)..(321): Homolog of NCBI NO: 7433084 NR Description: probable peroxidase (EC 1.11.1.7) prxr1 - spinach
  misc_feature (17)..(321): Homolog of NCBI NO: 34905838 NR Description: putative peroxidase [Oryza sativa (japonica >gi|15289934|dbj|BAB63629.1| putative peroxidase [Oryza sativa
  misc_feature (13)..(321): Homolog of NCBI NO: 34905826 NR Description: putative peroxidase [Oryza sativa (japonica >gi|15289928|dbj|BAB63623.1| putative peroxidase [Oryza sativa

SEQ ID NO: 92537 - DNA, 1497 bp, Arabidopsis thaliana; identical to SEQ ID NO: 88781
  misc_feature (1)..(1497): Ceres Seq. ID no. 12712335
  misc_feature: MA Experiment ID: 20000307 Result: Down-regulated in Transcription
  misc_feature: MA Experiment 20000307 PARAMETER Experiment Name: At_Germinating_Seeds_Sub_P Parameter: Age (hr) Value: 24 vs. 0
  misc_feature: MA Experiment 20000307 PARAMETER Experiment Name: At_Germinating_Seeds_Sub_P Parameter: Organism Value: A. thaliana
  misc_feature: MA Experiment 20000307 PARAMETER Experiment Name: At_Germinating_Seeds_Sub_P Parameter: Plant Line Value: WS
  misc_feature: MA Experiment 20000307 PARAMETER Experiment Name: At_Germinating_Seeds_Sub_P Parameter: Tissue Value: Germinating Seeds
  misc_feature: MA Experiment ID: 20000314 Result: Up-regulated in Transcription
  misc_feature: MA Experiment 20000314 PARAMETER Experiment Name: At_14day_Shoots-Roots_Sub_P Parameter: Age (day) Value: 14
  misc_feature: MA Experiment 20000314 PARAMETER Experiment Name: At_14day_Shoots-Roots_Sub_P Parameter: Organism Value: A. thaliana
  misc_feature: MA Experiment 20000314 PARAMETER Experiment Name: At_14day_Shoots-Roots_Sub_P Parameter: Plant Line Value: WS
  misc_feature: MA Experiment 20000314 PARAMETER Experiment Name: At_14day_Shoots-Roots_Sub_P Parameter: Tissue Value: Roots vs. Whole Plant
  misc_feature: MA Experiment ID: 20000315 Result: Up-regulated in Transcription
  misc_feature: MA Experiment 20000315 PARAMETER Experiment Name: At_14day_Shoots-Roots_Sub_P Parameter: Age (day) Value: 14
  misc_feature: MA Experiment 20000315 PARAMETER Experiment Name: At_14day_Shoots-Roots_Sub_P Parameter: Organism Value: A. thaliana
  misc_feature: MA Experiment 20000315 PARAMETER Experiment Name: At_14day_Shoots-Roots_Sub_P Parameter: Plant Line Value: WS
  misc_feature: MA Experiment 20000315 PARAMETER Experiment Name: At_14day_Shoots-Roots_Sub_P Parameter: Tissue Value: Shoots vs. Whole Plant

SEQ ID NO: 92538 - protein, 498 aa, Arabidopsis thaliana; identical to SEQ ID NO: 88782
  peptide (1)..(498): Ceres Seq. ID no. 12712336
  misc_feature (1)..(498): Homolog of NCBI NO: 15217599 NR Description: hypothetical protein; protein id: At1g71870.1
  misc_feature (19)..(488): Homolog of NCBI NO: 28376699 NR Description: putative MATE efflux membrane protein [Oryza
  misc_feature (13)..(467): Homolog of NCBI NO: 15239797 NR Description: putative protein; protein id: At5g49130.1 thaliana] >gi|10176946|dbj|BAB10095.1| similarity to unknown protein [Arabidopsis thaliana]
  misc_feature (24)..(496): Homolog of NCBI NO: 38567909 NR Description: OSJNBa0088I22.5 [Oryza sativa (japonica
  misc_feature (24)..(470): Homolog of NCBI NO: 37536202 NR Description: putative membrane protein [Oryza sativa (japonica group)] >gi|27311284|gb|AAO00710.1| putative membrane protein
  misc_feature (4)..(483): Homolog of NCBI NO: 20532318 NR Description: Putative membrane protein [Oryza sativa (japonica group)] >gi|27356666|gb|AAO06955.1| Putative membrane protein
  misc_feature (15)..(474): Homolog of NCBI NO: 15233459 NR Description: putative protein; protein id: At4g29140.1
  misc_feature (11)..(472): Homolog of NCBI NO: 15242265 NR Description: integral membrane protein-like; protein id:
  misc_feature (11)..(472): Homolog of NCBI NO: 39104576 NR Description: putative integral membrane protein [Arabidopsis
  misc_feature (7)..(472): Homolog of NCBI NO: 18406257 NR Description: expressed protein; protein id: At1g58340.1, by cDNA: gi_6520160 [Arabidopsis thaliana]

SEQ ID NO: 92539 - protein, 468 aa, Arabidopsis thaliana; identical to SEQ ID NO: 88783
  peptide (1)..(468): Ceres Seq. ID no. 12712337
  misc_feature (1)..(468): Homolog of NCBI NO: 15217599 NR Description: hypothetical protein; protein id: At1g71870.1
  misc_feature (1)..(458): Homolog of NCBI NO: 28376699 NR Description: putative MATE efflux membrane protein [Oryza
  misc_feature (1)..(437): Homolog of NCBI NO: 15239797 NR Description: putative protein; protein id: At5g49130.1 thaliana] >gi|10176946|dbj|BAB10095.1| similarity to unknown protein [Arabidopsis thaliana]
  misc_feature (1)..(466): Homolog of NCBI NO: 38567909 NR Description: OSJNBa0088I22.5 [Oryza sativa (japonica
  misc_feature (1)..(440): Homolog of NCBI NO: 37536202 NR Description: putative membrane protein [Oryza sativa (japonica group)] >gi|27311284|gb|AAO00710.1| putative membrane protein
  misc_feature (1)..(453): Homolog of NCBI NO: 20532318 NR Description: Putative membrane protein [Oryza sativa (japonica group)] >gi|27356666|gb|AAO06955.1| Putative membrane protein
  misc_feature (1)..(444): Homolog of NCBI NO: 15233459 NR Description: putative protein; protein id: At4g29140.1
  misc_feature (1)..(442): Homolog of NCBI NO: 15242265 NR Description: integral membrane protein-like; protein id:
  misc_feature (1)..(442): Homolog of NCBI NO: 39104576 NR Description: putative integral membrane protein [Arabidopsis
  misc_feature (1)..(442): Homolog of NCBI NO: 18406257 NR Description: expressed protein; protein id: At1g58340.1, by cDNA: gi_6520160 [Arabidopsis thaliana]

SEQ ID NO: 92540 - protein, 461 aa, Arabidopsis thaliana; identical to SEQ ID NO: 88784
  peptide (1)..(461): Ceres Seq. ID no. 12712338
  misc_feature (1)..(461): Homolog of NCBI NO: 15217599 NR Description: hypothetical protein; protein id: At1g71870.1
  misc_feature (1)..(451): Homolog of NCBI NO: 28376699 NR Description: putative MATE efflux membrane protein [Oryza
  misc_feature (1)..(430): Homolog of NCBI NO: 15239797 NR Description: putative protein; protein id: At5g49130.1 thaliana] >gi|10176946|dbj|BAB10095.1| similarity to unknown protein [Arabidopsis thaliana]
  misc_feature (1)..(459): Homolog of NCBI NO: 38567909 NR Description: OSJNBa0088I22.5 [Oryza sativa (japonica
  misc_feature (1)..(433): Homolog of NCBI NO: 37536202 NR Description: putative membrane protein [Oryza sativa (japonica group)] >gi|27311284|gb|AAO00710.1| putative membrane protein
  misc_feature (1)..(446): Homolog of NCBI NO: 20532318 NR Description: Putative membrane protein [Oryza sativa (japonica group)] >gi|27356666|gb|AAO06955.1| Putative membrane protein
  misc_feature (1)..(437): Homolog of NCBI NO: 15233459 NR Description: putative protein; protein id: At4g29140.1
  misc_feature (1)..(435): Homolog of NCBI NO: 15242265 NR Description: integral membrane protein-like; protein id:
  misc_feature (1)..(435): Homolog of NCBI NO: 39104576 NR Description: putative integral membrane protein [Arabidopsis
  misc_feature (1)..(435): Homolog of NCBI NO: 18406257 NR Description: expressed protein; protein id: At1g58340.1, by cDNA: gi_6520160 [Arabidopsis thaliana]

SEQ ID NO: 92541 - DNA, 1477 bp, Arabidopsis thaliana; identical to SEQ ID NO: 88785
  misc_feature (1)..(1477): Ceres Seq. ID no. 12712446
  misc_feature: MA Experiment ID: 108462 Result: Up-regulated in Transcription
  misc_feature: MA Experiment 108462 PARAMETER Experiment Name: At_Germinating_Seeds_cDNA_P Parameter: Age (day) Value: 2 vs. 0
  misc_feature: MA Experiment 108462 PARAMETER Experiment Name: At_Germinating_Seeds_cDNA_P Parameter: Tissue Value: Germinating Seeds
  misc_feature: MA Experiment ID: 108594 Result: Down-regulated in Transcription
  misc_feature: MA Experiment 108594 PARAMETER Experiment Name: At_Ler-rhl_Root_cDNA_P Parameter: Plant Line Value: null
  misc_feature: MA Experiment ID: 20001906 Result: Down-regulated in Transcription
  misc_feature: MA Experiment 20001906 PARAMETER Experiment Name: At_Drought_Reproduction_P Parameter: Age (day) Value: 35
  misc_feature: MA Experiment 20001906 PARAMETER Experiment Name: At_Drought_Reproduction_P Parameter: Organism Value: A. thaliana
  misc_feature: MA Experiment 20001906 PARAMETER Experiment Name: At_Drought_Reproduction_P Parameter: Plant Line Value: WS
  misc_feature: MA Experiment 20001906 PARAMETER Experiment Name: At_Drought_Reproduction_P Parameter: Timepoint (day) Value: 5
  misc_feature: MA Experiment 20001906 PARAMETER Experiment Name: At_Drought_Reproduction_P Parameter: Tissue Value: Siliques
  misc_feature: MA Experiment 20001906 PARAMETER Experiment Name: At_Drought_Reproduction_P Parameter: Treatment Value: Drought vs. No Drought

SEQ ID NO: 92542 - protein, 434 aa, Arabidopsis thaliana; identical to SEQ ID NO: 42955
  peptide (1)..(434): Ceres Seq. ID no. 12712447
  misc_feature (262)..(434): Pfam Name: Arabidopsis proteins of unknown function Pfam Description: Arabidopsis proteins of unknown function
  misc_feature (1)..(434): Homolog of NCBI NO: 18412850 NR Description: putative protein; protein id: At5g01360.1, by cDNA: 153592. [Arabidopsis thaliana]
  misc_feature (205)..(434): Homolog of NCBI NO: 11291874 NR Description: hypothetical protein T10O8.70 - Arabidopsis >gi|7320714|emb|CAB81919.1| putative protein [Arabidopsis
  misc_feature (1)..(197): Homolog of NCBI NO: 11291874 NR Description: hypothetical protein T10O8.70 - Arabidopsis >gi|7320714|emb|CAB81919.1| putative protein [Arabidopsis
  misc_feature (60)..(434): Homolog of NCBI NO: 15228789 NR Description: putative protein; protein id: At3g55990.1
  misc_feature (60)..(434): Homolog of NCBI NO: 26452343 NR Description: unknown protein [Arabidopsis thaliana]
  misc_feature (72)..(434): Homolog of NCBI NO: 15219382 NR Description: hypothetical protein; protein id: At1g73140.1
  misc_feature (64)..(434): Homolog of NCBI NO: 28393743 NR Description: unknown protein [Arabidopsis thaliana]
  misc_feature (92)..(434): Homolog of NCBI NO: 28876013 NR Description: unknown protein [Oryza sativa (japonica
  misc_feature (64)..(434): Homolog of NCBI NO: 15226647 NR Description: hypothetical protein; protein id: At2g40320.1
  misc_feature (86)..(434): Homolog of NCBI NO: 18405283 NR Description: expressed protein; protein id: At2g40150.1, by cDNA: gi_13877598 [Arabidopsis thaliana] Unknown protein [Arabidopsis thaliana]

SEQ ID NO: 92543 - protein, 407 aa, Arabidopsis thaliana; identical to SEQ ID NO: 42956
  peptide (1)..(407): Ceres Seq. ID no. 12712448
  misc_feature (235)..(407): Pfam Name: Arabidopsis proteins of unknown function Pfam Description: Arabidopsis proteins of unknown function
  misc_feature (1)..(407): Homolog of NCBI NO: 18412850 NR Description: putative protein; protein id: At5g01360.1, by cDNA: 153592. [Arabidopsis thaliana]
  misc_feature (178)..(407): Homolog of NCBI NO: 11291874 NR Description: hypothetical protein T10O8.70 - Arabidopsis >gi|7320714|emb|CAB81919.1| putative protein [Arabidopsis
  misc_feature (1)..(170): Homolog of NCBI NO: 11291874 NR Description: hypothetical protein T10O8.70 - Arabidopsis >gi|7320714|emb|CAB81919.1| putative protein [Arabidopsis
  misc_feature (33)..(407): Homolog of NCBI NO: 15228789 NR Description: putative protein; protein id: At3g55990.1
  misc_feature (33)..(407): Homolog of NCBI NO: 26452343 NR Description: unknown protein [Arabidopsis thaliana]
  misc_feature (45)..(407): Homolog of NCBI NO: 15219382 NR Description: hypothetical protein; protein id: At1g73140.1
  misc_feature (37)..(407): Homolog of NCBI NO: 28393743 NR Description: unknown protein [Arabidopsis thaliana]
  misc_feature (65)..(407): Homolog of NCBI NO: 28876013 NR Description: unknown protein [Oryza sativa (japonica
  misc_feature (37)..(407): Homolog of NCBI NO: 15226647 NR Description: hypothetical protein; protein id: At2g40320.1
  misc_feature (59)..(407): Homolog of NCBI NO: 18405283 NR Description: expressed protein; protein id: At2g40150.1, by cDNA: gi_13877598 [Arabidopsis thaliana] Unknown protein [Arabidopsis thaliana]

SEQ ID NO: 92544 - protein, 311 aa, Arabidopsis thaliana; identical to SEQ ID NO: 42957
  peptide (1)..(311): Ceres Seq. ID no. 12712449
  misc_feature (139)..(311): Pfam Name: Arabidopsis proteins of unknown function Pfam Description: Arabidopsis proteins of unknown function
  misc_feature (1)..(311): Homolog of NCBI NO: 18412850 NR Description: putative protein; protein id: At5g01360.1, by cDNA: 153592. [Arabidopsis thaliana]
  misc_feature (82)..(311): Homolog of NCBI NO: 11291874 NR Description: hypothetical protein T10O8.70 - Arabidopsis >gi|7320714|emb|CAB81919.1| putative protein [Arabidopsis
  misc_feature (1)..(74): Homolog of NCBI NO: 11291874 NR Description: hypothetical protein T10O8.70 - Arabidopsis >gi|7320714|emb|CAB81919.1| putative protein [Arabidopsis
  misc_feature (1)..(311): Homolog of NCBI NO: 15228789 NR Description: putative protein; protein id: At3g55990.1
  misc_feature (1)..(311): Homolog of NCBI NO: 26452343 NR Description: unknown protein [Arabidopsis thaliana]
  misc_feature (1)..(311): Homolog of NCBI NO: 15219382 NR Description: hypothetical protein; protein id: At1g73140.1
  misc_feature (1)..(311): Homolog of NCBI NO: 28393743 NR Description: unknown protein [Arabidopsis thaliana]
  misc_feature (1)..(311): Homolog of NCBI NO: 28876013 NR Description: unknown protein [Oryza sativa (japonica
  misc_feature (1)..(311): Homolog of NCBI NO: 15226647 NR Description: hypothetical protein; protein id: At2g40320.1
  misc_feature (1)..(311): Homolog of NCBI NO: 18405283 NR Description: expressed protein; protein id: At2g40150.1, by cDNA: gi_13877598 [Arabidopsis thaliana] Unknown protein [Arabidopsis thaliana]

SEQ ID NO: 92545 - DNA, 1065 bp, Arabidopsis thaliana; identical to SEQ ID NO: 88789
  misc_feature (1)..(1065): Ceres Seq. ID no. 12712466
  misc_feature: MA Experiment ID: 20000171 Result: Up-regulated in Transcription
  misc_feature: MA Experiment 20000171 PARAMETER Experiment Name: At_42deg_Heat_P Parameter: Age (day) Value: 14
  misc_feature: MA Experiment 20000171 PARAMETER Experiment Name: At_42deg_Heat_P Parameter: Organism Value: A. thaliana
  misc_feature: MA Experiment 20000171 PARAMETER Experiment Name: At_42deg_Heat_P Parameter: Plant Line Value: WS
  misc_feature: MA Experiment 20000171 PARAMETER Experiment Name: At_42deg_Heat_P Parameter: Temperature (deg C) Value: 42 vs. 22
  misc_feature: MA Experiment 20000171 PARAMETER Experiment Name: At_42deg_Heat_P Parameter: Timepoint (hr) Value: 1
  misc_feature: MA Experiment 20000171 PARAMETER Experiment Name: At_42deg_Heat_P Parameter: Tissue Value: Aerial
  misc_feature: MA Experiment ID: 20000173 Result: Up-regulated in Transcription
  misc_feature: MA Experiment 20000173 PARAMETER Experiment Name: At_42deg_Heat_P Parameter: Age (day) Value: 14
  misc_feature: MA Experiment 20000173 PARAMETER Experiment Name: At_42deg_Heat_P Parameter: Organism Value: A. thaliana
  misc_feature: MA Experiment 20000173 PARAMETER Experiment Name: At_42deg_Heat_P Parameter: Plant Line Value: WS
  misc_feature: MA Experiment 20000173 PARAMETER Experiment Name: At_42deg_Heat_P Parameter: Temperature (deg C) Value: 42 vs. 22
  misc_feature: MA Experiment 20000173 PARAMETER Experiment Name: At_42deg_Heat_P Parameter: Timepoint (hr) Value: 6
  misc_feature: MA Experiment 20000173 PARAMETER Experiment Name: At_42deg_Heat_P Parameter: Tissue Value: Aerial

SEQ ID NO: 92546 - protein, 354 aa, Arabidopsis thaliana; identical to SEQ ID NO: 88790
  peptide (1)..(354): Ceres Seq. ID no. 12712467
  misc_feature (210)..(298): Pfam Name: Glutaredoxin Pfam Description: Glutaredoxin
  misc_feature (1)..(188): Homolog of NCBI NO: 15240974 NR Description: putative protein; protein id: At5g01420.1
  misc_feature (179)..(354): Homolog of NCBI NO: 15240974 NR Description: putative protein; protein id: At5g01420.1
  misc_feature (1)..(188): Homolog of NCBI NO: 26451045 NR Description: unknown protein [Arabidopsis thaliana]
  misc_feature (179)..(354): Homolog of NCBI NO: 26451045 NR Description: unknown protein [Arabidopsis thaliana]
  misc_feature (140)..(354): Homolog of NCBI NO: 15237554 NR Description: putative protein; protein id: At5g03870.1
  misc_feature (196)..(354): Homolog of NCBI NO: 15240060 NR Description: putative protein; protein id: At5g06470.1 thaliana] >gi|9758427|dbj|BAB08969.1|
  misc_feature (194)..(353): Homolog of NCBI NO: 34899868 NR Description: OJ1714_H10.16 [Oryza sativa (japonica
  misc_feature (195)..(354): Homolog of NCBI NO: 38346321 NR Description: OJ000126_13.3 [Oryza sativa (japonica
  misc_feature (164)..(354): Homolog of NCBI NO: 15235179 NR Description: putative protein; protein id: At4g10630.1
  misc_feature (184)..(354): Homolog of NCBI NO: 15223291 NR Description: unknown protein; protein id: At1g32760.1 thaliana] >gi|6714276|gb|AAF25972.1|AC017118_9 F6N18.14

SEQ ID NO: 92547 - protein, 349 aa, Arabidopsis thaliana; identical to SEQ ID NO: 88791
  peptide (1)..(349): Ceres Seq. ID no. 12712468
  misc_feature (205)..(293): Pfam Name: Glutaredoxin Pfam Description: Glutaredoxin
  misc_feature (1)..(183): Homolog of NCBI NO: 15240974 NR Description: putative protein; protein id: At5g01420.1
  misc_feature (174)..(349): Homolog of NCBI NO: 15240974 NR Description: putative protein; protein id: At5g01420.1
  misc_feature (1)..(183): Homolog of NCBI NO: 26451045 NR Description: unknown protein [Arabidopsis thaliana]
  misc_feature (174)..(349): Homolog of NCBI NO: 26451045 NR Description: unknown protein [Arabidopsis thaliana]
  misc_feature (135)..(349): Homolog of NCBI NO: 15237554 NR Description: putative protein; protein id: At5g03870.1
  misc_feature (191)..(349): Homolog of NCBI NO: 15240060 NR Description: putative protein; protein id: At5g06470.1 thaliana] >gi|9758427|dbj|BAB08969.1|
  misc_feature (189)..(348): Homolog of NCBI NO: 34899868 NR Description: OJ1714_H10.16 [Oryza sativa (japonica
  misc_feature (190)..(349): Homolog of NCBI NO: 38346321 NR Description: OJ000126_13.3 [Oryza sativa (japonica
  misc_feature (159)..(349): Homolog of NCBI NO: 15235179 NR Description: putative protein; protein id: At4g10630.1
  misc_feature (179)..(349): Homolog of NCBI NO: 15223291 NR Description: unknown protein; protein id: At1g32760.1 thaliana] >gi|6714276|gb|AAF25972.1|AC017118_9 F6N18.14

SEQ ID NO: 92548 - DNA, 1125 bp, Arabidopsis thaliana; identical to SEQ ID NO: 88792
  misc_feature (1)..(1125): Ceres Seq. ID no. 12712511
  misc_feature: MA Experiment ID: 20000436 Result: Up-regulated in Transcription
  misc_feature: MA Experiment 20000436 PARAMETER Experiment Name: At_Drought_P Parameter: Age (day) Value: 7
  misc_feature: MA Experiment 20000436 PARAMETER Experiment Name: At_Drought_P Parameter: Organism Value: A. thaliana
  misc_feature: MA Experiment 20000436 PARAMETER Experiment Name: At_Drought_P Parameter: Plant Line Value: WS
  misc_feature: MA Experiment 20000436 PARAMETER Experiment Name: At_Drought_P Parameter: Timepoint (hr) Value: 12
  misc_feature: MA Experiment 20000436 PARAMETER Experiment Name: At_Drought_P Parameter: Tissue Value: Whole Plant
  misc_feature: MA Experiment 20000436 PARAMETER Experiment Name: At_Drought_P Parameter: Treatment Value: Drought vs. No Drought
  misc_feature: MA Experiment ID: 20000437 Result: Up-regulated in Transcription
  misc_feature: MA Experiment 20000437 PARAMETER Experiment Name: At_Drought_P Parameter: Age (day) Value: 8
  misc_feature: MA Experiment 20000437 PARAMETER Experiment Name: At_Drought_P Parameter: Organism Value: A. thaliana
  misc_feature: MA Experiment 20000437 PARAMETER Experiment Name: At_Drought_P Parameter: Plant Line Value: WS
  misc_feature: MA Experiment 20000437 PARAMETER Experiment Name: At_Drought_P Parameter: Timepoint (hr) Value: 24
  misc_feature: MA Experiment 20000437 PARAMETER Experiment Name: At_Drought_P Parameter: Tissue Value: Whole Plant
  misc_feature: MA Experiment 20000437 PARAMETER Experiment Name: At_Drought_P Parameter: Treatment Value: Drought vs. No Drought
  misc_feature: MA Experiment ID: 20001451 Result: Up-regulated in Transcription
  misc_feature: MA Experiment 20001451 PARAMETER Experiment Name: At_Far-red-induction_P Parameter: Age (day) Value: 7
  misc_feature: MA Experiment 20001451 PARAMETER Experiment Name: At_Far-red-induction_P Parameter: Light Value: Far-red vs. White
  misc_feature: MA Experiment 20001451 PARAMETER Experiment Name: At_Far-red-induction_P Parameter: Organism Value: A. thaliana
  misc_feature: MA Experiment 20001451 PARAMETER Experiment Name: At_Far-red-induction_P Parameter: Plant Line Value: Columbia
  misc_feature: MA Experiment 20001451 PARAMETER Experiment Name: At_Far-red-induction_P Parameter: Timepoint (hr) Value: 24
  misc_feature: MA Experiment 20001451 PARAMETER Experiment Name: At_Far-red-induction_P Parameter: Tissue Value: Whole Plant
  misc_feature: MA Experiment ID: 20001905 Result: Up-regulated in Transcription
  misc_feature: MA Experiment 20001905 PARAMETER Experiment Name: At_Drought_Reproduction_P Parameter: Age (day) Value: 40
  misc_feature: MA Experiment 20001905 PARAMETER Experiment Name: At_Drought_Reproduction_P Parameter: Organism Value: A. thaliana
  misc_feature: MA Experiment 20001905 PARAMETER Experiment Name: At_Drought_Reproduction_P Parameter: Plant Line Value: WS
  misc_feature: MA Experiment 20001905 PARAMETER Experiment Name: At_Drought_Reproduction_P Parameter: Timepoint (day) Value: 10
  misc_feature: MA Experiment 20001905 PARAMETER Experiment Name: At_Drought_Reproduction_P Parameter: Tissue Value: Rosettes
  misc_feature: MA Experiment 20001905 PARAMETER Experiment Name: At_Drought_Reproduction_P Parameter: Treatment Value: Drought vs. No Drought
  misc_feature: MA Experiment ID: 20001906 Result: Up-regulated in Transcription
  misc_feature: MA Experiment 20001906 PARAMETER Experiment Name: At_Drought_Reproduction_P Parameter: Age (day) Value: 35
  misc_feature: MA Experiment 20001906 PARAMETER Experiment Name: At_Drought_Reproduction_P Parameter: Organism Value: A. thaliana
  misc_feature: MA Experiment 20001906 PARAMETER Experiment Name: At_Drought_Reproduction_P Parameter: Plant Line Value: WS
  misc_feature: MA Experiment 20001906 PARAMETER Experiment Name: At_Drought_Reproduction_P Parameter: Timepoint (day) Value: 5
  misc_feature: MA Experiment 20001906 PARAMETER Experiment Name: At_Drought_Reproduction_P Parameter: Tissue Value: Siliques
  misc_feature: MA Experiment 20001906 PARAMETER Experiment Name: At_Drought_Reproduction_P Parameter: Treatment Value: Drought vs. No Drought
  misc_feature: MA Experiment ID: 20001911 Result: Up-regulated in Transcription
  misc_feature: MA Experiment 20001911 PARAMETER Experiment Name: At_Drought_Reproduction_P Parameter: Age (day) Value: 40
  misc_feature: MA Experiment 20001911 PARAMETER Experiment Name: At_Drought_Reproduction_P Parameter: Organism Value: A. thaliana
  misc_feature: MA Experiment 20001911 PARAMETER Experiment Name: At_Drought_Reproduction_P Parameter: Plant Line Value: WS
  misc_feature: MA Experiment 20001911 PARAMETER Experiment Name: At_Drought_Reproduction_P Parameter: Timepoint (day) Value: 10
  misc_feature: MA Experiment 20001911 PARAMETER Experiment Name: At_Drought_Reproduction_P Parameter: Tissue Value: Flowers
  misc_feature: MA Experiment 20001911 PARAMETER Experiment Name: At_Drought_Reproduction_P Parameter: Treatment Value: Drought vs. No Drought

SEQ ID NO: 92549 - protein, 374 aa, Arabidopsis thaliana; identical to SEQ ID NO: 88793
  peptide (1)..(374): Ceres Seq. ID no. 12712512
  misc_feature (53)..(374): Homolog of NCBI NO: 30679355 NR Description: aldose reductase, putative [Arabidopsis thaliana]
  misc_feature (143)..(374): Homolog of NCBI NO: 30679359 NR Description: aldose reductase, putative [Arabidopsis thaliana]
  misc_feature (53)..(144): Homolog of NCBI NO: 30679359 NR Description: aldose reductase, putative [Arabidopsis thaliana]
  misc_feature (53)..(374): Homolog of NCBI NO: 11250961 NR Description: aldose reductase-like protein - Arabidopsis
  misc_feature (53)..(374): Homolog of NCBI NO: 113595 NR Description: Aldose reductase (AR) (Aldehyde reductase)
  misc_feature (53)..(374): Homolog of NCBI NO: 728592 NR Description: aldose reductase [Hordeum vulgare]
  misc_feature (53)..(374): Homolog of NCBI NO: 543632 NR Description: aldehyde reductase (EC 1.1.1.21), NADPH-dependent
  misc_feature (53)..(374): Homolog of NCBI NO: 2130022 NR Description: aldose reductase homolog - wild oat
  misc_feature (53)..(373): Homolog of NCBI NO: 4539944 NR Description: aldose reductase ALDRXV4 [Xerophyta viscosa]
  misc_feature (68)..(373): Homolog of NCBI NO: 30687247 NR Description: aldo/keto reductase family [Arabidopsis thaliana]

SEQ ID NO: 92550 - protein, 366 aa, Arabidopsis thaliana; identical to SEQ ID NO: 88794
  peptide (1)..(366): Ceres Seq. ID no. 12712513
  misc_feature (45)..(366): Homolog of NCBI NO: 30679355 NR Description: aldose reductase, putative [Arabidopsis thaliana]
  misc_feature (135)..(366): Homolog of NCBI NO: 30679359 NR Description: aldose reductase, putative [Arabidopsis thaliana]
  misc_feature (45)..(136): Homolog of NCBI NO: 30679359 NR Description: aldose reductase, putative [Arabidopsis thaliana]
  misc_feature (45)..(366): Homolog of NCBI NO: 11250961 NR Description: aldose reductase-like protein - Arabidopsis
  misc_feature (45)..(366): Homolog of NCBI NO: 113595 NR Description: Aldose reductase (AR) (Aldehyde reductase)
  misc_feature (45)..(366): Homolog of NCBI NO: 728592 NR Description: aldose reductase [Hordeum vulgare]
  misc_feature (45)..(366): Homolog of NCBI NO: 543632 NR Description: aldehyde reductase (EC 1.1.1.21), NADPH-dependent
  misc_feature (45)..(366): Homolog of NCBI NO: 2130022 NR Description: aldose reductase homolog - wild oat
  misc_feature (45)..(365): Homolog of NCBI NO: 4539944 NR Description: aldose reductase ALDRXV4 [Xerophyta viscosa]
  misc_feature (60)..(365): Homolog of NCBI NO: 30687247 NR Description: aldo/keto reductase family [Arabidopsis thaliana]

SEQ ID NO: 92551 - protein, 350 aa, Arabidopsis thaliana; identical to SEQ ID NO: 88795
  peptide (1)..(350): Ceres Seq. ID no. 12712514
  misc_feature (29)..(350): Homolog of NCBI NO: 30679355 NR Description: aldose reductase, putative [Arabidopsis thaliana]
  misc_feature (119)..(350): Homolog of NCBI NO: 30679359 NR Description: aldose reductase, putative [Arabidopsis thaliana]
  misc_feature (29)..(120): Homolog of NCBI NO: 30679359 NR Description: aldose reductase, putative [Arabidopsis thaliana]
  misc_feature (29)..(350): Homolog of NCBI NO: 11250961 NR Description: aldose reductase-like protein - Arabidopsis
  misc_feature (29)..(350): Homolog of NCBI NO: 113595 NR Description: Aldose reductase (AR) (Aldehyde reductase)
  misc_feature (29)..(350): Homolog of NCBI NO: 728592 NR Description: aldose reductase [Hordeum vulgare]
  misc_feature (29)..(350): Homolog of NCBI NO: 543632 NR Description: aldehyde reductase (EC 1.1.1.21), NADPH-dependent
  misc_feature (29)..(350): Homolog of NCBI NO: 2130022 NR Description: aldose reductase homolog - wild oat
  misc_feature (29)..(349): Homolog of NCBI NO: 4539944 NR Description: aldose reductase ALDRXV4 [Xerophyta viscosa]
  misc_feature (44)..(349): Homolog of NCBI NO: 30687247 NR Description: aldo/keto reductase family [Arabidopsis thaliana]

SEQ ID NO: 92552 - DNA, 777 bp, Arabidopsis thaliana; identical to SEQ ID NO: 88796
  misc_feature (1)..(777): Ceres Seq. ID no. 12712591
  misc_feature: MA Experiment ID: 20000315 Result: Down-regulated in Transcription
  misc_feature: MA Experiment 20000315 PARAMETER Experiment Name: At_14day_Shoots-Roots_Sub_P Parameter: Age (day) Value: 14
  misc_feature: MA Experiment 20000315 PARAMETER Experiment Name: At_14day_Shoots-Roots_Sub_P Parameter: Organism Value: A. thaliana
  misc_feature: MA Experiment 20000315 PARAMETER Experiment Name: At_14day_Shoots-Roots_Sub_P Parameter: Plant Line Value: WS
  misc_feature: MA Experiment 20000315 PARAMETER Experiment Name: At_14day_Shoots-Roots_Sub_P Parameter: Tissue Value: Shoots vs. Whole Plant
  misc_feature: MA Experiment ID: 20000327 Result: Down-regulated in Transcription
  misc_feature: MA Experiment 20000327 PARAMETER Experiment Name: At_42deg_Heat_Sub_P Parameter: Age (day) Value: 14
  misc_feature: MA Experiment 20000327 PARAMETER Experiment Name: At_42deg_Heat_Sub_P Parameter: Organism Value: A. thaliana
  misc_feature: MA Experiment 20000327 PARAMETER Experiment Name: At_42deg_Heat_Sub_P Parameter: Plant Line Value: WS
  misc_feature: MA Experiment 20000327 PARAMETER Experiment Name: At_42deg_Heat_Sub_P Parameter: Temperature (deg C) Value: 42 vs. 22
  misc_feature: MA Experiment 20000327 PARAMETER Experiment Name: At_42deg_Heat_Sub_P Parameter: Timepoint (hr) Value: 1
  misc_feature: MA Experiment 20000327 PARAMETER Experiment Name: At_42deg_Heat_Sub_P Parameter: Tissue Value: Aerial
  misc_feature: MA Experiment ID: 20000328 Result: Down-regulated in Transcription
  misc_feature: MA Experiment 20000328 PARAMETER Experiment Name: At_42deg_Heat_Sub_P Parameter: Age (day) Value: 14
  misc_feature: MA Experiment 20000328 PARAMETER Experiment Name: At_42deg_Heat_Sub_P Parameter: Organism Value: A. thaliana
  misc_feature: MA Experiment 20000328 PARAMETER Experiment Name: At_42deg_Heat_Sub_P Parameter: Plant Line Value: WS
  misc_feature: MA Experiment 20000328 PARAMETER Experiment Name: At_42deg_Heat_Sub_P Parameter: Temperature (deg C) Value: 42 vs. 22
  misc_feature: MA Experiment 20000328 PARAMETER Experiment Name: At_42deg_Heat_Sub_P Parameter: Timepoint (hr) Value: 6
  misc_feature: MA Experiment 20000328 PARAMETER Experiment Name: At_42deg_Heat_Sub_P Parameter: Tissue Value: Aerial
  misc_feature: MA Experiment ID: 20000355 Result: Up-regulated in Transcription
  misc_feature: MA Experiment 20000355 PARAMETER Experiment Name: At_Siliques_Sub_P Parameter: Age (day) Value: 21
  misc_feature: MA Experiment 20000355 PARAMETER Experiment Name: At_Siliques_Sub_P Parameter: Organism Value: A. thaliana
  misc_feature: MA Experiment 20000355 PARAMETER Experiment Name: At_Siliques_Sub_P Parameter: Plant Line Value: WS
  misc_feature: MA Experiment 20000355 PARAMETER Experiment Name: At_Siliques_Sub_P Parameter: Tissue Value: Less Than 5mm Siliques vs. Whole Plant
  misc_feature: MA Experiment ID: 20000440 Result: Up-regulated in Transcription
  misc_feature: MA Experiment 20000440 PARAMETER Experiment Name: At_Closed-Flower__Sub_P Parameter: Tissue Value: Closed Flower vs. Whole Plant

SEQ ID NO: 92553 - protein, 258 aa, Arabidopsis thaliana; identical to SEQ ID NO: 88797
  peptide (1)..(258): Ceres Seq. ID no. 12712592
  misc_feature (71)..(229): Pfam Name: DNA / pantothenate metabolism flavoprotein Pfam Description: DNA / pantothenate metabolism flavoprotein
  misc_feature (71)..(256): Homolog of NCBI NO: 8778623 NR Description: F5O11.7 [Arabidopsis thaliana]
  misc_feature (2)..(68): Homolog of NCBI NO: 8778623 NR Description: F5O11.7 [Arabidopsis thaliana]
  misc_feature (1)..(258): Homolog of NCBI NO: 15241677 NR Description: putative protein; protein id: At5g02080.1
  misc_feature (15)..(256): Homolog of NCBI NO: 30682728 NR Description: expressed protein [Arabidopsis thaliana]
  misc_feature (52)..(255): Homolog of NCBI NO: 40253297 NR Description: putative Chain A, Crystal Structure Of
  misc_feature (2)..(67): Homolog of NCBI NO: 40253297 NR Description: putative Chain A, Crystal Structure Of
  misc_feature (62)..(253): Homolog of NCBI NO: 34810081 NR Description: Chain A, Crystal Structure Of Synthetase >gi|34810082|pdb|1P9O|B Chain B, Crystal Structure Of
  misc_feature (29)..(68): Homolog of NCBI NO: 34810081 NR Description: Chain A, Crystal Structure Of Synthetase >gi|34810082|pdb|1P9O|B Chain B, Crystal Structure Of
  misc_feature (62)..(253): Homolog of NCBI NO: 18255582 NR Description: RIKEN cDNA 6330579B17 gene [Mus musculus]
  misc_feature (29)..(67): Homolog of NCBI NO: 18255582 NR Description: RIKEN cDNA 6330579B17 gene [Mus musculus]

SEQ ID NO: 92554 - protein, 181 aa, Arabidopsis thaliana; identical to SEQ ID NO: 88798
  peptide (1)..(181): Ceres Seq. ID no. 12712593
  misc_feature (1)..(152): Pfam Name: DNA / pantothenate metabolism flavoprotein Pfam Description: DNA / pantothenate metabolism flavoprotein
  misc_feature (1)..(179): Homolog of NCBI NO: 8778623 NR Description: F5O11.7 [Arabidopsis thaliana]
  misc_feature (1)..(181): Homolog of NCBI NO: 15241677 NR Description: putative protein; protein id: At5g02080.1
  misc_feature (1)..(179): Homolog of NCBI NO: 30682728 NR Description: expressed protein [Arabidopsis thaliana]
  misc_feature (1)..(178): Homolog of NCBI NO: 40253297 NR Description: putative Chain A, Crystal Structure Of
  misc_feature (1)..(176): Homolog of NCBI NO: 34810081 NR Description: Chain A, Crystal Structure Of Synthetase >gi|34810082|pdb|1P9O|B Chain B, Crystal Structure Of
  misc_feature (1)..(176): Homolog of NCBI NO: 18255582 NR Description: RIKEN cDNA 6330579B17 gene [Mus musculus]
  misc_feature (1)..(176): Homolog of NCBI NO: 34870890 NR Description: similar to RIKEN cDNA 6330579B17 gene [Rattus
  misc_feature (1)..(142): Homolog of NCBI NO: 13375919 NR Description: hypothetical protein FLJ11838 [Homo sapiens]
  misc_feature (1)..(142): Homolog of NCBI NO: 13385982 NR Description: RIKEN cDNA 6330579B17 [Mus musculus]
  misc_feature (9)..(181): Homolog of NCBI NO: 40556035 NR Description: CNPV097 conserved hypothetical protein [Canarypox >gi|40233860|gb|AAR83443.1| CNPV097 conserved hypothetical

SEQ ID NO: 92555 - protein, 178 aa, Arabidopsis thaliana; identical to SEQ ID NO: 88799
  peptide (1)..(178): Ceres Seq. ID no. 12712594
  misc_feature (1)..(149): Pfam Name: DNA / pantothenate metabolism flavoprotein Pfam Description: DNA / pantothenate metabolism flavoprotein
  misc_feature (1)..(176): Homolog of NCBI NO: 8778623 NR Description: F5O11.7 [Arabidopsis thaliana]
  misc_feature (1)..(178): Homolog of NCBI NO: 15241677 NR Description: putative protein; protein id: At5g02080.1
  misc_feature (1)..(176): Homolog of NCBI NO: 30682728 NR Description: expressed protein [Arabidopsis thaliana]
  misc_feature (1)..(175): Homolog of NCBI NO: 40253297 NR Description: putative Chain A, Crystal Structure Of
  misc_feature (1)..(173): Homolog of NCBI NO: 34810081 NR Description: Chain A, Crystal Structure Of Synthetase >gi|34810082|pdb|1P9O|B Chain B, Crystal Structure Of
  misc_feature (1)..(173): Homolog of NCBI NO: 18255582 NR Description: RIKEN cDNA 6330579B17 gene [Mus musculus]
  misc_feature (1)..(173): Homolog of NCBI NO: 34870890 NR Description: similar to RIKEN cDNA 6330579B17 gene [Rattus
  misc_feature (1)..(139): Homolog of NCBI NO: 13375919 NR Description: hypothetical protein FLJ11838 [Homo sapiens]
  misc_feature (1)..(139): Homolog of NCBI NO: 13385982 NR Description: RIKEN cDNA 6330579B17 [Mus musculus]
  misc_feature (6)..(178): Homolog of NCBI NO: 40556035 NR Description: CNPV097 conserved hypothetical protein [Canarypox >gi|40233860|gb|AAR83443.1| CNPV097 conserved hypothetical

SEQ ID NO: 92556 - DNA, 897 bp, Arabidopsis thaliana; identical to SEQ ID NO: 88800
  misc_feature (1)..(897): Ceres Seq. ID no. 12712605
  misc_feature: MA Experiment ID: 20000180 Result: Down-regulated in Transcription
  misc_feature: MA Experiment 20000180 PARAMETER Experiment Name: At_Germinating_Seeds_P Parameter: Age (hr) Value: 24 vs. 0
  misc_feature: MA Experiment 20000180 PARAMETER Experiment Name: At_Germinating_Seeds_P Parameter: Tissue Value: Germinating Seeds
  misc_feature: MA Experiment ID: 20000184 Result: Down-regulated in Transcription
  misc_feature: MA Experiment 20000184 PARAMETER Experiment Name: At_Shoots__P Parameter: Age (day) Value: 7
  misc_feature: MA Experiment 20000184 PARAMETER Experiment Name: At_Shoots__P Parameter: Tissue Value: Shoots vs. Whole Plant
  misc_feature: MA Experiment ID: 20000185 Result: Down-regulated in Transcription
  misc_feature: MA Experiment 20000185 PARAMETER Experiment Name: At_Roots__P Parameter: Age (day) Value: 7 vs. 21
  misc_feature: MA Experiment 20000185 PARAMETER Experiment Name: At_Roots__P Parameter: Organism Value: A. thaliana
  misc_feature: MA Experiment 20000185 PARAMETER Experiment Name: At_Roots__P Parameter: Tissue Value: Roots vs. Whole Plant
  misc_feature: MA Experiment ID: 20001248 Result: Up-regulated in Transcription
  misc_feature: MA Experiment 20001248 PARAMETER Experiment Name: At_Far-red-induction_P Parameter: Age (day) Value: 7
  misc_feature: MA Experiment 20001248 PARAMETER Experiment Name: At_Far-red-induction_P Parameter: Light Value: Far-red vs. White
  misc_feature: MA Experiment 20001248 PARAMETER Experiment Name: At_Far-red-induction_P Parameter: Organism Value: A. thaliana
  misc_feature: MA Experiment 20001248 PARAMETER Experiment Name: At_Far-red-induction_P Parameter: Plant Line Value: Columbia
  misc_feature: MA Experiment 20001248 PARAMETER Experiment Name: At_Far-red-induction_P Parameter: Timepoint (hr) Value: 4
  misc_feature: MA Experiment 20001248 PARAMETER Experiment Name: At_Far-red-induction_P Parameter: Tissue Value: Whole Plant
  misc_feature: MA Experiment ID: 20001450 Result: Up-regulated in Transcription
  misc_feature: MA Experiment 20001450 PARAMETER Experiment Name: At_Far-red-induction_P Parameter: Age (day) Value: 7
  misc_feature: MA Experiment 20001450 PARAMETER Experiment Name: At_Far-red-induction_P Parameter: Light Value: Far-red vs. White
  misc_feature: MA Experiment 20001450 PARAMETER Experiment Name: At_Far-red-induction_P Parameter: Organism Value: A. thaliana
  misc_feature: MA Experiment 20001450 PARAMETER Experiment Name: At_Far-red-induction_P Parameter: Plant Line Value: Columbia
  misc_feature: MA Experiment 20001450 PARAMETER Experiment Name: At_Far-red-induction_P Parameter: Timepoint (hr) Value: 8
  misc_feature: MA Experiment 20001450 PARAMETER Experiment Name: At_Far-red-induction_P Parameter: Tissue Value: Whole Plant
  misc_feature: MA Experiment ID: 20001451 Result: Up-regulated in Transcription
  misc_feature: MA Experiment 20001451 PARAMETER Experiment Name: At_Far-red-induction_P Parameter: Age (day) Value: 7
  misc_feature: MA Experiment 20001451 PARAMETER Experiment Name: At_Far-red-induction_P Parameter: Light Value: Far-red vs. White
  misc_feature: MA Experiment 20001451 PARAMETER Experiment Name: At_Far-red-induction_P Parameter: Organism Value: A. thaliana
  misc_feature: MA Experiment 20001451 PARAMETER Experiment Name: At_Far-red-induction_P Parameter: Plant Line Value: Columbia
  misc_feature: MA Experiment 20001451 PARAMETER Experiment Name: At_Far-red-induction_P Parameter: Timepoint (hr) Value: 24
  misc_feature: MA Experiment 20001451 PARAMETER Experiment Name: At_Far-red-induction_P Parameter: Tissue Value: Whole Plant

SEQ ID NO: 92557 - protein, 298 aa, Arabidopsis thaliana; identical to SEQ ID NO: 88801
  peptide (1)..(298): Ceres Seq. ID no. 12712606
  misc_feature (104)..(145): Pfam Name: Armadillo/beta-catenin-like repeat Pfam Description: Armadillo/beta-catenin-like repeat
  misc_feature (4)..(298): Homolog of NCBI NO: 15241689 NR Description: putative protein; protein id: At5g02150.1
  misc_feature (4)..(298): Homolog of NCBI NO: 21553998 NR Description: unknown [Arabidopsis thaliana]
  misc_feature (4)..(298): Homolog of NCBI NO: 6478927 NR Description: hypothetical protein [Arabidopsis thaliana]
  misc_feature (4)..(298): Homolog of NCBI NO: 18398480 NR Description: expressed protein; protein id: At3g09350.1, by cDNA: 19154. [Arabidopsis thaliana] unknown protein [Arabidopsis thaliana]
  misc_feature (2)..(298): Homolog of NCBI NO: 15232329 NR Description: putative protein; protein id: At3g53800.1, by cDNA: 37834. [Arabidopsis thaliana] >gi|11292176|pir||T45920
  misc_feature (2)..(298): Homolog of NCBI NO: 26449490 NR Description: unknown protein [Arabidopsis thaliana]
  misc_feature (4)..(298): Homolog of NCBI NO: 34897412 NR Description: putative Hsp70 binding protein [Oryza sativa
  misc_feature (11)..(254): Homolog of NCBI NO: 29436427 NR Description: Similar to RIKEN cDNA 1500019G21 gene [Danio
  misc_feature (11)..(254): Homolog of NCBI NO: 12667701 NR Description: Hsp70 binding protein [Danio rerio]
  misc_feature (15)..(231): Homolog of NCBI NO: 15231095 NR Description: hypothetical protein; protein id: At3g51980.1, by cDNA: gi_20268763 [Arabidopsis thaliana]

SEQ ID NO: 92558 - protein, 285 aa, Arabidopsis thaliana; identical to SEQ ID NO: 88802
  peptide (1)..(285): Ceres Seq. ID no. 12712607
  misc_feature (91)..(132): Pfam Name: Armadillo/beta-catenin-like repeat Pfam Description: Armadillo/beta-catenin-like repeat
  misc_feature (1)..(285): Homolog of NCBI NO: 15241689 NR Description: putative protein; protein id: At5g02150.1
  misc_feature (1)..(285): Homolog of NCBI NO: 21553998 NR Description: unknown [Arabidopsis thaliana]
  misc_feature (1)..(285): Homolog of NCBI NO: 6478927 NR Description: hypothetical protein [Arabidopsis thaliana]
  misc_feature (1)..(285): Homolog of NCBI NO: 18398480 NR Description: expressed protein; protein id: At3g09350.1, by cDNA: 19154. [Arabidopsis thaliana] unknown protein [Arabidopsis thaliana]
  misc_feature (1)..(285): Homolog of NCBI NO: 15232329 NR Description: putative protein; protein id: At3g53800.1, by cDNA: 37834. [Arabidopsis thaliana] >gi|11292176|pir||T45920
  misc_feature (1)..(285): Homolog of NCBI NO: 26449490 NR Description: unknown protein [Arabidopsis thaliana]
  misc_feature (1)..(285): Homolog of NCBI NO: 34897412 NR Description: putative Hsp70 binding protein [Oryza sativa
  misc_feature (1)..(241): Homolog of NCBI NO: 29436427 NR Description: Similar to RIKEN cDNA 1500019G21 gene [Danio
  misc_feature (1)..(241): Homolog of NCBI NO: 12667701 NR Description: Hsp70 binding protein [Danio rerio]
  misc_feature (2)..(218): Homolog of NCBI NO: 15231095 NR Description: hypothetical protein; protein id: At3g51980.1, by cDNA: gi_20268763 [Arabidopsis thaliana]

SEQ ID NO: 92559 - protein, 234 aa, Arabidopsis thaliana; identical to SEQ ID NO: 88803
  peptide (1)..(234): Ceres Seq. ID no. 12712608
  misc_feature (40)..(81): Pfam Name: Armadillo/beta-catenin-like repeat Pfam Description: Armadillo/beta-catenin-like repeat
  misc_feature (1)..(234): Homolog of NCBI NO: 15241689 NR Description: putative protein; protein id: At5g02150.1
  misc_feature (1)..(234): Homolog of NCBI NO: 21553998 NR Description: unknown [Arabidopsis thaliana]
  misc_feature (1)..(234): Homolog of NCBI NO: 6478927 NR Description: hypothetical protein [Arabidopsis thaliana]
  misc_feature (1)..(234): Homolog of NCBI NO: 18398480 NR Description: expressed protein; protein id: At3g09350.1, by cDNA: 19154. [Arabidopsis thaliana] unknown protein [Arabidopsis thaliana]
  misc_feature (1)..(234): Homolog of NCBI NO: 15232329 NR Description: putative protein; protein id: At3g53800.1, by cDNA: 37834. [Arabidopsis thaliana] >gi|11292176|pir||T45920
  misc_feature (1)..(234): Homolog of NCBI NO: 26449490 NR Description: unknown protein [Arabidopsis thaliana]
  misc_feature (1)..(234): Homolog of NCBI NO: 34897412 NR Description: putative Hsp70 binding protein [Oryza sativa
  misc_feature (1)..(190): Homolog of NCBI NO: 29436427 NR Description: Similar to RIKEN cDNA 1500019G21 gene [Danio
  misc_feature (1)..(190): Homolog of NCBI NO: 12667701 NR Description: Hsp70 binding protein [Danio rerio]
  misc_feature (1)..(167): Homolog of NCBI NO: 15231095 NR Description: hypothetical protein; protein id: At3g51980.1, by cDNA: gi_20268763 [Arabidopsis thaliana]

SEQ ID NO: 92560 - DNA, 1230 bp, Arabidopsis thaliana; identical to SEQ ID NO: 88804
  misc_feature (1)..(1230): Ceres Seq. ID no. 12712635
  misc_feature: MA Experiment ID: 108434 Result: Up-regulated in Transcription
  misc_feature: MA Experiment 108434 PARAMETER Experiment Name: At_Root_Tips_cDNA_P Parameter: Tissue Value: Root Tips
  misc_feature: MA Experiment ID: 108461 Result: Down-regulated in Transcription
  misc_feature: MA Experiment 108461 PARAMETER Experiment Name: At_Germinating_Seeds_cDNA_P Parameter: Age (day) Value: 1 vs. 0
  misc_feature: MA Experiment 108461 PARAMETER Experiment Name: At_Germinating_Seeds_cDNA_P Parameter: Tissue Value: Germinating Seeds
  misc_feature: MA Experiment ID: 108462 Result: Down-regulated in Transcription
  misc_feature: MA Experiment 108462 PARAMETER Experiment Name: At_Germinating_Seeds_cDNA_P Parameter: Age (day) Value: 2 vs. 0
  misc_feature: MA Experiment 108462 PARAMETER Experiment Name: At_Germinating_Seeds_cDNA_P Parameter: Tissue Value: Germinating Seeds
  misc_feature: MA Experiment ID: 108463 Result: Down-regulated in Transcription
  misc_feature: MA Experiment 108463 PARAMETER Experiment Name: At_Germinating_Seeds_cDNA_P Parameter: Age (day) Value: 3 vs. 0
  misc_feature: MA Experiment 108463 PARAMETER Experiment Name: At_Germinating_Seeds_cDNA_P Parameter: Tissue Value: Germinating Seeds
  misc_feature: MA Experiment ID: 108464 Result: Down-regulated in Transcription
  misc_feature: MA Experiment 108464 PARAMETER Experiment Name: At_Germinating_Seeds_cDNA_P Parameter: Age (day) Value: 4 vs. 0
  misc_feature: MA Experiment 108464 PARAMETER Experiment Name: At_Germinating_Seeds_cDNA_P Parameter: Tissue Value: Germinating Seeds
  misc_feature: MA Experiment ID: 108561 Result: Down-regulated in Transcription
  misc_feature: MA Experiment 108561 PARAMETER Experiment Name: At_100uM_ABA_cDNA_P Parameter: Timepoint (hr) Value: 6
  misc_feature: MA Experiment 108561 PARAMETER Experiment Name: At_100uM_ABA_cDNA_P Parameter: Tissue Value: Aerial
  misc_feature: MA Experiment 108561 PARAMETER Experiment Name: At_100uM_ABA_cDNA_P Parameter: Treatment Value: 100uM ABA vs. No Treatment
  misc_feature: MA Experiment ID: 108579 Result: Up-regulated in Transcription
  misc_feature: MA Experiment 108579 PARAMETER Experiment Name: At_4deg_Cold_cDNA_P Parameter: Temperature (deg C) Value: 4 vs. 22
  misc_feature: MA Experiment 108579 PARAMETER Experiment Name: At_4deg_Cold_cDNA_P Parameter: Timepoint (hr) Value: 6
  misc_feature: MA Experiment 108579 PARAMETER Experiment Name: At_4deg_Cold_cDNA_P Parameter: Tissue Value: Aerial
  misc_feature: MA Experiment ID: 108607 Result: Down-regulated in Transcription
  misc_feature: MA Experiment 108607 PARAMETER Experiment Name: At_100uM_ABA_cDNA_P Parameter: Timepoint (hr) Value: 4
  misc_feature: MA Experiment 108607 PARAMETER Experiment Name: At_100uM_ABA_cDNA_P Parameter: Tissue Value: Aerial
  misc_feature: MA Experiment 108607 PARAMETER Experiment Name: At_100uM_ABA_cDNA_P Parameter: Treatment Value: 100uM ABA vs. No Treatment
  misc_feature: MA Experiment ID: 20000093 Result: Down-regulated in Transcription
  misc_feature: MA Experiment 20000093 PARAMETER Experiment Name: At_42deg_Heat_cDNA_P Parameter: Temperature (deg C) Value: 42 vs. 22
  misc_feature: MA Experiment 20000093 PARAMETER Experiment Name: At_42deg_Heat_cDNA_P Parameter: Timepoint (hr) Value: 0.5
  misc_feature: MA Experiment 20000093 PARAMETER Experiment Name: At_42deg_Heat_cDNA_P Parameter: Tissue Value: Aerial
  misc_feature: MA Experiment ID: 20000171 Result: Down-regulated in Transcription
  misc_feature: MA Experiment 20000171 PARAMETER Experiment Name: At_42deg_Heat_P Parameter: Age (day) Value: 14
  misc_feature: MA Experiment 20000171 PARAMETER Experiment Name: At_42deg_Heat_P Parameter: Organism Value: A. thaliana
  misc_feature: MA Experiment 20000171 PARAMETER Experiment Name: At_42deg_Heat_P Parameter: Plant Line Value: WS
  misc_feature: MA Experiment 20000171 PARAMETER Experiment Name: At_42deg_Heat_P Parameter: Temperature (deg C) Value: 42 vs. 22
  misc_feature: MA Experiment 20000171 PARAMETER Experiment Name: At_42deg_Heat_P Parameter: Timepoint (hr) Value: 1
  misc_feature: MA Experiment 20000171 PARAMETER Experiment Name: At_42deg_Heat_P Parameter: Tissue Value: Aerial
  misc_feature: MA Experiment ID: 20000180 Result: Down-regulated in Transcription
  misc_feature: MA Experiment 20000180 PARAMETER Experiment Name: At_Germinating_Seeds_P Parameter: Age (hr) Value: 24 vs. 0
  misc_feature: MA Experiment 20000180 PARAMETER Experiment Name: At_Germinating_Seeds_P Parameter: Tissue Value: Germinating Seeds
  misc_feature: MA Experiment ID: 20000227 Result: Up-regulated in Transcription
  misc_feature: MA Experiment 20000227 PARAMETER Experiment Name: At_Root-Tips-vs-Tops_P Parameter: Tissue Value: Root Tips vs. Root Tops
  misc_feature: MA Experiment ID: 20000234 Result: Down-regulated in Transcription
  misc_feature: MA Experiment 20000234 PARAMETER Experiment Name: At_Siliques_P Parameter: Age (day) Value: 21
  misc_feature: MA Experiment 20000234 PARAMETER Experiment Name: At_Siliques_P Parameter: Organism Value: A. thaliana
  misc_feature: MA Experiment 20000234 PARAMETER Experiment Name: At_Siliques_P Parameter: Plant Line Value: WS
  misc_feature: MA Experiment 20000234 PARAMETER Experiment Name: At_Siliques_P Parameter: Tissue Value: Less Than 5mm Siliques vs. Whole Plant
  misc_feature: MA Experiment ID: 20000235 Result: Down-regulated in Transcription
  misc_feature: MA Experiment 20000235 PARAMETER Experiment Name: At_Siliques_P Parameter: Age (day) Value: 21
  misc_feature: MA Experiment 20000235 PARAMETER Experiment Name: At_Siliques_P Parameter: Organism Value: A. thaliana
  misc_feature: MA Experiment 20000235 PARAMETER Experiment Name: At_Siliques_P Parameter: Plant Line Value: WS
  misc_feature: MA Experiment 20000235 PARAMETER Experiment Name: At_Siliques_P Parameter: Tissue Value: 5-10mm Siliques vs. Whole Plant
  misc_feature: MA Experiment ID: 20000438 Result: Down-regulated in Transcription
  misc_feature: MA Experiment 20000438 PARAMETER Experiment Name: At_Shoots__P Parameter: Age (day) Value: 14
  misc_feature: MA Experiment 20000438 PARAMETER Experiment Name: At_Shoots__P Parameter: Tissue Value: Shoots vs. Whole Plant
  misc_feature: MA Experiment ID: 20000495 Result: Up-regulated in Transcription
  misc_feature: MA Experiment 20000495 PARAMETER Experiment Name: At_Guard_Cells_P Parameter: Harvest Date Value: 8/2/2002
  misc_feature: MA Experiment 20000495 PARAMETER Experiment Name: At_Guard_Cells_P Parameter: Organism Value: A. thaliana
  misc_feature: MA Experiment 20000495 PARAMETER Experiment Name: At_Guard_Cells_P Parameter: Tissue Value: Guard Cells vs. Leaves
  misc_feature: MA Experiment ID: 20000496 Result: Up-regulated in Transcription
  misc_feature: MA Experiment 20000496 PARAMETER Experiment Name: At_Guard_Cells_P Parameter: Harvest Date Value: 7/19/2002
  misc_feature: MA Experiment 20000496 PARAMETER Experiment Name: At_Guard_Cells_P Parameter: Organism Value: Canola
  misc_feature: MA Experiment 20000496 PARAMETER Experiment Name: At_Guard_Cells_P Parameter: Tissue Value: Guard Cells vs. Leaves
  misc_feature: MA Experiment ID: 20000794 Result: Up-regulated in Transcription
  misc_feature: MA Experiment 20000794 PARAMETER Experiment Name: At_Petals_P Parameter: Age (day) Value: 23-25 days
  misc_feature: MA Experiment 20000794 PARAMETER Experiment Name: At_Petals_P Parameter: Plant Line Value: WS
  misc_feature: MA Experiment 20000794 PARAMETER Experiment Name: At_Petals_P Parameter: Tissue Value: Petals vs. Whole plant
  misc_feature: MA Experiment ID: 20001248 Result: Up-regulated in Transcription
  misc_feature: MA Experiment 20001248 PARAMETER Experiment Name: At_Far-red-induction_P Parameter: Age (day) Value: 7
  misc_feature: MA Experiment 20001248 PARAMETER Experiment Name: At_Far-red-induction_P Parameter: Light Value: Far-red vs. White
  misc_feature: MA Experiment 20001248 PARAMETER Experiment Name: At_Far-red-induction_P Parameter: Organism Value: A. thaliana
  misc_feature: MA Experiment 20001248 PARAMETER Experiment Name: At_Far-red-induction_P Parameter: Plant Line Value: Columbia
  misc_feature: MA Experiment 20001248 PARAMETER Experiment Name: At_Far-red-induction_P Parameter: Timepoint (hr) Value: 4
  misc_feature: MA Experiment 20001248 PARAMETER Experiment Name: At_Far-red-induction_P Parameter: Tissue Value: Whole Plant
  misc_feature: MA Experiment ID: 20001451 Result: Up-regulated in Transcription
  misc_feature: MA Experiment 20001451 PARAMETER Experiment Name: At_Far-red-induction_P Parameter: Age (day) Value: 7
  misc_feature: MA Experiment 20001451 PARAMETER Experiment Name: At_Far-red-induction_P Parameter: Light Value: Far-red vs. White
  misc_feature: MA Experiment 20001451 PARAMETER Experiment Name: At_Far-red-induction_P Parameter: Organism Value: A. thaliana
  misc_feature: MA Experiment 20001451 PARAMETER Experiment Name: At_Far-red-induction_P Parameter: Plant Line Value: Columbia
  misc_feature: MA Experiment 20001451 PARAMETER Experiment Name: At_Far-red-induction_P Parameter: Timepoint (hr) Value: 24
  misc_feature: MA Experiment 20001451 PARAMETER Experiment Name: At_Far-red-induction_P Parameter: Tissue Value: Whole Plant
  misc_feature: MA Experiment ID: 20001556 Result: Up-regulated in Transcription
  misc_feature: MA Experiment 20001556 PARAMETER Experiment Name: At_Drought_Soil_Dry_P Parameter: Age (day) Value: 26
  misc_feature: MA Experiment 20001556 PARAMETER Experiment Name: At_Drought_Soil_Dry_P Parameter: Organism Value: A. thaliana
  misc_feature: MA Experiment 20001556 PARAMETER Experiment Name: At_Drought_Soil_Dry_P Parameter: Plant Line Value: WS
  misc_feature: MA Experiment 20001556 PARAMETER Experiment Name: At_Drought_Soil_Dry_P Parameter: Post Timepoint (hr) Value: None
  misc_feature: MA Experiment 20001556 PARAMETER Experiment Name: At_Drought_Soil_Dry_P Parameter: Post-Treatment Value: None
  misc_feature: MA Experiment 20001556 PARAMETER Experiment Name: At_Drought_Soil_Dry_P Parameter: Timepoint (day) Value: 12
  misc_feature: MA Experiment 20001556 PARAMETER Experiment Name: At_Drought_Soil_Dry_P Parameter: Treatment Value: Drought vs. No Drought

SEQ ID NO: 92561 - protein, 280 aa, Arabidopsis thaliana; identical to SEQ ID NO: 34928
  peptide (1)..(280): Ceres Seq. ID no. 12712636
  misc_feature (187)..(264): Pfam Name: Pollen allergen Pfam Description: Pollen allergen
  misc_feature (23)..(280): Homolog of NCBI NO: 15241741 NR Description: expansin, putative; protein id: At5g02260.1, by cDNA: 21205., supported by cDNA: gi_15451011, supported by
  misc_feature (23)..(280): Homolog of NCBI NO: 29467509 NR Description: expansin [Pyrus communis]
  misc_feature (24)..(280): Homolog of NCBI NO: 15224330 NR Description: expansin, putative; protein id: At2g37640.1, by cDNA: gi_19699321 [Arabidopsis thaliana]
  misc_feature (23)..(280): Homolog of NCBI NO: 1076531 NR Description: pollen allergen homolog, hypothetical (clone - garden pea >gi|732905|emb|CAA59470.1| homology with pollen
  misc_feature (23)..(280): Homolog of NCBI NO: 20502784 NR Description: expansin 11 precursor [Rumex palustris]
  misc_feature (32)..(280): Homolog of NCBI NO: 29466643 NR Description: expansin [Prunus persica]
  misc_feature (23)..(280): Homolog of NCBI NO: 20502782 NR Description: expansin 10 precursor [Rumex palustris]
  misc_feature (23)..(280): Homolog of NCBI NO: 20502786 NR Description: expansin 12 precursor [Rumex palustris]
  misc_feature (21)..(280): Homolog of NCBI NO: 4138914 NR Description: expansin precursor [Lycopersicon esculentum]
  misc_feature (32)..(280): Homolog of NCBI NO: 13898655 NR Description: expansin [Prunus cerasus]

SEQ ID NO: 92562 - protein, 258 aa, Arabidopsis thaliana; identical to SEQ ID NO: 34929
  peptide (1)..(258): Ceres Seq. ID no. 12712637
  misc_feature (165)..(242): Pfam Name: Pollen allergen Pfam Description: Pollen allergen
  misc_feature (1)..(258): Homolog of NCBI NO: 15241741 NR Description: expansin, putative; protein id: At5g02260.1, by cDNA: 21205., supported by cDNA: gi_15451011, supported by
  misc_feature (1)..(258): Homolog of NCBI NO: 29467509 NR Description: expansin [Pyrus communis]
  misc_feature (2)..(258): Homolog of NCBI NO: 15224330 NR Description: expansin, putative; protein id: At2g37640.1, by cDNA: gi_19699321 [Arabidopsis thaliana]
  misc_feature (1)..(258): Homolog of NCBI NO: 1076531 NR Description: pollen allergen homolog, hypothetical (clone - garden pea >gi|732905|emb|CAA59470.1| homology with pollen
  misc_feature (1)..(258): Homolog of NCBI NO: 20502784 NR Description: expansin 11 precursor [Rumex palustris]
  misc_feature (10)..(258): Homolog of NCBI NO: 29466643 NR Description: expansin [Prunus persica]
  misc_feature (1)..(258): Homolog of NCBI NO: 20502782 NR Description: expansin 10 precursor [Rumex palustris]
  misc_feature (1)..(258): Homolog of NCBI NO: 20502786 NR Description: expansin 12 precursor [Rumex palustris]
  misc_feature (1)..(258): Homolog of NCBI NO: 4138914 NR Description: expansin precursor [Lycopersicon esculentum]
  misc_feature (10)..(258): Homolog of NCBI NO: 13898655 NR Description: expansin [Prunus cerasus]

SEQ ID NO: 92563 - protein, 250 aa, Arabidopsis thaliana; identical to SEQ ID NO: 34930
  peptide (1)..(250): Ceres Seq. ID no. 12712638
  misc_feature (157)..(234): Pfam Name: Pollen allergen Pfam Description: Pollen allergen
  misc_feature (1)..(250): Homolog of NCBI NO: 15241741 NR Description: expansin, putative; protein id: At5g02260.1, by cDNA: 21205., supported by cDNA: gi_15451011, supported by
  misc_feature (1)..(250): Homolog of NCBI NO: 29467509 NR Description: expansin [Pyrus communis]
  misc_feature (1)..(250): Homolog of NCBI NO: 15224330 NR Description: expansin, putative; protein id: At2g37640.1, by cDNA: gi_19699321 [Arabidopsis thaliana]
  misc_feature (1)..(250): Homolog of NCBI NO: 1076531 NR Description: pollen allergen homolog, hypothetical (clone - garden pea >gi|732905|emb|CAA59470.1| homology with pollen
  misc_feature (1)..(250): Homolog of NCBI NO: 20502784 NR Description: expansin 11 precursor [Rumex palustris]
  misc_feature (2)..(250): Homolog of NCBI NO: 29466643 NR Description: expansin [Prunus persica]
  misc_feature (1)..(250): Homolog of NCBI NO: 20502782 NR Description: expansin 10 precursor [Rumex palustris]
  misc_feature (1)..(250): Homolog of NCBI NO: 20502786 NR Description: expansin 12 precursor [Rumex palustris]
  misc_feature (1)..(250): Homolog of NCBI NO: 4138914 NR Description: expansin precursor [Lycopersicon esculentum]
  misc_feature (2)..(250): Homolog of NCBI NO: 13898655 NR Description: expansin [Prunus cerasus]

SEQ ID NO: 92564 - DNA, 2255 bp, Arabidopsis thaliana; identical to SEQ ID NO: 88808
  misc_feature (1)..(2255): Ceres Seq. ID no. 12712671
  misc_feature: MA Experiment ID: 20000314 Result: Down-regulated in Transcription
  misc_feature: MA Experiment 20000314 PARAMETER Experiment Name: At_14day_Shoots-Roots_Sub_P Parameter: Age (day) Value: 14
  misc_feature: MA Experiment 20000314 PARAMETER Experiment Name: At_14day_Shoots-Roots_Sub_P Parameter: Organism Value: A. thaliana
  misc_feature: MA Experiment 20000314 PARAMETER Experiment Name: At_14day_Shoots-Roots_Sub_P Parameter: Plant Line Value: WS
  misc_feature: MA Experiment 20000314 PARAMETER Experiment Name: At_14day_Shoots-Roots_Sub_P Parameter: Tissue Value: Roots vs. Whole Plant
  misc_feature: MA Experiment ID: 20000327 Result: Up-regulated in Transcription
  misc_feature: MA Experiment 20000327 PARAMETER Experiment Name: At_42deg_Heat_Sub_P Parameter: Age (day) Value: 14
  misc_feature: MA Experiment 20000327 PARAMETER Experiment Name: At_42deg_Heat_Sub_P Parameter: Organism Value: A. thaliana
  misc_feature: MA Experiment 20000327 PARAMETER Experiment Name: At_42deg_Heat_Sub_P Parameter: Plant Line Value: WS
  misc_feature: MA Experiment 20000327 PARAMETER Experiment Name: At_42deg_Heat_Sub_P Parameter: Temperature (deg C) Value: 42 vs. 22
  misc_feature: MA Experiment 20000327 PARAMETER Experiment Name: At_42deg_Heat_Sub_P Parameter: Timepoint (hr) Value: 1
  misc_feature: MA Experiment 20000327 PARAMETER Experiment Name: At_42deg_Heat_Sub_P Parameter: Tissue Value: Aerial
  misc_feature: MA Experiment ID: 20000328 Result: Up-regulated in Transcription
  misc_feature: MA Experiment 20000328 PARAMETER Experiment Name: At_42deg_Heat_Sub_P Parameter: Age (day) Value: 14
  misc_feature: MA Experiment 20000328 PARAMETER Experiment Name: At_42deg_Heat_Sub_P Parameter: Organism Value: A. thaliana
  misc_feature: MA Experiment 20000328 PARAMETER Experiment Name: At_42deg_Heat_Sub_P Parameter: Plant Line Value: WS
  misc_feature: MA Experiment 20000328 PARAMETER Experiment Name: At_42deg_Heat_Sub_P Parameter: Temperature (deg C) Value: 42 vs. 22
  misc_feature: MA Experiment 20000328 PARAMETER Experiment Name: At_42deg_Heat_Sub_P Parameter: Timepoint (hr) Value: 6
  misc_feature: MA Experiment 20000328 PARAMETER Experiment Name: At_42deg_Heat_Sub_P Parameter: Tissue Value: Aerial
  misc_feature: MA Experiment ID: 20000355 Result: Down-regulated in Transcription
  misc_feature: MA Experiment 20000355 PARAMETER Experiment Name: At_Siliques_Sub_P Parameter: Age (day) Value: 21
  misc_feature: MA Experiment 20000355 PARAMETER Experiment Name: At_Siliques_Sub_P Parameter: Organism Value: A. thaliana
  misc_feature: MA Experiment 20000355 PARAMETER Experiment Name: At_Siliques_Sub_P Parameter: Plant Line Value: WS
  misc_feature: MA Experiment 20000355 PARAMETER Experiment Name: At_Siliques_Sub_P Parameter: Tissue Value: Less Than 5mm Siliques vs. Whole Plant
  misc_feature: MA Experiment ID: 20001807 Result: Up-regulated in Transcription
  misc_feature: MA Experiment 20001807 PARAMETER Experiment Name: At_50mM_NH4NO3_L-to-H_Sub_P Parameter: Timepoint (hr) Value: 6
  misc_feature: MA Experiment 20001807 PARAMETER Experiment Name: At_50mM_NH4NO3_L-to-H_Sub_P Parameter: Tissue Value: Leaf
  misc_feature: MA Experiment 20001807 PARAMETER Experiment Name: At_50mM_NH4NO3_L-to-H_Sub_P Parameter: Treatment Value: 50mM NH4NO3 vs 100mM Mannitol

SEQ ID NO: 92565 - protein, 651 aa, Arabidopsis thaliana; identical to SEQ ID NO: 22039
  peptide (1)..(651): Ceres Seq. ID no. 12712672
  misc_feature (6)..(626): Homolog of NCBI NO: 21263753 NR Description: Heat shock cognate 71 kDa protein (Hsc70.1)
  misc_feature (8)..(651): Homolog of NCBI NO: 14423732 NR Description: Heat shock 70 kDa protein
  misc_feature (1)..(635): Homolog of NCBI NO: 6016151 NR Description: Luminal binding protein 3 precursor (BiP3)
  misc_feature (3)..(635): Homolog of NCBI NO: 1037176 NR Description: immunoglobulin heavy chain binding protein
  misc_feature (1)..(626): Homolog of NCBI NO: 481576 NR Description: dnaK-type molecular chaperone GRP78/BiP - cinnamomi >gi|429118|emb|CAA53369.1| glucose regulated protein
  misc_feature (3)..(635): Homolog of NCBI NO: 29539338 NR Description: Heat shock 70 kDa protein [Cyanidioschyzon
  misc_feature (1)..(635): Homolog of NCBI NO: 23480384 NR Description: heat shock protein [Plasmodium yoelii yoelii]
  misc_feature (124)..(646): Homolog of NCBI NO: 4164594 NR Description: heat shock protein 70 [Paracoccidioides

SEQ ID NO: 92566 - protein, 588 aa, Arabidopsis thaliana; identical to SEQ ID NO: 22040
  peptide (1)..(588): Ceres Seq. ID no. 12712673
  misc_feature (1)..(563): Homolog of NCBI NO: 21263753 NR Description: Heat shock cognate 71 kDa protein (Hsc70.1)
  misc_feature (1)..(588): Homolog of NCBI NO: 14423732 NR Description: Heat shock 70 kDa protein
  misc_feature (1)..(572): Homolog of NCBI NO: 6016151 NR Description: Luminal binding protein 3 precursor (BiP3)
  misc_feature (1)..(572): Homolog of NCBI NO: 1037176 NR Description: immunoglobulin heavy chain binding protein
  misc_feature (1)..(563): Homolog of NCBI NO: 481576 NR Description: dnaK-type molecular chaperone GRP78/BiP - cinnamomi >gi|429118|emb|CAA53369.1| glucose regulated protein
  misc_feature (1)..(572): Homolog of NCBI NO: 29539338 NR Description: Heat shock 70 kDa protein [Cyanidioschyzon
  misc_feature (1)..(572): Homolog of NCBI NO: 23480384 NR Description: heat shock protein [Plasmodium yoelii yoelii]
  misc_feature (61)..(583): Homolog of NCBI NO: 4164594 NR Description: heat shock protein 70 [Paracoccidioides

SEQ ID NO: 92567 - protein, 562 aa, Arabidopsis thaliana; identical to SEQ ID NO: 22041
  peptide (1)..(562): Ceres Seq. ID no. 12712674
  misc_feature (1)..(537): Homolog of NCBI NO: 21263753 NR Description: Heat shock cognate 71 kDa protein (Hsc70.1)
  misc_feature (1)..(562): Homolog of NCBI NO: 14423732 NR Description: Heat shock 70 kDa protein
  misc_feature (1)..(546): Homolog of NCBI NO: 6016151 NR Description: Luminal binding protein 3 precursor (BiP3)
  misc_feature (1)..(546): Homolog of NCBI NO: 1037176 NR Description: immunoglobulin heavy chain binding protein
  misc_feature (1)..(537): Homolog of NCBI NO: 481576 NR Description: dnaK-type molecular chaperone GRP78/BiP - cinnamomi >gi|429118|emb|CAA53369.1| glucose regulated protein
  misc_feature (1)..(546): Homolog of NCBI NO: 29539338 NR Description: Heat shock 70 kDa protein [Cyanidioschyzon
  misc_feature (1)..(546): Homolog of NCBI NO: 23480384 NR Description: heat shock protein [Plasmodium yoelii yoelii]
  misc_feature (35)..(557): Homolog of NCBI NO: 4164594 NR Description: heat shock protein 70 [Paracoccidioides

SEQ ID NO: 92568 - DNA, 1278 bp, Arabidopsis thaliana; identical to SEQ ID NO: 88812
  misc_feature (1)..(1278): Ceres Seq. ID no. 12712683
  misc_feature: MA Experiment ID: 108435 Result: Down-regulated in Transcription
  misc_feature: MA Experiment 108435 PARAMETER Experiment Name: At_stm_Mutants_cDNA_P Parameter: Plant Line Value: wt Landsburg vs stm
  misc_feature: MA Experiment 108435 PARAMETER Experiment Name: At_stm_Mutants_cDNA_P Parameter: Tissue Value: Shoot Apical Meristem Region
  misc_feature: MA Experiment ID: 108462 Result: Down-regulated in Transcription
  misc_feature: MA Experiment 108462 PARAMETER Experiment Name: At_Germinating_Seeds_cDNA_P Parameter: Age (day) Value: 2 vs. 0
  misc_feature: MA Experiment 108462 PARAMETER Experiment Name: At_Germinating_Seeds_cDNA_P Parameter: Tissue Value: Germinating Seeds
  misc_feature: MA Experiment ID: 108463 Result: Down-regulated in Transcription
  misc_feature: MA Experiment 108463 PARAMETER Experiment Name: At_Germinating_Seeds_cDNA_P Parameter: Age (day) Value: 3 vs. 0
  misc_feature: MA Experiment 108463 PARAMETER Experiment Name: At_Germinating_Seeds_cDNA_P Parameter: Tissue Value: Germinating Seeds
  misc_feature: MA Experiment ID: 108464 Result: Down-regulated in Transcription
  misc_feature: MA Experiment 108464 PARAMETER Experiment Name: At_Germinating_Seeds_cDNA_P Parameter: Age (day) Value: 4 vs. 0
  misc_feature: MA Experiment 108464 PARAMETER Experiment Name: At_Germinating_Seeds_cDNA_P Parameter: Tissue Value: Germinating Seeds
  misc_feature: MA Experiment ID: 108561 Result: Down-regulated in Transcription
  misc_feature: MA Experiment 108561 PARAMETER Experiment Name: At_100uM_ABA_cDNA_P Parameter: Timepoint (hr) Value: 6
  misc_feature: MA Experiment 108561 PARAMETER Experiment Name: At_100uM_ABA_cDNA_P Parameter: Tissue Value: Aerial
  misc_feature: MA Experiment 108561 PARAMETER Experiment Name: At_100uM_ABA_cDNA_P Parameter: Treatment Value: 100uM ABA vs. No Treatment
  misc_feature: MA Experiment ID: 20000069 Result: Down-regulated in Transcription
  misc_feature: MA Experiment 20000069 PARAMETER Experiment Name: At_100uM_ABA_Mutants_cDNA_P Parameter: Plant Line Value: CS23
  misc_feature: MA Experiment 20000069 PARAMETER Experiment Name: At_100uM_ABA_Mutants_cDNA_P Parameter: Timepoint (hr) Value: 6
  misc_feature: MA Experiment 20000069 PARAMETER Experiment Name: At_100uM_ABA_Mutants_cDNA_P Parameter: Tissue Value: Aerial
  misc_feature: MA Experiment 20000069 PARAMETER Experiment Name: At_100uM_ABA_Mutants_cDNA_P Parameter: Treatment Value: 100uM ABA vs. No Treatment
  misc_feature: MA Experiment ID: 20000070 Result: Down-regulated in Transcription
  misc_feature: MA Experiment 20000070 PARAMETER Experiment Name: At_100uM_ABA_Mutants_cDNA_P Parameter: Plant Line Value: CS24
  misc_feature: MA Experiment 20000070 PARAMETER Experiment Name: At_100uM_ABA_Mutants_cDNA_P Parameter: Timepoint (hr) Value: 6
  misc_feature: MA Experiment 20000070 PARAMETER Experiment Name: At_100uM_ABA_Mutants_cDNA_P Parameter: Tissue Value: Aerial
  misc_feature: MA Experiment 20000070 PARAMETER Experiment Name: At_100uM_ABA_Mutants_cDNA_P Parameter: Treatment Value: 100uM ABA vs. No Treatment
  misc_feature: MA Experiment ID: 20000071 Result: Down-regulated in Transcription
  misc_feature: MA Experiment 20000071 PARAMETER Experiment Name: At_100uM_ABA_Mutants_cDNA_P Parameter: Plant Line Value: CS8104
  misc_feature: MA Experiment 20000071 PARAMETER Experiment Name: At_100uM_ABA_Mutants_cDNA_P Parameter: Timepoint (hr) Value: 6
  misc_feature: MA Experiment 20000071 PARAMETER Experiment Name: At_100uM_ABA_Mutants_cDNA_P Parameter: Tissue Value: Aerial
  misc_feature: MA Experiment 20000071 PARAMETER Experiment Name: At_100uM_ABA_Mutants_cDNA_P Parameter: Treatment Value: 100uM ABA vs. No Treatment
  misc_feature: MA Experiment ID: 20000072 Result: Down-regulated in Transcription
  misc_feature: MA Experiment 20000072 PARAMETER Experiment Name: At_100uM_ABA_Mutants_cDNA_P Parameter: Plant Line Value: CS8105
  misc_feature: MA Experiment 20000072 PARAMETER Experiment Name: At_100uM_ABA_Mutants_cDNA_P Parameter: Timepoint (hr) Value: 6
  misc_feature: MA Experiment 20000072 PARAMETER Experiment Name: At_100uM_ABA_Mutants_cDNA_P Parameter: Tissue Value: Aerial
  misc_feature: MA Experiment 20000072 PARAMETER Experiment Name: At_100uM_ABA_Mutants_cDNA_P Parameter: Treatment Value: 100uM ABA vs. No Treatment
  misc_feature: MA Experiment ID: 20000087 Result: Down-regulated in Transcription
  misc_feature: MA Experiment 20000087 PARAMETER Experiment Name: At_100uM_ABA_Mutants_cDNA_P Parameter: Plant Line Value: WS
  misc_feature: MA Experiment 20000087 PARAMETER Experiment Name: At_100uM_ABA_Mutants_cDNA_P Parameter: Timepoint (hr) Value: 6
  misc_feature: MA Experiment 20000087 PARAMETER Experiment Name: At_100uM_ABA_Mutants_cDNA_P Parameter: Tissue Value: Aerial
  misc_feature: MA Experiment 20000087 PARAMETER Experiment Name: At_100uM_ABA_Mutants_cDNA_P Parameter: Treatment Value: 100uM ABA vs. No Treatment
  misc_feature: MA Experiment ID: 20000088 Result: Down-regulated in Transcription
  misc_feature: MA Experiment 20000088 PARAMETER Experiment Name: At_100uM_ABA_Mutants_cDNA_P Parameter: Plant Line Value: Landsberg
  misc_feature: MA Experiment 20000088 PARAMETER Experiment Name: At_100uM_ABA_Mutants_cDNA_P Parameter: Timepoint (hr) Value: 6
  misc_feature: MA Experiment 20000088 PARAMETER Experiment Name: At_100uM_ABA_Mutants_cDNA_P Parameter: Tissue Value: Aerial
  misc_feature: MA Experiment 20000088 PARAMETER Experiment Name: At_100uM_ABA_Mutants_cDNA_P Parameter: Treatment Value: 100uM ABA vs. No Treatment
  misc_feature: MA Experiment ID: 20000117 Result: Down-regulated in Transcription
  misc_feature: MA Experiment 20000117 PARAMETER Experiment Name: At_100uM_ABA_Mutants_cDNA_P Parameter: Plant Line Value: Columbia
  misc_feature: MA Experiment 20000117 PARAMETER Experiment Name: At_100uM_ABA_Mutants_cDNA_P Parameter: Timepoint (hr) Value: 6
  misc_feature: MA Experiment 20000117 PARAMETER Experiment Name: At_100uM_ABA_Mutants_cDNA_P Parameter: Tissue Value: Aerial
  misc_feature: MA Experiment 20000117 PARAMETER Experiment Name: At_100uM_ABA_Mutants_cDNA_P Parameter: Treatment Value: 100uM ABA vs. No Treatment
  misc_feature: MA Experiment ID: 20000180 Result: Up-regulated in Transcription
  misc_feature: MA Experiment 20000180 PARAMETER Experiment Name: At_Germinating_Seeds_P Parameter: Age (hr) Value: 24 vs. 0
  misc_feature: MA Experiment 20000180 PARAMETER Experiment Name: At_Germinating_Seeds_P Parameter: Tissue Value: Germinating Seeds
  misc_feature: MA Experiment ID: 20000184 Result: Up-regulated in Transcription
  misc_feature: MA Experiment 20000184 PARAMETER Experiment Name: At_Shoots__P Parameter: Age (day) Value: 7
  misc_feature: MA Experiment 20000184 PARAMETER Experiment Name: At_Shoots__P Parameter: Tissue Value: Shoots vs. Whole Plant
  misc_feature: MA Experiment ID: 20000185 Result: Down-regulated in Transcription
  misc_feature: MA Experiment 20000185 PARAMETER Experiment Name: At_Roots__P Parameter: Age (day) Value: 7 vs. 21
  misc_feature: MA Experiment 20000185 PARAMETER Experiment Name: At_Roots__P Parameter: Organism Value: A. thaliana
  misc_feature: MA Experiment 20000185 PARAMETER Experiment Name: At_Roots__P Parameter: Tissue Value: Roots vs. Whole Plant
  misc_feature: MA Experiment ID: 20000211 Result: Down-regulated in Transcription
  misc_feature: MA Experiment 20000211 PARAMETER Experiment Name: At_0.001percent_MeJA__P Parameter: Age (day) Value: 14
  misc_feature: MA Experiment 20000211 PARAMETER Experiment Name: At_0.001percent_MeJA__P Parameter: Organism Value: A. thaliana
  misc_feature: MA Experiment 20000211 PARAMETER Experiment Name: At_0.001percent_MeJA__P Parameter: Plant Line Value: WS
  misc_feature: MA Experiment 20000211 PARAMETER Experiment Name: At_0.001percent_MeJA__P Parameter: Timepoint (hr) Value: 1
  misc_feature: MA Experiment 20000211 PARAMETER Experiment Name: At_0.001percent_MeJA__P Parameter: Tissue Value: Aerial
  misc_feature: MA Experiment 20000211 PARAMETER Experiment Name: At_0.001percent_MeJA__P Parameter: Treatment Value: 0.001percent MeJA vs. No Treatment
  misc_feature: MA Experiment ID: 20000224 Result: Down-regulated in Transcription
  misc_feature: MA Experiment ID: 20000234 Result: Up-regulated in Transcription
  misc_feature: MA Experiment 20000234 PARAMETER Experiment Name: At_Siliques_P Parameter: Age (day) Value: 21
  misc_feature: MA Experiment 20000234 PARAMETER Experiment Name: At_Siliques_P Parameter: Organism Value: A. thaliana
  misc_feature: MA Experiment 20000234 PARAMETER Experiment Name: At_Siliques_P Parameter: Plant Line Value: WS
  misc_feature: MA Experiment 20000234 PARAMETER Experiment Name: At_Siliques_P Parameter: Tissue Value: Less Than 5mm Siliques vs. Whole Plant
  misc_feature: MA Experiment ID: 20000235 Result: Up-regulated in Transcription
  misc_feature: MA Experiment 20000235 PARAMETER Experiment Name: At_Siliques_P Parameter: Age (day) Value: 21
  misc_feature: MA Experiment 20000235 PARAMETER Experiment Name: At_Siliques_P Parameter: Organism Value: A. thaliana
  misc_feature: MA Experiment 20000235 PARAMETER Experiment Name: At_Siliques_P Parameter: Plant Line Value: WS
  misc_feature: MA Experiment 20000235 PARAMETER Experiment Name: At_Siliques_P Parameter: Tissue Value: 5-10mm Siliques vs. Whole Plant
  misc_feature: MA Experiment ID: 20000264 Result: Up-regulated in Transcription
  misc_feature: MA Experiment 20000264 PARAMETER Experiment Name: At_Open_Flower_P Parameter: Age (day) Value: 21
  misc_feature: MA Experiment 20000264 PARAMETER Experiment Name: At_Open_Flower_P Parameter: Plant Line Value: WS
  misc_feature: MA Experiment 20000264 PARAMETER Experiment Name: At_Open_Flower_P Parameter: Tissue Value: Open Flower vs. Whole Plant
  misc_feature: MA Experiment ID: 20000265 Result: Up-regulated in Transcription
  misc_feature: MA Experiment 20000265 PARAMETER Experiment Name: At_Open_Flower_P Parameter: Age (day) Value: 21
  misc_feature: MA Experiment 20000265 PARAMETER Experiment Name: At_Open_Flower_P Parameter: Plant Line Value: WS
  misc_feature: MA Experiment 20000265 PARAMETER Experiment Name: At_Open_Flower_P Parameter: Tissue Value: Closed Flower vs. Whole Plant
  misc_feature: MA Experiment ID: 20000286 Result: Up-regulated in Transcription
  misc_feature: MA Experiment 20000286 PARAMETER Experiment Name: At_Open_Flower_P Parameter: Age (day) Value: 21
  misc_feature: MA Experiment 20000286 PARAMETER Experiment Name: At_Open_Flower_P Parameter: Plant Line Value: WS
  misc_feature: MA Experiment 20000286 PARAMETER Experiment Name: At_Open_Flower_P Parameter: Tissue Value: Half Open vs. Whole Plant
  misc_feature: MA Experiment ID: 20000308 Result: Down-regulated in Transcription
  misc_feature: MA Experiment 20000308 PARAMETER Experiment Name: At_100mM_NaCl__P Parameter: Age (day) Value: 17
  misc_feature: MA Experiment 20000308 PARAMETER Experiment Name: At_100mM_NaCl__P Parameter: Organism Value: A. thaliana
  misc_feature: MA Experiment 20000308 PARAMETER Experiment Name: At_100mM_NaCl__P Parameter: Plant Line Value: WS
  misc_feature: MA Experiment 20000308 PARAMETER Experiment Name: At_100mM_NaCl__P Parameter: Timepoint (hr) Value: 72
  misc_feature: MA Experiment 20000308 PARAMETER Experiment Name: At_100mM_NaCl__P Parameter: Tissue Value: Whole Plant
  misc_feature: MA Experiment 20000308 PARAMETER Experiment Name: At_100mM_NaCl__P Parameter: Treatment Value: 100mM NaCl vs. No Treatment
  misc_feature: MA Experiment ID: 20000437 Result: Down-regulated in Transcription
  misc_feature: MA Experiment 20000437 PARAMETER Experiment Name: At_Drought_P Parameter: Age (day) Value: 8
  misc_feature: MA Experiment 20000437 PARAMETER Experiment Name: At_Drought_P Parameter: Organism Value: A. thaliana
  misc_feature: MA Experiment 20000437 PARAMETER Experiment Name: At_Drought_P Parameter: Plant Line Value: WS
  misc_feature: MA Experiment 20000437 PARAMETER Experiment Name: At_Drought_P Parameter: Timepoint (hr) Value: 24
  misc_feature: MA Experiment 20000437 PARAMETER Experiment Name: At_Drought_P Parameter: Tissue Value: Whole Plant
  misc_feature: MA Experiment 20000437 PARAMETER Experiment Name: At_Drought_P Parameter: Treatment Value: Drought vs. No Drought
  misc_feature: MA Experiment ID: 20000438 Result: Up-regulated in Transcription
  misc_feature: MA Experiment 20000438 PARAMETER Experiment Name: At_Shoots__P Parameter: Age (day) Value: 14
  misc_feature: MA Experiment 20000438 PARAMETER Experiment Name: At_Shoots__P Parameter: Tissue Value: Shoots vs. Whole Plant
  misc_feature: MA Experiment ID: 20000439 Result: Down-regulated in Transcription
  misc_feature: MA Experiment 20000439 PARAMETER Experiment Name: At_Roots__P Parameter: Age (day) Value: 14 vs. 21
  misc_feature: MA Experiment 20000439 PARAMETER Experiment Name: At_Roots__P Parameter: Organism Value: A. thaliana
  misc_feature: MA Experiment 20000439 PARAMETER Experiment Name: At_Roots__P Parameter: Tissue Value: Roots vs. Whole Plant
  misc_feature: MA Experiment ID: 20001247 Result: Up-regulated in Transcription
  misc_feature: MA Experiment 20001247 PARAMETER Experiment Name: At_Far-red-induction_P Parameter: Age (day) Value: 7
  misc_feature: MA Experiment 20001247 PARAMETER Experiment Name: At_Far-red-induction_P Parameter: Light Value: Far-red vs. White
  misc_feature: MA Experiment 20001247 PARAMETER Experiment Name: At_Far-red-induction_P Parameter: Organism Value: A. thaliana
  misc_feature: MA Experiment 20001247 PARAMETER Experiment Name: At_Far-red-induction_P Parameter: Plant Line Value: Columbia
  misc_feature: MA Experiment 20001247 PARAMETER Experiment Name: At_Far-red-induction_P Parameter: Timepoint (hr) Value: 1
  misc_feature: MA Experiment 20001247 PARAMETER Experiment Name: At_Far-red-induction_P Parameter: Tissue Value: Whole Plant
  misc_feature: MA Experiment ID: 20001248 Result: Up-regulated in Transcription
  misc_feature: MA Experiment 20001248 PARAMETER Experiment Name: At_Far-red-induction_P Parameter: Age (day) Value: 7
  misc_feature: MA Experiment 20001248 PARAMETER Experiment Name: At_Far-red-induction_P Parameter: Light Value: Far-red vs. White
  misc_feature: MA Experiment 20001248 PARAMETER Experiment Name: At_Far-red-induction_P Parameter: Organism Value: A. thaliana
  misc_feature: MA Experiment 20001248 PARAMETER Experiment Name: At_Far-red-induction_P Parameter: Plant Line Value: Columbia
  misc_feature: MA Experiment 20001248 PARAMETER Experiment Name: At_Far-red-induction_P Parameter: Timepoint (hr) Value: 4
  misc_feature: MA Experiment 20001248 PARAMETER Experiment Name: At_Far-red-induction_P Parameter: Tissue Value: Whole Plant
  misc_feature: MA Experiment ID: 20001450 Result: Up-regulated in Transcription
  misc_feature: MA Experiment 20001450 PARAMETER Experiment Name: At_Far-red-induction_P Parameter: Age (day) Value: 7
  misc_feature: MA Experiment 20001450 PARAMETER Experiment Name: At_Far-red-induction_P Parameter: Light Value: Far-red vs. White
  misc_feature: MA Experiment 20001450 PARAMETER Experiment Name: At_Far-red-induction_P Parameter: Organism Value: A. thaliana
  misc_feature: MA Experiment 20001450 PARAMETER Experiment Name: At_Far-red-induction_P Parameter: Plant Line Value: Columbia
  misc_feature: MA Experiment 20001450 PARAMETER Experiment Name: At_Far-red-induction_P Parameter: Timepoint (hr) Value: 8
  misc_feature: MA Experiment 20001450 PARAMETER Experiment Name: At_Far-red-induction_P Parameter: Tissue Value: Whole Plant
  misc_feature: MA Experiment ID: 20001554 Result: Down-regulated in Transcription
  misc_feature: MA Experiment 20001554 PARAMETER Experiment Name: At_Drought_Soil_Dry_P Parameter: Age (day) Value: 21
  misc_feature: MA Experiment 20001554 PARAMETER Experiment Name: At_Drought_Soil_Dry_P Parameter: Organism Value: A. thaliana
  misc_feature: MA Experiment 20001554 PARAMETER Experiment Name: At_Drought_Soil_Dry_P Parameter: Plant Line Value: WS
  misc_feature: MA Experiment 20001554 PARAMETER Experiment Name: At_Drought_Soil_Dry_P Parameter: Post Timepoint (hr) Value: None
  misc_feature: MA Experiment 20001554 PARAMETER Experiment Name: At_Drought_Soil_Dry_P Parameter: Post-Treatment Value: None
  misc_feature: MA Experiment 20001554 PARAMETER Experiment Name: At_Drought_Soil_Dry_P Parameter: Timepoint (day) Value: 7
  misc_feature: MA Experiment 20001554 PARAMETER Experiment Name: At_Drought_Soil_Dry_P Parameter: Treatment Value: Drought vs. No Drought
  misc_feature: MA Experiment ID: 20001555 Result: Down-regulated in Transcription
  misc_feature: MA Experiment 20001555 PARAMETER Experiment Name: At_Drought_Soil_Dry_P Parameter: Age (day) Value: 24
  misc_feature: MA Experiment 20001555 PARAMETER Experiment Name: At_Drought_Soil_Dry_P Parameter: Organism Value: A. thaliana
  misc_feature: MA Experiment 20001555 PARAMETER Experiment Name: At_Drought_Soil_Dry_P Parameter: Plant Line Value: WS
  misc_feature: MA Experiment 20001555 PARAMETER Experiment Name: At_Drought_Soil_Dry_P Parameter: Post Timepoint (hr) Value: None
  misc_feature: MA Experiment 20001555 PARAMETER Experiment Name: At_Drought_Soil_Dry_P Parameter: Post-Treatment Value: None
  misc_feature: MA Experiment 20001555 PARAMETER Experiment Name: At_Drought_Soil_Dry_P Parameter: Timepoint (day) Value: 10
  misc_feature: MA Experiment 20001555 PARAMETER Experiment Name: At_Drought_Soil_Dry_P Parameter: Treatment Value: Drought vs. No Drought
  misc_feature: MA Experiment ID: 20001769 Result: Up-regulated in Transcription
  misc_feature: MA Experiment 20001769 PARAMETER Experiment Name: At_Far-red-enriched-adult_P Parameter: Age (day) Value: 28
  misc_feature: MA Experiment 20001769 PARAMETER Experiment Name: At_Far-red-enriched-adult_P Parameter: Light Value: Far-red enriched vs. White
  misc_feature: MA Experiment 20001769 PARAMETER Experiment Name: At_Far-red-enriched-adult_P Parameter: Organism Value: A. thaliana
  misc_feature: MA Experiment 20001769 PARAMETER Experiment Name: At_Far-red-enriched-adult_P Parameter: Plant Line Value: Columbia
  misc_feature: MA Experiment 20001769 PARAMETER Experiment Name: At_Far-red-enriched-adult_P Parameter: Timepoint (hr) Value: 4
  misc_feature: MA Experiment 20001769 PARAMETER Experiment Name: At_Far-red-enriched-adult_P Parameter: Tissue Value: Aerial
  misc_feature: MA Experiment ID: 20001770 Result: Up-regulated in Transcription
  misc_feature: MA Experiment 20001770 PARAMETER Experiment Name: At_Far-red-enriched-adult_P Parameter: Age (day) Value: 28
  misc_feature: MA Experiment 20001770 PARAMETER Experiment Name: At_Far-red-enriched-adult_P Parameter: Light Value: Far-red enriched vs. White
  misc_feature: MA Experiment 20001770 PARAMETER Experiment Name: At_Far-red-enriched-adult_P Parameter: Organism Value: A. thaliana
  misc_feature: MA Experiment 20001770 PARAMETER Experiment Name: At_Far-red-enriched-adult_P Parameter: Plant Line Value: Columbia
  misc_feature: MA Experiment 20001770 PARAMETER Experiment Name: At_Far-red-enriched-adult_P Parameter: Timepoint (hr) Value: 8
  misc_feature: MA Experiment 20001770 PARAMETER Experiment Name: At_Far-red-enriched-adult_P Parameter: Tissue Value: Aerial
  misc_feature: MA Experiment ID: 20001906 Result: Down-regulated in Transcription
  misc_feature: MA Experiment 20001906 PARAMETER Experiment Name: At_Drought_Reproduction_P Parameter: Age (day) Value: 35
  misc_feature: MA Experiment 20001906 PARAMETER Experiment Name: At_Drought_Reproduction_P Parameter: Organism Value: A. thaliana
  misc_feature: MA Experiment 20001906 PARAMETER Experiment Name: At_Drought_Reproduction_P Parameter: Plant Line Value: WS
  misc_feature: MA Experiment 20001906 PARAMETER Experiment Name: At_Drought_Reproduction_P Parameter: Timepoint (day) Value: 5
  misc_feature: MA Experiment 20001906 PARAMETER Experiment Name: At_Drought_Reproduction_P Parameter: Tissue Value: Siliques
  misc_feature: MA Experiment 20001906 PARAMETER Experiment Name: At_Drought_Reproduction_P Parameter: Treatment Value: Drought vs. No Drought
  misc_feature: MA Experiment ID: 20001911 Result: Down-regulated in Transcription
  misc_feature: MA Experiment 20001911 PARAMETER Experiment Name: At_Drought_Reproduction_P Parameter: Age (day) Value: 40
  misc_feature: MA Experiment 20001911 PARAMETER Experiment Name: At_Drought_Reproduction_P Parameter: Organism Value: A. thaliana
  misc_feature: MA Experiment 20001911 PARAMETER Experiment Name: At_Drought_Reproduction_P Parameter: Plant Line Value: WS
  misc_feature: MA Experiment 20001911 PARAMETER Experiment Name: At_Drought_Reproduction_P Parameter: Timepoint (day) Value: 10
  misc_feature: MA Experiment 20001911 PARAMETER Experiment Name: At_Drought_Reproduction_P Parameter: Tissue Value: Flowers
  misc_feature: MA Experiment 20001911 PARAMETER Experiment Name: At_Drought_Reproduction_P Parameter: Treatment Value: Drought vs. No Drought

SEQ ID NO: 92569 - protein, 358 aa, Arabidopsis thaliana; identical to SEQ ID NO: 88813
  peptide (1)..(358): Ceres Seq. ID no. 12712684
  misc_feature (28)..(358): Homolog of NCBI NO: 18413950 NR Description: putative protein; protein id: At5g02540.1, by cDNA: 26538., supported by cDNA: gi_20260301 [Arabidopsis
  misc_feature (28)..(358): Homolog of NCBI NO: 20260302 NR Description: putative protein [Arabidopsis thaliana]
  misc_feature (28)..(358): Homolog of NCBI NO: 21554820 NR Description: putativepod-specific dehydrogenase SAC25
  misc_feature (28)..(346): Homolog of NCBI NO: 629592 NR Description: hypothetical protein - rape
  misc_feature (28)..(348): Homolog of NCBI NO: 15224306 NR Description: putative oxidoreductase; protein id: At2g37540.1, by cDNA: gi_20466184 [Arabidopsis thaliana]
  misc_feature (28)..(348): Homolog of NCBI NO: 34895876 NR Description: P0009G03.18 [Oryza sativa (japonica
  misc_feature (30)..(358): Homolog of NCBI NO: 11250521 NR Description: hypothetical protein T22P11.130 - Arabidopsis >gi|7413643|emb|CAB85991.1| putative protein [Arabidopsis
  misc_feature (36)..(345): Homolog of NCBI NO: 23297050 NR Description: unknown protein [Arabidopsis thaliana]
  misc_feature (36)..(347): Homolog of NCBI NO: 30686197 NR Description: short-chain dehydrogenase/reductase family
  misc_feature (36)..(347): Homolog of NCBI NO: 18416145 NR Description: putative protein; protein id: At4g23430.1,

SEQ ID NO: 92570 - protein, 331 aa, Arabidopsis thaliana; identical to SEQ ID NO: 88814
  peptide (1)..(331): Ceres Seq. ID no. 12712685
  misc_feature (1)..(331): Homolog of NCBI NO: 18413950 NR Description: putative protein; protein id: At5g02540.1, by cDNA: 26538., supported by cDNA: gi_20260301 [Arabidopsis
  misc_feature (1)..(331): Homolog of NCBI NO: 20260302 NR Description: putative protein [Arabidopsis thaliana]
  misc_feature (1)..(331): Homolog of NCBI NO: 21554820 NR Description: putativepod-specific dehydrogenase SAC25
  misc_feature (1)..(319): Homolog of NCBI NO: 629592 NR Description: hypothetical protein - rape
  misc_feature (1)..(321): Homolog of NCBI NO: 15224306 NR Description: putative oxidoreductase; protein id: At2g37540.1, by cDNA: gi_20466184 [Arabidopsis thaliana]
  misc_feature (1)..(321): Homolog of NCBI NO: 34895876 NR Description: P0009G03.18 [Oryza sativa (japonica
  misc_feature (3)..(331): Homolog of NCBI NO: 11250521 NR Description: hypothetical protein T22P11.130 - Arabidopsis >gi|7413643|emb|CAB85991.1| putative protein [Arabidopsis
  misc_feature (9)..(318): Homolog of NCBI NO: 23297050 NR Description: unknown protein [Arabidopsis thaliana]
  misc_feature (9)..(320): Homolog of NCBI NO: 30686197 NR Description: short-chain dehydrogenase/reductase family
  misc_feature (9)..(320): Homolog of NCBI NO: 18416145 NR Description: putative protein; protein id: At4g23430.1,

SEQ ID NO: 92571 - protein, 285 aa, Arabidopsis thaliana; identical to SEQ ID NO: 36159
  peptide (1)..(285): Ceres Seq. ID no. 12712686
  misc_feature (1)..(285): Homolog of NCBI NO: 18413950 NR Description: putative protein; protein id: At5g02540.1, by cDNA: 26538., supported by cDNA: gi_20260301 [Arabidopsis
  misc_feature (1)..(285): Homolog of NCBI NO: 20260302 NR Description: putative protein [Arabidopsis thaliana]
  misc_feature (1)..(285): Homolog of NCBI NO: 21554820 NR Description: putativepod-specific dehydrogenase SAC25
  misc_feature (1)..(273): Homolog of NCBI NO: 629592 NR Description: hypothetical protein - rape
  misc_feature (1)..(275): Homolog of NCBI NO: 15224306 NR Description: putative oxidoreductase; protein id: At2g37540.1, by cDNA: gi_20466184 [Arabidopsis thaliana]
  misc_feature (1)..(275): Homolog of NCBI NO: 34895876 NR Description: P0009G03.18 [Oryza sativa (japonica
  misc_feature (1)..(285): Homolog of NCBI NO: 11250521 NR Description: hypothetical protein T22P11.130 - Arabidopsis >gi|7413643|emb|CAB85991.1| putative protein [Arabidopsis
  misc_feature (1)..(272): Homolog of NCBI NO: 23297050 NR Description: unknown protein [Arabidopsis thaliana]
  misc_feature (1)..(274): Homolog of NCBI NO: 30686197 NR Description: short-chain dehydrogenase/reductase family
  misc_feature (1)..(274): Homolog of NCBI NO: 18416145 NR Description: putative protein; protein id: At4g23430.1,

SEQ ID NO: 92572 - DNA, 1659 bp, Arabidopsis thaliana; identical to SEQ ID NO: 88816
  misc_feature (1)..(1659): Ceres Seq. ID no. 12712705
  misc_feature: MA Experiment ID: 20000169 Result: Up-regulated in Transcription
  misc_feature: MA Experiment 20000169 PARAMETER Experiment Name: At_100uM_ABA_P Parameter: Age (day) Value: 14
  misc_feature: MA Experiment 20000169 PARAMETER Experiment Name: At_100uM_ABA_P Parameter: Organism Value: A. thaliana
  misc_feature: MA Experiment 20000169 PARAMETER Experiment Name: At_100uM_ABA_P Parameter: Plant Line Value: WS
  misc_feature: MA Experiment 20000169 PARAMETER Experiment Name: At_100uM_ABA_P Parameter: Timepoint (hr) Value: 6
  misc_feature: MA Experiment 20000169 PARAMETER Experiment Name: At_100uM_ABA_P Parameter: Tissue Value: Aerial
  misc_feature: MA Experiment 20000169 PARAMETER Experiment Name: At_100uM_ABA_P Parameter: Treatment Value: 100uM ABA vs. No Treatment
  misc_feature: MA Experiment ID: 20000179 Result: Up-regulated in Transcription
  misc_feature: MA Experiment 20000179 PARAMETER Experiment Name: At_Germinating_Seeds_P Parameter: Age (hr) Value: 6 vs. 0
  misc_feature: MA Experiment 20000179 PARAMETER Experiment Name: At_Germinating_Seeds_P Parameter: Tissue Value: Germinating Seeds
  misc_feature: MA Experiment ID: 20000184 Result: Down-regulated in Transcription
  misc_feature: MA Experiment 20000184 PARAMETER Experiment Name: At_Shoots__P Parameter: Age (day) Value: 7
  misc_feature: MA Experiment 20000184 PARAMETER Experiment Name: At_Shoots__P Parameter: Tissue Value: Shoots vs. Whole Plant
  misc_feature: MA Experiment ID: 20000185 Result: Down-regulated in Transcription
  misc_feature: MA Experiment 20000185 PARAMETER Experiment Name: At_Roots__P Parameter: Age (day) Value: 7 vs. 21
  misc_feature: MA Experiment 20000185 PARAMETER Experiment Name: At_Roots__P Parameter: Organism Value: A. thaliana
  misc_feature: MA Experiment 20000185 PARAMETER Experiment Name: At_Roots__P Parameter: Tissue Value: Roots vs. Whole Plant
  misc_feature: MA Experiment ID: 20000227 Result: Up-regulated in Transcription
  misc_feature: MA Experiment 20000227 PARAMETER Experiment Name: At_Root-Tips-vs-Tops_P Parameter: Tissue Value: Root Tips vs. Root Tops
  misc_feature: MA Experiment ID: 20000267 Result: Up-regulated in Transcription
  misc_feature: MA Experiment 20000267 PARAMETER Experiment Name: At_Drought_P Parameter: Age (day) Value: 7
  misc_feature: MA Experiment 20000267 PARAMETER Experiment Name: At_Drought_P Parameter: Organism Value: A. thaliana
  misc_feature: MA Experiment 20000267 PARAMETER Experiment Name: At_Drought_P Parameter: Plant Line Value: WS
  misc_feature: MA Experiment 20000267 PARAMETER Experiment Name: At_Drought_P Parameter: Timepoint (hr) Value: 6
  misc_feature: MA Experiment 20000267 PARAMETER Experiment Name: At_Drought_P Parameter: Tissue Value: Whole Plant
  misc_feature: MA Experiment 20000267 PARAMETER Experiment Name: At_Drought_P Parameter: Treatment Value: Drought vs. No Drought
  misc_feature: MA Experiment ID: 20000436 Result: Up-regulated in Transcription
  misc_feature: MA Experiment 20000436 PARAMETER Experiment Name: At_Drought_P Parameter: Age (day) Value: 7
  misc_feature: MA Experiment 20000436 PARAMETER Experiment Name: At_Drought_P Parameter: Organism Value: A. thaliana
  misc_feature: MA Experiment 20000436 PARAMETER Experiment Name: At_Drought_P Parameter: Plant Line Value: WS
  misc_feature: MA Experiment 20000436 PARAMETER Experiment Name: At_Drought_P Parameter: Timepoint (hr) Value: 12
  misc_feature: MA Experiment 20000436 PARAMETER Experiment Name: At_Drought_P Parameter: Tissue Value: Whole Plant
  misc_feature: MA Experiment 20000436 PARAMETER Experiment Name: At_Drought_P Parameter: Treatment Value: Drought vs. No Drought
  misc_feature: MA Experiment ID: 20000437 Result: Up-regulated in Transcription
  misc_feature: MA Experiment 20000437 PARAMETER Experiment Name: At_Drought_P Parameter: Age (day) Value: 8
  misc_feature: MA Experiment 20000437 PARAMETER Experiment Name: At_Drought_P Parameter: Organism Value: A. thaliana
  misc_feature: MA Experiment 20000437 PARAMETER Experiment Name: At_Drought_P Parameter: Plant Line Value: WS
  misc_feature: MA Experiment 20000437 PARAMETER Experiment Name: At_Drought_P Parameter: Timepoint (hr) Value: 24
  misc_feature: MA Experiment 20000437 PARAMETER Experiment Name: At_Drought_P Parameter: Tissue Value: Whole Plant
  misc_feature: MA Experiment 20000437 PARAMETER Experiment Name: At_Drought_P Parameter: Treatment Value: Drought vs. No Drought
  misc_feature: MA Experiment ID: 20000438 Result: Down-regulated in Transcription
  misc_feature: MA Experiment 20000438 PARAMETER Experiment Name: At_Shoots__P Parameter: Age (day) Value: 14
  misc_feature: MA Experiment 20000438 PARAMETER Experiment Name: At_Shoots__P Parameter: Tissue Value: Shoots vs. Whole Plant
  misc_feature: MA Experiment ID: 20000439 Result: Down-regulated in Transcription
  misc_feature: MA Experiment 20000439 PARAMETER Experiment Name: At_Roots__P Parameter: Age (day) Value: 14 vs. 21
  misc_feature: MA Experiment 20000439 PARAMETER Experiment Name: At_Roots__P Parameter: Organism Value: A. thaliana
  misc_feature: MA Experiment 20000439 PARAMETER Experiment Name: At_Roots__P Parameter: Tissue Value: Roots vs. Whole Plant
  misc_feature: MA Experiment ID: 20000453 Result: Up-regulated in Transcription
  misc_feature: MA Experiment 20000453 PARAMETER Experiment Name: At_100uM_ABA_P Parameter: Age (day) Value: 15
  misc_feature: MA Experiment 20000453 PARAMETER Experiment Name: At_100uM_ABA_P Parameter: Organism Value: A. thaliana
  misc_feature: MA Experiment 20000453 PARAMETER Experiment Name: At_100uM_ABA_P Parameter: Plant Line Value: WS
  misc_feature: MA Experiment 20000453 PARAMETER Experiment Name: At_100uM_ABA_P Parameter: Timepoint (hr) Value: 24
  misc_feature: MA Experiment 20000453 PARAMETER Experiment Name: At_100uM_ABA_P Parameter: Tissue Value: Aerial
  misc_feature: MA Experiment 20000453 PARAMETER Experiment Name: At_100uM_ABA_P Parameter: Treatment Value: 100uM ABA vs. No Treatment
  misc_feature: MA Experiment ID: 20000495 Result: Up-regulated in Transcription
  misc_feature: MA Experiment 20000495 PARAMETER Experiment Name: At_Guard_Cells_P Parameter: Harvest Date Value: 8/2/2002
  misc_feature: MA Experiment 20000495 PARAMETER Experiment Name: At_Guard_Cells_P Parameter: Organism Value: A. thaliana
  misc_feature: MA Experiment 20000495 PARAMETER Experiment Name: At_Guard_Cells_P Parameter: Tissue Value: Guard Cells vs. Leaves
  misc_feature: MA Experiment ID: 20001451 Result: Up-regulated in Transcription
  misc_feature: MA Experiment 20001451 PARAMETER Experiment Name: At_Far-red-induction_P Parameter: Age (day) Value: 7
  misc_feature: MA Experiment 20001451 PARAMETER Experiment Name: At_Far-red-induction_P Parameter: Light Value: Far-red vs. White
  misc_feature: MA Experiment 20001451 PARAMETER Experiment Name: At_Far-red-induction_P Parameter: Organism Value: A. thaliana
  misc_feature: MA Experiment 20001451 PARAMETER Experiment Name: At_Far-red-induction_P Parameter: Plant Line Value: Columbia
  misc_feature: MA Experiment 20001451 PARAMETER Experiment Name: At_Far-red-induction_P Parameter: Timepoint (hr) Value: 24
  misc_feature: MA Experiment 20001451 PARAMETER Experiment Name: At_Far-red-induction_P Parameter: Tissue Value: Whole Plant
  misc_feature: MA Experiment ID: 20001554 Result: Up-regulated in Transcription
  misc_feature: MA Experiment 20001554 PARAMETER Experiment Name: At_Drought_Soil_Dry_P Parameter: Age (day) Value: 21
  misc_feature: MA Experiment 20001554 PARAMETER Experiment Name: At_Drought_Soil_Dry_P Parameter: Organism Value: A. thaliana
  misc_feature: MA Experiment 20001554 PARAMETER Experiment Name: At_Drought_Soil_Dry_P Parameter: Plant Line Value: WS
  misc_feature: MA Experiment 20001554 PARAMETER Experiment Name: At_Drought_Soil_Dry_P Parameter: Post Timepoint (hr) Value: None
  misc_feature: MA Experiment 20001554 PARAMETER Experiment Name: At_Drought_Soil_Dry_P Parameter: Post-Treatment Value: None
  misc_feature: MA Experiment 20001554 PARAMETER Experiment Name: At_Drought_Soil_Dry_P Parameter: Timepoint (day) Value: 7
  misc_feature: MA Experiment 20001554 PARAMETER Experiment Name: At_Drought_Soil_Dry_P Parameter: Treatment Value: Drought vs. No Drought
  misc_feature: MA Experiment ID: 20001555 Result: Up-regulated in Transcription
  misc_feature: MA Experiment 20001555 PARAMETER Experiment Name: At_Drought_Soil_Dry_P Parameter: Age (day) Value: 24
  misc_feature: MA Experiment 20001555 PARAMETER Experiment Name: At_Drought_Soil_Dry_P Parameter: Organism Value: A. thaliana
  misc_feature: MA Experiment 20001555 PARAMETER Experiment Name: At_Drought_Soil_Dry_P Parameter: Plant Line Value: WS
  misc_feature: MA Experiment 20001555 PARAMETER Experiment Name: At_Drought_Soil_Dry_P Parameter: Post Timepoint (hr) Value: None
  misc_feature: MA Experiment 20001555 PARAMETER Experiment Name: At_Drought_Soil_Dry_P Parameter: Post-Treatment Value: None
  misc_feature: MA Experiment 20001555 PARAMETER Experiment Name: At_Drought_Soil_Dry_P Parameter: Timepoint (day) Value: 10
  misc_feature: MA Experiment 20001555 PARAMETER Experiment Name: At_Drought_Soil_Dry_P Parameter: Treatment Value: Drought vs. No Drought
  misc_feature: MA Experiment ID: 20001556 Result: Up-regulated in Transcription
  misc_feature: MA Experiment 20001556 PARAMETER Experiment Name: At_Drought_Soil_Dry_P Parameter: Age (day) Value: 26
  misc_feature: MA Experiment 20001556 PARAMETER Experiment Name: At_Drought_Soil_Dry_P Parameter: Organism Value: A. thaliana
  misc_feature: MA Experiment 20001556 PARAMETER Experiment Name: At_Drought_Soil_Dry_P Parameter: Plant Line Value: WS
  misc_feature: MA Experiment 20001556 PARAMETER Experiment Name: At_Drought_Soil_Dry_P Parameter: Post Timepoint (hr) Value: None
  misc_feature: MA Experiment 20001556 PARAMETER Experiment Name: At_Drought_Soil_Dry_P Parameter: Post-Treatment Value: None
  misc_feature: MA Experiment 20001556 PARAMETER Experiment Name: At_Drought_Soil_Dry_P Parameter: Timepoint (day) Value: 12
  misc_feature: MA Experiment 20001556 PARAMETER Experiment Name: At_Drought_Soil_Dry_P Parameter: Treatment Value: Drought vs. No Drought
  misc_feature: MA Experiment ID: 20001557 Result: Up-regulated in Transcription
  misc_feature: MA Experiment 20001557 PARAMETER Experiment Name: At_Drought_Soil_Dry_P Parameter: Age (day) Value: 27
  misc_feature: MA Experiment 20001557 PARAMETER Experiment Name: At_Drought_Soil_Dry_P Parameter: Organism Value: A. thaliana
  misc_feature: MA Experiment 20001557 PARAMETER Experiment Name: At_Drought_Soil_Dry_P Parameter: Plant Line Value: WS
  misc_feature: MA Experiment 20001557 PARAMETER Experiment Name: At_Drought_Soil_Dry_P Parameter: Post Timepoint (hr) Value: 3
  misc_feature: MA Experiment 20001557 PARAMETER Experiment Name: At_Drought_Soil_Dry_P Parameter: Post-Treatment Value: Re-Water vs. No Drought
  misc_feature: MA Experiment 20001557 PARAMETER Experiment Name: At_Drought_Soil_Dry_P Parameter: Timepoint (day) Value: 13
  misc_feature: MA Experiment 20001557 PARAMETER Experiment Name: At_Drought_Soil_Dry_P Parameter: Treatment Value: Drought vs. No Drought
  misc_feature: MA Experiment ID: 20001558 Result: Up-regulated in Transcription
  misc_feature: MA Experiment 20001558 PARAMETER Experiment Name: At_Drought_Soil_Dry_P Parameter: Age (day) Value: 27
  misc_feature: MA Experiment 20001558 PARAMETER Experiment Name: At_Drought_Soil_Dry_P Parameter: Organism Value: A. thaliana
  misc_feature: MA Experiment 20001558 PARAMETER Experiment Name: At_Drought_Soil_Dry_P Parameter: Plant Line Value: WS
  misc_feature: MA Experiment 20001558 PARAMETER Experiment Name: At_Drought_Soil_Dry_P Parameter: Post Timepoint (hr) Value: 6
  misc_feature: MA Experiment 20001558 PARAMETER Experiment Name: At_Drought_Soil_Dry_P Parameter: Post-Treatment Value: Re-Water vs. No Drought
  misc_feature: MA Experiment 20001558 PARAMETER Experiment Name: At_Drought_Soil_Dry_P Parameter: Timepoint (day) Value: 13
  misc_feature: MA Experiment 20001558 PARAMETER Experiment Name: At_Drought_Soil_Dry_P Parameter: Treatment Value: Drought vs. No Drought
  misc_feature: MA Experiment ID: 20001559 Result: Up-regulated in Transcription
  misc_feature: MA Experiment 20001559 PARAMETER Experiment Name: At_Drought_Soil_Dry_P Parameter: Age (day) Value: 28
  misc_feature: MA Experiment 20001559 PARAMETER Experiment Name: At_Drought_Soil_Dry_P Parameter: Organism Value: A. thaliana
  misc_feature: MA Experiment 20001559 PARAMETER Experiment Name: At_Drought_Soil_Dry_P Parameter: Plant Line Value: WS
  misc_feature: MA Experiment 20001559 PARAMETER Experiment Name: At_Drought_Soil_Dry_P Parameter: Post Timepoint (hr) Value: 29
  misc_feature: MA Experiment 20001559 PARAMETER Experiment Name: At_Drought_Soil_Dry_P Parameter: Post-Treatment Value: Re-Water vs. No Drought
  misc_feature: MA Experiment 20001559 PARAMETER Experiment Name: At_Drought_Soil_Dry_P Parameter: Timepoint (day) Value: 14
  misc_feature: MA Experiment 20001559 PARAMETER Experiment Name: At_Drought_Soil_Dry_P Parameter: Treatment Value: Drought vs. No Drought
  misc_feature: MA Experiment ID: 20001560 Result: Up-regulated in Transcription
  misc_feature: MA Experiment 20001560 PARAMETER Experiment Name: At_Drought_Soil_Dry_P Parameter: Age (day) Value: 28
  misc_feature: MA Experiment 20001560 PARAMETER Experiment Name: At_Drought_Soil_Dry_P Parameter: Organism Value: A. thaliana
  misc_feature: MA Experiment 20001560 PARAMETER Experiment Name: At_Drought_Soil_Dry_P Parameter: Plant Line Value: WS
  misc_feature: MA Experiment 20001560 PARAMETER Experiment Name: At_Drought_Soil_Dry_P Parameter: Post Timepoint (hr) Value: None
  misc_feature: MA Experiment 20001560 PARAMETER Experiment Name: At_Drought_Soil_Dry_P Parameter: Post-Treatment Value: None
  misc_feature: MA Experiment 20001560 PARAMETER Experiment Name: At_Drought_Soil_Dry_P Parameter: Timepoint (day) Value: 14
  misc_feature: MA Experiment 20001560 PARAMETER Experiment Name: At_Drought_Soil_Dry_P Parameter: Treatment Value: Drought vs. No Drought
  misc_feature: MA Experiment ID: 20001904 Result: Up-regulated in Transcription
  misc_feature: MA Experiment 20001904 PARAMETER Experiment Name: At_Drought_Reproduction_P Parameter: Age (day) Value: 37
  misc_feature: MA Experiment 20001904 PARAMETER Experiment Name: At_Drought_Reproduction_P Parameter: Organism Value: A. thaliana
  misc_feature: MA Experiment 20001904 PARAMETER Experiment Name: At_Drought_Reproduction_P Parameter: Plant Line Value: WS
  misc_feature: MA Experiment 20001904 PARAMETER Experiment Name: At_Drought_Reproduction_P Parameter: Timepoint (day) Value: 7
  misc_feature: MA Experiment 20001904 PARAMETER Experiment Name: At_Drought_Reproduction_P Parameter: Tissue Value: Rosettes
  misc_feature: MA Experiment 20001904 PARAMETER Experiment Name: At_Drought_Reproduction_P Parameter: Treatment Value: Drought vs. No Drought
  misc_feature: MA Experiment ID: 20001905 Result: Up-regulated in Transcription
  misc_feature: MA Experiment 20001905 PARAMETER Experiment Name: At_Drought_Reproduction_P Parameter: Age (day) Value: 40
  misc_feature: MA Experiment 20001905 PARAMETER Experiment Name: At_Drought_Reproduction_P Parameter: Organism Value: A. thaliana
  misc_feature: MA Experiment 20001905 PARAMETER Experiment Name: At_Drought_Reproduction_P Parameter: Plant Line Value: WS
  misc_feature: MA Experiment 20001905 PARAMETER Experiment Name: At_Drought_Reproduction_P Parameter: Timepoint (day) Value: 10
  misc_feature: MA Experiment 20001905 PARAMETER Experiment Name: At_Drought_Reproduction_P Parameter: Tissue Value: Rosettes
  misc_feature: MA Experiment 20001905 PARAMETER Experiment Name: At_Drought_Reproduction_P Parameter: Treatment Value: Drought vs. No Drought
  misc_feature: MA Experiment ID: 20001906 Result: Up-regulated in Transcription
  misc_feature: MA Experiment 20001906 PARAMETER Experiment Name: At_Drought_Reproduction_P Parameter: Age (day) Value: 35
  misc_feature: MA Experiment 20001906 PARAMETER Experiment Name: At_Drought_Reproduction_P Parameter: Organism Value: A. thaliana
  misc_feature: MA Experiment 20001906 PARAMETER Experiment Name: At_Drought_Reproduction_P Parameter: Plant Line Value: WS
  misc_feature: MA Experiment 20001906 PARAMETER Experiment Name: At_Drought_Reproduction_P Parameter: Timepoint (day) Value: 5
  misc_feature: MA Experiment 20001906 PARAMETER Experiment Name: At_Drought_Reproduction_P Parameter: Tissue Value: Siliques
  misc_feature: MA Experiment 20001906 PARAMETER Experiment Name: At_Drought_Reproduction_P Parameter: Treatment Value: Drought vs. No Drought
  misc_feature: MA Experiment ID: 20001908 Result: Up-regulated in Transcription
  misc_feature: MA Experiment 20001908 PARAMETER Experiment Name: At_Drought_Reproduction_P Parameter: Age (day) Value: 40
  misc_feature: MA Experiment 20001908 PARAMETER Experiment Name: At_Drought_Reproduction_P Parameter: Organism Value: A. thaliana
  misc_feature: MA Experiment 20001908 PARAMETER Experiment Name: At_Drought_Reproduction_P Parameter: Plant Line Value: WS
  misc_feature: MA Experiment 20001908 PARAMETER Experiment Name: At_Drought_Reproduction_P Parameter: Timepoint (day) Value: 10
  misc_feature: MA Experiment 20001908 PARAMETER Experiment Name: At_Drought_Reproduction_P Parameter: Tissue Value: Siliques
  misc_feature: MA Experiment 20001908 PARAMETER Experiment Name: At_Drought_Reproduction_P Parameter: Treatment Value: Drought vs. No Drought
  misc_feature: MA Experiment ID: 20001910 Result: Up-regulated in Transcription
  misc_feature: MA Experiment 20001910 PARAMETER Experiment Name: At_Drought_Reproduction_P Parameter: Age (day) Value: 37
  misc_feature: MA Experiment 20001910 PARAMETER Experiment Name: At_Drought_Reproduction_P Parameter: Organism Value: A. thaliana
  misc_feature: MA Experiment 20001910 PARAMETER Experiment Name: At_Drought_Reproduction_P Parameter: Plant Line Value: WS
  misc_feature: MA Experiment 20001910 PARAMETER Experiment Name: At_Drought_Reproduction_P Parameter: Timepoint (day) Value: 7
  misc_feature: MA Experiment 20001910 PARAMETER Experiment Name: At_Drought_Reproduction_P Parameter: Tissue Value: Flowers
  misc_feature: MA Experiment 20001910 PARAMETER Experiment Name: At_Drought_Reproduction_P Parameter: Treatment Value: Drought vs. No Drought
  misc_feature: MA Experiment ID: 20001911 Result: Up-regulated in Transcription
  misc_feature: MA Experiment 20001911 PARAMETER Experiment Name: At_Drought_Reproduction_P Parameter: Age (day) Value: 40
  misc_feature: MA Experiment 20001911 PARAMETER Experiment Name: At_Drought_Reproduction_P Parameter: Organism Value: A. thaliana
  misc_feature: MA Experiment 20001911 PARAMETER Experiment Name: At_Drought_Reproduction_P Parameter: Plant Line Value: WS
  misc_feature: MA Experiment 20001911 PARAMETER Experiment Name: At_Drought_Reproduction_P Parameter: Timepoint (day) Value: 10
  misc_feature: MA Experiment 20001911 PARAMETER Experiment Name: At_Drought_Reproduction_P Parameter: Tissue Value: Flowers
  misc_feature: MA Experiment 20001911 PARAMETER Experiment Name: At_Drought_Reproduction_P Parameter: Treatment Value: Drought vs. No Drought

SEQ ID NO: 92573 - protein, 519 aa, Arabidopsis thaliana; identical to SEQ ID NO: 22364
  peptide (1)..(519): Ceres Seq. ID no. 12712706
  misc_feature (20)..(519): Homolog of NCBI NO: 15235559 NR Description: cytochrome p450 family; protein id: At4g37430.1, by cDNA: 33365., supported by cDNA: gi_14532439, supported by gi_3164143 [Arabidopsis thaliana]
  misc_feature (20)..(519): Homolog of NCBI NO: 21618274 NR Description: cytochrome P450 monooxygenase CYP91A2
  misc_feature (20)..(519): Homolog of NCBI NO: 25282605 NR Description: cytochrome P450 monooxygenase [imported] - thaliana >gi|3164144|dbj|BAA28539.1| cytochrome P450
  misc_feature (20)..(519): Homolog of NCBI NO: 18491105 NR Description: AT4g37430/F6G17_80 [Arabidopsis thaliana]
  misc_feature (20)..(503): Homolog of NCBI NO: 23397303 NR Description: putative cytochrome P450 monooxygenase (CYP91A2)
  misc_feature (22)..(517): Homolog of NCBI NO: 18420031 NR Description: cytochrome p450 family; protein id: At4g37400.1,
  misc_feature (22)..(517): Homolog of NCBI NO: 21618287 NR Description: cytochrome P450 monooxygenase-like protein
  misc_feature (24)..(518): Homolog of NCBI NO: 15242068 NR Description: cytochrome p450 family; protein id: At5g57220.1, by cDNA: gi_17528949, supported by cDNA: gi_20465950 [Arabidopsis >gi|8777355|dbj|BAA96945.1| cytochrome P450 [Arabidopsis
  misc_feature (22)..(517): Homolog of NCBI NO: 15235541 NR Description: cytochrome p450, putative; protein id: supported by cDNA: 102007. [Arabidopsis thaliana]
  misc_feature (22)..(479): Homolog of NCBI NO: 18252165 NR Description: cytochrome P450 monooxygenase - like protein

SEQ ID NO: 92574 - protein, 500 aa, Arabidopsis thaliana; identical to SEQ ID NO: 22365
  peptide (1)..(500): Ceres Seq. ID no. 12712707
  misc_feature (1)..(500): Homolog of NCBI NO: 15235559 NR Description: cytochrome p450 family; protein id: At4g37430.1, by cDNA: 33365., supported by cDNA: gi_14532439, supported by gi_3164143 [Arabidopsis thaliana]
  misc_feature (1)..(500): Homolog of NCBI NO: 21618274 NR Description: cytochrome P450 monooxygenase CYP91A2
  misc_feature (1)..(500): Homolog of NCBI NO: 25282605 NR Description: cytochrome P450 monooxygenase [imported] - thaliana >gi|3164144|dbj|BAA28539.1| cytochrome P450
  misc_feature (1)..(500): Homolog of NCBI NO: 18491105 NR Description: AT4g37430/F6G17_80 [Arabidopsis thaliana]
  misc_feature (1)..(484): Homolog of NCBI NO: 23397303 NR Description: putative cytochrome P450 monooxygenase (CYP91A2)
  misc_feature (3)..(498): Homolog of NCBI NO: 18420031 NR Description: cytochrome p450 family; protein id: At4g37400.1,
  misc_feature (3)..(498): Homolog of NCBI NO: 21618287 NR Description: cytochrome P450 monooxygenase-like protein
  misc_feature (5)..(499): Homolog of NCBI NO: 15242068 NR Description: cytochrome p450 family; protein id: At5g57220.1, by cDNA: gi_17528949, supported by cDNA: gi_20465950 [Arabidopsis >gi|8777355|dbj|BAA96945.1| cytochrome P450 [Arabidopsis
  misc_feature (3)..(498): Homolog of NCBI NO: 15235541 NR Description: cytochrome p450, putative; protein id: supported by cDNA: 102007. [Arabidopsis thaliana]
  misc_feature (3)..(460): Homolog of NCBI NO: 18252165 NR Description: cytochrome P450 monooxygenase - like protein

SEQ ID NO: 92575 - protein, 457 aa, Arabidopsis thaliana; identical to SEQ ID NO: 22366
  peptide (1)..(457): Ceres Seq. ID no. 12712708
  misc_feature (1)..(457): Homolog of NCBI NO: 15235559 NR Description: cytochrome p450 family; protein id: At4g37430.1, by cDNA: 33365., supported by cDNA: gi_14532439, supported by gi_3164143 [Arabidopsis thaliana]
  misc_feature (1)..(457): Homolog of NCBI NO: 21618274 NR Description: cytochrome P450 monooxygenase CYP91A2
  misc_feature (1)..(457): Homolog of NCBI NO: 25282605 NR Description: cytochrome P450 monooxygenase [imported] - thaliana >gi|3164144|dbj|BAA28539.1| cytochrome P450
  misc_feature (1)..(457): Homolog of NCBI NO: 18491105 NR Description: AT4g37430/F6G17_80 [Arabidopsis thaliana]
  misc_feature (1)..(441): Homolog of NCBI NO: 23397303 NR Description: putative cytochrome P450 monooxygenase (CYP91A2)
  misc_feature (1)..(455): Homolog of NCBI NO: 18420031 NR Description: cytochrome p450 family; protein id: At4g37400.1,
  misc_feature (1)..(455): Homolog of NCBI NO: 21618287 NR Description: cytochrome P450 monooxygenase-like protein
  misc_feature (1)..(456): Homolog of NCBI NO: 15242068 NR Description: cytochrome p450 family; protein id: At5g57220.1, by cDNA: gi_17528949, supported by cDNA: gi_20465950 [Arabidopsis >gi|8777355|dbj|BAA96945.1| cytochrome P450 [Arabidopsis
  misc_feature (1)..(455): Homolog of NCBI NO: 15235541 NR Description: cytochrome p450, putative; protein id: supported by cDNA: 102007. [Arabidopsis thaliana]
  misc_feature (1)..(417): Homolog of NCBI NO: 18252165 NR Description: cytochrome P450 monooxygenase - like protein

SEQ ID NO: 92576 - DNA, 1065 bp, Arabidopsis thaliana; identical to SEQ ID NO: 88820
  misc_feature (1)..(1065): Ceres Seq. ID no. 12712778
  misc_feature: MA Experiment ID: 20000166 Result: Up-regulated in Transcription
  misc_feature: MA Experiment 20000166 PARAMETER Experiment Name: At_100uM_ABA_P Parameter: Age (day) Value: 14
  misc_feature: MA Experiment 20000166 PARAMETER Experiment Name: At_100uM_ABA_P Parameter: Organism Value: A. thaliana
  misc_feature: MA Experiment 20000166 PARAMETER Experiment Name: At_100uM_ABA_P Parameter: Plant Line Value: WS
  misc_feature: MA Experiment 20000166 PARAMETER Experiment Name: At_100uM_ABA_P Parameter: Timepoint (hr) Value: 1
  misc_feature: MA Experiment 20000166 PARAMETER Experiment Name: At_100uM_ABA_P Parameter: Tissue Value: Aerial
  misc_feature: MA Experiment 20000166 PARAMETER Experiment Name: At_100uM_ABA_P Parameter: Treatment Value: 100uM ABA vs. No Treatment
  misc_feature: MA Experiment ID: 20000173 Result: Down-regulated in Transcription
  misc_feature: MA Experiment 20000173 PARAMETER Experiment Name: At_42deg_Heat_P Parameter: Age (day) Value: 14
  misc_feature: MA Experiment 20000173 PARAMETER Experiment Name: At_42deg_Heat_P Parameter: Organism Value: A. thaliana
  misc_feature: MA Experiment 20000173 PARAMETER Experiment Name: At_42deg_Heat_P Parameter: Plant Line Value: WS
  misc_feature: MA Experiment 20000173 PARAMETER Experiment Name: At_42deg_Heat_P Parameter: Temperature (deg C) Value: 42 vs. 22
  misc_feature: MA Experiment 20000173 PARAMETER Experiment Name: At_42deg_Heat_P Parameter: Timepoint (hr) Value: 6
  misc_feature: MA Experiment 20000173 PARAMETER Experiment Name: At_42deg_Heat_P Parameter: Tissue Value: Aerial
  misc_feature: MA Experiment ID: 20000182 Result: Up-regulated in Transcription
  misc_feature: MA Experiment 20000182 PARAMETER Experiment Name: At_2mM_SA_P Parameter: Age (day) Value: 14
  misc_feature: MA Experiment 20000182 PARAMETER Experiment Name: At_2mM_SA_P Parameter: Organism Value: A. thaliana
  misc_feature: MA Experiment 20000182 PARAMETER Experiment Name: At_2mM_SA_P Parameter: Plant Line Value: WS
  misc_feature: MA Experiment 20000182 PARAMETER Experiment Name: At_2mM_SA_P Parameter: Timepoint (hr) Value: 6
  misc_feature: MA Experiment 20000182 PARAMETER Experiment Name: At_2mM_SA_P Parameter: Tissue Value: Aerial
  misc_feature: MA Experiment 20000182 PARAMETER Experiment Name: At_2mM_SA_P Parameter: Treatment Value: 2mM SA vs. No Treatment
  misc_feature: MA Experiment ID: 20000184 Result: Down-regulated in Transcription
  misc_feature: MA Experiment 20000184 PARAMETER Experiment Name: At_Shoots__P Parameter: Age (day) Value: 7
  misc_feature: MA Experiment 20000184 PARAMETER Experiment Name: At_Shoots__P Parameter: Tissue Value: Shoots vs. Whole Plant
  misc_feature: MA Experiment ID: 20000185 Result: Down-regulated in Transcription
  misc_feature: MA Experiment 20000185 PARAMETER Experiment Name: At_Roots__P Parameter: Age (day) Value: 7 vs. 21
  misc_feature: MA Experiment 20000185 PARAMETER Experiment Name: At_Roots__P Parameter: Organism Value: A. thaliana
  misc_feature: MA Experiment 20000185 PARAMETER Experiment Name: At_Roots__P Parameter: Tissue Value: Roots vs. Whole Plant
  misc_feature: MA Experiment ID: 20000234 Result: Down-regulated in Transcription
  misc_feature: MA Experiment 20000234 PARAMETER Experiment Name: At_Siliques_P Parameter: Age (day) Value: 21
  misc_feature: MA Experiment 20000234 PARAMETER Experiment Name: At_Siliques_P Parameter: Organism Value: A. thaliana
  misc_feature: MA Experiment 20000234 PARAMETER Experiment Name: At_Siliques_P Parameter: Plant Line Value: WS
  misc_feature: MA Experiment 20000234 PARAMETER Experiment Name: At_Siliques_P Parameter: Tissue Value: Less Than 5mm Siliques vs. Whole Plant
  misc_feature: MA Experiment ID: 20000235 Result: Down-regulated in Transcription
  misc_feature: MA Experiment 20000235 PARAMETER Experiment Name: At_Siliques_P Parameter: Age (day) Value: 21
  misc_feature: MA Experiment 20000235 PARAMETER Experiment Name: At_Siliques_P Parameter: Organism Value: A. thaliana
  misc_feature: MA Experiment 20000235 PARAMETER Experiment Name: At_Siliques_P Parameter: Plant Line Value: WS
  misc_feature: MA Experiment 20000235 PARAMETER Experiment Name: At_Siliques_P Parameter: Tissue Value: 5-10mm Siliques vs. Whole Plant
  misc_feature: MA Experiment ID: 20000264 Result: Down-regulated in Transcription
  misc_feature: MA Experiment 20000264 PARAMETER Experiment Name: At_Open_Flower_P Parameter: Age (day) Value: 21
  misc_feature: MA Experiment 20000264 PARAMETER Experiment Name: At_Open_Flower_P Parameter: Plant Line Value: WS
  misc_feature: MA Experiment 20000264 PARAMETER Experiment Name: At_Open_Flower_P Parameter: Tissue Value: Open Flower vs. Whole Plant
  misc_feature: MA Experiment ID: 20000265 Result: Down-regulated in Transcription
  misc_feature: MA Experiment 20000265 PARAMETER Experiment Name: At_Open_Flower_P Parameter: Age (day) Value: 21
  misc_feature: MA Experiment 20000265 PARAMETER Experiment Name: At_Open_Flower_P Parameter: Plant Line Value: WS
  misc_feature: MA Experiment 20000265 PARAMETER Experiment Name: At_Open_Flower_P Parameter: Tissue Value: Closed Flower vs. Whole Plant
  misc_feature: MA Experiment ID: 20000267 Result: Up-regulated in Transcription
  misc_feature: MA Experiment 20000267 PARAMETER Experiment Name: At_Drought_P Parameter: Age (day) Value: 7
  misc_feature: MA Experiment 20000267 PARAMETER Experiment Name: At_Drought_P Parameter: Organism Value: A. thaliana
  misc_feature: MA Experiment 20000267 PARAMETER Experiment Name: At_Drought_P Parameter: Plant Line Value: WS
  misc_feature: MA Experiment 20000267 PARAMETER Experiment Name: At_Drought_P Parameter: Timepoint (hr) Value: 6
  misc_feature: MA Experiment 20000267 PARAMETER Experiment Name: At_Drought_P Parameter: Tissue Value: Whole Plant
  misc_feature: MA Experiment 20000267 PARAMETER Experiment Name: At_Drought_P Parameter: Treatment Value: Drought vs. No Drought
  misc_feature: MA Experiment ID: 20000286 Result: Down-regulated in Transcription
  misc_feature: MA Experiment 20000286 PARAMETER Experiment Name: At_Open_Flower_P Parameter: Age (day) Value: 21
  misc_feature: MA Experiment 20000286 PARAMETER Experiment Name: At_Open_Flower_P Parameter: Plant Line Value: WS
  misc_feature: MA Experiment 20000286 PARAMETER Experiment Name: At_Open_Flower_P Parameter: Tissue Value: Half Open vs. Whole Plant
  misc_feature: MA Experiment ID: 20000436 Result: Up-regulated in Transcription
  misc_feature: MA Experiment 20000436 PARAMETER Experiment Name: At_Drought_P Parameter: Age (day) Value: 7
  misc_feature: MA Experiment 20000436 PARAMETER Experiment Name: At_Drought_P Parameter: Organism Value: A. thaliana
  misc_feature: MA Experiment 20000436 PARAMETER Experiment Name: At_Drought_P Parameter: Plant Line Value: WS
  misc_feature: MA Experiment 20000436 PARAMETER Experiment Name: At_Drought_P Parameter: Timepoint (hr) Value: 12
  misc_feature: MA Experiment 20000436 PARAMETER Experiment Name: At_Drought_P Parameter: Tissue Value: Whole Plant
  misc_feature: MA Experiment 20000436 PARAMETER Experiment Name: At_Drought_P Parameter: Treatment Value: Drought vs. No Drought
  misc_feature: MA Experiment ID: 20000437 Result: Up-regulated in Transcription
  misc_feature: MA Experiment 20000437 PARAMETER Experiment Name: At_Drought_P Parameter: Age (day) Value: 8
  misc_feature: MA Experiment 20000437 PARAMETER Experiment Name: At_Drought_P Parameter: Organism Value: A. thaliana
  misc_feature: MA Experiment 20000437 PARAMETER Experiment Name: At_Drought_P Parameter: Plant Line Value: WS
  misc_feature: MA Experiment 20000437 PARAMETER Experiment Name: At_Drought_P Parameter: Timepoint (hr) Value: 24
  misc_feature: MA Experiment 20000437 PARAMETER Experiment Name: At_Drought_P Parameter: Tissue Value: Whole Plant
  misc_feature: MA Experiment 20000437 PARAMETER Experiment Name: At_Drought_P Parameter: Treatment Value: Drought vs. No Drought
  misc_feature: MA Experiment ID: 20000438 Result: Down-regulated in Transcription
  misc_feature: MA Experiment 20000438 PARAMETER Experiment Name: At_Shoots__P Parameter: Age (day) Value: 14
  misc_feature: MA Experiment 20000438 PARAMETER Experiment Name: At_Shoots__P Parameter: Tissue Value: Shoots vs. Whole Plant
  misc_feature: MA Experiment ID: 20000439 Result: Down-regulated in Transcription
  misc_feature: MA Experiment 20000439 PARAMETER Experiment Name: At_Roots__P Parameter: Age (day) Value: 14 vs. 21
  misc_feature: MA Experiment 20000439 PARAMETER Experiment Name: At_Roots__P Parameter: Organism Value: A. thaliana
  misc_feature: MA Experiment 20000439 PARAMETER Experiment Name: At_Roots__P Parameter: Tissue Value: Roots vs. Whole Plant
  misc_feature: MA Experiment ID: 20000453 Result: Up-regulated in Transcription
  misc_feature: MA Experiment 20000453 PARAMETER Experiment Name: At_100uM_ABA_P Parameter: Age (day) Value: 15
  misc_feature: MA Experiment 20000453 PARAMETER Experiment Name: At_100uM_ABA_P Parameter: Organism Value: A. thaliana
  misc_feature: MA Experiment 20000453 PARAMETER Experiment Name: At_100uM_ABA_P Parameter: Plant Line Value: WS
  misc_feature: MA Experiment 20000453 PARAMETER Experiment Name: At_100uM_ABA_P Parameter: Timepoint (hr) Value: 24
  misc_feature: MA Experiment 20000453 PARAMETER Experiment Name: At_100uM_ABA_P Parameter: Tissue Value: Aerial
  misc_feature: MA Experiment 20000453 PARAMETER Experiment Name: At_100uM_ABA_P Parameter: Treatment Value: 100uM ABA vs. No Treatment
  misc_feature: MA Experiment ID: 20000456 Result: Up-regulated in Transcription
  misc_feature: MA Experiment 20000456 PARAMETER Experiment Name: At_100uM_BA_P Parameter: Age (day) Value: 14
  misc_feature: MA Experiment 20000456 PARAMETER Experiment Name: At_100uM_BA_P Parameter: Organism Value: A. thaliana
  misc_feature: MA Experiment 20000456 PARAMETER Experiment Name: At_100uM_BA_P Parameter: Plant Line Value: WS
  misc_feature: MA Experiment 20000456 PARAMETER Experiment Name: At_100uM_BA_P Parameter: Timepoint (hr) Value: 6
  misc_feature: MA Experiment 20000456 PARAMETER Experiment Name: At_100uM_BA_P Parameter: Tissue Value: Aerial
  misc_feature: MA Experiment 20000456 PARAMETER Experiment Name: At_100uM_BA_P Parameter: Treatment Value: 100uM BA vs. No Treatment
  misc_feature: MA Experiment ID: 20000495 Result: Down-regulated in Transcription
  misc_feature: MA Experiment 20000495 PARAMETER Experiment Name: At_Guard_Cells_P Parameter: Harvest Date Value: 8/2/2002
  misc_feature: MA Experiment 20000495 PARAMETER Experiment Name: At_Guard_Cells_P Parameter: Organism Value: A. thaliana
  misc_feature: MA Experiment 20000495 PARAMETER Experiment Name: At_Guard_Cells_P Parameter: Tissue Value: Guard Cells vs. Leaves
  misc_feature: MA Experiment ID: 20000506 Result: Up-regulated in Transcription
  misc_feature: MA Experiment 20000506 PARAMETER Experiment Name: At_Wounding_P Parameter: Organism Value: A. thaliana
  misc_feature: MA Experiment 20000506 PARAMETER Experiment Name: At_Wounding_P Parameter: Plant Line Value: WS
  misc_feature: MA Experiment 20000506 PARAMETER Experiment Name: At_Wounding_P Parameter: Timepoint (hr) Value: 6
  misc_feature: MA Experiment 20000506 PARAMETER Experiment Name: At_Wounding_P Parameter: Tissue Value: Aerial
  misc_feature: MA Experiment 20000506 PARAMETER Experiment Name: At_Wounding_P Parameter: Treatment Value: Wounding vs. No Wounding
  misc_feature: MA Experiment ID: 20000794 Result: Down-regulated in Transcription
  misc_feature: MA Experiment 20000794 PARAMETER Experiment Name: At_Petals_P Parameter: Age (day) Value: 23-25 days
  misc_feature: MA Experiment 20000794 PARAMETER Experiment Name: At_Petals_P Parameter: Plant Line Value: WS
  misc_feature: MA Experiment 20000794 PARAMETER Experiment Name: At_Petals_P Parameter: Tissue Value: Petals vs. Whole plant
  misc_feature: MA Experiment ID: 20001450 Result: Up-regulated in Transcription
  misc_feature: MA Experiment 20001450 PARAMETER Experiment Name: At_Far-red-induction_P Parameter: Age (day) Value: 7
  misc_feature: MA Experiment 20001450 PARAMETER Experiment Name: At_Far-red-induction_P Parameter: Light Value: Far-red vs. White
  misc_feature: MA Experiment 20001450 PARAMETER Experiment Name: At_Far-red-induction_P Parameter: Organism Value: A. thaliana
  misc_feature: MA Experiment 20001450 PARAMETER Experiment Name: At_Far-red-induction_P Parameter: Plant Line Value: Columbia
  misc_feature: MA Experiment 20001450 PARAMETER Experiment Name: At_Far-red-induction_P Parameter: Timepoint (hr) Value: 8
  misc_feature: MA Experiment 20001450 PARAMETER Experiment Name: At_Far-red-induction_P Parameter: Tissue Value: Whole Plant
  misc_feature: MA Experiment ID: 20001554 Result: Down-regulated in Transcription
  misc_feature: MA Experiment 20001554 PARAMETER Experiment Name: At_Drought_Soil_Dry_P Parameter: Age (day) Value: 21
  misc_feature: MA Experiment 20001554 PARAMETER Experiment Name: At_Drought_Soil_Dry_P Parameter: Organism Value: A. thaliana
  misc_feature: MA Experiment 20001554 PARAMETER Experiment Name: At_Drought_Soil_Dry_P Parameter: Plant Line Value: WS
  misc_feature: MA Experiment 20001554 PARAMETER Experiment Name: At_Drought_Soil_Dry_P Parameter: Post Timepoint (hr) Value: None
  misc_feature: MA Experiment 20001554 PARAMETER Experiment Name: At_Drought_Soil_Dry_P Parameter: Post-Treatment Value: None
  misc_feature: MA Experiment 20001554 PARAMETER Experiment Name: At_Drought_Soil_Dry_P Parameter: Timepoint (day) Value: 7
  misc_feature: MA Experiment 20001554 PARAMETER Experiment Name: At_Drought_Soil_Dry_P Parameter: Treatment Value: Drought vs. No Drought

SEQ ID NO: 92577 - protein, 354 aa, Arabidopsis thaliana; identical to SEQ ID NO: 88821
  peptide (1)..(354): Ceres Seq. ID no. 12712779
  misc_feature (1)..(354): Homolog of NCBI NO: 15234344 NR Description: protein kinase - like protein; protein id: [Arabidopsis thaliana] >gi|7488275|pir||T09348 protein kinase
  misc_feature (1)..(354): Homolog of NCBI NO: 30681932 NR Description: protein kinase family [Arabidopsis thaliana] putative protein kinase [Arabidopsis thaliana]
  misc_feature (10)..(353): Homolog of NCBI NO: 4008012 NR Description: receptor-like protein kinase [Arabidopsis
  misc_feature (10)..(353): Homolog of NCBI NO: 15236444 NR Description: protein kinase - like protein; protein id:
  misc_feature (1)..(346): Homolog of NCBI NO: 4530126 NR Description: receptor-like protein kinase homolog RK20-1
  misc_feature (12)..(353): Homolog of NCBI NO: 22655168 NR Description: protein kinase-like protein [Arabidopsis thaliana]
  misc_feature (6)..(320): Homolog of NCBI NO: 19699091 NR Description: AT4g23250/F21P8_140 [Arabidopsis thaliana]
  misc_feature (6)..(320): Homolog of NCBI NO: 22328880 NR Description: putative protein; protein id: At4g23260.1,
  misc_feature (30)..(321): Homolog of NCBI NO: 15233525 NR Description: putative receptor-like protein kinase; protein id:
  misc_feature (10)..(321): Homolog of NCBI NO: 18076585 NR Description: putative receptor-like serine-threonine protein

SEQ ID NO: 92578 - protein, 239 aa, Arabidopsis thaliana; identical to SEQ ID NO: 69755
  peptide (1)..(239): Ceres Seq. ID no. 12712780
  misc_feature (1)..(239): Homolog of NCBI NO: 15234344 NR Description: protein kinase - like protein; protein id: [Arabidopsis thaliana] >gi|7488275|pir||T09348 protein kinase
  misc_feature (1)..(239): Homolog of NCBI NO: 30681932 NR Description: protein kinase family [Arabidopsis thaliana] putative protein kinase [Arabidopsis thaliana]
  misc_feature (1)..(238): Homolog of NCBI NO: 4008012 NR Description: receptor-like protein kinase [Arabidopsis
  misc_feature (1)..(238): Homolog of NCBI NO: 15236444 NR Description: protein kinase - like protein; protein id:
  misc_feature (1)..(231): Homolog of NCBI NO: 4530126 NR Description: receptor-like protein kinase homolog RK20-1
  misc_feature (1)..(238): Homolog of NCBI NO: 22655168 NR Description: protein kinase-like protein [Arabidopsis thaliana]
  misc_feature (1)..(205): Homolog of NCBI NO: 19699091 NR Description: AT4g23250/F21P8_140 [Arabidopsis thaliana]
  misc_feature (1)..(205): Homolog of NCBI NO: 22328880 NR Description: putative protein; protein id: At4g23260.1,
  misc_feature (1)..(206): Homolog of NCBI NO: 15233525 NR Description: putative receptor-like protein kinase; protein id:
  misc_feature (1)..(206): Homolog of NCBI NO: 18076585 NR Description: putative receptor-like serine-threonine protein

SEQ ID NO: 92579 - protein, 217 aa, Arabidopsis thaliana; identical to SEQ ID NO: 69756
  peptide (1)..(217): Ceres Seq. ID no. 12712781
  misc_feature (1)..(217): Homolog of NCBI NO: 15234344 NR Description: protein kinase - like protein; protein id: [Arabidopsis thaliana] >gi|7488275|pir||T09348 protein kinase
  misc_feature (1)..(217): Homolog of NCBI NO: 30681932 NR Description: protein kinase family [Arabidopsis thaliana] putative protein kinase [Arabidopsis thaliana]
  misc_feature (1)..(216): Homolog of NCBI NO: 4008012 NR Description: receptor-like protein kinase [Arabidopsis
  misc_feature (1)..(216): Homolog of NCBI NO: 15236444 NR Description: protein kinase - like protein; protein id:
  misc_feature (1)..(209): Homolog of NCBI NO: 4530126 NR Description: receptor-like protein kinase homolog RK20-1
  misc_feature (1)..(216): Homolog of NCBI NO: 22655168 NR Description: protein kinase-like protein [Arabidopsis thaliana]
  misc_feature (1)..(183): Homolog of NCBI NO: 19699091 NR Description: AT4g23250/F21P8_140 [Arabidopsis thaliana]
  misc_feature (1)..(183): Homolog of NCBI NO: 22328880 NR Description: putative protein; protein id: At4g23260.1,
  misc_feature (1)..(184): Homolog of NCBI NO: 15233525 NR Description: putative receptor-like protein kinase; protein id:
  misc_feature (1)..(184): Homolog of NCBI NO: 18076585 NR Description: putative receptor-like serine-threonine protein

SEQ ID NO: 92580 - DNA, 5487 bp, Arabidopsis thaliana; identical to SEQ ID NO: 88824
  misc_feature (1)..(5487): Ceres Seq. ID no. 12712790
  misc_feature: MA Experiment ID: 20000184 Result: Down-regulated in Transcription
  misc_feature: MA Experiment 20000184 PARAMETER Experiment Name: At_Shoots__P Parameter: Age (day) Value: 7
  misc_feature: MA Experiment 20000184 PARAMETER Experiment Name: At_Shoots__P Parameter: Tissue Value: Shoots vs. Whole Plant
  misc_feature: MA Experiment ID: 20000185 Result: Up-regulated in Transcription
  misc_feature: MA Experiment 20000185 PARAMETER Experiment Name: At_Roots__P Parameter: Age (day) Value: 7 vs. 21
  misc_feature: MA Experiment 20000185 PARAMETER Experiment Name: At_Roots__P Parameter: Organism Value: A. thaliana
  misc_feature: MA Experiment 20000185 PARAMETER Experiment Name: At_Roots__P Parameter: Tissue Value: Roots vs. Whole Plant
  misc_feature: MA Experiment ID: 20000437 Result: Up-regulated in Transcription
  misc_feature: MA Experiment 20000437 PARAMETER Experiment Name: At_Drought_P Parameter: Age (day) Value: 8
  misc_feature: MA Experiment 20000437 PARAMETER Experiment Name: At_Drought_P Parameter: Organism Value: A. thaliana
  misc_feature: MA Experiment 20000437 PARAMETER Experiment Name: At_Drought_P Parameter: Plant Line Value: WS
  misc_feature: MA Experiment 20000437 PARAMETER Experiment Name: At_Drought_P Parameter: Timepoint (hr) Value: 24
  misc_feature: MA Experiment 20000437 PARAMETER Experiment Name: At_Drought_P Parameter: Tissue Value: Whole Plant
  misc_feature: MA Experiment 20000437 PARAMETER Experiment Name: At_Drought_P Parameter: Treatment Value: Drought vs. No Drought
  misc_feature: MA Experiment ID: 20000439 Result: Up-regulated in Transcription
  misc_feature: MA Experiment 20000439 PARAMETER Experiment Name: At_Roots__P Parameter: Age (day) Value: 14 vs. 21
  misc_feature: MA Experiment 20000439 PARAMETER Experiment Name: At_Roots__P Parameter: Organism Value: A. thaliana
  misc_feature: MA Experiment 20000439 PARAMETER Experiment Name: At_Roots__P Parameter: Tissue Value: Roots vs. Whole Plant

SEQ ID NO: 92581 - protein, 1828 aa, Arabidopsis thaliana; identical to SEQ ID NO: 88825
  peptide (1)..(1828): Ceres Seq. ID no. 12712791
  misc_feature (1559)..(1810): Pfam Name: Protein kinase domain Pfam Description: Protein kinase domain
  misc_feature (1406)..(1827): Homolog of NCBI NO: 1255448 NR Description: mitogen-activated protein kinase [Arabidopsis
  misc_feature (1406)..(1827): Homolog of NCBI NO: 15236515 NR Description: MEKK1/MAP kinase kinase kinase; protein id: supported by cDNA: gi_1255447, supported by cDNA: gi_17064765
  misc_feature (1406)..(1827): Homolog of NCBI NO: 17064766 NR Description: Unknown protein [Arabidopsis thaliana]
  misc_feature (1460)..(1827): Homolog of NCBI NO: 15236511 NR Description: putative mitogen-activated protein kinase;
  misc_feature (1406)..(1475): Homolog of NCBI NO: 15236511 NR Description: putative mitogen-activated protein kinase;
  misc_feature (1413)..(1475): Homolog of NCBI NO: 15236511 NR Description: putative mitogen-activated protein kinase;
  misc_feature (1397)..(1820): Homolog of NCBI NO: 3688209 NR Description: MAP3K beta 1 protein kinase [Brassica napus]
  misc_feature (1556)..(1810): Homolog of NCBI NO: 15236509 NR Description: putative mitogen-activated protein kinase;
  misc_feature (1556)..(1810): Homolog of NCBI NO: 28393793 NR Description: putative mitogen-activated protein kinase
  misc_feature (1440)..(1578): Homolog of NCBI NO: 15236509 NR Description: putative mitogen-activated protein kinase;

SEQ ID NO: 92582 - protein, 1660 aa, Arabidopsis thaliana; identical to SEQ ID NO: 88826
  peptide (1)..(1660): Ceres Seq. ID no. 12712792
  misc_feature (1391)..(1642): Pfam Name: Protein kinase domain Pfam Description: Protein kinase domain
  misc_feature (1238)..(1659): Homolog of NCBI NO: 1255448 NR Description: mitogen-activated protein kinase [Arabidopsis
  misc_feature (1238)..(1659): Homolog of NCBI NO: 15236515 NR Description: MEKK1/MAP kinase kinase kinase; protein id: supported by cDNA: gi_1255447, supported by cDNA: gi_17064765
  misc_feature (1238)..(1659): Homolog of NCBI NO: 17064766 NR Description: Unknown protein [Arabidopsis thaliana]
  misc_feature (1292)..(1659): Homolog of NCBI NO: 15236511 NR Description: putative mitogen-activated protein kinase;
  misc_feature (1238)..(1307): Homolog of NCBI NO: 15236511 NR Description: putative mitogen-activated protein kinase;
  misc_feature (1245)..(1307): Homolog of NCBI NO: 15236511 NR Description: putative mitogen-activated protein kinase;
  misc_feature (1229)..(1652): Homolog of NCBI NO: 3688209 NR Description: MAP3K beta 1 protein kinase [Brassica napus]
  misc_feature (1388)..(1642): Homolog of NCBI NO: 15236509 NR Description: putative mitogen-activated protein kinase;
  misc_feature (1388)..(1642): Homolog of NCBI NO: 28393793 NR Description: putative mitogen-activated protein kinase
  misc_feature (1272)..(1410): Homolog of NCBI NO: 15236509 NR Description: putative mitogen-activated protein kinase;

SEQ ID NO: 92583 - protein, 1614 aa, Arabidopsis thaliana; identical to SEQ ID NO: 88827
  peptide (1)..(1614): Ceres Seq. ID no. 12712793
  misc_feature (1345)..(1596): Pfam Name: Protein kinase domain Pfam Description: Protein kinase domain
  misc_feature (1192)..(1613): Homolog of NCBI NO: 1255448 NR Description: mitogen-activated protein kinase [Arabidopsis
  misc_feature (1192)..(1613): Homolog of NCBI NO: 15236515 NR Description: MEKK1/MAP kinase kinase kinase; protein id: supported by cDNA: gi_1255447, supported by cDNA: gi_17064765
  misc_feature (1192)..(1613): Homolog of NCBI NO: 17064766 NR Description: Unknown protein [Arabidopsis thaliana]
  misc_feature (1246)..(1613): Homolog of NCBI NO: 15236511 NR Description: putative mitogen-activated protein kinase;
  misc_feature (1192)..(1261): Homolog of NCBI NO: 15236511 NR Description: putative mitogen-activated protein kinase;
  misc_feature (1199)..(1261): Homolog of NCBI NO: 15236511 NR Description: putative mitogen-activated protein kinase;
  misc_feature (1183)..(1606): Homolog of NCBI NO: 3688209 NR Description: MAP3K beta 1 protein kinase [Brassica napus]
  misc_feature (1342)..(1596): Homolog of NCBI NO: 15236509 NR Description: putative mitogen-activated protein kinase;
  misc_feature (1342)..(1596): Homolog of NCBI NO: 28393793 NR Description: putative mitogen-activated protein kinase
  misc_feature (1226)..(1364): Homolog of NCBI NO: 15236509 NR Description: putative mitogen-activated protein kinase;

SEQ ID NO: 92584 - DNA, 390 bp, Arabidopsis thaliana; identical to SEQ ID NO: 88828
  misc_feature (1)..(390): Ceres Seq. ID no. 12712862
  misc_feature: MA Experiment ID: 20000314 Result: Up-regulated in Transcription
  misc_feature: MA Experiment 20000314 PARAMETER Experiment Name: At_14day_Shoots-Roots_Sub_P Parameter: Age (day) Value: 14
  misc_feature: MA Experiment 20000314 PARAMETER Experiment Name: At_14day_Shoots-Roots_Sub_P Parameter: Organism Value: A. thaliana
  misc_feature: MA Experiment 20000314 PARAMETER Experiment Name: At_14day_Shoots-Roots_Sub_P Parameter: Plant Line Value: WS
  misc_feature: MA Experiment 20000314 PARAMETER Experiment Name: At_14day_Shoots-Roots_Sub_P Parameter: Tissue Value: Roots vs. Whole Plant

SEQ ID NO: 92585 - protein, 129 aa, Arabidopsis thaliana; identical to SEQ ID NO: 83969
  peptide (1)..(129): Ceres Seq. ID no. 12712863
  misc_feature (46)..(128): Pfam Name: Protease inhibitor/seed storage/LTP family Pfam Description: Protease inhibitor/seed storage/LTP family
  misc_feature (1)..(129): Homolog of NCBI NO: 18413820 NR Description: pEARLI 1-like protein; protein id: At4g12510.1
  misc_feature (1)..(129): Homolog of NCBI NO: 7484770 NR Description: extensin like protein - black poplar extensin like protein [Populus nigra] >gi|1199774|dbj|BAA11855.1|
  misc_feature (1)..(128): Homolog of NCBI NO: 10798758 NR Description: P-rich protein Nt-SubC29 [Nicotiana tabacum]
  misc_feature (1)..(123): Homolog of NCBI NO: 21360370 NR Description: extensin-like protein [Citrus junos]
  misc_feature (6)..(128): Homolog of NCBI NO: 15221201 NR Description: pEARLI 1-like protein; protein id: At1g12090.1, by cDNA: 5712., supported by cDNA: gi_16648817, supported by
  misc_feature (1)..(129): Homolog of NCBI NO: 4454097 NR Description: hybrid proline-rich protein [Catharanthus roseus]
  misc_feature (1)..(129): Homolog of NCBI NO: 481236 NR Description: hypothetical protein - Madagascar periwinkle

SEQ ID NO: 92586 - DNA, 1728 bp, Arabidopsis thaliana; identical to SEQ ID NO: 88830
  misc_feature (1)..(1728): Ceres Seq. ID no. 12712883
  misc_feature: MA Experiment ID: 20000265 Result: Up-regulated in Transcription
  misc_feature: MA Experiment 20000265 PARAMETER Experiment Name: At_Open_Flower_P Parameter: Age (day) Value: 21
  misc_feature: MA Experiment 20000265 PARAMETER Experiment Name: At_Open_Flower_P Parameter: Plant Line Value: WS
  misc_feature: MA Experiment 20000265 PARAMETER Experiment Name: At_Open_Flower_P Parameter: Tissue Value: Closed Flower vs. Whole Plant
  misc_feature: MA Experiment ID: 20000437 Result: Up-regulated in Transcription
  misc_feature: MA Experiment 20000437 PARAMETER Experiment Name: At_Drought_P Parameter: Age (day) Value: 8
  misc_feature: MA Experiment 20000437 PARAMETER Experiment Name: At_Drought_P Parameter: Organism Value: A. thaliana
  misc_feature: MA Experiment 20000437 PARAMETER Experiment Name: At_Drought_P Parameter: Plant Line Value: WS
  misc_feature: MA Experiment 20000437 PARAMETER Experiment Name: At_Drought_P Parameter: Timepoint (hr) Value: 24
  misc_feature: MA Experiment 20000437 PARAMETER Experiment Name: At_Drought_P Parameter: Tissue Value: Whole Plant
  misc_feature: MA Experiment 20000437 PARAMETER Experiment Name: At_Drought_P Parameter: Treatment Value: Drought vs. No Drought
  misc_feature: MA Experiment ID: 20000794 Result: Up-regulated in Transcription
  misc_feature: MA Experiment 20000794 PARAMETER Experiment Name: At_Petals_P Parameter: Age (day) Value: 23-25 days
  misc_feature: MA Experiment 20000794 PARAMETER Experiment Name: At_Petals_P Parameter: Plant Line Value: WS
  misc_feature: MA Experiment 20000794 PARAMETER Experiment Name: At_Petals_P Parameter: Tissue Value: Petals vs. Whole plant
  misc_feature: MA Experiment ID: 20001911 Result: Up-regulated in Transcription
  misc_feature: MA Experiment 20001911 PARAMETER Experiment Name: At_Drought_Reproduction_P Parameter: Age (day) Value: 40
  misc_feature: MA Experiment 20001911 PARAMETER Experiment Name: At_Drought_Reproduction_P Parameter: Organism Value: A. thaliana
  misc_feature: MA Experiment 20001911 PARAMETER Experiment Name: At_Drought_Reproduction_P Parameter: Plant Line Value: WS
  misc_feature: MA Experiment 20001911 PARAMETER Experiment Name: At_Drought_Reproduction_P Parameter: Timepoint (day) Value: 10
  misc_feature: MA Experiment 20001911 PARAMETER Experiment Name: At_Drought_Reproduction_P Parameter: Tissue Value: Flowers
  misc_feature: MA Experiment 20001911 PARAMETER Experiment Name: At_Drought_Reproduction_P Parameter: Treatment Value: Drought vs. No Drought

SEQ ID NO: 92587 - protein, 575 aa, Arabidopsis thaliana; identical to SEQ ID NO: 88831
  peptide (1)..(575): Ceres Seq. ID no. 12712884
  misc_feature (1)..(575): Homolog of NCBI NO: 15235450 NR Description: putative protein; protein id: At4g12680.1
  misc_feature (1)..(550): Homolog of NCBI NO: 38345330 NR Description: OSJNBa0081L15.3 [Oryza sativa (japonica
  misc_feature (1)..(536): Homolog of NCBI NO: 9758091 NR Description: dbj|BAA95714.1~gene_id:MNF13.19~strong similarity
  misc_feature (1)..(536): Homolog of NCBI NO: 30693640 NR Description: expressed protein [Arabidopsis thaliana] unknown protein [Arabidopsis thaliana]
  misc_feature (1)..(536): Homolog of NCBI NO: 27311557 NR Description: Unknown protein [Arabidopsis thaliana]
  misc_feature (1)..(536): Homolog of NCBI NO: 30688768 NR Description: expressed protein [Arabidopsis thaliana]
  misc_feature (15)..(546): Homolog of NCBI NO: 38344840 NR Description: OSJNBa0064H22.21 [Oryza sativa (japonica
  misc_feature (15)..(511): Homolog of NCBI NO: 15234594 NR Description: hypothetical protein; protein id: At4g37030.1
  misc_feature (99)..(404): Homolog of NCBI NO: 7939511 NR Description: emb|CAB40985.1~gene_id:K1G2.10~similar to unknown
  misc_feature (364)..(536): Homolog of NCBI NO: 7939511 NR Description: emb|CAB40985.1~gene_id:K1G2.10~similar to unknown

SEQ ID NO: 92588 - protein, 463 aa, Arabidopsis thaliana; identical to SEQ ID NO: 88832
  peptide (1)..(463): Ceres Seq. ID no. 12712885
  misc_feature (1)..(463): Homolog of NCBI NO: 15235450 NR Description: putative protein; protein id: At4g12680.1
  misc_feature (1)..(438): Homolog of NCBI NO: 38345330 NR Description: OSJNBa0081L15.3 [Oryza sativa (japonica
  misc_feature (1)..(424): Homolog of NCBI NO: 9758091 NR Description: dbj|BAA95714.1~gene_id:MNF13.19~strong similarity
  misc_feature (1)..(424): Homolog of NCBI NO: 30693640 NR Description: expressed protein [Arabidopsis thaliana] unknown protein [Arabidopsis thaliana]
  misc_feature (1)..(424): Homolog of NCBI NO: 27311557 NR Description: Unknown protein [Arabidopsis thaliana]
  misc_feature (1)..(424): Homolog of NCBI NO: 30688768 NR Description: expressed protein [Arabidopsis thaliana]
  misc_feature (1)..(434): Homolog of NCBI NO: 38344840 NR Description: OSJNBa0064H22.21 [Oryza sativa (japonica
  misc_feature (1)..(399): Homolog of NCBI NO: 15234594 NR Description: hypothetical protein; protein id: At4g37030.1
  misc_feature (1)..(292): Homolog of NCBI NO: 7939511 NR Description: emb|CAB40985.1~gene_id:K1G2.10~similar to unknown
  misc_feature (252)..(424): Homolog of NCBI NO: 7939511 NR Description: emb|CAB40985.1~gene_id:K1G2.10~similar to unknown

SEQ ID NO: 92589 - protein, 415 aa, Arabidopsis thaliana; identical to SEQ ID NO: 84462
  peptide (1)..(415): Ceres Seq. ID no. 12712886
  misc_feature (1)..(415): Homolog of NCBI NO: 15235450 NR Description: putative protein; protein id: At4g12680.1
  misc_feature (1)..(390): Homolog of NCBI NO: 38345330 NR Description: OSJNBa0081L15.3 [Oryza sativa (japonica
  misc_feature (1)..(376): Homolog of NCBI NO: 9758091 NR Description: dbj|BAA95714.1~gene_id:MNF13.19~strong similarity
  misc_feature (1)..(376): Homolog of NCBI NO: 30693640 NR Description: expressed protein [Arabidopsis thaliana] unknown protein [Arabidopsis thaliana]
  misc_feature (1)..(376): Homolog of NCBI NO: 27311557 NR Description: Unknown protein [Arabidopsis thaliana]
  misc_feature (1)..(376): Homolog of NCBI NO: 30688768 NR Description: expressed protein [Arabidopsis thaliana]
  misc_feature (1)..(386): Homolog of NCBI NO: 38344840 NR Description: OSJNBa0064H22.21 [Oryza sativa (japonica
  misc_feature (1)..(351): Homolog of NCBI NO: 15234594 NR Description: hypothetical protein; protein id: At4g37030.1
  misc_feature (1)..(244): Homolog of NCBI NO: 7939511 NR Description: emb|CAB40985.1~gene_id:K1G2.10~similar to unknown
  misc_feature (204)..(376): Homolog of NCBI NO: 7939511 NR Description: emb|CAB40985.1~gene_id:K1G2.10~similar to unknown

SEQ ID NO: 92590 - DNA, 1133 bp, Arabidopsis thaliana; identical to SEQ ID NO: 88834
  misc_feature (1)..(1133): Ceres Seq. ID no. 12712887
  misc_feature: MA Experiment ID: 20000182 Result: Down-regulated in Transcription
  misc_feature: MA Experiment 20000182 PARAMETER Experiment Name: At_2mM_SA_P Parameter: Age (day) Value: 14
  misc_feature: MA Experiment 20000182 PARAMETER Experiment Name: At_2mM_SA_P Parameter: Organism Value: A. thaliana
  misc_feature: MA Experiment 20000182 PARAMETER Experiment Name: At_2mM_SA_P Parameter: Plant Line Value: WS
  misc_feature: MA Experiment 20000182 PARAMETER Experiment Name: At_2mM_SA_P Parameter: Timepoint (hr) Value: 6
  misc_feature: MA Experiment 20000182 PARAMETER Experiment Name: At_2mM_SA_P Parameter: Tissue Value: Aerial
  misc_feature: MA Experiment 20000182 PARAMETER Experiment Name: At_2mM_SA_P Parameter: Treatment Value: 2mM SA vs. No Treatment
  misc_feature: MA Experiment ID: 20000184 Result: Up-regulated in Transcription
  misc_feature: MA Experiment 20000184 PARAMETER Experiment Name: At_Shoots__P Parameter: Age (day) Value: 7
  misc_feature: MA Experiment 20000184 PARAMETER Experiment Name: At_Shoots__P Parameter: Tissue Value: Shoots vs. Whole Plant
  misc_feature: MA Experiment ID: 20000234 Result: Down-regulated in Transcription
  misc_feature: MA Experiment 20000234 PARAMETER Experiment Name: At_Siliques_P Parameter: Age (day) Value: 21
  misc_feature: MA Experiment 20000234 PARAMETER Experiment Name: At_Siliques_P Parameter: Organism Value: A. thaliana
  misc_feature: MA Experiment 20000234 PARAMETER Experiment Name: At_Siliques_P Parameter: Plant Line Value: WS
  misc_feature: MA Experiment 20000234 PARAMETER Experiment Name: At_Siliques_P Parameter: Tissue Value: Less Than 5mm Siliques vs. Whole Plant
  misc_feature: MA Experiment ID: 20000235 Result: Down-regulated in Transcription
  misc_feature: MA Experiment 20000235 PARAMETER Experiment Name: At_Siliques_P Parameter: Age (day) Value: 21
  misc_feature: MA Experiment 20000235 PARAMETER Experiment Name: At_Siliques_P Parameter: Organism Value: A. thaliana
  misc_feature: MA Experiment 20000235 PARAMETER Experiment Name: At_Siliques_P Parameter: Plant Line Value: WS
  misc_feature: MA Experiment 20000235 PARAMETER Experiment Name: At_Siliques_P Parameter: Tissue Value: 5-10mm Siliques vs. Whole Plant
  misc_feature: MA Experiment ID: 20000264 Result: Down-regulated in Transcription
  misc_feature: MA Experiment 20000264 PARAMETER Experiment Name: At_Open_Flower_P Parameter: Age (day) Value: 21
  misc_feature: MA Experiment 20000264 PARAMETER Experiment Name: At_Open_Flower_P Parameter: Plant Line Value: WS
  misc_feature: MA Experiment 20000264 PARAMETER Experiment Name: At_Open_Flower_P Parameter: Tissue Value: Open Flower vs. Whole Plant
  misc_feature: MA Experiment ID: 20000265 Result: Down-regulated in Transcription
  misc_feature: MA Experiment 20000265 PARAMETER Experiment Name: At_Open_Flower_P Parameter: Age (day) Value: 21
  misc_feature: MA Experiment 20000265 PARAMETER Experiment Name: At_Open_Flower_P Parameter: Plant Line Value: WS
  misc_feature: MA Experiment 20000265 PARAMETER Experiment Name: At_Open_Flower_P Parameter: Tissue Value: Closed Flower vs. Whole Plant
  misc_feature: MA Experiment ID: 20000308 Result: Down-regulated in Transcription
  misc_feature: MA Experiment 20000308 PARAMETER Experiment Name: At_100mM_NaCl__P Parameter: Age (day) Value: 17
  misc_feature: MA Experiment 20000308 PARAMETER Experiment Name: At_100mM_NaCl__P Parameter: Organism Value: A. thaliana
  misc_feature: MA Experiment 20000308 PARAMETER Experiment Name: At_100mM_NaCl__P Parameter: Plant Line Value: WS
  misc_feature: MA Experiment 20000308 PARAMETER Experiment Name: At_100mM_NaCl__P Parameter: Timepoint (hr) Value: 72
  misc_feature: MA Experiment 20000308 PARAMETER Experiment Name: At_100mM_NaCl__P Parameter: Tissue Value: Whole Plant
  misc_feature: MA Experiment 20000308 PARAMETER Experiment Name: At_100mM_NaCl__P Parameter: Treatment Value: 100mM NaCl vs. No Treatment
  misc_feature: MA Experiment ID: 20001247 Result: Up-regulated in Transcription
  misc_feature: MA Experiment 20001247 PARAMETER Experiment Name: At_Far-red-induction_P Parameter: Age (day) Value: 7
  misc_feature: MA Experiment 20001247 PARAMETER Experiment Name: At_Far-red-induction_P Parameter: Light Value: Far-red vs. White
  misc_feature: MA Experiment 20001247 PARAMETER Experiment Name: At_Far-red-induction_P Parameter: Organism Value: A. thaliana
  misc_feature: MA Experiment 20001247 PARAMETER Experiment Name: At_Far-red-induction_P Parameter: Plant Line Value: Columbia
  misc_feature: MA Experiment 20001247 PARAMETER Experiment Name: At_Far-red-induction_P Parameter: Timepoint (hr) Value: 1
  misc_feature: MA Experiment 20001247 PARAMETER Experiment Name: At_Far-red-induction_P Parameter: Tissue Value: Whole Plant
  misc_feature: MA Experiment ID: 20001450 Result: Up-regulated in Transcription
  misc_feature: MA Experiment 20001450 PARAMETER Experiment Name: At_Far-red-induction_P Parameter: Age (day) Value: 7
  misc_feature: MA Experiment 20001450 PARAMETER Experiment Name: At_Far-red-induction_P Parameter: Light Value: Far-red vs. White
  misc_feature: MA Experiment 20001450 PARAMETER Experiment Name: At_Far-red-induction_P Parameter: Organism Value: A. thaliana
  misc_feature: MA Experiment 20001450 PARAMETER Experiment Name: At_Far-red-induction_P Parameter: Plant Line Value: Columbia
  misc_feature: MA Experiment 20001450 PARAMETER Experiment Name: At_Far-red-induction_P Parameter: Timepoint (hr) Value: 8
  misc_feature: MA Experiment 20001450 PARAMETER Experiment Name: At_Far-red-induction_P Parameter: Tissue Value: Whole Plant
  misc_feature: MA Experiment ID: 20001451 Result: Up-regulated in Transcription
  misc_feature: MA Experiment 20001451 PARAMETER Experiment Name: At_Far-red-induction_P Parameter: Age (day) Value: 7
  misc_feature: MA Experiment 20001451 PARAMETER Experiment Name: At_Far-red-induction_P Parameter: Light Value: Far-red vs. White
  misc_feature: MA Experiment 20001451 PARAMETER Experiment Name: At_Far-red-induction_P Parameter: Organism Value: A. thaliana
  misc_feature: MA Experiment 20001451 PARAMETER Experiment Name: At_Far-red-induction_P Parameter: Plant Line Value: Columbia
  misc_feature: MA Experiment 20001451 PARAMETER Experiment Name: At_Far-red-induction_P Parameter: Timepoint (hr) Value: 24
  misc_feature: MA Experiment 20001451 PARAMETER Experiment Name: At_Far-red-induction_P Parameter: Tissue Value: Whole Plant
  misc_feature: MA Experiment ID: 20001555 Result: Down-regulated in Transcription
  misc_feature: MA Experiment 20001555 PARAMETER Experiment Name: At_Drought_Soil_Dry_P Parameter: Age (day) Value: 24
  misc_feature: MA Experiment 20001555 PARAMETER Experiment Name: At_Drought_Soil_Dry_P Parameter: Organism Value: A. thaliana
  misc_feature: MA Experiment 20001555 PARAMETER Experiment Name: At_Drought_Soil_Dry_P Parameter: Plant Line Value: WS
  misc_feature: MA Experiment 20001555 PARAMETER Experiment Name: At_Drought_Soil_Dry_P Parameter: Post Timepoint (hr) Value: None
  misc_feature: MA Experiment 20001555 PARAMETER Experiment Name: At_Drought_Soil_Dry_P Parameter: Post-Treatment Value: None
  misc_feature: MA Experiment 20001555 PARAMETER Experiment Name: At_Drought_Soil_Dry_P Parameter: Timepoint (day) Value: 10
  misc_feature: MA Experiment 20001555 PARAMETER Experiment Name: At_Drought_Soil_Dry_P Parameter: Treatment Value: Drought vs. No Drought
  misc_feature: MA Experiment ID: 20001556 Result: Down-regulated in Transcription
  misc_feature: MA Experiment 20001556 PARAMETER Experiment Name: At_Drought_Soil_Dry_P Parameter: Age (day) Value: 26
  misc_feature: MA Experiment 20001556 PARAMETER Experiment Name: At_Drought_Soil_Dry_P Parameter: Organism Value: A. thaliana
  misc_feature: MA Experiment 20001556 PARAMETER Experiment Name: At_Drought_Soil_Dry_P Parameter: Plant Line Value: WS
  misc_feature: MA Experiment 20001556 PARAMETER Experiment Name: At_Drought_Soil_Dry_P Parameter: Post Timepoint (hr) Value: None
  misc_feature: MA Experiment 20001556 PARAMETER Experiment Name: At_Drought_Soil_Dry_P Parameter: Post-Treatment Value: None
  misc_feature: MA Experiment 20001556 PARAMETER Experiment Name: At_Drought_Soil_Dry_P Parameter: Timepoint (day) Value: 12
  misc_feature: MA Experiment 20001556 PARAMETER Experiment Name: At_Drought_Soil_Dry_P Parameter: Treatment Value: Drought vs. No Drought
  misc_feature: MA Experiment ID: 20001558 Result: Down-regulated in Transcription
  misc_feature: MA Experiment 20001558 PARAMETER Experiment Name: At_Drought_Soil_Dry_P Parameter: Age (day) Value: 27
  misc_feature: MA Experiment 20001558 PARAMETER Experiment Name: At_Drought_Soil_Dry_P Parameter: Organism Value: A. thaliana
  misc_feature: MA Experiment 20001558 PARAMETER Experiment Name: At_Drought_Soil_Dry_P Parameter: Plant Line Value: WS
  misc_feature: MA Experiment 20001558 PARAMETER Experiment Name: At_Drought_Soil_Dry_P Parameter: Post Timepoint (hr) Value: 6
  misc_feature: MA Experiment 20001558 PARAMETER Experiment Name: At_Drought_Soil_Dry_P Parameter: Post-Treatment Value: Re-Water vs. No Drought
  misc_feature: MA Experiment 20001558 PARAMETER Experiment Name: At_Drought_Soil_Dry_P Parameter: Timepoint (day) Value: 13
  misc_feature: MA Experiment 20001558 PARAMETER Experiment Name: At_Drought_Soil_Dry_P Parameter: Treatment Value: Drought vs. No Drought
  misc_feature: MA Experiment ID: 20001904 Result: Down-regulated in Transcription
  misc_feature: MA Experiment 20001904 PARAMETER Experiment Name: At_Drought_Reproduction_P Parameter: Age (day) Value: 37
  misc_feature: MA Experiment 20001904 PARAMETER Experiment Name: At_Drought_Reproduction_P Parameter: Organism Value: A. thaliana
  misc_feature: MA Experiment 20001904 PARAMETER Experiment Name: At_Drought_Reproduction_P Parameter: Plant Line Value: WS
  misc_feature: MA Experiment 20001904 PARAMETER Experiment Name: At_Drought_Reproduction_P Parameter: Timepoint (day) Value: 7
  misc_feature: MA Experiment 20001904 PARAMETER Experiment Name: At_Drought_Reproduction_P Parameter: Tissue Value: Rosettes
  misc_feature: MA Experiment 20001904 PARAMETER Experiment Name: At_Drought_Reproduction_P Parameter: Treatment Value: Drought vs. No Drought

SEQ ID NO: 92591 - protein, 285 aa, Arabidopsis thaliana; identical to SEQ ID NO: 29057
  peptide (1)..(285): Ceres Seq. ID no. 12712888
  misc_feature (20)..(284): Pfam Name: Plant protein of unknown function (DUF868) Pfam Description: Plant protein of unknown function (DUF868)
  misc_feature (1)..(285): Homolog of NCBI NO: 15235452 NR Description: putative protein; protein id: At4g12690.1, by cDNA: 12923. [Arabidopsis thaliana] >gi|7459232|pir||T06627
  misc_feature (4)..(259): Homolog of NCBI NO: 15228105 NR Description: hypothetical protein; protein id: At2g04220.1 thaliana] >gi|20198211|gb|AAD27916.2| hypothetical protein thaliana] >gi|20198251|gb|AAM15482.1| hypothetical protein
  misc_feature (1)..(250): Homolog of NCBI NO: 15238927 NR Description: putative protein; protein id: At5g48270.1 thaliana] >gi|8777417|dbj|BAA97007.1|
  misc_feature (251)..(285): Homolog of NCBI NO: 15238927 NR Description: putative protein; protein id: At5g48270.1 thaliana] >gi|8777417|dbj|BAA97007.1|
  misc_feature (58)..(259): Homolog of NCBI NO: 25334990 NR Description: hypothetical protein At2g04220 [imported] -
  misc_feature (70)..(285): Homolog of NCBI NO: 20804936 NR Description: P0456E05.14 [Oryza sativa (japonica
  misc_feature (1)..(65): Homolog of NCBI NO: 20804936 NR Description: P0456E05.14 [Oryza sativa (japonica
  misc_feature (25)..(283): Homolog of NCBI NO: 22331055 NR Description: hypothetical protein; protein id: At3g13229.1 thaliana] >gi|9294527|dbj|BAB02790.1|
  misc_feature (21)..(285): Homolog of NCBI NO: 15241702 NR Description: putative protein; protein id: At5g28150.1, by cDNA: gi_19699076 [Arabidopsis thaliana] AT5g28150/T24G3_80 [Arabidopsis thaliana]
  misc_feature (21)..(285): Homolog of NCBI NO: 18397034 NR Description: expressed protein; protein id: At3g04860.1, by cDNA: 5170., supported by cDNA: gi_16612260 [Arabidopsis

SEQ ID NO: 92592 - protein, 251 aa, Arabidopsis thaliana; identical to SEQ ID NO: 29058
  peptide (1)..(251): Ceres Seq. ID no. 12712889
  misc_feature (1)..(250): Pfam Name: Plant protein of unknown function (DUF868) Pfam Description: Plant protein of unknown function (DUF868)
  misc_feature (1)..(251): Homolog of NCBI NO: 15235452 NR Description: putative protein; protein id: At4g12690.1, by cDNA: 12923. [Arabidopsis thaliana] >gi|7459232|pir||T06627
  misc_feature (1)..(225): Homolog of NCBI NO: 15228105 NR Description: hypothetical protein; protein id: At2g04220.1 thaliana] >gi|20198211|gb|AAD27916.2| hypothetical protein thaliana] >gi|20198251|gb|AAM15482.1| hypothetical protein
  misc_feature (1)..(216): Homolog of NCBI NO: 15238927 NR Description: putative protein; protein id: At5g48270.1 thaliana] >gi|8777417|dbj|BAA97007.1|
  misc_feature (217)..(251): Homolog of NCBI NO: 15238927 NR Description: putative protein; protein id: At5g48270.1 thaliana] >gi|8777417|dbj|BAA97007.1|
  misc_feature (24)..(225): Homolog of NCBI NO: 25334990 NR Description: hypothetical protein At2g04220 [imported] -
  misc_feature (36)..(251): Homolog of NCBI NO: 20804936 NR Description: P0456E05.14 [Oryza sativa (japonica
  misc_feature (1)..(31): Homolog of NCBI NO: 20804936 NR Description: P0456E05.14 [Oryza sativa (japonica
  misc_feature (1)..(249): Homolog of NCBI NO: 22331055 NR Description: hypothetical protein; protein id: At3g13229.1 thaliana] >gi|9294527|dbj|BAB02790.1|
  misc_feature (1)..(251): Homolog of NCBI NO: 15241702 NR Description: putative protein; protein id: At5g28150.1, by cDNA: gi_19699076 [Arabidopsis thaliana] AT5g28150/T24G3_80 [Arabidopsis thaliana]
  misc_feature (1)..(251): Homolog of NCBI NO: 18397034 NR Description: expressed protein; protein id: At3g04860.1, by cDNA: 5170., supported by cDNA: gi_16612260 [Arabidopsis

SEQ ID NO: 92593 - protein, 235 aa, Arabidopsis thaliana; identical to SEQ ID NO: 29059
  peptide (1)..(235): Ceres Seq. ID no. 12712890
  misc_feature (1)..(234): Pfam Name: Plant protein of unknown function (DUF868) Pfam Description: Plant protein of unknown function (DUF868)
  misc_feature (1)..(235): Homolog of NCBI NO: 15235452 NR Description: putative protein; protein id: At4g12690.1, by cDNA: 12923. [Arabidopsis thaliana] >gi|7459232|pir||T06627
  misc_feature (1)..(209): Homolog of NCBI NO: 15228105 NR Description: hypothetical protein; protein id: At2g04220.1 thaliana] >gi|20198211|gb|AAD27916.2| hypothetical protein thaliana] >gi|20198251|gb|AAM15482.1| hypothetical protein
  misc_feature (1)..(200): Homolog of NCBI NO: 15238927 NR Description: putative protein; protein id: At5g48270.1 thaliana] >gi|8777417|dbj|BAA97007.1|
  misc_feature (201)..(235): Homolog of NCBI NO: 15238927 NR Description: putative protein; protein id: At5g48270.1 thaliana] >gi|8777417|dbj|BAA97007.1|
  misc_feature (8)..(209): Homolog of NCBI NO: 25334990 NR Description: hypothetical protein At2g04220 [imported] -
  misc_feature (20)..(235): Homolog of NCBI NO: 20804936 NR Description: P0456E05.14 [Oryza sativa (japonica
  misc_feature (1)..(15): Homolog of NCBI NO: 20804936 NR Description: P0456E05.14 [Oryza sativa (japonica
  misc_feature (1)..(233): Homolog of NCBI NO: 22331055 NR Description: hypothetical protein; protein id: At3g13229.1 thaliana] >gi|9294527|dbj|BAB02790.1|
  misc_feature (1)..(235): Homolog of NCBI NO: 15241702 NR Description: putative protein; protein id: At5g28150.1, by cDNA: gi_19699076 [Arabidopsis thaliana] AT5g28150/T24G3_80 [Arabidopsis thaliana]
  misc_feature (1)..(235): Homolog of NCBI NO: 18397034 NR Description: expressed protein; protein id: At3g04860.1, by cDNA: 5170., supported by cDNA: gi_16612260 [Arabidopsis

SEQ ID NO: 92594 - DNA, 1041 bp, Arabidopsis thaliana; identical to SEQ ID NO: 88838
  misc_feature (1)..(1041): Ceres Seq. ID no. 12712903
  misc_feature: MA Experiment ID: 108434 Result: Down-regulated in Transcription
  misc_feature: MA Experiment 108434 PARAMETER Experiment Name: At_Root_Tips_cDNA_P Parameter: Tissue Value: Root Tips
  misc_feature: MA Experiment ID: 108461 Result: Up-regulated in Transcription
  misc_feature: MA Experiment 108461 PARAMETER Experiment Name: At_Germinating_Seeds_cDNA_P Parameter: Age (day) Value: 1 vs. 0
  misc_feature: MA Experiment 108461 PARAMETER Experiment Name: At_Germinating_Seeds_cDNA_P Parameter: Tissue Value: Germinating Seeds
  misc_feature: MA Experiment ID: 108464 Result: Up-regulated in Transcription
  misc_feature: MA Experiment 108464 PARAMETER Experiment Name: At_Germinating_Seeds_cDNA_P Parameter: Age (day) Value: 4 vs. 0
  misc_feature: MA Experiment 108464 PARAMETER Experiment Name: At_Germinating_Seeds_cDNA_P Parameter: Tissue Value: Germinating Seeds
  misc_feature: MA Experiment ID: 108585 Result: Up-regulated in Transcription
  misc_feature: MA Experiment 108585 PARAMETER Experiment Name: At_5mM_NaNP_cDNA_P Parameter: Timepoint (hr) Value: 6
  misc_feature: MA Experiment 108585 PARAMETER Experiment Name: At_5mM_NaNP_cDNA_P Parameter: Tissue Value: Aerial
  misc_feature: MA Experiment 108585 PARAMETER Experiment Name: At_5mM_NaNP_cDNA_P Parameter: Treatment Value: null
  misc_feature: MA Experiment ID: 108607 Result: Down-regulated in Transcription
  misc_feature: MA Experiment 108607 PARAMETER Experiment Name: At_100uM_ABA_cDNA_P Parameter: Timepoint (hr) Value: 4
  misc_feature: MA Experiment 108607 PARAMETER Experiment Name: At_100uM_ABA_cDNA_P Parameter: Tissue Value: Aerial
  misc_feature: MA Experiment 108607 PARAMETER Experiment Name: At_100uM_ABA_cDNA_P Parameter: Treatment Value: 100uM ABA vs. No Treatment
  misc_feature: MA Experiment ID: 108609 Result: Down-regulated in Transcription
  misc_feature: MA Experiment 108609 PARAMETER Experiment Name: At_100uM_ABA_cDNA_P Parameter: Timepoint (hr) Value: 24
  misc_feature: MA Experiment 108609 PARAMETER Experiment Name: At_100uM_ABA_cDNA_P Parameter: Tissue Value: Aerial
  misc_feature: MA Experiment 108609 PARAMETER Experiment Name: At_100uM_ABA_cDNA_P Parameter: Treatment Value: 100uM ABA vs. No Treatment
  misc_feature: MA Experiment ID: 108668 Result: Up-regulated in Transcription
  misc_feature: MA Experiment 108668 PARAMETER Experiment Name: At_2mM_SA_cDNA_P Parameter: Plant Line Value: WS
  misc_feature: MA Experiment 108668 PARAMETER Experiment Name: At_2mM_SA_cDNA_P Parameter: Timepoint (hr) Value: 6
  misc_feature: MA Experiment 108668 PARAMETER Experiment Name: At_2mM_SA_cDNA_P Parameter: Treatment Value: 2mM SA vs. No Treatment
  misc_feature: MA Experiment ID: 20000030 Result: Down-regulated in Transcription
  misc_feature: MA Experiment 20000030 PARAMETER Experiment Name: At_CS6630_Roots_cDNA_P Parameter: Plant Line Value: CS6630 vs. WS
  misc_feature: MA Experiment 20000030 PARAMETER Experiment Name: At_CS6630_Roots_cDNA_P Parameter: Tissue Value: Roots
  misc_feature: MA Experiment ID: 20000111 Result: Down-regulated in Transcription
  misc_feature: MA Experiment 20000111 PARAMETER Experiment Name: At_42deg_Heat_cDNA_P Parameter: Temperature (deg C) Value: 42 vs. 22
  misc_feature: MA Experiment 20000111 PARAMETER Experiment Name: At_42deg_Heat_cDNA_P Parameter: Timepoint (hr) Value: 6
  misc_feature: MA Experiment 20000111 PARAMETER Experiment Name: At_42deg_Heat_cDNA_P Parameter: Tissue Value: Aerial
  misc_feature: MA Experiment ID: 20000144 Result: Down-regulated in Transcription
  misc_feature: MA Experiment 20000144 PARAMETER Experiment Name: At_42deg_Heat_cDNA_P Parameter: Temperature (deg C) Value: 42 vs. 22
  misc_feature: MA Experiment 20000144 PARAMETER Experiment Name: At_42deg_Heat_cDNA_P Parameter: Timepoint (hr) Value: 1
  misc_feature: MA Experiment 20000144 PARAMETER Experiment Name: At_42deg_Heat_cDNA_P Parameter: Tissue Value: Aerial
  misc_feature: MA Experiment ID: 20000166 Result: Down-regulated in Transcription
  misc_feature: MA Experiment 20000166 PARAMETER Experiment Name: At_100uM_ABA_P Parameter: Age (day) Value: 14
  misc_feature: MA Experiment 20000166 PARAMETER Experiment Name: At_100uM_ABA_P Parameter: Organism Value: A. thaliana
  misc_feature: MA Experiment 20000166 PARAMETER Experiment Name: At_100uM_ABA_P Parameter: Plant Line Value: WS
  misc_feature: MA Experiment 20000166 PARAMETER Experiment Name: At_100uM_ABA_P Parameter: Timepoint (hr) Value: 1
  misc_feature: MA Experiment 20000166 PARAMETER Experiment Name: At_100uM_ABA_P Parameter: Tissue Value: Aerial
  misc_feature: MA Experiment 20000166 PARAMETER Experiment Name: At_100uM_ABA_P Parameter: Treatment Value: 100uM ABA vs. No Treatment
  misc_feature: MA Experiment ID: 20000169 Result: Down-regulated in Transcription
  misc_feature: MA Experiment 20000169 PARAMETER Experiment Name: At_100uM_ABA_P Parameter: Age (day) Value: 14
  misc_feature: MA Experiment 20000169 PARAMETER Experiment Name: At_100uM_ABA_P Parameter: Organism Value: A. thaliana
  misc_feature: MA Experiment 20000169 PARAMETER Experiment Name: At_100uM_ABA_P Parameter: Plant Line Value: WS
  misc_feature: MA Experiment 20000169 PARAMETER Experiment Name: At_100uM_ABA_P Parameter: Timepoint (hr) Value: 6
  misc_feature: MA Experiment 20000169 PARAMETER Experiment Name: At_100uM_ABA_P Parameter: Tissue Value: Aerial
  misc_feature: MA Experiment 20000169 PARAMETER Experiment Name: At_100uM_ABA_P Parameter: Treatment Value: 100uM ABA vs. No Treatment
  misc_feature: MA Experiment ID: 20000180 Result: Up-regulated in Transcription
  misc_feature: MA Experiment 20000180 PARAMETER Experiment Name: At_Germinating_Seeds_P Parameter: Age (hr) Value: 24 vs. 0
  misc_feature: MA Experiment 20000180 PARAMETER Experiment Name: At_Germinating_Seeds_P Parameter: Tissue Value: Germinating Seeds
  misc_feature: MA Experiment ID: 20000185 Result: Up-regulated in Transcription
  misc_feature: MA Experiment 20000185 PARAMETER Experiment Name: At_Roots__P Parameter: Age (day) Value: 7 vs. 21
  misc_feature: MA Experiment 20000185 PARAMETER Experiment Name: At_Roots__P Parameter: Organism Value: A. thaliana
  misc_feature: MA Experiment 20000185 PARAMETER Experiment Name: At_Roots__P Parameter: Tissue Value: Roots vs. Whole Plant
  misc_feature: MA Experiment ID: 20000265 Result: Down-regulated in Transcription
  misc_feature: MA Experiment 20000265 PARAMETER Experiment Name: At_Open_Flower_P Parameter: Age (day) Value: 21
  misc_feature: MA Experiment 20000265 PARAMETER Experiment Name: At_Open_Flower_P Parameter: Plant Line Value: WS
  misc_feature: MA Experiment 20000265 PARAMETER Experiment Name: At_Open_Flower_P Parameter: Tissue Value: Closed Flower vs. Whole Plant
  misc_feature: MA Experiment ID: 20000308 Result: Up-regulated in Transcription
  misc_feature: MA Experiment 20000308 PARAMETER Experiment Name: At_100mM_NaCl__P Parameter: Age (day) Value: 17
  misc_feature: MA Experiment 20000308 PARAMETER Experiment Name: At_100mM_NaCl__P Parameter: Organism Value: A. thaliana
  misc_feature: MA Experiment 20000308 PARAMETER Experiment Name: At_100mM_NaCl__P Parameter: Plant Line Value: WS
  misc_feature: MA Experiment 20000308 PARAMETER Experiment Name: At_100mM_NaCl__P Parameter: Timepoint (hr) Value: 72
  misc_feature: MA Experiment 20000308 PARAMETER Experiment Name: At_100mM_NaCl__P Parameter: Tissue Value: Whole Plant
  misc_feature: MA Experiment 20000308 PARAMETER Experiment Name: At_100mM_NaCl__P Parameter: Treatment Value: 100mM NaCl vs. No Treatment
  misc_feature: MA Experiment ID: 20000436 Result: Down-regulated in Transcription
  misc_feature: MA Experiment 20000436 PARAMETER Experiment Name: At_Drought_P Parameter: Age (day) Value: 7
  misc_feature: MA Experiment 20000436 PARAMETER Experiment Name: At_Drought_P Parameter: Organism Value: A. thaliana
  misc_feature: MA Experiment 20000436 PARAMETER Experiment Name: At_Drought_P Parameter: Plant Line Value: WS
  misc_feature: MA Experiment 20000436 PARAMETER Experiment Name: At_Drought_P Parameter: Timepoint (hr) Value: 12
  misc_feature: MA Experiment 20000436 PARAMETER Experiment Name: At_Drought_P Parameter: Tissue Value: Whole Plant
  misc_feature: MA Experiment 20000436 PARAMETER Experiment Name: At_Drought_P Parameter: Treatment Value: Drought vs. No Drought
  misc_feature: MA Experiment ID: 20000439 Result: Up-regulated in Transcription
  misc_feature: MA Experiment 20000439 PARAMETER Experiment Name: At_Roots__P Parameter: Age (day) Value: 14 vs. 21
  misc_feature: MA Experiment 20000439 PARAMETER Experiment Name: At_Roots__P Parameter: Organism Value: A. thaliana
  misc_feature: MA Experiment 20000439 PARAMETER Experiment Name: At_Roots__P Parameter: Tissue Value: Roots vs. Whole Plant
  misc_feature: MA Experiment ID: 20000453 Result: Down-regulated in Transcription
  misc_feature: MA Experiment 20000453 PARAMETER Experiment Name: At_100uM_ABA_P Parameter: Age (day) Value: 15
  misc_feature: MA Experiment 20000453 PARAMETER Experiment Name: At_100uM_ABA_P Parameter: Organism Value: A. thaliana
  misc_feature: MA Experiment 20000453 PARAMETER Experiment Name: At_100uM_ABA_P Parameter: Plant Line Value: WS
  misc_feature: MA Experiment 20000453 PARAMETER Experiment Name: At_100uM_ABA_P Parameter: Timepoint (hr) Value: 24
  misc_feature: MA Experiment 20000453 PARAMETER Experiment Name: At_100uM_ABA_P Parameter: Tissue Value: Aerial
  misc_feature: MA Experiment 20000453 PARAMETER Experiment Name: At_100uM_ABA_P Parameter: Treatment Value: 100uM ABA vs. No Treatment
  misc_feature: MA Experiment ID: 20000460 Result: Down-regulated in Transcription
  misc_feature: MA Experiment 20000460 PARAMETER Experiment Name: At_10percent_PEG_P Parameter: Age (day) Value: 12
  misc_feature: MA Experiment 20000460 PARAMETER Experiment Name: At_10percent_PEG_P Parameter: Organism Value: A. thaliana
  misc_feature: MA Experiment 20000460 PARAMETER Experiment Name: At_10percent_PEG_P Parameter: Plant Line Value: WS
  misc_feature: MA Experiment 20000460 PARAMETER Experiment Name: At_10percent_PEG_P Parameter: Timepoint (day) Value: 12
  misc_feature: MA Experiment 20000460 PARAMETER Experiment Name: At_10percent_PEG_P Parameter: Tissue Value: Whole Plant
  misc_feature: MA Experiment 20000460 PARAMETER Experiment Name: At_10percent_PEG_P Parameter: Treatment Value: 10percent PEG vs. No Treatment
  misc_feature: MA Experiment ID: 20000496 Result: Up-regulated in Transcription
  misc_feature: MA Experiment 20000496 PARAMETER Experiment Name: At_Guard_Cells_P Parameter: Harvest Date Value: 7/19/2002
  misc_feature: MA Experiment 20000496 PARAMETER Experiment Name: At_Guard_Cells_P Parameter: Organism Value: Canola
  misc_feature: MA Experiment 20000496 PARAMETER Experiment Name: At_Guard_Cells_P Parameter: Tissue Value: Guard Cells vs. Leaves
  misc_feature: MA Experiment ID: 20000527 Result: Down-regulated in Transcription
  misc_feature: MA Experiment 20000527 PARAMETER Experiment Name: At_10percent_PEG_P Parameter: Age (day) Value: 20
  misc_feature: MA Experiment 20000527 PARAMETER Experiment Name: At_10percent_PEG_P Parameter: Organism Value: A. thaliana
  misc_feature: MA Experiment 20000527 PARAMETER Experiment Name: At_10percent_PEG_P Parameter: Plant Line Value: WS
  misc_feature: MA Experiment 20000527 PARAMETER Experiment Name: At_10percent_PEG_P Parameter: Timepoint (day) Value: 20
  misc_feature: MA Experiment 20000527 PARAMETER Experiment Name: At_10percent_PEG_P Parameter: Tissue Value: Whole Plant
  misc_feature: MA Experiment 20000527 PARAMETER Experiment Name: At_10percent_PEG_P Parameter: Treatment Value: 10percent PEG vs. No Treatment
  misc_feature: MA Experiment ID: 20000575 Result: Down-regulated in Transcription
  misc_feature: MA Experiment 20000575 PARAMETER Experiment Name: At_100uM_ABA_Mutants__P Parameter: Organism Value: A. thaliana
  misc_feature: MA Experiment 20000575 PARAMETER Experiment Name: At_100uM_ABA_Mutants__P Parameter: Plant Line Value: CS22
  misc_feature: MA Experiment 20000575 PARAMETER Experiment Name: At_100uM_ABA_Mutants__P Parameter: Timepoint (hr) Value: 6
  misc_feature: MA Experiment 20000575 PARAMETER Experiment Name: At_100uM_ABA_Mutants__P Parameter: Tissue Value: Whole Plant
  misc_feature: MA Experiment 20000575 PARAMETER Experiment Name: At_100uM_ABA_Mutants__P Parameter: Treatment Value: 1uM ABA vs. No Treatment
  misc_feature: MA Experiment ID: 20000576 Result: Down-regulated in Transcription
  misc_feature: MA Experiment 20000576 PARAMETER Experiment Name: At_100uM_ABA_Mutants__P Parameter: Organism Value: A. thaliana
  misc_feature: MA Experiment 20000576 PARAMETER Experiment Name: At_100uM_ABA_Mutants__P Parameter: Plant Line Value: CS23
  misc_feature: MA Experiment 20000576 PARAMETER Experiment Name: At_100uM_ABA_Mutants__P Parameter: Timepoint (hr) Value: 6
  misc_feature: MA Experiment 20000576 PARAMETER Experiment Name: At_100uM_ABA_Mutants__P Parameter: Tissue Value: Whole Plant
  misc_feature: MA Experiment 20000576 PARAMETER Experiment Name: At_100uM_ABA_Mutants__P Parameter: Treatment Value: 1uM ABA vs. No Treatment
  misc_feature: MA Experiment ID: 20001247 Result: Down-regulated in Transcription
  misc_feature: MA Experiment 20001247 PARAMETER Experiment Name: At_Far-red-induction_P Parameter: Age (day) Value: 7
  misc_feature: MA Experiment 20001247 PARAMETER Experiment Name: At_Far-red-induction_P Parameter: Light Value: Far-red vs. White
  misc_feature: MA Experiment 20001247 PARAMETER Experiment Name: At_Far-red-induction_P Parameter: Organism Value: A. thaliana
  misc_feature: MA Experiment 20001247 PARAMETER Experiment Name: At_Far-red-induction_P Parameter: Plant Line Value: Columbia
  misc_feature: MA Experiment 20001247 PARAMETER Experiment Name: At_Far-red-induction_P Parameter: Timepoint (hr) Value: 1
  misc_feature: MA Experiment 20001247 PARAMETER Experiment Name: At_Far-red-induction_P Parameter: Tissue Value: Whole Plant
  misc_feature: MA Experiment ID: 20001450 Result: Down-regulated in Transcription
  misc_feature: MA Experiment 20001450 PARAMETER Experiment Name: At_Far-red-induction_P Parameter: Age (day) Value: 7
  misc_feature: MA Experiment 20001450 PARAMETER Experiment Name: At_Far-red-induction_P Parameter: Light Value: Far-red vs. White
  misc_feature: MA Experiment 20001450 PARAMETER Experiment Name: At_Far-red-induction_P Parameter: Organism Value: A. thaliana
  misc_feature: MA Experiment 20001450 PARAMETER Experiment Name: At_Far-red-induction_P Parameter: Plant Line Value: Columbia
  misc_feature: MA Experiment 20001450 PARAMETER Experiment Name: At_Far-red-induction_P Parameter: Timepoint (hr) Value: 8
  misc_feature: MA Experiment 20001450 PARAMETER Experiment Name: At_Far-red-induction_P Parameter: Tissue Value: Whole Plant
  misc_feature: MA Experiment ID: 20001556 Result: Down-regulated in Transcription
  misc_feature: MA Experiment 20001556 PARAMETER Experiment Name: At_Drought_Soil_Dry_P Parameter: Age (day) Value: 26
  misc_feature: MA Experiment 20001556 PARAMETER Experiment Name: At_Drought_Soil_Dry_P Parameter: Organism Value: A. thaliana
  misc_feature: MA Experiment 20001556 PARAMETER Experiment Name: At_Drought_Soil_Dry_P Parameter: Plant Line Value: WS
  misc_feature: MA Experiment 20001556 PARAMETER Experiment Name: At_Drought_Soil_Dry_P Parameter: Post Timepoint (hr) Value: None
  misc_feature: MA Experiment 20001556 PARAMETER Experiment Name: At_Drought_Soil_Dry_P Parameter: Post-Treatment Value: None
  misc_feature: MA Experiment 20001556 PARAMETER Experiment Name: At_Drought_Soil_Dry_P Parameter: Timepoint (day) Value: 12
  misc_feature: MA Experiment 20001556 PARAMETER Experiment Name: At_Drought_Soil_Dry_P Parameter: Treatment Value: Drought vs. No Drought
  misc_feature: MA Experiment ID: 20001755 Result: Up-regulated in Transcription
  misc_feature: MA Experiment 20001755 PARAMETER Experiment Name: At_50mM_NH4NO3_L-to-H_P Parameter: Timepoint (hr) Value: 2
  misc_feature: MA Experiment 20001755 PARAMETER Experiment Name: At_50mM_NH4NO3_L-to-H_P Parameter: Tissue Value: Leaf
  misc_feature: MA Experiment 20001755 PARAMETER Experiment Name: At_50mM_NH4NO3_L-to-H_P Parameter: Treatment Value: 50mM NH4NO3 vs 100mM Mannitol
  misc_feature: MA Experiment ID: 20001757 Result: Up-regulated in Transcription
  misc_feature: MA Experiment 20001757 PARAMETER Experiment Name: At_50mM_NH4NO3_L-to-H_P Parameter: Timepoint (hr) Value: 6
  misc_feature: MA Experiment 20001757 PARAMETER Experiment Name: At_50mM_NH4NO3_L-to-H_P Parameter: Tissue Value: Leaf
  misc_feature: MA Experiment 20001757 PARAMETER Experiment Name: At_50mM_NH4NO3_L-to-H_P Parameter: Treatment Value: 50mM NH4NO3 vs 100mM Mannitol

SEQ ID NO: 92595 - protein, 346 aa, Arabidopsis thaliana; identical to SEQ ID NO: 88839
  peptide (1)..(346): Ceres Seq. ID no. 12712904
  misc_feature (40)..(291): Pfam Name: Peroxidase Pfam Description: Peroxidase
  misc_feature (1)..(346): Homolog of NCBI NO: 15236608 NR Description: peroxidase, putative; protein id: At4g08780.1 thaliana] >gi|26397838|sp|Q9LDA4|PE38_ARATH Peroxidase 38
  misc_feature (1)..(346): Homolog of NCBI NO: 15236606 NR Description: peroxidase, putative; protein id: At4g08770.1, by cDNA: gi_17530567 [Arabidopsis thaliana] Peroxidase 37 precursor (Atperox P37) (ATP38)
  misc_feature (1)..(346): Homolog of NCBI NO: 22531052 NR Description: peroxidase C2 precursor-like protein [Arabidopsis
  misc_feature (1)..(344): Homolog of NCBI NO: 129809 NR Description: Peroxidase C2 precursor >gi|81665|pir||JH0149
  misc_feature (5)..(346): Homolog of NCBI NO: 15229095 NR Description: peroxidase, putative; protein id: At3g49120.1, by cDNA: 39678., supported by cDNA: gi_11908065, supported by gi_12642879, supported by cDNA: gi_13265526, supported by cDNA:
  misc_feature (5)..(346): Homolog of NCBI NO: 15229084 NR Description: peroxidase; protein id: At3g49110.1, supported by gi_15146325, supported by cDNA: gi_15450610 [Arabidopsis >gi|129815|sp|P24101|PE33_ARATH Peroxidase 33 precursor (Atperox
  misc_feature (5)..(346): Homolog of NCBI NO: 480907 NR Description: peroxidase (EC 1.11.1.7) Cb - Arabidopsis
  misc_feature (14)..(346): Homolog of NCBI NO: 129816 NR Description: Peroxidase C1C precursor >gi|81668|pir||S00627
  misc_feature (4)..(346): Homolog of NCBI NO: 129813 NR Description: PEROXIDASE C1A PRECURSOR >gi|2144377|pir||OPRHC
  misc_feature (3)..(346): Homolog of NCBI NO: 25453209 NR Description: Peroxidase 32 precursor (Atperox P32) (PRXR3) >gi|1402908|emb|CAA66959.1| peroxidase [Arabidopsis thaliana] peroxidase ATP16a [Arabidopsis thaliana]

SEQ ID NO: 92596 - protein, 242 aa, Arabidopsis thaliana; identical to SEQ ID NO: 88840
  peptide (1)..(242): Ceres Seq. ID no. 12712905
  misc_feature (1)..(187): Pfam Name: Peroxidase Pfam Description: Peroxidase
  misc_feature (1)..(242): Homolog of NCBI NO: 15236608 NR Description: peroxidase, putative; protein id: At4g08780.1 thaliana] >gi|26397838|sp|Q9LDA4|PE38_ARATH Peroxidase 38
  misc_feature (1)..(242): Homolog of NCBI NO: 15236606 NR Description: peroxidase, putative; protein id: At4g08770.1, by cDNA: gi_17530567 [Arabidopsis thaliana] Peroxidase 37 precursor (Atperox P37) (ATP38)
  misc_feature (1)..(242): Homolog of NCBI NO: 22531052 NR Description: peroxidase C2 precursor-like protein [Arabidopsis
  misc_feature (1)..(240): Homolog of NCBI NO: 129809 NR Description: Peroxidase C2 precursor >gi|81665|pir||JH0149
  misc_feature (1)..(242): Homolog of NCBI NO: 15229095 NR Description: peroxidase, putative; protein id: At3g49120.1, by cDNA: 39678., supported by cDNA: gi_11908065, supported by gi_12642879, supported by cDNA: gi_13265526, supported by cDNA:
  misc_feature (1)..(242): Homolog of NCBI NO: 15229084 NR Description: peroxidase; protein id: At3g49110.1, supported by gi_15146325, supported by cDNA: gi_15450610 [Arabidopsis >gi|129815|sp|P24101|PE33_ARATH Peroxidase 33 precursor (Atperox
  misc_feature (1)..(242): Homolog of NCBI NO: 480907 NR Description: peroxidase (EC 1.11.1.7) Cb - Arabidopsis
  misc_feature (1)..(242): Homolog of NCBI NO: 129816 NR Description: Peroxidase C1C precursor >gi|81668|pir||S00627
  misc_feature (1)..(242): Homolog of NCBI NO: 129813 NR Description: PEROXIDASE C1A PRECURSOR >gi|2144377|pir||OPRHC
  misc_feature (1)..(242): Homolog of NCBI NO: 25453209 NR Description: Peroxidase 32 precursor (Atperox P32) (PRXR3) >gi|1402908|emb|CAA66959.1| peroxidase [Arabidopsis thaliana] peroxidase ATP16a [Arabidopsis thaliana]

SEQ ID NO: 92597 - protein, 225 aa, Arabidopsis thaliana; identical to SEQ ID NO: 88841
  peptide (1)..(225): Ceres Seq. ID no. 12712906
  misc_feature (1)..(170): Pfam Name: Peroxidase Pfam Description: Peroxidase
  misc_feature (1)..(225): Homolog of NCBI NO: 15236608 NR Description: peroxidase, putative; protein id: At4g08780.1 thaliana] >gi|26397838|sp|Q9LDA4|PE38_ARATH Peroxidase 38
  misc_feature (1)..(225): Homolog of NCBI NO: 15236606 NR Description: peroxidase, putative; protein id: At4g08770.1, by cDNA: gi_17530567 [Arabidopsis thaliana] Peroxidase 37 precursor (Atperox P37) (ATP38)
  misc_feature (1)..(225): Homolog of NCBI NO: 22531052 NR Description: peroxidase C2 precursor-like protein [Arabidopsis
  misc_feature (1)..(223): Homolog of NCBI NO: 129809 NR Description: Peroxidase C2 precursor >gi|81665|pir||JH0149
  misc_feature (1)..(225): Homolog of NCBI NO: 15229095 NR Description: peroxidase, putative; protein id: At3g49120.1, by cDNA: 39678., supported by cDNA: gi_11908065, supported by gi_12642879, supported by cDNA: gi_13265526, supported by cDNA:
  misc_feature (1)..(225): Homolog of NCBI NO: 15229084 NR Description: peroxidase; protein id: At3g49110.1, supported by gi_15146325, supported by cDNA: gi_15450610 [Arabidopsis >gi|129815|sp|P24101|PE33_ARATH Peroxidase 33 precursor (Atperox
  misc_feature (1)..(225): Homolog of NCBI NO: 480907 NR Description: peroxidase (EC 1.11.1.7) Cb - Arabidopsis
  misc_feature (1)..(225): Homolog of NCBI NO: 129816 NR Description: Peroxidase C1C precursor >gi|81668|pir||S00627
  misc_feature (1)..(225): Homolog of NCBI NO: 129813 NR Description: PEROXIDASE C1A PRECURSOR >gi|2144377|pir||OPRHC
  misc_feature (1)..(225): Homolog of NCBI NO: 25453209 NR Description: Peroxidase 32 precursor (Atperox P32) (PRXR3) >gi|1402908|emb|CAA66959.1| peroxidase [Arabidopsis thaliana] peroxidase ATP16a [Arabidopsis thaliana]

SEQ ID NO: 92598 - DNA, 3249 bp, Arabidopsis thaliana; identical to SEQ ID NO: 88842
  misc_feature (1)..(3249): Ceres Seq. ID no. 12713004
  misc_feature: MA Experiment ID: 20000171 Result: Up-regulated in Transcription
  misc_feature: MA Experiment 20000171 PARAMETER Experiment Name: At_42deg_Heat_P Parameter: Age (day) Value: 14
  misc_feature: MA Experiment 20000171 PARAMETER Experiment Name: At_42deg_Heat_P Parameter: Organism Value: A. thaliana
  misc_feature: MA Experiment 20000171 PARAMETER Experiment Name: At_42deg_Heat_P Parameter: Plant Line Value: WS
  misc_feature: MA Experiment 20000171 PARAMETER Experiment Name: At_42deg_Heat_P Parameter: Temperature (deg C) Value: 42 vs. 22
  misc_feature: MA Experiment 20000171 PARAMETER Experiment Name: At_42deg_Heat_P Parameter: Timepoint (hr) Value: 1
  misc_feature: MA Experiment 20000171 PARAMETER Experiment Name: At_42deg_Heat_P Parameter: Tissue Value: Aerial
  misc_feature: MA Experiment ID: 20000173 Result: Up-regulated in Transcription
  misc_feature: MA Experiment 20000173 PARAMETER Experiment Name: At_42deg_Heat_P Parameter: Age (day) Value: 14
  misc_feature: MA Experiment 20000173 PARAMETER Experiment Name: At_42deg_Heat_P Parameter: Organism Value: A. thaliana
  misc_feature: MA Experiment 20000173 PARAMETER Experiment Name: At_42deg_Heat_P Parameter: Plant Line Value: WS
  misc_feature: MA Experiment 20000173 PARAMETER Experiment Name: At_42deg_Heat_P Parameter: Temperature (deg C) Value: 42 vs. 22
  misc_feature: MA Experiment 20000173 PARAMETER Experiment Name: At_42deg_Heat_P Parameter: Timepoint (hr) Value: 6
  misc_feature: MA Experiment 20000173 PARAMETER Experiment Name: At_42deg_Heat_P Parameter: Tissue Value: Aerial
  misc_feature: MA Experiment ID: 20001247 Result: Up-regulated in Transcription
  misc_feature: MA Experiment 20001247 PARAMETER Experiment Name: At_Far-red-induction_P Parameter: Age (day) Value: 7
  misc_feature: MA Experiment 20001247 PARAMETER Experiment Name: At_Far-red-induction_P Parameter: Light Value: Far-red vs. White
  misc_feature: MA Experiment 20001247 PARAMETER Experiment Name: At_Far-red-induction_P Parameter: Organism Value: A. thaliana
  misc_feature: MA Experiment 20001247 PARAMETER Experiment Name: At_Far-red-induction_P Parameter: Plant Line Value: Columbia
  misc_feature: MA Experiment 20001247 PARAMETER Experiment Name: At_Far-red-induction_P Parameter: Timepoint (hr) Value: 1
  misc_feature: MA Experiment 20001247 PARAMETER Experiment Name: At_Far-red-induction_P Parameter: Tissue Value: Whole Plant

SEQ ID NO: 92599 - protein, 1082 aa, Arabidopsis thaliana; identical to SEQ ID NO: 88843
  peptide (1)..(1082): Ceres Seq. ID no. 12713005
  misc_feature (612)..(1081): Pfam Name: T-complex protein 11 Pfam Description: T-complex protein 11
  misc_feature (9)..(549): Homolog of NCBI NO: 15219971 NR Description: unknown protein; protein id: At1g22930.1
  misc_feature (547)..(1078): Homolog of NCBI NO: 15219971 NR Description: unknown protein; protein id: At1g22930.1
  misc_feature (18)..(549): Homolog of NCBI NO: 39545651 NR Description: OJ000114_01.6 [Oryza sativa (japonica
  misc_feature (565)..(1077): Homolog of NCBI NO: 39545651 NR Description: OJ000114_01.6 [Oryza sativa (japonica
  misc_feature (497)..(1077): Homolog of NCBI NO: 39545653 NR Description: OJ000114_01.8 [Oryza sativa (japonica
  misc_feature (306)..(380): Homolog of NCBI NO: 39545653 NR Description: OJ000114_01.8 [Oryza sativa (japonica
  misc_feature (355)..(726): Homolog of NCBI NO: 39545653 NR Description: OJ000114_01.8 [Oryza sativa (japonica
  misc_feature (535)..(806): Homolog of NCBI NO: 38648893 NR Description: Unknown (protein for MGC:73347) [Danio rerio]
  misc_feature (550)..(786): Homolog of NCBI NO: 28893201 NR Description: RIKEN cDNA C130096D04 gene [Mus musculus]
  misc_feature (33)..(262): Homolog of NCBI NO: 30230642 NR Description: autotransporter/adhesin Aae [Actinobacillus

SEQ ID NO: 92600 - protein, 1007 aa, Arabidopsis thaliana; identical to SEQ ID NO: 88844
  peptide (1)..(1007): Ceres Seq. ID no. 12713006
  misc_feature (537)..(1006): Pfam Name: T-complex protein 11 Pfam Description: T-complex protein 11
  misc_feature (1)..(474): Homolog of NCBI NO: 15219971 NR Description: unknown protein; protein id: At1g22930.1
  misc_feature (472)..(1003): Homolog of NCBI NO: 15219971 NR Description: unknown protein; protein id: At1g22930.1
  misc_feature (1)..(474): Homolog of NCBI NO: 39545651 NR Description: OJ000114_01.6 [Oryza sativa (japonica
  misc_feature (490)..(1002): Homolog of NCBI NO: 39545651 NR Description: OJ000114_01.6 [Oryza sativa (japonica
  misc_feature (422)..(1002): Homolog of NCBI NO: 39545653 NR Description: OJ000114_01.8 [Oryza sativa (japonica
  misc_feature (231)..(305): Homolog of NCBI NO: 39545653 NR Description: OJ000114_01.8 [Oryza sativa (japonica
  misc_feature (280)..(651): Homolog of NCBI NO: 39545653 NR Description: OJ000114_01.8 [Oryza sativa (japonica
  misc_feature (460)..(731): Homolog of NCBI NO: 38648893 NR Description: Unknown (protein for MGC:73347) [Danio rerio]
  misc_feature (475)..(711): Homolog of NCBI NO: 28893201 NR Description: RIKEN cDNA C130096D04 gene [Mus musculus]
  misc_feature (1)..(187): Homolog of NCBI NO: 30230642 NR Description: autotransporter/adhesin Aae [Actinobacillus

SEQ ID NO: 92601 - protein, 967 aa, Arabidopsis thaliana; identical to SEQ ID NO: 88845
  peptide (1)..(967): Ceres Seq. ID no. 12713007
  misc_feature (497)..(966): Pfam Name: T-complex protein 11 Pfam Description: T-complex protein 11
  misc_feature (1)..(434): Homolog of NCBI NO: 15219971 NR Description: unknown protein; protein id: At1g22930.1
  misc_feature (432)..(963): Homolog of NCBI NO: 15219971 NR Description: unknown protein; protein id: At1g22930.1
  misc_feature (1)..(434): Homolog of NCBI NO: 39545651 NR Description: OJ000114_01.6 [Oryza sativa (japonica
  misc_feature (450)..(962): Homolog of NCBI NO: 39545651 NR Description: OJ000114_01.6 [Oryza sativa (japonica
  misc_feature (382)..(962): Homolog of NCBI NO: 39545653 NR Description: OJ000114_01.8 [Oryza sativa (japonica
  misc_feature (191)..(265): Homolog of NCBI NO: 39545653 NR Description: OJ000114_01.8 [Oryza sativa (japonica
  misc_feature (240)..(611): Homolog of NCBI NO: 39545653 NR Description: OJ000114_01.8 [Oryza sativa (japonica
  misc_feature (420)..(691): Homolog of NCBI NO: 38648893 NR Description: Unknown (protein for MGC:73347) [Danio rerio]
  misc_feature (435)..(671): Homolog of NCBI NO: 28893201 NR Description: RIKEN cDNA C130096D04 gene [Mus musculus]
  misc_feature (1)..(147): Homolog of NCBI NO: 30230642 NR Description: autotransporter/adhesin Aae [Actinobacillus

SEQ ID NO: 92602 - DNA, 690 bp, Arabidopsis thaliana; identical to SEQ ID NO: 88846
  misc_feature (1)..(690): Ceres Seq. ID no. 12713044
  misc_feature: MA Experiment ID: 20000306 Result: Up-regulated in Transcription
  misc_feature: MA Experiment 20000306 PARAMETER Experiment Name: At_Germinating_Seeds_Sub_P Parameter: Age (hr) Value: 6 vs. 0
  misc_feature: MA Experiment 20000306 PARAMETER Experiment Name: At_Germinating_Seeds_Sub_P Parameter: Organism Value: A. thaliana
  misc_feature: MA Experiment 20000306 PARAMETER Experiment Name: At_Germinating_Seeds_Sub_P Parameter: Plant Line Value: WS
  misc_feature: MA Experiment 20000306 PARAMETER Experiment Name: At_Germinating_Seeds_Sub_P Parameter: Tissue Value: Germinating Seeds
  misc_feature: MA Experiment ID: 20000307 Result: Up-regulated in Transcription
  misc_feature: MA Experiment 20000307 PARAMETER Experiment Name: At_Germinating_Seeds_Sub_P Parameter: Age (hr) Value: 24 vs. 0
  misc_feature: MA Experiment 20000307 PARAMETER Experiment Name: At_Germinating_Seeds_Sub_P Parameter: Organism Value: A. thaliana
  misc_feature: MA Experiment 20000307 PARAMETER Experiment Name: At_Germinating_Seeds_Sub_P Parameter: Plant Line Value: WS
  misc_feature: MA Experiment 20000307 PARAMETER Experiment Name: At_Germinating_Seeds_Sub_P Parameter: Tissue Value: Germinating Seeds
  misc_feature: MA Experiment ID: 20000314 Result: Up-regulated in Transcription
  misc_feature: MA Experiment 20000314 PARAMETER Experiment Name: At_14day_Shoots-Roots_Sub_P Parameter: Age (day) Value: 14
  misc_feature: MA Experiment 20000314 PARAMETER Experiment Name: At_14day_Shoots-Roots_Sub_P Parameter: Organism Value: A. thaliana
  misc_feature: MA Experiment 20000314 PARAMETER Experiment Name: At_14day_Shoots-Roots_Sub_P Parameter: Plant Line Value: WS
  misc_feature: MA Experiment 20000314 PARAMETER Experiment Name: At_14day_Shoots-Roots_Sub_P Parameter: Tissue Value: Roots vs. Whole Plant

SEQ ID NO: 92603 - protein, 229 aa, Arabidopsis thaliana; identical to SEQ ID NO: 88847
  peptide (1)..(229): Ceres Seq. ID no. 12713045
  misc_feature (7)..(229): Homolog of NCBI NO: 30681030 NR Description: expressed protein [Arabidopsis thaliana]
  misc_feature (1)..(220): Homolog of NCBI NO: 7487558 NR Description: hypothetical protein T30A10.60 - Arabidopsis >gi|5881775|emb|CAB55693.1| putative protein [Arabidopsis >gi|7267572|emb|CAB78053.1| putative protein [Arabidopsis
  misc_feature (8)..(224): Homolog of NCBI NO: 15219873 NR Description: hypothetical protein; protein id: At1g61150.1 thaliana] >gi|27808548|gb|AAO24554.1| At1g61150 [Arabidopsis
  misc_feature (8)..(221): Homolog of NCBI NO: 25404311 NR Description: hypothetical protein F11P17.12 [imported] - thaliana >gi|2443886|gb|AAB71479.1| Unknown protein [Arabidopsis
  misc_feature (4)..(224): Homolog of NCBI NO: 26451919 NR Description: unknown protein [Arabidopsis thaliana]
  misc_feature (13)..(229): Homolog of NCBI NO: 8923557 NR Description: chromosome 20 open reading frame 11; two hybrid protein 1 [Homo sapiens] >gi|28201788|sp|Q9NWU2|CT11_HUMAN C20orf11 >gi|7020818|dbj|BAA91285.1| unnamed protein product
  misc_feature (13)..(229): Homolog of NCBI NO: 21594655 NR Description: chromosome 20 open reading frame 11 [Homo sapiens]
  misc_feature (13)..(229): Homolog of NCBI NO: 20863687 NR Description: RIKEN cDNA 2310003C23 [Mus musculus] RIKEN cDNA 2310003C23 [Mus musculus] similar to RIKEN cDNA 2310003C23 [Mus musculus] [Rattus
  misc_feature (13)..(224): Homolog of NCBI NO: 37748055 NR Description: Unknown (protein for MGC:73100) [Danio rerio]
  misc_feature (13)..(224): Homolog of NCBI NO: 24643081 NR Description: CG6617-PA [Drosophila melanogaster]

SEQ ID NO: 92604 - protein, 198 aa, Arabidopsis thaliana; identical to SEQ ID NO: 88848
  peptide (1)..(198): Ceres Seq. ID no. 12713046
  misc_feature (1)..(198): Homolog of NCBI NO: 30681030 NR Description: expressed protein [Arabidopsis thaliana]
  misc_feature (1)..(189): Homolog of NCBI NO: 7487558 NR Description: hypothetical protein T30A10.60 - Arabidopsis >gi|5881775|emb|CAB55693.1| putative protein [Arabidopsis >gi|7267572|emb|CAB78053.1| putative protein [Arabidopsis
  misc_feature (1)..(193): Homolog of NCBI NO: 15219873 NR Description: hypothetical protein; protein id: At1g61150.1 thaliana] >gi|27808548|gb|AAO24554.1| At1g61150 [Arabidopsis
  misc_feature (1)..(190): Homolog of NCBI NO: 25404311 NR Description: hypothetical protein F11P17.12 [imported] - thaliana >gi|2443886|gb|AAB71479.1| Unknown protein [Arabidopsis
  misc_feature (1)..(193): Homolog of NCBI NO: 26451919 NR Description: unknown protein [Arabidopsis thaliana]
  misc_feature (1)..(198): Homolog of NCBI NO: 8923557 NR Description: chromosome 20 open reading frame 11; two hybrid protein 1 [Homo sapiens] >gi|28201788|sp|Q9NWU2|CT11_HUMAN C20orf11 >gi|7020818|dbj|BAA91285.1| unnamed protein product
  misc_feature (1)..(198): Homolog of NCBI NO: 21594655 NR Description: chromosome 20 open reading frame 11 [Homo sapiens]
  misc_feature (1)..(198): Homolog of NCBI NO: 20863687 NR Description: RIKEN cDNA 2310003C23 [Mus musculus] RIKEN cDNA 2310003C23 [Mus musculus] similar to RIKEN cDNA 2310003C23 [Mus musculus] [Rattus
  misc_feature (1)..(193): Homolog of NCBI NO: 37748055 NR Description: Unknown (protein for MGC:73100) [Danio rerio]
  misc_feature (1)..(193): Homolog of NCBI NO: 24643081 NR Description: CG6617-PA [Drosophila melanogaster]

SEQ ID NO: 92605 - protein, 193 aa, Arabidopsis thaliana; identical to SEQ ID NO: 88849
  peptide (1)..(193): Ceres Seq. ID no. 12713047
  misc_feature (1)..(193): Homolog of NCBI NO: 30681030 NR Description: expressed protein [Arabidopsis thaliana]
  misc_feature (1)..(184): Homolog of NCBI NO: 7487558 NR Description: hypothetical protein T30A10.60 - Arabidopsis >gi|5881775|emb|CAB55693.1| putative protein [Arabidopsis >gi|7267572|emb|CAB78053.1| putative protein [Arabidopsis
  misc_feature (1)..(188): Homolog of NCBI NO: 15219873 NR Description: hypothetical protein; protein id: At1g61150.1 thaliana] >gi|27808548|gb|AAO24554.1| At1g61150 [Arabidopsis
  misc_feature (1)..(185): Homolog of NCBI NO: 25404311 NR Description: hypothetical protein F11P17.12 [imported] - thaliana >gi|2443886|gb|AAB71479.1| Unknown protein [Arabidopsis
  misc_feature (1)..(188): Homolog of NCBI NO: 26451919 NR Description: unknown protein [Arabidopsis thaliana]
  misc_feature (1)..(193): Homolog of NCBI NO: 8923557 NR Description: chromosome 20 open reading frame 11; two hybrid protein 1 [Homo sapiens] >gi|28201788|sp|Q9NWU2|CT11_HUMAN C20orf11 >gi|7020818|dbj|BAA91285.1| unnamed protein product
  misc_feature (1)..(193): Homolog of NCBI NO: 21594655 NR Description: chromosome 20 open reading frame 11 [Homo sapiens]
  misc_feature (1)..(193): Homolog of NCBI NO: 20863687 NR Description: RIKEN cDNA 2310003C23 [Mus musculus] RIKEN cDNA 2310003C23 [Mus musculus] similar to RIKEN cDNA 2310003C23 [Mus musculus] [Rattus
  misc_feature (1)..(188): Homolog of NCBI NO: 37748055 NR Description: Unknown (protein for MGC:73100) [Danio rerio]
  misc_feature (1)..(188): Homolog of NCBI NO: 24643081 NR Description: CG6617-PA [Drosophila melanogaster]

SEQ ID NO: 92606 - DNA, 450 bp, Arabidopsis thaliana; identical to SEQ ID NO: 88850
  misc_feature (1)..(450): Ceres Seq. ID no. 12713059
  misc_feature: MA Experiment ID: 108434 Result: Up-regulated in Transcription
  misc_feature: MA Experiment 108434 PARAMETER Experiment Name: At_Root_Tips_cDNA_P Parameter: Tissue Value: Root Tips
  misc_feature: MA Experiment ID: 108462 Result: Down-regulated in Transcription
  misc_feature: MA Experiment 108462 PARAMETER Experiment Name: At_Germinating_Seeds_cDNA_P Parameter: Age (day) Value: 2 vs. 0
  misc_feature: MA Experiment 108462 PARAMETER Experiment Name: At_Germinating_Seeds_cDNA_P Parameter: Tissue Value: Germinating Seeds
  misc_feature: MA Experiment ID: 108463 Result: Down-regulated in Transcription
  misc_feature: MA Experiment 108463 PARAMETER Experiment Name: At_Germinating_Seeds_cDNA_P Parameter: Age (day) Value: 3 vs. 0
  misc_feature: MA Experiment 108463 PARAMETER Experiment Name: At_Germinating_Seeds_cDNA_P Parameter: Tissue Value: Germinating Seeds
  misc_feature: MA Experiment ID: 108464 Result: Down-regulated in Transcription
  misc_feature: MA Experiment 108464 PARAMETER Experiment Name: At_Germinating_Seeds_cDNA_P Parameter: Age (day) Value: 4 vs. 0
  misc_feature: MA Experiment 108464 PARAMETER Experiment Name: At_Germinating_Seeds_cDNA_P Parameter: Tissue Value: Germinating Seeds
  misc_feature: MA Experiment ID: 108573 Result: Down-regulated in Transcription
  misc_feature: MA Experiment 108573 PARAMETER Experiment Name: At_Drought_cDNA_P Parameter: Timepoint (hr) Value: 6
  misc_feature: MA Experiment 108573 PARAMETER Experiment Name: At_Drought_cDNA_P Parameter: Tissue Value: Aerial
  misc_feature: MA Experiment 108573 PARAMETER Experiment Name: At_Drought_cDNA_P Parameter: Treatment Value: Drought vs. No Drought
  misc_feature: MA Experiment ID: 108579 Result: Up-regulated in Transcription
  misc_feature: MA Experiment 108579 PARAMETER Experiment Name: At_4deg_Cold_cDNA_P Parameter: Temperature (deg C) Value: 4 vs. 22
  misc_feature: MA Experiment 108579 PARAMETER Experiment Name: At_4deg_Cold_cDNA_P Parameter: Timepoint (hr) Value: 6
  misc_feature: MA Experiment 108579 PARAMETER Experiment Name: At_4deg_Cold_cDNA_P Parameter: Tissue Value: Aerial
  misc_feature: MA Experiment ID: 20000113 Result: Down-regulated in Transcription
  misc_feature: MA Experiment 20000113 PARAMETER Experiment Name: At_42deg_Heat_cDNA_P Parameter: Temperature (deg C) Value: 42 vs. 22
  misc_feature: MA Experiment 20000113 PARAMETER Experiment Name: At_42deg_Heat_cDNA_P Parameter: Timepoint (hr) Value: 8
  misc_feature: MA Experiment 20000113 PARAMETER Experiment Name: At_42deg_Heat_cDNA_P Parameter: Tissue Value: Aerial

SEQ ID NO: 92607 - protein, 149 aa, Arabidopsis thaliana; identical to SEQ ID NO: 21514
  peptide (1)..(149): Ceres Seq. ID no. 12713060
  misc_feature (2)..(138): Pfam Name: Nucleoside diphosphate kinase Pfam Description: Nucleoside diphosphate kinase
  misc_feature (1)..(149): Homolog of NCBI NO: 730129 NR Description: Nucleoside diphosphate kinase I (NDK I) (NDP
  misc_feature (1)..(149): Homolog of NCBI NO: 18413214 NR Description: nucleoside-diphosphate kinase; protein id:
  misc_feature (3)..(149): Homolog of NCBI NO: 322552 NR Description: nucleoside-diphosphate kinase (EC 2.7.4.6) - thaliana (fragment) >gi|16396|emb|CAA49170.1| nucleoside
  misc_feature (7)..(149): Homolog of NCBI NO: 13899069 NR Description: Unknown protein [Arabidopsis thaliana]
  misc_feature (1)..(148): Homolog of NCBI NO: 19570344 NR Description: nucleoside diphosphate kinase 1 [Brassica rapa]
  misc_feature (2)..(148): Homolog of NCBI NO: 1389640 NR Description: PNDKN1 [Pisum sativum]
  misc_feature (2)..(148): Homolog of NCBI NO: 1346672 NR Description: Nucleoside diphosphate kinase I (NDK I) (NDP
  misc_feature (1)..(149): Homolog of NCBI NO: 322551 NR Description: nucleoside-diphosphate kinase (EC 2.7.4.6) - thaliana >gi|16398|emb|CAA49173.1| nucleoside diphosphate kinase
  misc_feature (1)..(148): Homolog of NCBI NO: 2498076 NR Description: NUCLEOSIDE DIPHOSPHATE KINASE (NDK) (NDP KINASE)

SEQ ID NO: 92608 - protein, 143 aa, Arabidopsis thaliana; identical to SEQ ID NO: 21515
  peptide (1)..(143): Ceres Seq. ID no. 12713061
  misc_feature (1)..(132): Pfam Name: Nucleoside diphosphate kinase Pfam Description: Nucleoside diphosphate kinase
  misc_feature (1)..(143): Homolog of NCBI NO: 730129 NR Description: Nucleoside diphosphate kinase I (NDK I) (NDP
  misc_feature (1)..(143): Homolog of NCBI NO: 18413214 NR Description: nucleoside-diphosphate kinase; protein id:
  misc_feature (1)..(143): Homolog of NCBI NO: 322552 NR Description: nucleoside-diphosphate kinase (EC 2.7.4.6) - thaliana (fragment) >gi|16396|emb|CAA49170.1| nucleoside
  misc_feature (1)..(143): Homolog of NCBI NO: 13899069 NR Description: Unknown protein [Arabidopsis thaliana]
  misc_feature (1)..(142): Homolog of NCBI NO: 19570344 NR Description: nucleoside diphosphate kinase 1 [Brassica rapa]
  misc_feature (1)..(142): Homolog of NCBI NO: 1389640 NR Description: PNDKN1 [Pisum sativum]
  misc_feature (1)..(142): Homolog of NCBI NO: 1346672 NR Description: Nucleoside diphosphate kinase I (NDK I) (NDP
  misc_feature (1)..(143): Homolog of NCBI NO: 322551 NR Description: nucleoside-diphosphate kinase (EC 2.7.4.6) - thaliana >gi|16398|emb|CAA49173.1| nucleoside diphosphate kinase
  misc_feature (1)..(142): Homolog of NCBI NO: 2498076 NR Description: NUCLEOSIDE DIPHOSPHATE KINASE (NDK) (NDP KINASE)

SEQ ID NO: 92609 - protein, 77 aa, Arabidopsis thaliana; identical to SEQ ID NO: 21516
  peptide (1)..(77): Ceres Seq. ID no. 12713062
  misc_feature (1)..(66): Pfam Name: Nucleoside diphosphate kinase Pfam Description: Nucleoside diphosphate kinase
  misc_feature (1)..(77): Homolog of NCBI NO: 730129 NR Description: Nucleoside diphosphate kinase I (NDK I) (NDP
  misc_feature (1)..(77): Homolog of NCBI NO: 18413214 NR Description: nucleoside-diphosphate kinase; protein id:
  misc_feature (1)..(77): Homolog of NCBI NO: 322552 NR Description: nucleoside-diphosphate kinase (EC 2.7.4.6) - thaliana (fragment) >gi|16396|emb|CAA49170.1| nucleoside
  misc_feature (1)..(77): Homolog of NCBI NO: 13899069 NR Description: Unknown protein [Arabidopsis thaliana]
  misc_feature (1)..(76): Homolog of NCBI NO: 19570344 NR Description: nucleoside diphosphate kinase 1 [Brassica rapa]
  misc_feature (1)..(76): Homolog of NCBI NO: 1389640 NR Description: PNDKN1 [Pisum sativum]
  misc_feature (1)..(76): Homolog of NCBI NO: 1346672 NR Description: Nucleoside diphosphate kinase I (NDK I) (NDP
  misc_feature (1)..(77): Homolog of NCBI NO: 322551 NR Description: nucleoside-diphosphate kinase (EC 2.7.4.6) - thaliana >gi|16398|emb|CAA49173.1| nucleoside diphosphate kinase
  misc_feature (1)..(76): Homolog of NCBI NO: 2498076 NR Description: NUCLEOSIDE DIPHOSPHATE KINASE (NDK) (NDP KINASE)

SEQ ID NO: 92610 - DNA, 1227 bp, Arabidopsis thaliana; identical to SEQ ID NO: 88854
  misc_feature (1)..(1227): Ceres Seq. ID no. 12713115
  misc_feature: MA Experiment ID: 20000328 Result: Up-regulated in Transcription
  misc_feature: MA Experiment 20000328 PARAMETER Experiment Name: At_42deg_Heat_Sub_P Parameter: Age (day) Value: 14
  misc_feature: MA Experiment 20000328 PARAMETER Experiment Name: At_42deg_Heat_Sub_P Parameter: Organism Value: A. thaliana
  misc_feature: MA Experiment 20000328 PARAMETER Experiment Name: At_42deg_Heat_Sub_P Parameter: Plant Line Value: WS
  misc_feature: MA Experiment 20000328 PARAMETER Experiment Name: At_42deg_Heat_Sub_P Parameter: Temperature (deg C) Value: 42 vs. 22
  misc_feature: MA Experiment 20000328 PARAMETER Experiment Name: At_42deg_Heat_Sub_P Parameter: Timepoint (hr) Value: 6
  misc_feature: MA Experiment 20000328 PARAMETER Experiment Name: At_42deg_Heat_Sub_P Parameter: Tissue Value: Aerial
  misc_feature: MA Experiment ID: 20000347 Result: Up-regulated in Transcription
  misc_feature: MA Experiment 20000347 PARAMETER Experiment Name: At_2mM_SA_Sub_P Parameter: Age (day) Value: 14
  misc_feature: MA Experiment 20000347 PARAMETER Experiment Name: At_2mM_SA_Sub_P Parameter: Organism Value: A. thaliana
  misc_feature: MA Experiment 20000347 PARAMETER Experiment Name: At_2mM_SA_Sub_P Parameter: Plant Line Value: WS
  misc_feature: MA Experiment 20000347 PARAMETER Experiment Name: At_2mM_SA_Sub_P Parameter: Timepoint (hr) Value: 6
  misc_feature: MA Experiment 20000347 PARAMETER Experiment Name: At_2mM_SA_Sub_P Parameter: Tissue Value: Aerial
  misc_feature: MA Experiment 20000347 PARAMETER Experiment Name: At_2mM_SA_Sub_P Parameter: Treatment Value: 2mM SA vs. No Treatment

SEQ ID NO: 92611 - protein, 408 aa, Arabidopsis thaliana; identical to SEQ ID NO: 88855
  peptide (1)..(408): Ceres Seq. ID no. 12713116
  misc_feature (1)..(408): Homolog of NCBI NO: 18395292 NR Description: unknown protein; protein id: At2g02060.1
  misc_feature (61)..(406): Homolog of NCBI NO: 15223826 NR Description: hypothetical protein common family; protein id:
  misc_feature (17)..(387): Homolog of NCBI NO: 21536907 NR Description: regulatory protein [Arabidopsis thaliana]
  misc_feature (48)..(386): Homolog of NCBI NO: 38344278 NR Description: OSJNBa0013K16.10 [Oryza sativa (japonica
  misc_feature (45)..(385): Homolog of NCBI NO: 15235236 NR Description: hypothetical protein common family; protein id:
  misc_feature (67)..(389): Homolog of NCBI NO: 23306127 NR Description: Putataive InsB from Escherichia coli [Oryza
  misc_feature (119)..(384): Homolog of NCBI NO: 6063544 NR Description: similar to Arabidopsis thaliana chromosome 2, BAC
  misc_feature (44)..(381): Homolog of NCBI NO: 15235236 NR Description: hypothetical protein common family; protein id:
  misc_feature (73)..(384): Homolog of NCBI NO: 34897442 NR Description: putative regulatory protein [Oryza sativa
  misc_feature (107)..(384): Homolog of NCBI NO: 18414558 NR Description: hypothetical protein common family; protein id:

SEQ ID NO: 92612 - protein, 213 aa, Arabidopsis thaliana; identical to SEQ ID NO: 88856
  peptide (1)..(213): Ceres Seq. ID no. 12713117
  misc_feature (1)..(213): Homolog of NCBI NO: 18395292 NR Description: unknown protein; protein id: At2g02060.1
  misc_feature (1)..(211): Homolog of NCBI NO: 15223826 NR Description: hypothetical protein common family; protein id:
  misc_feature (1)..(192): Homolog of NCBI NO: 21536907 NR Description: regulatory protein [Arabidopsis thaliana]
  misc_feature (1)..(191): Homolog of NCBI NO: 38344278 NR Description: OSJNBa0013K16.10 [Oryza sativa (japonica
  misc_feature (1)..(190): Homolog of NCBI NO: 15235236 NR Description: hypothetical protein common family; protein id:
  misc_feature (1)..(194): Homolog of NCBI NO: 23306127 NR Description: Putataive InsB from Escherichia coli [Oryza
  misc_feature (1)..(189): Homolog of NCBI NO: 6063544 NR Description: similar to Arabidopsis thaliana chromosome 2, BAC
  misc_feature (1)..(186): Homolog of NCBI NO: 15235236 NR Description: hypothetical protein common family; protein id:
  misc_feature (1)..(189): Homolog of NCBI NO: 34897442 NR Description: putative regulatory protein [Oryza sativa
  misc_feature (1)..(189): Homolog of NCBI NO: 18414558 NR Description: hypothetical protein common family; protein id:

SEQ ID NO: 92613 - protein, 206 aa, Arabidopsis thaliana; identical to SEQ ID NO: 88857
  peptide (1)..(206): Ceres Seq. ID no. 12713118
  misc_feature (1)..(206): Homolog of NCBI NO: 18395292 NR Description: unknown protein; protein id: At2g02060.1
  misc_feature (1)..(204): Homolog of NCBI NO: 15223826 NR Description: hypothetical protein common family; protein id:
  misc_feature (1)..(185): Homolog of NCBI NO: 21536907 NR Description: regulatory protein [Arabidopsis thaliana]
  misc_feature (1)..(184): Homolog of NCBI NO: 38344278 NR Description: OSJNBa0013K16.10 [Oryza sativa (japonica
  misc_feature (1)..(183): Homolog of NCBI NO: 15235236 NR Description: hypothetical protein common family; protein id:
  misc_feature (1)..(187): Homolog of NCBI NO: 23306127 NR Description: Putataive InsB from Escherichia coli [Oryza
  misc_feature (1)..(182): Homolog of NCBI NO: 6063544 NR Description: similar to Arabidopsis thaliana chromosome 2, BAC
  misc_feature (1)..(179): Homolog of NCBI NO: 15235236 NR Description: hypothetical protein common family; protein id:
  misc_feature (1)..(182): Homolog of NCBI NO: 34897442 NR Description: putative regulatory protein [Oryza sativa
  misc_feature (1)..(182): Homolog of NCBI NO: 18414558 NR Description: hypothetical protein common family; protein id:

SEQ ID NO: 92614 - DNA, 496 bp, Arabidopsis thaliana; identical to SEQ ID NO: 88858
  misc_feature (1)..(496): Ceres Seq. ID no. 12713134
  misc_feature: MA Experiment ID: 108434 Result: Down-regulated in Transcription
  misc_feature: MA Experiment 108434 PARAMETER Experiment Name: At_Root_Tips_cDNA_P Parameter: Tissue Value: Root Tips
  misc_feature: MA Experiment ID: 108463 Result: Up-regulated in Transcription
  misc_feature: MA Experiment 108463 PARAMETER Experiment Name: At_Germinating_Seeds_cDNA_P Parameter: Age (day) Value: 3 vs. 0
  misc_feature: MA Experiment 108463 PARAMETER Experiment Name: At_Germinating_Seeds_cDNA_P Parameter: Tissue Value: Germinating Seeds
  misc_feature: MA Experiment ID: 108464 Result: Up-regulated in Transcription
  misc_feature: MA Experiment 108464 PARAMETER Experiment Name: At_Germinating_Seeds_cDNA_P Parameter: Age (day) Value: 4 vs. 0
  misc_feature: MA Experiment 108464 PARAMETER Experiment Name: At_Germinating_Seeds_cDNA_P Parameter: Tissue Value: Germinating Seeds
  misc_feature: MA Experiment ID: 108579 Result: Up-regulated in Transcription
  misc_feature: MA Experiment 108579 PARAMETER Experiment Name: At_4deg_Cold_cDNA_P Parameter: Temperature (deg C) Value: 4 vs. 22
  misc_feature: MA Experiment 108579 PARAMETER Experiment Name: At_4deg_Cold_cDNA_P Parameter: Timepoint (hr) Value: 6
  misc_feature: MA Experiment 108579 PARAMETER Experiment Name: At_4deg_Cold_cDNA_P Parameter: Tissue Value: Aerial
  misc_feature: MA Experiment ID: 20000087 Result: Up-regulated in Transcription
  misc_feature: MA Experiment 20000087 PARAMETER Experiment Name: At_100uM_ABA_Mutants_cDNA_P Parameter: Plant Line Value: WS
  misc_feature: MA Experiment 20000087 PARAMETER Experiment Name: At_100uM_ABA_Mutants_cDNA_P Parameter: Timepoint (hr) Value: 6
  misc_feature: MA Experiment 20000087 PARAMETER Experiment Name: At_100uM_ABA_Mutants_cDNA_P Parameter: Tissue Value: Aerial
  misc_feature: MA Experiment 20000087 PARAMETER Experiment Name: At_100uM_ABA_Mutants_cDNA_P Parameter: Treatment Value: 100uM ABA vs. No Treatment
  misc_feature: MA Experiment ID: 20000180 Result: Up-regulated in Transcription
  misc_feature: MA Experiment 20000180 PARAMETER Experiment Name: At_Germinating_Seeds_P Parameter: Age (hr) Value: 24 vs. 0
  misc_feature: MA Experiment 20000180 PARAMETER Experiment Name: At_Germinating_Seeds_P Parameter: Tissue Value: Germinating Seeds
  misc_feature: MA Experiment ID: 20000185 Result: Up-regulated in Transcription
  misc_feature: MA Experiment 20000185 PARAMETER Experiment Name: At_Roots__P Parameter: Age (day) Value: 7 vs. 21
  misc_feature: MA Experiment 20000185 PARAMETER Experiment Name: At_Roots__P Parameter: Organism Value: A. thaliana
  misc_feature: MA Experiment 20000185 PARAMETER Experiment Name: At_Roots__P Parameter: Tissue Value: Roots vs. Whole Plant
  misc_feature: MA Experiment ID: 20001560 Result: Up-regulated in Transcription
  misc_feature: MA Experiment 20001560 PARAMETER Experiment Name: At_Drought_Soil_Dry_P Parameter: Age (day) Value: 28
  misc_feature: MA Experiment 20001560 PARAMETER Experiment Name: At_Drought_Soil_Dry_P Parameter: Organism Value: A. thaliana
  misc_feature: MA Experiment 20001560 PARAMETER Experiment Name: At_Drought_Soil_Dry_P Parameter: Plant Line Value: WS
  misc_feature: MA Experiment 20001560 PARAMETER Experiment Name: At_Drought_Soil_Dry_P Parameter: Post Timepoint (hr) Value: None
  misc_feature: MA Experiment 20001560 PARAMETER Experiment Name: At_Drought_Soil_Dry_P Parameter: Post-Treatment Value: None
  misc_feature: MA Experiment 20001560 PARAMETER Experiment Name: At_Drought_Soil_Dry_P Parameter: Timepoint (day) Value: 14
  misc_feature: MA Experiment 20001560 PARAMETER Experiment Name: At_Drought_Soil_Dry_P Parameter: Treatment Value: Drought vs. No Drought
  misc_feature: MA Experiment ID: 20001904 Result: Up-regulated in Transcription
  misc_feature: MA Experiment 20001904 PARAMETER Experiment Name: At_Drought_Reproduction_P Parameter: Age (day) Value: 37
  misc_feature: MA Experiment 20001904 PARAMETER Experiment Name: At_Drought_Reproduction_P Parameter: Organism Value: A. thaliana
  misc_feature: MA Experiment 20001904 PARAMETER Experiment Name: At_Drought_Reproduction_P Parameter: Plant Line Value: WS
  misc_feature: MA Experiment 20001904 PARAMETER Experiment Name: At_Drought_Reproduction_P Parameter: Timepoint (day) Value: 7
  misc_feature: MA Experiment 20001904 PARAMETER Experiment Name: At_Drought_Reproduction_P Parameter: Tissue Value: Rosettes
  misc_feature: MA Experiment 20001904 PARAMETER Experiment Name: At_Drought_Reproduction_P Parameter: Treatment Value: Drought vs. No Drought

SEQ ID NO: 92615 - protein, 94 aa, Arabidopsis thaliana; identical to SEQ ID NO: 88859
  peptide (1)..(94): Ceres Seq. ID no. 12713135
  misc_feature (48)..(94): Pfam Name: Gamma-thionins family Pfam Description: Gamma-thionins family
  misc_feature (18)..(94): Homolog of NCBI NO: 15226878 NR Description: plant defensin protein, putative (PDF2.3); id: At2g02130.1, supported by cDNA: gi_15293090, supported by
  misc_feature (18)..(94): Homolog of NCBI NO: 7488534 NR Description: proteinase inhibitor II - turnip
  misc_feature (18)..(94): Homolog of NCBI NO: 15226872 NR Description: plant defensin protein, putative (PDF2.2); id: At2g02100.1, supported by cDNA: gi_13878184 [Arabidopsis
  misc_feature (18)..(94): Homolog of NCBI NO: 15226876 NR Description: plant defensin protein, putative (PDF2.1);
  misc_feature (18)..(94): Homolog of NCBI NO: 21553559 NR Description: protease inhibitor II [Arabidopsis thaliana]
  misc_feature (18)..(94): Homolog of NCBI NO: 22330359 NR Description: plant defensin protein, putative (PDF2.4);
  misc_feature (18)..(94): Homolog of NCBI NO: 11387188 NR Description: Flower-specific gamma-thionin precursor (Defensin >gi|7672659|gb|AAF66591.1|AF141131_1 defensin [Helianthus annuus]
  misc_feature (18)..(94): Homolog of NCBI NO: 28624546 NR Description: defensin protein 1 [Prunus persica]
  misc_feature (18)..(94): Homolog of NCBI NO: 16225423 NR Description: putative gamma-thionin [Castanea sativa]
  misc_feature (18)..(94): Homolog of NCBI NO: 17066707 NR Description: defensin protein precursor [Capsicum annuum]

SEQ ID NO: 92616 - protein, 77 aa, Arabidopsis thaliana; identical to SEQ ID NO: 25733
  peptide (1)..(77): Ceres Seq. ID no. 12713136
  misc_feature (31)..(77): Pfam Name: Gamma-thionins family Pfam Description: Gamma-thionins family
  misc_feature (1)..(77): Homolog of NCBI NO: 15226878 NR Description: plant defensin protein, putative (PDF2.3); id: At2g02130.1, supported by cDNA: gi_15293090, supported by
  misc_feature (1)..(77): Homolog of NCBI NO: 7488534 NR Description: proteinase inhibitor II - turnip
  misc_feature (1)..(77): Homolog of NCBI NO: 15226872 NR Description: plant defensin protein, putative (PDF2.2); id: At2g02100.1, supported by cDNA: gi_13878184 [Arabidopsis
  misc_feature (1)..(77): Homolog of NCBI NO: 15226876 NR Description: plant defensin protein, putative (PDF2.1);
  misc_feature (1)..(77): Homolog of NCBI NO: 21553559 NR Description: protease inhibitor II [Arabidopsis thaliana]
  misc_feature (1)..(77): Homolog of NCBI NO: 22330359 NR Description: plant defensin protein, putative (PDF2.4);
  misc_feature (1)..(77): Homolog of NCBI NO: 11387188 NR Description: Flower-specific gamma-thionin precursor (Defensin >gi|7672659|gb|AAF66591.1|AF141131_1 defensin [Helianthus annuus]
  misc_feature (1)..(77): Homolog of NCBI NO: 28624546 NR Description: defensin protein 1 [Prunus persica]
  misc_feature (1)..(77): Homolog of NCBI NO: 16225423 NR Description: putative gamma-thionin [Castanea sativa]
  misc_feature (1)..(77): Homolog of NCBI NO: 17066707 NR Description: defensin protein precursor [Capsicum annuum]

SEQ ID NO: 92617 - protein, 62 aa, Arabidopsis thaliana; identical to SEQ ID NO: 25734
  peptide (1)..(62): Ceres Seq. ID no. 12713137
  misc_feature (16)..(62): Pfam Name: Gamma-thionins family Pfam Description: Gamma-thionins family
  misc_feature (1)..(62): Homolog of NCBI NO: 15226878 NR Description: plant defensin protein, putative (PDF2.3); id: At2g02130.1, supported by cDNA: gi_15293090, supported by
  misc_feature (1)..(62): Homolog of NCBI NO: 7488534 NR Description: proteinase inhibitor II - turnip
  misc_feature (1)..(62): Homolog of NCBI NO: 15226872 NR Description: plant defensin protein, putative (PDF2.2); id: At2g02100.1, supported by cDNA: gi_13878184 [Arabidopsis
  misc_feature (1)..(62): Homolog of NCBI NO: 15226876 NR Description: plant defensin protein, putative (PDF2.1);
  misc_feature (1)..(62): Homolog of NCBI NO: 21553559 NR Description: protease inhibitor II [Arabidopsis thaliana]
  misc_feature (1)..(62): Homolog of NCBI NO: 22330359 NR Description: plant defensin protein, putative (PDF2.4);
  misc_feature (1)..(62): Homolog of NCBI NO: 11387188 NR Description: Flower-specific gamma-thionin precursor (Defensin >gi|7672659|gb|AAF66591.1|AF141131_1 defensin [Helianthus annuus]
  misc_feature (1)..(62): Homolog of NCBI NO: 28624546 NR Description: defensin protein 1 [Prunus persica]
  misc_feature (1)..(62): Homolog of NCBI NO: 16225423 NR Description: putative gamma-thionin [Castanea sativa]
  misc_feature (1)..(62): Homolog of NCBI NO: 17066707 NR Description: defensin protein precursor [Capsicum annuum]

SEQ ID NO: 92618 - protein, 50 aa, Arabidopsis thaliana; identical to SEQ ID NO: 88862
  peptide (1)..(50): Ceres Seq. ID no. 12713138

SEQ ID NO: 92619 - DNA, 2016 bp, Arabidopsis thaliana; identical to SEQ ID NO: 88863
  misc_feature (1)..(2016): Ceres Seq. ID no. 12713178
  misc_feature: MA Experiment ID: 20000314 Result: Up-regulated in Transcription
  misc_feature: MA Experiment 20000314 PARAMETER Experiment Name: At_14day_Shoots-Roots_Sub_P Parameter: Age (day) Value: 14
  misc_feature: MA Experiment 20000314 PARAMETER Experiment Name: At_14day_Shoots-Roots_Sub_P Parameter: Organism Value: A. thaliana
  misc_feature: MA Experiment 20000314 PARAMETER Experiment Name: At_14day_Shoots-Roots_Sub_P Parameter: Plant Line Value: WS
  misc_feature: MA Experiment 20000314 PARAMETER Experiment Name: At_14day_Shoots-Roots_Sub_P Parameter: Tissue Value: Roots vs. Whole Plant
  misc_feature: MA Experiment ID: 20000355 Result: Up-regulated in Transcription
  misc_feature: MA Experiment 20000355 PARAMETER Experiment Name: At_Siliques_Sub_P Parameter: Age (day) Value: 21
  misc_feature: MA Experiment 20000355 PARAMETER Experiment Name: At_Siliques_Sub_P Parameter: Organism Value: A. thaliana
  misc_feature: MA Experiment 20000355 PARAMETER Experiment Name: At_Siliques_Sub_P Parameter: Plant Line Value: WS
  misc_feature: MA Experiment 20000355 PARAMETER Experiment Name: At_Siliques_Sub_P Parameter: Tissue Value: Less Than 5mm Siliques vs. Whole Plant
  misc_feature: MA Experiment ID: 20000440 Result: Up-regulated in Transcription
  misc_feature: MA Experiment 20000440 PARAMETER Experiment Name: At_Closed-Flower__Sub_P Parameter: Tissue Value: Closed Flower vs. Whole Plant
  misc_feature: MA Experiment ID: 20001806 Result: Up-regulated in Transcription
  misc_feature: MA Experiment 20001806 PARAMETER Experiment Name: At_50mM_NH4NO3_L-to-H_Sub_P Parameter: Timepoint (hr) Value: 4
  misc_feature: MA Experiment 20001806 PARAMETER Experiment Name: At_50mM_NH4NO3_L-to-H_Sub_P Parameter: Tissue Value: Leaf
  misc_feature: MA Experiment 20001806 PARAMETER Experiment Name: At_50mM_NH4NO3_L-to-H_Sub_P Parameter: Treatment Value: 50mM NH4NO3 vs 100mM Mannitol

SEQ ID NO: 92620 - protein, 671 aa, Arabidopsis thaliana; identical to SEQ ID NO: 88864
  peptide (1)..(671): Ceres Seq. ID no. 12713179
  misc_feature (424)..(640): Pfam Name: Phosphoglycerate mutase family Pfam Description: Phosphoglycerate mutase family
  misc_feature (346)..(666): Homolog of NCBI NO: 18395083 NR Description: expressed protein; protein id: At1g22170.1, by cDNA: 33490. [Arabidopsis thaliana] >gi|25511655|pir||C86354
  misc_feature (346)..(666): Homolog of NCBI NO: 21618275 NR Description: unknown [Arabidopsis thaliana]
  misc_feature (346)..(666): Homolog of NCBI NO: 21539557 NR Description: unknown protein [Arabidopsis thaliana]
  misc_feature (483)..(671): Homolog of NCBI NO: 15218201 NR Description: phosphoglycerate mutase, putative; protein id: [Arabidopsis thaliana] >gi|26451923|dbj|BAC43054.1| unknown [Arabidopsis thaliana] >gi|28372948|gb|AAO39956.1| At1g78050
  misc_feature (199)..(344): Homolog of NCBI NO: 15218200 NR Description: allergen, putative; protein id: At1g78040.1, by cDNA: 22488. [Arabidopsis thaliana] allergen, putative [Arabidopsis thaliana]
  misc_feature (199)..(344): Homolog of NCBI NO: 24417468 NR Description: unknown [Arabidopsis thaliana]
  misc_feature (424)..(639): Homolog of NCBI NO: 15618772 NR Description: Phosphoglycerate Mutase [Chlamydophila pneumoniae >gi|16752176|ref|NP_445543.1| phosphoglycerate mutase
  misc_feature (424)..(639): Homolog of NCBI NO: 15836396 NR Description: phosphoglycerate mutase [Chlamydophila pneumoniae
  misc_feature (424)..(645): Homolog of NCBI NO: 29840659 NR Description: phosphoglycerate mutase [Chlamydophila caviae >gi|29835009|gb|AAP05643.1| phosphoglycerate mutase
  misc_feature (426)..(645): Homolog of NCBI NO: 15834720 NR Description: phosphoglycerate mutase [Chlamydia muridarum]

SEQ ID NO: 92621 - protein, 644 aa, Arabidopsis thaliana; identical to SEQ ID NO: 88865
  peptide (1)..(644): Ceres Seq. ID no. 12713180
  misc_feature (397)..(613): Pfam Name: Phosphoglycerate mutase family Pfam Description: Phosphoglycerate mutase family
  misc_feature (319)..(639): Homolog of NCBI NO: 18395083 NR Description: expressed protein; protein id: At1g22170.1, by cDNA: 33490. [Arabidopsis thaliana] >gi|25511655|pir||C86354
  misc_feature (319)..(639): Homolog of NCBI NO: 21618275 NR Description: unknown [Arabidopsis thaliana]
  misc_feature (319)..(639): Homolog of NCBI NO: 21539557 NR Description: unknown protein [Arabidopsis thaliana]
  misc_feature (456)..(644): Homolog of NCBI NO: 15218201 NR Description: phosphoglycerate mutase, putative; protein id: [Arabidopsis thaliana] >gi|26451923|dbj|BAC43054.1| unknown [Arabidopsis thaliana] >gi|28372948|gb|AAO39956.1| At1g78050
  misc_feature (172)..(317): Homolog of NCBI NO: 15218200 NR Description: allergen, putative; protein id: At1g78040.1, by cDNA: 22488. [Arabidopsis thaliana] allergen, putative [Arabidopsis thaliana]
  misc_feature (172)..(317): Homolog of NCBI NO: 24417468 NR Description: unknown [Arabidopsis thaliana]
  misc_feature (397)..(612): Homolog of NCBI NO: 15618772 NR Description: Phosphoglycerate Mutase [Chlamydophila pneumoniae >gi|16752176|ref|NP_445543.1| phosphoglycerate mutase
  misc_feature (397)..(612): Homolog of NCBI NO: 15836396 NR Description: phosphoglycerate mutase [Chlamydophila pneumoniae
  misc_feature (397)..(618): Homolog of NCBI NO: 29840659 NR Description: phosphoglycerate mutase [Chlamydophila caviae >gi|29835009|gb|AAP05643.1| phosphoglycerate mutase
  misc_feature (399)..(618): Homolog of NCBI NO: 15834720 NR Description: phosphoglycerate mutase [Chlamydia muridarum]

SEQ ID NO: 92622 - protein, 643 aa, Arabidopsis thaliana; identical to SEQ ID NO: 88866
  peptide (1)..(643): Ceres Seq. ID no. 12713181
  misc_feature (396)..(612): Pfam Name: Phosphoglycerate mutase family Pfam Description: Phosphoglycerate mutase family
  misc_feature (318)..(638): Homolog of NCBI NO: 18395083 NR Description: expressed protein; protein id: At1g22170.1, by cDNA: 33490. [Arabidopsis thaliana] >gi|25511655|pir||C86354
  misc_feature (318)..(638): Homolog of NCBI NO: 21618275 NR Description: unknown [Arabidopsis thaliana]
  misc_feature (318)..(638): Homolog of NCBI NO: 21539557 NR Description: unknown protein [Arabidopsis thaliana]
  misc_feature (455)..(643): Homolog of NCBI NO: 15218201 NR Description: phosphoglycerate mutase, putative; protein id: [Arabidopsis thaliana] >gi|26451923|dbj|BAC43054.1| unknown [Arabidopsis thaliana] >gi|28372948|gb|AAO39956.1| At1g78050
  misc_feature (171)..(316): Homolog of NCBI NO: 15218200 NR Description: allergen, putative; protein id: At1g78040.1, by cDNA: 22488. [Arabidopsis thaliana] allergen, putative [Arabidopsis thaliana]
  misc_feature (171)..(316): Homolog of NCBI NO: 24417468 NR Description: unknown [Arabidopsis thaliana]
  misc_feature (396)..(611): Homolog of NCBI NO: 15618772 NR Description: Phosphoglycerate Mutase [Chlamydophila pneumoniae >gi|16752176|ref|NP_445543.1| phosphoglycerate mutase
  misc_feature (396)..(611): Homolog of NCBI NO: 15836396 NR Description: phosphoglycerate mutase [Chlamydophila pneumoniae
  misc_feature (396)..(617): Homolog of NCBI NO: 29840659 NR Description: phosphoglycerate mutase [Chlamydophila caviae >gi|29835009|gb|AAP05643.1| phosphoglycerate mutase
  misc_feature (398)..(617): Homolog of NCBI NO: 15834720 NR Description: phosphoglycerate mutase [Chlamydia muridarum]

SEQ ID NO: 92623 - DNA, 890 bp, Arabidopsis thaliana; identical to SEQ ID NO: 88867
  misc_feature (1)..(890): Ceres Seq. ID no. 12713249
  misc_feature: MA Experiment ID: 108434 Result: Down-regulated in Transcription
  misc_feature: MA Experiment 108434 PARAMETER Experiment Name: At_Root_Tips_cDNA_P Parameter: Tissue Value: Root Tips
  misc_feature: MA Experiment ID: 108461 Result: Up-regulated in Transcription
  misc_feature: MA Experiment 108461 PARAMETER Experiment Name: At_Germinating_Seeds_cDNA_P Parameter: Age (day) Value: 1 vs. 0
  misc_feature: MA Experiment 108461 PARAMETER Experiment Name: At_Germinating_Seeds_cDNA_P Parameter: Tissue Value: Germinating Seeds
  misc_feature: MA Experiment ID: 108462 Result: Up-regulated in Transcription
  misc_feature: MA Experiment 108462 PARAMETER Experiment Name: At_Germinating_Seeds_cDNA_P Parameter: Age (day) Value: 2 vs. 0
  misc_feature: MA Experiment 108462 PARAMETER Experiment Name: At_Germinating_Seeds_cDNA_P Parameter: Tissue Value: Germinating Seeds
  misc_feature: MA Experiment ID: 108469 Result: Down-regulated in Transcription
  misc_feature: MA Experiment ID: 108474 Result: Up-regulated in Transcription
  misc_feature: MA Experiment 108474 PARAMETER Experiment Name: At_Drought_Flowers_cDNA_P Parameter: Timepoint (hr) Value: null
  misc_feature: MA Experiment 108474 PARAMETER Experiment Name: At_Drought_Flowers_cDNA_P Parameter: Treatment Value: Drought vs. No Drought
  misc_feature: MA Experiment ID: 108573 Result: Down-regulated in Transcription
  misc_feature: MA Experiment 108573 PARAMETER Experiment Name: At_Drought_cDNA_P Parameter: Timepoint (hr) Value: 6
  misc_feature: MA Experiment 108573 PARAMETER Experiment Name: At_Drought_cDNA_P Parameter: Tissue Value: Aerial
  misc_feature: MA Experiment 108573 PARAMETER Experiment Name: At_Drought_cDNA_P Parameter: Treatment Value: Drought vs. No Drought
  misc_feature: MA Experiment ID: 108579 Result: Up-regulated in Transcription
  misc_feature: MA Experiment 108579 PARAMETER Experiment Name: At_4deg_Cold_cDNA_P Parameter: Temperature (deg C) Value: 4 vs. 22
  misc_feature: MA Experiment 108579 PARAMETER Experiment Name: At_4deg_Cold_cDNA_P Parameter: Timepoint (hr) Value: 6
  misc_feature: MA Experiment 108579 PARAMETER Experiment Name: At_4deg_Cold_cDNA_P Parameter: Tissue Value: Aerial
  misc_feature: MA Experiment ID: 108595 Result: Down-regulated in Transcription
  misc_feature: MA Experiment 108595 PARAMETER Experiment Name: At_Ler-pi_Ovule_cDNA_P Parameter: Plant Line Value: null
  misc_feature: MA Experiment ID: 108668 Result: Down-regulated in Transcription
  misc_feature: MA Experiment 108668 PARAMETER Experiment Name: At_2mM_SA_cDNA_P Parameter: Plant Line Value: WS
  misc_feature: MA Experiment 108668 PARAMETER Experiment Name: At_2mM_SA_cDNA_P Parameter: Timepoint (hr) Value: 6
  misc_feature: MA Experiment 108668 PARAMETER Experiment Name: At_2mM_SA_cDNA_P Parameter: Treatment Value: 2mM SA vs. No Treatment
  misc_feature: MA Experiment ID: 20000071 Result: Down-regulated in Transcription
  misc_feature: MA Experiment 20000071 PARAMETER Experiment Name: At_100uM_ABA_Mutants_cDNA_P Parameter: Plant Line Value: CS8104
  misc_feature: MA Experiment 20000071 PARAMETER Experiment Name: At_100uM_ABA_Mutants_cDNA_P Parameter: Timepoint (hr) Value: 6
  misc_feature: MA Experiment 20000071 PARAMETER Experiment Name: At_100uM_ABA_Mutants_cDNA_P Parameter: Tissue Value: Aerial
  misc_feature: MA Experiment 20000071 PARAMETER Experiment Name: At_100uM_ABA_Mutants_cDNA_P Parameter: Treatment Value: 100uM ABA vs. No Treatment
  misc_feature: MA Experiment ID: 20000090 Result: Down-regulated in Transcription
  misc_feature: MA Experiment ID: 20000111 Result: Down-regulated in Transcription
  misc_feature: MA Experiment 20000111 PARAMETER Experiment Name: At_42deg_Heat_cDNA_P Parameter: Temperature (deg C) Value: 42 vs. 22
  misc_feature: MA Experiment 20000111 PARAMETER Experiment Name: At_42deg_Heat_cDNA_P Parameter: Timepoint (hr) Value: 6
  misc_feature: MA Experiment 20000111 PARAMETER Experiment Name: At_42deg_Heat_cDNA_P Parameter: Tissue Value: Aerial
  misc_feature: MA Experiment ID: 20000113 Result: Down-regulated in Transcription
  misc_feature: MA Experiment 20000113 PARAMETER Experiment Name: At_42deg_Heat_cDNA_P Parameter: Temperature (deg C) Value: 42 vs. 22
  misc_feature: MA Experiment 20000113 PARAMETER Experiment Name: At_42deg_Heat_cDNA_P Parameter: Timepoint (hr) Value: 8
  misc_feature: MA Experiment 20000113 PARAMETER Experiment Name: At_42deg_Heat_cDNA_P Parameter: Tissue Value: Aerial
  misc_feature: MA Experiment ID: 20000117 Result: Down-regulated in Transcription
  misc_feature: MA Experiment 20000117 PARAMETER Experiment Name: At_100uM_ABA_Mutants_cDNA_P Parameter: Plant Line Value: Columbia
  misc_feature: MA Experiment 20000117 PARAMETER Experiment Name: At_100uM_ABA_Mutants_cDNA_P Parameter: Timepoint (hr) Value: 6
  misc_feature: MA Experiment 20000117 PARAMETER Experiment Name: At_100uM_ABA_Mutants_cDNA_P Parameter: Tissue Value: Aerial
  misc_feature: MA Experiment 20000117 PARAMETER Experiment Name: At_100uM_ABA_Mutants_cDNA_P Parameter: Treatment Value: 100uM ABA vs. No Treatment
  misc_feature: MA Experiment ID: 20000180 Result: Up-regulated in Transcription
  misc_feature: MA Experiment 20000180 PARAMETER Experiment Name: At_Germinating_Seeds_P Parameter: Age (hr) Value: 24 vs. 0
  misc_feature: MA Experiment 20000180 PARAMETER Experiment Name: At_Germinating_Seeds_P Parameter: Tissue Value: Germinating Seeds
  misc_feature: MA Experiment ID: 20000182 Result: Down-regulated in Transcription
  misc_feature: MA Experiment 20000182 PARAMETER Experiment Name: At_2mM_SA_P Parameter: Age (day) Value: 14
  misc_feature: MA Experiment 20000182 PARAMETER Experiment Name: At_2mM_SA_P Parameter: Organism Value: A. thaliana
  misc_feature: MA Experiment 20000182 PARAMETER Experiment Name: At_2mM_SA_P Parameter: Plant Line Value: WS
  misc_feature: MA Experiment 20000182 PARAMETER Experiment Name: At_2mM_SA_P Parameter: Timepoint (hr) Value: 6
  misc_feature: MA Experiment 20000182 PARAMETER Experiment Name: At_2mM_SA_P Parameter: Tissue Value: Aerial
  misc_feature: MA Experiment 20000182 PARAMETER Experiment Name: At_2mM_SA_P Parameter: Treatment Value: 2mM SA vs. No Treatment
  misc_feature: MA Experiment ID: 20000227 Result: Down-regulated in Transcription
  misc_feature: MA Experiment 20000227 PARAMETER Experiment Name: At_Root-Tips-vs-Tops_P Parameter: Tissue Value: Root Tips vs. Root Tops
  misc_feature: MA Experiment ID: 20000234 Result: Down-regulated in Transcription
  misc_feature: MA Experiment 20000234 PARAMETER Experiment Name: At_Siliques_P Parameter: Age (day) Value: 21
  misc_feature: MA Experiment 20000234 PARAMETER Experiment Name: At_Siliques_P Parameter: Organism Value: A. thaliana
  misc_feature: MA Experiment 20000234 PARAMETER Experiment Name: At_Siliques_P Parameter: Plant Line Value: WS
  misc_feature: MA Experiment 20000234 PARAMETER Experiment Name: At_Siliques_P Parameter: Tissue Value: Less Than 5mm Siliques vs. Whole Plant
  misc_feature: MA Experiment ID: 20000235 Result: Down-regulated in Transcription
  misc_feature: MA Experiment 20000235 PARAMETER Experiment Name: At_Siliques_P Parameter: Age (day) Value: 21
  misc_feature: MA Experiment 20000235 PARAMETER Experiment Name: At_Siliques_P Parameter: Organism Value: A. thaliana
  misc_feature: MA Experiment 20000235 PARAMETER Experiment Name: At_Siliques_P Parameter: Plant Line Value: WS
  misc_feature: MA Experiment 20000235 PARAMETER Experiment Name: At_Siliques_P Parameter: Tissue Value: 5-10mm Siliques vs. Whole Plant
  misc_feature: MA Experiment ID: 20000264 Result: Down-regulated in Transcription
  misc_feature: MA Experiment 20000264 PARAMETER Experiment Name: At_Open_Flower_P Parameter: Age (day) Value: 21
  misc_feature: MA Experiment 20000264 PARAMETER Experiment Name: At_Open_Flower_P Parameter: Plant Line Value: WS
  misc_feature: MA Experiment 20000264 PARAMETER Experiment Name: At_Open_Flower_P Parameter: Tissue Value: Open Flower vs. Whole Plant
  misc_feature: MA Experiment ID: 20000286 Result: Down-regulated in Transcription
  misc_feature: MA Experiment 20000286 PARAMETER Experiment Name: At_Open_Flower_P Parameter: Age (day) Value: 21
  misc_feature: MA Experiment 20000286 PARAMETER Experiment Name: At_Open_Flower_P Parameter: Plant Line Value: WS
  misc_feature: MA Experiment 20000286 PARAMETER Experiment Name: At_Open_Flower_P Parameter: Tissue Value: Half Open vs. Whole Plant
  misc_feature: MA Experiment ID: 20000308 Result: Up-regulated in Transcription
  misc_feature: MA Experiment 20000308 PARAMETER Experiment Name: At_100mM_NaCl__P Parameter: Age (day) Value: 17
  misc_feature: MA Experiment 20000308 PARAMETER Experiment Name: At_100mM_NaCl__P Parameter: Organism Value: A. thaliana
  misc_feature: MA Experiment 20000308 PARAMETER Experiment Name: At_100mM_NaCl__P Parameter: Plant Line Value: WS
  misc_feature: MA Experiment 20000308 PARAMETER Experiment Name: At_100mM_NaCl__P Parameter: Timepoint (hr) Value: 72
  misc_feature: MA Experiment 20000308 PARAMETER Experiment Name: At_100mM_NaCl__P Parameter: Tissue Value: Whole Plant
  misc_feature: MA Experiment 20000308 PARAMETER Experiment Name: At_100mM_NaCl__P Parameter: Treatment Value: 100mM NaCl vs. No Treatment
  misc_feature: MA Experiment ID: 20000436 Result: Down-regulated in Transcription
  misc_feature: MA Experiment 20000436 PARAMETER Experiment Name: At_Drought_P Parameter: Age (day) Value: 7
  misc_feature: MA Experiment 20000436 PARAMETER Experiment Name: At_Drought_P Parameter: Organism Value: A. thaliana
  misc_feature: MA Experiment 20000436 PARAMETER Experiment Name: At_Drought_P Parameter: Plant Line Value: WS
  misc_feature: MA Experiment 20000436 PARAMETER Experiment Name: At_Drought_P Parameter: Timepoint (hr) Value: 12
  misc_feature: MA Experiment 20000436 PARAMETER Experiment Name: At_Drought_P Parameter: Tissue Value: Whole Plant
  misc_feature: MA Experiment 20000436 PARAMETER Experiment Name: At_Drought_P Parameter: Treatment Value: Drought vs. No Drought
  misc_feature: MA Experiment ID: 20000437 Result: Down-regulated in Transcription
  misc_feature: MA Experiment 20000437 PARAMETER Experiment Name: At_Drought_P Parameter: Age (day) Value: 8
  misc_feature: MA Experiment 20000437 PARAMETER Experiment Name: At_Drought_P Parameter: Organism Value: A. thaliana
  misc_feature: MA Experiment 20000437 PARAMETER Experiment Name: At_Drought_P Parameter: Plant Line Value: WS
  misc_feature: MA Experiment 20000437 PARAMETER Experiment Name: At_Drought_P Parameter: Timepoint (hr) Value: 24
  misc_feature: MA Experiment 20000437 PARAMETER Experiment Name: At_Drought_P Parameter: Tissue Value: Whole Plant
  misc_feature: MA Experiment 20000437 PARAMETER Experiment Name: At_Drought_P Parameter: Treatment Value: Drought vs. No Drought
  misc_feature: MA Experiment ID: 20000438 Result: Up-regulated in Transcription
  misc_feature: MA Experiment 20000438 PARAMETER Experiment Name: At_Shoots__P Parameter: Age (day) Value: 14
  misc_feature: MA Experiment 20000438 PARAMETER Experiment Name: At_Shoots__P Parameter: Tissue Value: Shoots vs. Whole Plant
  misc_feature: MA Experiment ID: 20000439 Result: Down-regulated in Transcription
  misc_feature: MA Experiment 20000439 PARAMETER Experiment Name: At_Roots__P Parameter: Age (day) Value: 14 vs. 21
  misc_feature: MA Experiment 20000439 PARAMETER Experiment Name: At_Roots__P Parameter: Organism Value: A. thaliana
  misc_feature: MA Experiment 20000439 PARAMETER Experiment Name: At_Roots__P Parameter: Tissue Value: Roots vs. Whole Plant
  misc_feature: MA Experiment ID: 20000445 Result: Down-regulated in Transcription
  misc_feature: MA Experiment 20000445 PARAMETER Experiment Name: At_100uM_NAA__P Parameter: Age (day) Value: 14
  misc_feature: MA Experiment 20000445 PARAMETER Experiment Name: At_100uM_NAA__P Parameter: Organism Value: A. thaliana
  misc_feature: MA Experiment 20000445 PARAMETER Experiment Name: At_100uM_NAA__P Parameter: Plant Line Value: WS
  misc_feature: MA Experiment 20000445 PARAMETER Experiment Name: At_100uM_NAA__P Parameter: Timepoint (hr) Value: 6
  misc_feature: MA Experiment 20000445 PARAMETER Experiment Name: At_100uM_NAA__P Parameter: Tissue Value: Aerial
  misc_feature: MA Experiment 20000445 PARAMETER Experiment Name: At_100uM_NAA__P Parameter: Treatment Value: 100uM NAA vs. No Treatment
  misc_feature: MA Experiment ID: 20000495 Result: Up-regulated in Transcription
  misc_feature: MA Experiment 20000495 PARAMETER Experiment Name: At_Guard_Cells_P Parameter: Harvest Date Value: 8/2/2002
  misc_feature: MA Experiment 20000495 PARAMETER Experiment Name: At_Guard_Cells_P Parameter: Organism Value: A. thaliana
  misc_feature: MA Experiment 20000495 PARAMETER Experiment Name: At_Guard_Cells_P Parameter: Tissue Value: Guard Cells vs. Leaves
  misc_feature: MA Experiment ID: 20000527 Result: Up-regulated in Transcription
  misc_feature: MA Experiment 20000527 PARAMETER Experiment Name: At_10percent_PEG_P Parameter: Age (day) Value: 20
  misc_feature: MA Experiment 20000527 PARAMETER Experiment Name: At_10percent_PEG_P Parameter: Organism Value: A. thaliana
  misc_feature: MA Experiment 20000527 PARAMETER Experiment Name: At_10percent_PEG_P Parameter: Plant Line Value: WS
  misc_feature: MA Experiment 20000527 PARAMETER Experiment Name: At_10percent_PEG_P Parameter: Timepoint (day) Value: 20
  misc_feature: MA Experiment 20000527 PARAMETER Experiment Name: At_10percent_PEG_P Parameter: Tissue Value: Whole Plant
  misc_feature: MA Experiment 20000527 PARAMETER Experiment Name: At_10percent_PEG_P Parameter: Treatment Value: 10percent PEG vs. No Treatment
  misc_feature: MA Experiment ID: 20000573 Result: Down-regulated in Transcription
  misc_feature: MA Experiment 20000573 PARAMETER Experiment Name: At_100uM_ABA_Mutants__P Parameter: Organism Value: A. thaliana
  misc_feature: MA Experiment 20000573 PARAMETER Experiment Name: At_100uM_ABA_Mutants__P Parameter: Plant Line Value: CS22 vs. Ler wt
  misc_feature: MA Experiment 20000573 PARAMETER Experiment Name: At_100uM_ABA_Mutants__P Parameter: Timepoint (hr) Value: N/A
  misc_feature: MA Experiment 20000573 PARAMETER Experiment Name: At_100uM_ABA_Mutants__P Parameter: Tissue Value: Whole Plant
  misc_feature: MA Experiment 20000573 PARAMETER Experiment Name: At_100uM_ABA_Mutants__P Parameter: Treatment Value: None
  misc_feature: MA Experiment ID: 20000794 Result: Down-regulated in Transcription
  misc_feature: MA Experiment 20000794 PARAMETER Experiment Name: At_Petals_P Parameter: Age (day) Value: 23-25 days
  misc_feature: MA Experiment 20000794 PARAMETER Experiment Name: At_Petals_P Parameter: Plant Line Value: WS
  misc_feature: MA Experiment 20000794 PARAMETER Experiment Name: At_Petals_P Parameter: Tissue Value: Petals vs. Whole plant
  misc_feature: MA Experiment ID: 20001248 Result: Down-regulated in Transcription
  misc_feature: MA Experiment 20001248 PARAMETER Experiment Name: At_Far-red-induction_P Parameter: Age (day) Value: 7
  misc_feature: MA Experiment 20001248 PARAMETER Experiment Name: At_Far-red-induction_P Parameter: Light Value: Far-red vs. White
  misc_feature: MA Experiment 20001248 PARAMETER Experiment Name: At_Far-red-induction_P Parameter: Organism Value: A. thaliana
  misc_feature: MA Experiment 20001248 PARAMETER Experiment Name: At_Far-red-induction_P Parameter: Plant Line Value: Columbia
  misc_feature: MA Experiment 20001248 PARAMETER Experiment Name: At_Far-red-induction_P Parameter: Timepoint (hr) Value: 4
  misc_feature: MA Experiment 20001248 PARAMETER Experiment Name: At_Far-red-induction_P Parameter: Tissue Value: Whole Plant
  misc_feature: MA Experiment ID: 20001450 Result: Down-regulated in Transcription
  misc_feature: MA Experiment 20001450 PARAMETER Experiment Name: At_Far-red-induction_P Parameter: Age (day) Value: 7
  misc_feature: MA Experiment 20001450 PARAMETER Experiment Name: At_Far-red-induction_P Parameter: Light Value: Far-red vs. White
  misc_feature: MA Experiment 20001450 PARAMETER Experiment Name: At_Far-red-induction_P Parameter: Organism Value: A. thaliana
  misc_feature: MA Experiment 20001450 PARAMETER Experiment Name: At_Far-red-induction_P Parameter: Plant Line Value: Columbia
  misc_feature: MA Experiment 20001450 PARAMETER Experiment Name: At_Far-red-induction_P Parameter: Timepoint (hr) Value: 8
  misc_feature: MA Experiment 20001450 PARAMETER Experiment Name: At_Far-red-induction_P Parameter: Tissue Value: Whole Plant
  misc_feature: MA Experiment ID: 20001451 Result: Down-regulated in Transcription
  misc_feature: MA Experiment 20001451 PARAMETER Experiment Name: At_Far-red-induction_P Parameter: Age (day) Value: 7
  misc_feature: MA Experiment 20001451 PARAMETER Experiment Name: At_Far-red-induction_P Parameter: Light Value: Far-red vs. White
  misc_feature: MA Experiment 20001451 PARAMETER Experiment Name: At_Far-red-induction_P Parameter: Organism Value: A. thaliana
  misc_feature: MA Experiment 20001451 PARAMETER Experiment Name: At_Far-red-induction_P Parameter: Plant Line Value: Columbia
  misc_feature: MA Experiment 20001451 PARAMETER Experiment Name: At_Far-red-induction_P Parameter: Timepoint (hr) Value: 24
  misc_feature: MA Experiment 20001451 PARAMETER Experiment Name: At_Far-red-induction_P Parameter: Tissue Value: Whole Plant
  misc_feature: MA Experiment ID: 20001560 Result: Up-regulated in Transcription
  misc_feature: MA Experiment 20001560 PARAMETER Experiment Name: At_Drought_Soil_Dry_P Parameter: Age (day) Value: 28
  misc_feature: MA Experiment 20001560 PARAMETER Experiment Name: At_Drought_Soil_Dry_P Parameter: Organism Value: A. thaliana
  misc_feature: MA Experiment 20001560 PARAMETER Experiment Name: At_Drought_Soil_Dry_P Parameter: Plant Line Value: WS
  misc_feature: MA Experiment 20001560 PARAMETER Experiment Name: At_Drought_Soil_Dry_P Parameter: Post Timepoint (hr) Value: None
  misc_feature: MA Experiment 20001560 PARAMETER Experiment Name: At_Drought_Soil_Dry_P Parameter: Post-Treatment Value: None
  misc_feature: MA Experiment 20001560 PARAMETER Experiment Name: At_Drought_Soil_Dry_P Parameter: Timepoint (day) Value: 14
  misc_feature: MA Experiment 20001560 PARAMETER Experiment Name: At_Drought_Soil_Dry_P Parameter: Treatment Value: Drought vs. No Drought
  misc_feature: MA Experiment ID: 20001755 Result: Up-regulated in Transcription
  misc_feature: MA Experiment 20001755 PARAMETER Experiment Name: At_50mM_NH4NO3_L-to-H_P Parameter: Timepoint (hr) Value: 2
  misc_feature: MA Experiment 20001755 PARAMETER Experiment Name: At_50mM_NH4NO3_L-to-H_P Parameter: Tissue Value: Leaf
  misc_feature: MA Experiment 20001755 PARAMETER Experiment Name: At_50mM_NH4NO3_L-to-H_P Parameter: Treatment Value: 50mM NH4NO3 vs 100mM Mannitol
  misc_feature: MA Experiment ID: 20001756 Result: Up-regulated in Transcription
  misc_feature: MA Experiment 20001756 PARAMETER Experiment Name: At_50mM_NH4NO3_L-to-H_P Parameter: Timepoint (hr) Value: 4
  misc_feature: MA Experiment 20001756 PARAMETER Experiment Name: At_50mM_NH4NO3_L-to-H_P Parameter: Tissue Value: Leaf
  misc_feature: MA Experiment 20001756 PARAMETER Experiment Name: At_50mM_NH4NO3_L-to-H_P Parameter: Treatment Value: 50mM NH4NO3 vs 100mM Mannitol
  misc_feature: MA Experiment ID: 20001757 Result: Up-regulated in Transcription
  misc_feature: MA Experiment 20001757 PARAMETER Experiment Name: At_50mM_NH4NO3_L-to-H_P Parameter: Timepoint (hr) Value: 6
  misc_feature: MA Experiment 20001757 PARAMETER Experiment Name: At_50mM_NH4NO3_L-to-H_P Parameter: Tissue Value: Leaf
  misc_feature: MA Experiment 20001757 PARAMETER Experiment Name: At_50mM_NH4NO3_L-to-H_P Parameter: Treatment Value: 50mM NH4NO3 vs 100mM Mannitol
  misc_feature: MA Experiment ID: 20001905 Result: Down-regulated in Transcription
  misc_feature: MA Experiment 20001905 PARAMETER Experiment Name: At_Drought_Reproduction_P Parameter: Age (day) Value: 40
  misc_feature: MA Experiment 20001905 PARAMETER Experiment Name: At_Drought_Reproduction_P Parameter: Organism Value: A. thaliana
  misc_feature: MA Experiment 20001905 PARAMETER Experiment Name: At_Drought_Reproduction_P Parameter: Plant Line Value: WS
  misc_feature: MA Experiment 20001905 PARAMETER Experiment Name: At_Drought_Reproduction_P Parameter: Timepoint (day) Value: 10
  misc_feature: MA Experiment 20001905 PARAMETER Experiment Name: At_Drought_Reproduction_P Parameter: Tissue Value: Rosettes
  misc_feature: MA Experiment 20001905 PARAMETER Experiment Name: At_Drought_Reproduction_P Parameter: Treatment Value: Drought vs. No Drought
  misc_feature: MA Experiment ID: 20001911 Result: Down-regulated in Transcription
  misc_feature: MA Experiment 20001911 PARAMETER Experiment Name: At_Drought_Reproduction_P Parameter: Age (day) Value: 40
  misc_feature: MA Experiment 20001911 PARAMETER Experiment Name: At_Drought_Reproduction_P Parameter: Organism Value: A. thaliana
  misc_feature: MA Experiment 20001911 PARAMETER Experiment Name: At_Drought_Reproduction_P Parameter: Plant Line Value: WS
  misc_feature: MA Experiment 20001911 PARAMETER Experiment Name: At_Drought_Reproduction_P Parameter: Timepoint (day) Value: 10
  misc_feature: MA Experiment 20001911 PARAMETER Experiment Name: At_Drought_Reproduction_P Parameter: Tissue Value: Flowers
  misc_feature: MA Experiment 20001911 PARAMETER Experiment Name: At_Drought_Reproduction_P Parameter: Treatment Value: Drought vs. No Drought

SEQ ID NO: 92624 - protein, 217 aa, Arabidopsis thaliana; identical to SEQ ID NO: 21617
  peptide (1)..(217): Ceres Seq. ID no. 12713250
  misc_feature (85)..(193): Pfam Name: Glutathione S-transferase, C-terminal domain Pfam Description: Glutathione S-transferase, C-terminal domain
  misc_feature (1)..(217): Homolog of NCBI NO: 15218311 NR Description: glutathione transferase, putative; protein id: supported by cDNA: 30680. [Arabidopsis thaliana]
  misc_feature (1)..(217): Homolog of NCBI NO: 21592638 NR Description: 2,4-D inducible glutathione S-transferase,
  misc_feature (1)..(168): Homolog of NCBI NO: 8052534 NR Description: F3F9.11 [Arabidopsis thaliana]
  misc_feature (1)..(214): Homolog of NCBI NO: 18411929 NR Description: glutathione transferase, putative; protein id: supported by cDNA: 30759., supported by cDNA: gi_14326476
  misc_feature (1)..(214): Homolog of NCBI NO: 21592644 NR Description: glutathione transferase, putative [Arabidopsis
  misc_feature (1)..(214): Homolog of NCBI NO: 8052534 NR Description: F3F9.11 [Arabidopsis thaliana]
  misc_feature (1)..(214): Homolog of NCBI NO: 15220041 NR Description: glutathione transferase, putative; protein id: [Arabidopsis thaliana] >gi|25313212|pir||H86307 probable
  misc_feature (1)..(214): Homolog of NCBI NO: 8052535 NR Description: F3F9.13 [Arabidopsis thaliana]
  misc_feature (1)..(214): Homolog of NCBI NO: 15218304 NR Description: glutathione transferase, putative; protein id: supported by cDNA: 252874. [Arabidopsis thaliana] GST7 like protein [Arabidopsis thaliana]

SEQ ID NO: 92625 - protein, 204 aa, Arabidopsis thaliana; identical to SEQ ID NO: 21618
  peptide (1)..(204): Ceres Seq. ID no. 12713251
  misc_feature (72)..(180): Pfam Name: Glutathione S-transferase, C-terminal domain Pfam Description: Glutathione S-transferase, C-terminal domain
  misc_feature (1)..(204): Homolog of NCBI NO: 15218311 NR Description: glutathione transferase, putative; protein id: supported by cDNA: 30680. [Arabidopsis thaliana]
  misc_feature (1)..(204): Homolog of NCBI NO: 21592638 NR Description: 2,4-D inducible glutathione S-transferase,
  misc_feature (1)..(155): Homolog of NCBI NO: 8052534 NR Description: F3F9.11 [Arabidopsis thaliana]
  misc_feature (1)..(201): Homolog of NCBI NO: 18411929 NR Description: glutathione transferase, putative; protein id: supported by cDNA: 30759., supported by cDNA: gi_14326476
  misc_feature (1)..(201): Homolog of NCBI NO: 21592644 NR Description: glutathione transferase, putative [Arabidopsis
  misc_feature (1)..(201): Homolog of NCBI NO: 8052534 NR Description: F3F9.11 [Arabidopsis thaliana]
  misc_feature (1)..(201): Homolog of NCBI NO: 15220041 NR Description: glutathione transferase, putative; protein id: [Arabidopsis thaliana] >gi|25313212|pir||H86307 probable
  misc_feature (1)..(201): Homolog of NCBI NO: 8052535 NR Description: F3F9.13 [Arabidopsis thaliana]
  misc_feature (1)..(201): Homolog of NCBI NO: 15218304 NR Description: glutathione transferase, putative; protein id: supported by cDNA: 252874. [Arabidopsis thaliana] GST7 like protein [Arabidopsis thaliana]

SEQ ID NO: 92626 - protein, 201 aa, Arabidopsis thaliana; identical to SEQ ID NO: 21619
  peptide (1)..(201): Ceres Seq. ID no. 12713252
  misc_feature (69)..(177): Pfam Name: Glutathione S-transferase, C-terminal domain Pfam Description: Glutathione S-transferase, C-terminal domain
  misc_feature (1)..(201): Homolog of NCBI NO: 15218311 NR Description: glutathione transferase, putative; protein id: supported by cDNA: 30680. [Arabidopsis thaliana]
  misc_feature (1)..(201): Homolog of NCBI NO: 21592638 NR Description: 2,4-D inducible glutathione S-transferase,
  misc_feature (1)..(152): Homolog of NCBI NO: 8052534 NR Description: F3F9.11 [Arabidopsis thaliana]
  misc_feature (1)..(198): Homolog of NCBI NO: 18411929 NR Description: glutathione transferase, putative; protein id: supported by cDNA: 30759., supported by cDNA: gi_14326476
  misc_feature (1)..(198): Homolog of NCBI NO: 21592644 NR Description: glutathione transferase, putative [Arabidopsis
  misc_feature (1)..(198): Homolog of NCBI NO: 8052534 NR Description: F3F9.11 [Arabidopsis thaliana]
  misc_feature (1)..(198): Homolog of NCBI NO: 15220041 NR Description: glutathione transferase, putative; protein id: [Arabidopsis thaliana] >gi|25313212|pir||H86307 probable
  misc_feature (1)..(198): Homolog of NCBI NO: 8052535 NR Description: F3F9.13 [Arabidopsis thaliana]
  misc_feature (1)..(198): Homolog of NCBI NO: 15218304 NR Description: glutathione transferase, putative; protein id: supported by cDNA: 252874. [Arabidopsis thaliana] GST7 like protein [Arabidopsis thaliana]

SEQ ID NO: 92627 - DNA, 981 bp, Arabidopsis thaliana; identical to SEQ ID NO: 88871
  misc_feature (1)..(981): Ceres Seq. ID no. 12713253
  misc_feature: MA Experiment ID: 108434 Result: Down-regulated in Transcription
  misc_feature: MA Experiment 108434 PARAMETER Experiment Name: At_Root_Tips_cDNA_P Parameter: Tissue Value: Root Tips
  misc_feature: MA Experiment ID: 108435 Result: Down-regulated in Transcription
  misc_feature: MA Experiment 108435 PARAMETER Experiment Name: At_stm_Mutants_cDNA_P Parameter: Plant Line Value: wt Landsburg vs stm
  misc_feature: MA Experiment 108435 PARAMETER Experiment Name: At_stm_Mutants_cDNA_P Parameter: Tissue Value: Shoot Apical Meristem Region
  misc_feature: MA Experiment ID: 108469 Result: Up-regulated in Transcription
  misc_feature: MA Experiment ID: 108576 Result: Up-regulated in Transcription
  misc_feature: MA Experiment 108576 PARAMETER Experiment Name: At_42deg_Heat_cDNA_P Parameter: Temperature (deg C) Value: 42 vs. 22
  misc_feature: MA Experiment 108576 PARAMETER Experiment Name: At_42deg_Heat_cDNA_P Parameter: Timepoint (hr) Value: 1
  misc_feature: MA Experiment 108576 PARAMETER Experiment Name: At_42deg_Heat_cDNA_P Parameter: Tissue Value: Aerial
  misc_feature: MA Experiment ID: 108577 Result: Up-regulated in Transcription
  misc_feature: MA Experiment 108577 PARAMETER Experiment Name: At_42deg_Heat_cDNA_P Parameter: Temperature (deg C) Value: 42 vs. 22
  misc_feature: MA Experiment 108577 PARAMETER Experiment Name: At_42deg_Heat_cDNA_P Parameter: Timepoint (hr) Value: 6
  misc_feature: MA Experiment 108577 PARAMETER Experiment Name: At_42deg_Heat_cDNA_P Parameter: Tissue Value: Aerial
  misc_feature: MA Experiment ID: 108594 Result: Down-regulated in Transcription
  misc_feature: MA Experiment 108594 PARAMETER Experiment Name: At_Ler-rhl_Root_cDNA_P Parameter: Plant Line Value: null
  misc_feature: MA Experiment ID: 20000069 Result: Up-regulated in Transcription
  misc_feature: MA Experiment 20000069 PARAMETER Experiment Name: At_100uM_ABA_Mutants_cDNA_P Parameter: Plant Line Value: CS23
  misc_feature: MA Experiment 20000069 PARAMETER Experiment Name: At_100uM_ABA_Mutants_cDNA_P Parameter: Timepoint (hr) Value: 6
  misc_feature: MA Experiment 20000069 PARAMETER Experiment Name: At_100uM_ABA_Mutants_cDNA_P Parameter: Tissue Value: Aerial
  misc_feature: MA Experiment 20000069 PARAMETER Experiment Name: At_100uM_ABA_Mutants_cDNA_P Parameter: Treatment Value: 100uM ABA vs. No Treatment
  misc_feature: MA Experiment ID: 20000070 Result: Up-regulated in Transcription
  misc_feature: MA Experiment 20000070 PARAMETER Experiment Name: At_100uM_ABA_Mutants_cDNA_P Parameter: Plant Line Value: CS24
  misc_feature: MA Experiment 20000070 PARAMETER Experiment Name: At_100uM_ABA_Mutants_cDNA_P Parameter: Timepoint (hr) Value: 6
  misc_feature: MA Experiment 20000070 PARAMETER Experiment Name: At_100uM_ABA_Mutants_cDNA_P Parameter: Tissue Value: Aerial
  misc_feature: MA Experiment 20000070 PARAMETER Experiment Name: At_100uM_ABA_Mutants_cDNA_P Parameter: Treatment Value: 100uM ABA vs. No Treatment
  misc_feature: MA Experiment ID: 20000071 Result: Up-regulated in Transcription
  misc_feature: MA Experiment 20000071 PARAMETER Experiment Name: At_100uM_ABA_Mutants_cDNA_P Parameter: Plant Line Value: CS8104
  misc_feature: MA Experiment 20000071 PARAMETER Experiment Name: At_100uM_ABA_Mutants_cDNA_P Parameter: Timepoint (hr) Value: 6
  misc_feature: MA Experiment 20000071 PARAMETER Experiment Name: At_100uM_ABA_Mutants_cDNA_P Parameter: Tissue Value: Aerial
  misc_feature: MA Experiment 20000071 PARAMETER Experiment Name: At_100uM_ABA_Mutants_cDNA_P Parameter: Treatment Value: 100uM ABA vs. No Treatment
  misc_feature: MA Experiment ID: 20000072 Result: Up-regulated in Transcription
  misc_feature: MA Experiment 20000072 PARAMETER Experiment Name: At_100uM_ABA_Mutants_cDNA_P Parameter: Plant Line Value: CS8105
  misc_feature: MA Experiment 20000072 PARAMETER Experiment Name: At_100uM_ABA_Mutants_cDNA_P Parameter: Timepoint (hr) Value: 6
  misc_feature: MA Experiment 20000072 PARAMETER Experiment Name: At_100uM_ABA_Mutants_cDNA_P Parameter: Tissue Value: Aerial
  misc_feature: MA Experiment 20000072 PARAMETER Experiment Name: At_100uM_ABA_Mutants_cDNA_P Parameter: Treatment Value: 100uM ABA vs. No Treatment
  misc_feature: MA Experiment ID: 20000086 Result: Up-regulated in Transcription
  misc_feature: MA Experiment 20000086 PARAMETER Experiment Name: At_100uM_ABA_Mutants_cDNA_P Parameter: Plant Line Value: CS22
  misc_feature: MA Experiment 20000086 PARAMETER Experiment Name: At_100uM_ABA_Mutants_cDNA_P Parameter: Timepoint (hr) Value: 6
  misc_feature: MA Experiment 20000086 PARAMETER Experiment Name: At_100uM_ABA_Mutants_cDNA_P Parameter: Tissue Value: Aerial
  misc_feature: MA Experiment 20000086 PARAMETER Experiment Name: At_100uM_ABA_Mutants_cDNA_P Parameter: Treatment Value: 100uM ABA vs. No Treatment
  misc_feature: MA Experiment ID: 20000087 Result: Up-regulated in Transcription
  misc_feature: MA Experiment 20000087 PARAMETER Experiment Name: At_100uM_ABA_Mutants_cDNA_P Parameter: Plant Line Value: WS
  misc_feature: MA Experiment 20000087 PARAMETER Experiment Name: At_100uM_ABA_Mutants_cDNA_P Parameter: Timepoint (hr) Value: 6
  misc_feature: MA Experiment 20000087 PARAMETER Experiment Name: At_100uM_ABA_Mutants_cDNA_P Parameter: Tissue Value: Aerial
  misc_feature: MA Experiment 20000087 PARAMETER Experiment Name: At_100uM_ABA_Mutants_cDNA_P Parameter: Treatment Value: 100uM ABA vs. No Treatment
  misc_feature: MA Experiment ID: 20000088 Result: Up-regulated in Transcription
  misc_feature: MA Experiment 20000088 PARAMETER Experiment Name: At_100uM_ABA_Mutants_cDNA_P Parameter: Plant Line Value: Landsberg
  misc_feature: MA Experiment 20000088 PARAMETER Experiment Name: At_100uM_ABA_Mutants_cDNA_P Parameter: Timepoint (hr) Value: 6
  misc_feature: MA Experiment 20000088 PARAMETER Experiment Name: At_100uM_ABA_Mutants_cDNA_P Parameter: Tissue Value: Aerial
  misc_feature: MA Experiment 20000088 PARAMETER Experiment Name: At_100uM_ABA_Mutants_cDNA_P Parameter: Treatment Value: 100uM ABA vs. No Treatment
  misc_feature: MA Experiment ID: 20000089 Result: Up-regulated in Transcription
  misc_feature: MA Experiment ID: 20000090 Result: Up-regulated in Transcription
  misc_feature: MA Experiment ID: 20000093 Result: Up-regulated in Transcription
  misc_feature: MA Experiment 20000093 PARAMETER Experiment Name: At_42deg_Heat_cDNA_P Parameter: Temperature (deg C) Value: 42 vs. 22
  misc_feature: MA Experiment 20000093 PARAMETER Experiment Name: At_42deg_Heat_cDNA_P Parameter: Timepoint (hr) Value: 0.5
  misc_feature: MA Experiment 20000093 PARAMETER Experiment Name: At_42deg_Heat_cDNA_P Parameter: Tissue Value: Aerial
  misc_feature: MA Experiment ID: 20000111 Result: Up-regulated in Transcription
  misc_feature: MA Experiment 20000111 PARAMETER Experiment Name: At_42deg_Heat_cDNA_P Parameter: Temperature (deg C) Value: 42 vs. 22
  misc_feature: MA Experiment 20000111 PARAMETER Experiment Name: At_42deg_Heat_cDNA_P Parameter: Timepoint (hr) Value: 6
  misc_feature: MA Experiment 20000111 PARAMETER Experiment Name: At_42deg_Heat_cDNA_P Parameter: Tissue Value: Aerial
  misc_feature: MA Experiment ID: 20000112 Result: Up-regulated in Transcription
  misc_feature: MA Experiment 20000112 PARAMETER Experiment Name: At_42deg_Heat_cDNA_P Parameter: Temperature (deg C) Value: 42 vs. 22
  misc_feature: MA Experiment 20000112 PARAMETER Experiment Name: At_42deg_Heat_cDNA_P Parameter: Timepoint (hr) Value: 2
  misc_feature: MA Experiment 20000112 PARAMETER Experiment Name: At_42deg_Heat_cDNA_P Parameter: Tissue Value: Aerial
  misc_feature: MA Experiment ID: 20000113 Result: Up-regulated in Transcription
  misc_feature: MA Experiment 20000113 PARAMETER Experiment Name: At_42deg_Heat_cDNA_P Parameter: Temperature (deg C) Value: 42 vs. 22
  misc_feature: MA Experiment 20000113 PARAMETER Experiment Name: At_42deg_Heat_cDNA_P Parameter: Timepoint (hr) Value: 8
  misc_feature: MA Experiment 20000113 PARAMETER Experiment Name: At_42deg_Heat_cDNA_P Parameter: Tissue Value: Aerial
  misc_feature: MA Experiment ID: 20000117 Result: Up-regulated in Transcription
  misc_feature: MA Experiment 20000117 PARAMETER Experiment Name: At_100uM_ABA_Mutants_cDNA_P Parameter: Plant Line Value: Columbia
  misc_feature: MA Experiment 20000117 PARAMETER Experiment Name: At_100uM_ABA_Mutants_cDNA_P Parameter: Timepoint (hr) Value: 6
  misc_feature: MA Experiment 20000117 PARAMETER Experiment Name: At_100uM_ABA_Mutants_cDNA_P Parameter: Tissue Value: Aerial
  misc_feature: MA Experiment 20000117 PARAMETER Experiment Name: At_100uM_ABA_Mutants_cDNA_P Parameter: Treatment Value: 100uM ABA vs. No Treatment
  misc_feature: MA Experiment ID: 20000144 Result: Up-regulated in Transcription
  misc_feature: MA Experiment 20000144 PARAMETER Experiment Name: At_42deg_Heat_cDNA_P Parameter: Temperature (deg C) Value: 42 vs. 22
  misc_feature: MA Experiment 20000144 PARAMETER Experiment Name: At_42deg_Heat_cDNA_P Parameter: Timepoint (hr) Value: 1
  misc_feature: MA Experiment 20000144 PARAMETER Experiment Name: At_42deg_Heat_cDNA_P Parameter: Tissue Value: Aerial
  misc_feature: MA Experiment ID: 20000171 Result: Up-regulated in Transcription
  misc_feature: MA Experiment 20000171 PARAMETER Experiment Name: At_42deg_Heat_P Parameter: Age (day) Value: 14
  misc_feature: MA Experiment 20000171 PARAMETER Experiment Name: At_42deg_Heat_P Parameter: Organism Value: A. thaliana
  misc_feature: MA Experiment 20000171 PARAMETER Experiment Name: At_42deg_Heat_P Parameter: Plant Line Value: WS
  misc_feature: MA Experiment 20000171 PARAMETER Experiment Name: At_42deg_Heat_P Parameter: Temperature (deg C) Value: 42 vs. 22
  misc_feature: MA Experiment 20000171 PARAMETER Experiment Name: At_42deg_Heat_P Parameter: Timepoint (hr) Value: 1
  misc_feature: MA Experiment 20000171 PARAMETER Experiment Name: At_42deg_Heat_P Parameter: Tissue Value: Aerial
  misc_feature: MA Experiment ID: 20000173 Result: Up-regulated in Transcription
  misc_feature: MA Experiment 20000173 PARAMETER Experiment Name: At_42deg_Heat_P Parameter: Age (day) Value: 14
  misc_feature: MA Experiment 20000173 PARAMETER Experiment Name: At_42deg_Heat_P Parameter: Organism Value: A. thaliana
  misc_feature: MA Experiment 20000173 PARAMETER Experiment Name: At_42deg_Heat_P Parameter: Plant Line Value: WS
  misc_feature: MA Experiment 20000173 PARAMETER Experiment Name: At_42deg_Heat_P Parameter: Temperature (deg C) Value: 42 vs. 22
  misc_feature: MA Experiment 20000173 PARAMETER Experiment Name: At_42deg_Heat_P Parameter: Timepoint (hr) Value: 6
  misc_feature: MA Experiment 20000173 PARAMETER Experiment Name: At_42deg_Heat_P Parameter: Tissue Value: Aerial
  misc_feature: MA Experiment ID: 20000182 Result: Up-regulated in Transcription
  misc_feature: MA Experiment 20000182 PARAMETER Experiment Name: At_2mM_SA_P Parameter: Age (day) Value: 14
  misc_feature: MA Experiment 20000182 PARAMETER Experiment Name: At_2mM_SA_P Parameter: Organism Value: A. thaliana
  misc_feature: MA Experiment 20000182 PARAMETER Experiment Name: At_2mM_SA_P Parameter: Plant Line Value: WS
  misc_feature: MA Experiment 20000182 PARAMETER Experiment Name: At_2mM_SA_P Parameter: Timepoint (hr) Value: 6
  misc_feature: MA Experiment 20000182 PARAMETER Experiment Name: At_2mM_SA_P Parameter: Tissue Value: Aerial
  misc_feature: MA Experiment 20000182 PARAMETER Experiment Name: At_2mM_SA_P Parameter: Treatment Value: 2mM SA vs. No Treatment
  misc_feature: MA Experiment ID: 20000185 Result: Up-regulated in Transcription
  misc_feature: MA Experiment 20000185 PARAMETER Experiment Name: At_Roots__P Parameter: Age (day) Value: 7 vs. 21
  misc_feature: MA Experiment 20000185 PARAMETER Experiment Name: At_Roots__P Parameter: Organism Value: A. thaliana
  misc_feature: MA Experiment 20000185 PARAMETER Experiment Name: At_Roots__P Parameter: Tissue Value: Roots vs. Whole Plant
  misc_feature: MA Experiment ID: 20000234 Result: Down-regulated in Transcription
  misc_feature: MA Experiment 20000234 PARAMETER Experiment Name: At_Siliques_P Parameter: Age (day) Value: 21
  misc_feature: MA Experiment 20000234 PARAMETER Experiment Name: At_Siliques_P Parameter: Organism Value: A. thaliana
  misc_feature: MA Experiment 20000234 PARAMETER Experiment Name: At_Siliques_P Parameter: Plant Line Value: WS
  misc_feature: MA Experiment 20000234 PARAMETER Experiment Name: At_Siliques_P Parameter: Tissue Value: Less Than 5mm Siliques vs. Whole Plant
  misc_feature: MA Experiment ID: 20000235 Result: Down-regulated in Transcription
  misc_feature: MA Experiment 20000235 PARAMETER Experiment Name: At_Siliques_P Parameter: Age (day) Value: 21
  misc_feature: MA Experiment 20000235 PARAMETER Experiment Name: At_Siliques_P Parameter: Organism Value: A. thaliana
  misc_feature: MA Experiment 20000235 PARAMETER Experiment Name: At_Siliques_P Parameter: Plant Line Value: WS
  misc_feature: MA Experiment 20000235 PARAMETER Experiment Name: At_Siliques_P Parameter: Tissue Value: 5-10mm Siliques vs. Whole Plant
  misc_feature: MA Experiment ID: 20000286 Result: Down-regulated in Transcription
  misc_feature: MA Experiment 20000286 PARAMETER Experiment Name: At_Open_Flower_P Parameter: Age (day) Value: 21
  misc_feature: MA Experiment 20000286 PARAMETER Experiment Name: At_Open_Flower_P Parameter: Plant Line Value: WS
  misc_feature: MA Experiment 20000286 PARAMETER Experiment Name: At_Open_Flower_P Parameter: Tissue Value: Half Open vs. Whole Plant
  misc_feature: MA Experiment ID: 20000709 Result: Up-regulated in Transcription
  misc_feature: MA Experiment 20000709 PARAMETER Experiment Name: At_15mM_NH4NO3_L-to-H_P Parameter: Age (hr) Value: 14
  misc_feature: MA Experiment 20000709 PARAMETER Experiment Name: At_15mM_NH4NO3_L-to-H_P Parameter: Organism Value: A. thaliana
  misc_feature: MA Experiment 20000709 PARAMETER Experiment Name: At_15mM_NH4NO3_L-to-H_P Parameter: Plant Line Value: WS
  misc_feature: MA Experiment 20000709 PARAMETER Experiment Name: At_15mM_NH4NO3_L-to-H_P Parameter: Timepoint (hr) Value: 4
  misc_feature: MA Experiment 20000709 PARAMETER Experiment Name: At_15mM_NH4NO3_L-to-H_P Parameter: Tissue Value: Aerial
  misc_feature: MA Experiment 20000709 PARAMETER Experiment Name: At_15mM_NH4NO3_L-to-H_P Parameter: Treatment Value: 15mM NH4NO3 vs. 30mM Mannitol
  misc_feature: MA Experiment ID: 20000794 Result: Down-regulated in Transcription
  misc_feature: MA Experiment 20000794 PARAMETER Experiment Name: At_Petals_P Parameter: Age (day) Value: 23-25 days
  misc_feature: MA Experiment 20000794 PARAMETER Experiment Name: At_Petals_P Parameter: Plant Line Value: WS
  misc_feature: MA Experiment 20000794 PARAMETER Experiment Name: At_Petals_P Parameter: Tissue Value: Petals vs. Whole plant
  misc_feature: MA Experiment ID: 20001450 Result: Down-regulated in Transcription
  misc_feature: MA Experiment 20001450 PARAMETER Experiment Name: At_Far-red-induction_P Parameter: Age (day) Value: 7
  misc_feature: MA Experiment 20001450 PARAMETER Experiment Name: At_Far-red-induction_P Parameter: Light Value: Far-red vs. White
  misc_feature: MA Experiment 20001450 PARAMETER Experiment Name: At_Far-red-induction_P Parameter: Organism Value: A. thaliana
  misc_feature: MA Experiment 20001450 PARAMETER Experiment Name: At_Far-red-induction_P Parameter: Plant Line Value: Columbia
  misc_feature: MA Experiment 20001450 PARAMETER Experiment Name: At_Far-red-induction_P Parameter: Timepoint (hr) Value: 8
  misc_feature: MA Experiment 20001450 PARAMETER Experiment Name: At_Far-red-induction_P Parameter: Tissue Value: Whole Plant
  misc_feature: MA Experiment ID: 20001451 Result: Down-regulated in Transcription
  misc_feature: MA Experiment 20001451 PARAMETER Experiment Name: At_Far-red-induction_P Parameter: Age (day) Value: 7
  misc_feature: MA Experiment 20001451 PARAMETER Experiment Name: At_Far-red-induction_P Parameter: Light Value: Far-red vs. White
  misc_feature: MA Experiment 20001451 PARAMETER Experiment Name: At_Far-red-induction_P Parameter: Organism Value: A. thaliana
  misc_feature: MA Experiment 20001451 PARAMETER Experiment Name: At_Far-red-induction_P Parameter: Plant Line Value: Columbia
  misc_feature: MA Experiment 20001451 PARAMETER Experiment Name: At_Far-red-induction_P Parameter: Timepoint (hr) Value: 24
  misc_feature: MA Experiment 20001451 PARAMETER Experiment Name: At_Far-red-induction_P Parameter: Tissue Value: Whole Plant
  misc_feature: MA Experiment ID: 20001557 Result: Up-regulated in Transcription
  misc_feature: MA Experiment 20001557 PARAMETER Experiment Name: At_Drought_Soil_Dry_P Parameter: Age (day) Value: 27
  misc_feature: MA Experiment 20001557 PARAMETER Experiment Name: At_Drought_Soil_Dry_P Parameter: Organism Value: A. thaliana
  misc_feature: MA Experiment 20001557 PARAMETER Experiment Name: At_Drought_Soil_Dry_P Parameter: Plant Line Value: WS
  misc_feature: MA Experiment 20001557 PARAMETER Experiment Name: At_Drought_Soil_Dry_P Parameter: Post Timepoint (hr) Value: 3
  misc_feature: MA Experiment 20001557 PARAMETER Experiment Name: At_Drought_Soil_Dry_P Parameter: Post-Treatment Value: Re-Water vs. No Drought
  misc_feature: MA Experiment 20001557 PARAMETER Experiment Name: At_Drought_Soil_Dry_P Parameter: Timepoint (day) Value: 13
  misc_feature: MA Experiment 20001557 PARAMETER Experiment Name: At_Drought_Soil_Dry_P Parameter: Treatment Value: Drought vs. No Drought

SEQ ID NO: 92628 - protein, 219 aa, Arabidopsis thaliana; identical to SEQ ID NO: 21639
  peptide (1)..(219): Ceres Seq. ID no. 12713254
  misc_feature (1)..(219): Homolog of NCBI NO: 18411929 NR Description: glutathione transferase, putative; protein id: supported by cDNA: 30759., supported by cDNA: gi_14326476
  misc_feature (1)..(219): Homolog of NCBI NO: 21592644 NR Description: glutathione transferase, putative [Arabidopsis
  misc_feature (1)..(219): Homolog of NCBI NO: 8052534 NR Description: F3F9.11 [Arabidopsis thaliana]
  misc_feature (1)..(215): Homolog of NCBI NO: 15220041 NR Description: glutathione transferase, putative; protein id: [Arabidopsis thaliana] >gi|25313212|pir||H86307 probable
  misc_feature (1)..(216): Homolog of NCBI NO: 1346215 NR Description: PROBABLE GLUTATHIONE S-TRANSFERASE PARC
  misc_feature (1)..(216): Homolog of NCBI NO: 416652 NR Description: PROBABLE GLUTATHIONE S-TRANSFERASE (AUXIN-INDUCED
  misc_feature (1)..(214): Homolog of NCBI NO: 7447307 NR Description: glutathione transferase (EC 2.5.1.18) - papaya
  misc_feature (1)..(216): Homolog of NCBI NO: 100302 NR Description: auxin-induced protein (clone pCNT107) - common
  misc_feature (1)..(214): Homolog of NCBI NO: 15218311 NR Description: glutathione transferase, putative; protein id: supported by cDNA: 30680. [Arabidopsis thaliana]

SEQ ID NO: 92629 - protein, 206 aa, Arabidopsis thaliana; identical to SEQ ID NO: 21640
  peptide (1)..(206): Ceres Seq. ID no. 12713255
  misc_feature (1)..(206): Homolog of NCBI NO: 18411929 NR Description: glutathione transferase, putative; protein id: supported by cDNA: 30759., supported by cDNA: gi_14326476
  misc_feature (1)..(206): Homolog of NCBI NO: 21592644 NR Description: glutathione transferase, putative [Arabidopsis
  misc_feature (1)..(206): Homolog of NCBI NO: 8052534 NR Description: F3F9.11 [Arabidopsis thaliana]
  misc_feature (1)..(202): Homolog of NCBI NO: 15220041 NR Description: glutathione transferase, putative; protein id: [Arabidopsis thaliana] >gi|25313212|pir||H86307 probable
  misc_feature (1)..(203): Homolog of NCBI NO: 1346215 NR Description: PROBABLE GLUTATHIONE S-TRANSFERASE PARC
  misc_feature (1)..(203): Homolog of NCBI NO: 416652 NR Description: PROBABLE GLUTATHIONE S-TRANSFERASE (AUXIN-INDUCED
  misc_feature (1)..(201): Homolog of NCBI NO: 7447307 NR Description: glutathione transferase (EC 2.5.1.18) - papaya
  misc_feature (1)..(203): Homolog of NCBI NO: 100302 NR Description: auxin-induced protein (clone pCNT107) - common
  misc_feature (1)..(201): Homolog of NCBI NO: 15218311 NR Description: glutathione transferase, putative; protein id: supported by cDNA: 30680. [Arabidopsis thaliana]

SEQ ID NO: 92630 - protein, 203 aa, Arabidopsis thaliana; identical to SEQ ID NO: 21641
  peptide (1)..(203): Ceres Seq. ID no. 12713256
  misc_feature (1)..(203): Homolog of NCBI NO: 18411929 NR Description: glutathione transferase, putative; protein id: supported by cDNA: 30759., supported by cDNA: gi_14326476
  misc_feature (1)..(203): Homolog of NCBI NO: 21592644 NR Description: glutathione transferase, putative [Arabidopsis
  misc_feature (1)..(203): Homolog of NCBI NO: 8052534 NR Description: F3F9.11 [Arabidopsis thaliana]
  misc_feature (1)..(199): Homolog of NCBI NO: 15220041 NR Description: glutathione transferase, putative; protein id: [Arabidopsis thaliana] >gi|25313212|pir||H86307 probable
  misc_feature (1)..(200): Homolog of NCBI NO: 1346215 NR Description: PROBABLE GLUTATHIONE S-TRANSFERASE PARC
  misc_feature (1)..(200): Homolog of NCBI NO: 416652 NR Description: PROBABLE GLUTATHIONE S-TRANSFERASE (AUXIN-INDUCED
  misc_feature (1)..(198): Homolog of NCBI NO: 7447307 NR Description: glutathione transferase (EC 2.5.1.18) - papaya
  misc_feature (1)..(200): Homolog of NCBI NO: 100302 NR Description: auxin-induced protein (clone pCNT107) - common
  misc_feature (1)..(198): Homolog of NCBI NO: 15218311 NR Description: glutathione transferase, putative; protein id: supported by cDNA: 30680. [Arabidopsis thaliana]

SEQ ID NO: 92631 - DNA, 1003 bp, Arabidopsis thaliana; identical to SEQ ID NO: 88875
  misc_feature (1)..(1003): Ceres Seq. ID no. 12713341
  misc_feature: MA Experiment ID: 108434 Result: Down-regulated in Transcription
  misc_feature: MA Experiment 108434 PARAMETER Experiment Name: At_Root_Tips_cDNA_P Parameter: Tissue Value: Root Tips
  misc_feature: MA Experiment ID: 20000234 Result: Up-regulated in Transcription
  misc_feature: MA Experiment 20000234 PARAMETER Experiment Name: At_Siliques_P Parameter: Age (day) Value: 21
  misc_feature: MA Experiment 20000234 PARAMETER Experiment Name: At_Siliques_P Parameter: Organism Value: A. thaliana
  misc_feature: MA Experiment 20000234 PARAMETER Experiment Name: At_Siliques_P Parameter: Plant Line Value: WS
  misc_feature: MA Experiment 20000234 PARAMETER Experiment Name: At_Siliques_P Parameter: Tissue Value: Less Than 5mm Siliques vs. Whole Plant
  misc_feature: MA Experiment ID: 20000235 Result: Up-regulated in Transcription
  misc_feature: MA Experiment 20000235 PARAMETER Experiment Name: At_Siliques_P Parameter: Age (day) Value: 21
  misc_feature: MA Experiment 20000235 PARAMETER Experiment Name: At_Siliques_P Parameter: Organism Value: A. thaliana
  misc_feature: MA Experiment 20000235 PARAMETER Experiment Name: At_Siliques_P Parameter: Plant Line Value: WS
  misc_feature: MA Experiment 20000235 PARAMETER Experiment Name: At_Siliques_P Parameter: Tissue Value: 5-10mm Siliques vs. Whole Plant

SEQ ID NO: 92632 - protein, 195 aa, Arabidopsis thaliana; identical to SEQ ID NO: 88876
  peptide (1)..(195): Ceres Seq. ID no. 12713342
  misc_feature (22)..(154): Pfam Name: Protein of unknown function (DUF640) Pfam Description: Protein of unknown function (DUF640)
  misc_feature (1)..(195): Homolog of NCBI NO: 18412120 NR Description: Expressed protein; protein id: At1g78815.1, by cDNA: 230925. [Arabidopsis thaliana] >gi|25341951|pir||D96817
  misc_feature (1)..(195): Homolog of NCBI NO: 21592379 NR Description: unknown [Arabidopsis thaliana]
  misc_feature (35)..(168): Homolog of NCBI NO: 15219952 NR Description: hypothetical protein; protein id: At1g16910.1
  misc_feature (16)..(191): Homolog of NCBI NO: 18406012 NR Description: expressed protein; protein id: At2g42610.1, by cDNA: gi_6691164 [Arabidopsis thaliana]
  misc_feature (15)..(173): Homolog of NCBI NO: 15233942 NR Description: putative protein; protein id: At4g18610.1
  misc_feature (33)..(195): Homolog of NCBI NO: 34907938 NR Description: B1088C09.17 [Oryza sativa (japonica
  misc_feature (14)..(170): Homolog of NCBI NO: 18390725 NR Description: expressed protein; protein id: At1g07090.1, by cDNA: 28780. [Arabidopsis thaliana] >gi|25341953|pir||G86205
  misc_feature (27)..(172): Homolog of NCBI NO: 15241821 NR Description: putative protein; protein id: At5g28490.1
  misc_feature (5)..(181): Homolog of NCBI NO: 38344650 NR Description: OSJNBb0072M01.12 [Oryza sativa (japonica
  misc_feature (29)..(169): Homolog of NCBI NO: 15229310 NR Description: unknown protein; protein id: At3g04510.1 thaliana] >gi|7547110|gb|AAF63782.1| unknown protein [Arabidopsis

SEQ ID NO: 92633 - DNA, 450 bp, Arabidopsis thaliana; identical to SEQ ID NO: 88877
  misc_feature (1)..(450): Ceres Seq. ID no. 12713370
  misc_feature: MA Experiment ID: 20000180 Result: Up-regulated in Transcription
  misc_feature: MA Experiment 20000180 PARAMETER Experiment Name: At_Germinating_Seeds_P Parameter: Age (hr) Value: 24 vs. 0
  misc_feature: MA Experiment 20000180 PARAMETER Experiment Name: At_Germinating_Seeds_P Parameter: Tissue Value: Germinating Seeds
  misc_feature: MA Experiment ID: 20000185 Result: Down-regulated in Transcription
  misc_feature: MA Experiment 20000185 PARAMETER Experiment Name: At_Roots__P Parameter: Age (day) Value: 7 vs. 21
  misc_feature: MA Experiment 20000185 PARAMETER Experiment Name: At_Roots__P Parameter: Organism Value: A. thaliana
  misc_feature: MA Experiment 20000185 PARAMETER Experiment Name: At_Roots__P Parameter: Tissue Value: Roots vs. Whole Plant
  misc_feature: MA Experiment ID: 20000439 Result: Down-regulated in Transcription
  misc_feature: MA Experiment 20000439 PARAMETER Experiment Name: At_Roots__P Parameter: Age (day) Value: 14 vs. 21
  misc_feature: MA Experiment 20000439 PARAMETER Experiment Name: At_Roots__P Parameter: Organism Value: A. thaliana
  misc_feature: MA Experiment 20000439 PARAMETER Experiment Name: At_Roots__P Parameter: Tissue Value: Roots vs. Whole Plant

SEQ ID NO: 92634 - protein, 149 aa, Arabidopsis thaliana; identical to SEQ ID NO: 88878
  peptide (1)..(149): Ceres Seq. ID no. 12713371
  misc_feature (42)..(113): Pfam Name: Photosystem II 10 kDa polypeptide PsbR Pfam Description: Photosystem II 10 kDa polypeptide PsbR
  misc_feature (1)..(113): Homolog of NCBI NO: 15219268 NR Description: photosystem II polypeptide, putative; protein id: supported by cDNA: 110067., supported by cDNA: gi_17979202, by cDNA: gi_20465468 [Arabidopsis thaliana]
  misc_feature (1)..(113): Homolog of NCBI NO: 1346871 NR Description: Photosystem II 10 kDa polypeptide, chloroplast
  misc_feature (4)..(113): Homolog of NCBI NO: 28207611 NR Description: photosystem II 10kDa polypeptide [Brassica rapa
  misc_feature (3)..(113): Homolog of NCBI NO: 131399 NR Description: Photosystem II 10 kDa polypeptide, chloroplast
  misc_feature (3)..(113): Homolog of NCBI NO: 3914471 NR Description: Photosystem II 10 kDa polypeptide, chloroplast >gi|1217642|emb|CAA65231.1| PSII polypeptide [Lycopersicon
  misc_feature (3)..(113): Homolog of NCBI NO: 21491 NR Description: ST-LS1 protein (AA 1-138) [Solanum tuberosum]
  misc_feature (1)..(113): Homolog of NCBI NO: 3914472 NR Description: Photosystem II 10 kDa polypeptide, chloroplast
  misc_feature (10)..(113): Homolog of NCBI NO: 1418984 NR Description: photosystem II 10 kD polypeptide [Lycopersicon
  misc_feature (1)..(113): Homolog of NCBI NO: 131400 NR Description: Photosystem II 10 kDa polypeptide, chloroplast
  misc_feature (1)..(113): Homolog of NCBI NO: 33694227 NR Description: 10 kDa photosystem II polypeptide [Trifolium

SEQ ID NO: 92635 - protein, 144 aa, Arabidopsis thaliana; identical to SEQ ID NO: 88879
  peptide (1)..(144): Ceres Seq. ID no. 12713372
  misc_feature (37)..(108): Pfam Name: Photosystem II 10 kDa polypeptide PsbR Pfam Description: Photosystem II 10 kDa polypeptide PsbR
  misc_feature (1)..(108): Homolog of NCBI NO: 15219268 NR Description: photosystem II polypeptide, putative; protein id: supported by cDNA: 110067., supported by cDNA: gi_17979202, by cDNA: gi_20465468 [Arabidopsis thaliana]
  misc_feature (1)..(108): Homolog of NCBI NO: 1346871 NR Description: Photosystem II 10 kDa polypeptide, chloroplast
  misc_feature (1)..(108): Homolog of NCBI NO: 28207611 NR Description: photosystem II 10kDa polypeptide [Brassica rapa
  misc_feature (1)..(108): Homolog of NCBI NO: 131399 NR Description: Photosystem II 10 kDa polypeptide, chloroplast
  misc_feature (1)..(108): Homolog of NCBI NO: 3914471 NR Description: Photosystem II 10 kDa polypeptide, chloroplast >gi|1217642|emb|CAA65231.1| PSII polypeptide [Lycopersicon
  misc_feature (1)..(108): Homolog of NCBI NO: 21491 NR Description: ST-LS1 protein (AA 1-138) [Solanum tuberosum]
  misc_feature (1)..(108): Homolog of NCBI NO: 3914472 NR Description: Photosystem II 10 kDa polypeptide, chloroplast
  misc_feature (5)..(108): Homolog of NCBI NO: 1418984 NR Description: photosystem II 10 kD polypeptide [Lycopersicon
  misc_feature (1)..(108): Homolog of NCBI NO: 131400 NR Description: Photosystem II 10 kDa polypeptide, chloroplast
  misc_feature (1)..(108): Homolog of NCBI NO: 33694227 NR Description: 10 kDa photosystem II polypeptide [Trifolium

SEQ ID NO: 92636 - protein, 91 aa, Arabidopsis thaliana; identical to SEQ ID NO: 88880
  peptide (1)..(91): Ceres Seq. ID no. 12713373
  misc_feature (1)..(55): Pfam Name: Photosystem II 10 kDa polypeptide PsbR Pfam Description: Photosystem II 10 kDa polypeptide PsbR
  misc_feature (1)..(55): Homolog of NCBI NO: 15219268 NR Description: photosystem II polypeptide, putative; protein id: supported by cDNA: 110067., supported by cDNA: gi_17979202, by cDNA: gi_20465468 [Arabidopsis thaliana]
  misc_feature (1)..(55): Homolog of NCBI NO: 1346871 NR Description: Photosystem II 10 kDa polypeptide, chloroplast
  misc_feature (1)..(55): Homolog of NCBI NO: 28207611 NR Description: photosystem II 10kDa polypeptide [Brassica rapa
  misc_feature (1)..(55): Homolog of NCBI NO: 131399 NR Description: Photosystem II 10 kDa polypeptide, chloroplast
  misc_feature (1)..(55): Homolog of NCBI NO: 3914471 NR Description: Photosystem II 10 kDa polypeptide, chloroplast >gi|1217642|emb|CAA65231.1| PSII polypeptide [Lycopersicon
  misc_feature (1)..(55): Homolog of NCBI NO: 21491 NR Description: ST-LS1 protein (AA 1-138) [Solanum tuberosum]
  misc_feature (1)..(55): Homolog of NCBI NO: 3914472 NR Description: Photosystem II 10 kDa polypeptide, chloroplast
  misc_feature (1)..(55): Homolog of NCBI NO: 1418984 NR Description: photosystem II 10 kD polypeptide [Lycopersicon
  misc_feature (1)..(55): Homolog of NCBI NO: 131400 NR Description: Photosystem II 10 kDa polypeptide, chloroplast
  misc_feature (1)..(55): Homolog of NCBI NO: 33694227 NR Description: 10 kDa photosystem II polypeptide [Trifolium

SEQ ID NO: 92637 - DNA, 1092 bp, Arabidopsis thaliana; identical to SEQ ID NO: 88881
  misc_feature (1)..(1092): Ceres Seq. ID no. 12713449
  misc_feature: MA Experiment ID: 20000180 Result: Down-regulated in Transcription
  misc_feature: MA Experiment 20000180 PARAMETER Experiment Name: At_Germinating_Seeds_P Parameter: Age (hr) Value: 24 vs. 0
  misc_feature: MA Experiment 20000180 PARAMETER Experiment Name: At_Germinating_Seeds_P Parameter: Tissue Value: Germinating Seeds
  misc_feature: MA Experiment ID: 20000234 Result: Up-regulated in Transcription
  misc_feature: MA Experiment 20000234 PARAMETER Experiment Name: At_Siliques_P Parameter: Age (day) Value: 21
  misc_feature: MA Experiment 20000234 PARAMETER Experiment Name: At_Siliques_P Parameter: Organism Value: A. thaliana
  misc_feature: MA Experiment 20000234 PARAMETER Experiment Name: At_Siliques_P Parameter: Plant Line Value: WS
  misc_feature: MA Experiment 20000234 PARAMETER Experiment Name: At_Siliques_P Parameter: Tissue Value: Less Than 5mm Siliques vs. Whole Plant
  misc_feature: MA Experiment ID: 20000265 Result: Up-regulated in Transcription
  misc_feature: MA Experiment 20000265 PARAMETER Experiment Name: At_Open_Flower_P Parameter: Age (day) Value: 21
  misc_feature: MA Experiment 20000265 PARAMETER Experiment Name: At_Open_Flower_P Parameter: Plant Line Value: WS
  misc_feature: MA Experiment 20000265 PARAMETER Experiment Name: At_Open_Flower_P Parameter: Tissue Value: Closed Flower vs. Whole Plant
  misc_feature: MA Experiment ID: 20000437 Result: Down-regulated in Transcription
  misc_feature: MA Experiment 20000437 PARAMETER Experiment Name: At_Drought_P Parameter: Age (day) Value: 8
  misc_feature: MA Experiment 20000437 PARAMETER Experiment Name: At_Drought_P Parameter: Organism Value: A. thaliana
  misc_feature: MA Experiment 20000437 PARAMETER Experiment Name: At_Drought_P Parameter: Plant Line Value: WS
  misc_feature: MA Experiment 20000437 PARAMETER Experiment Name: At_Drought_P Parameter: Timepoint (hr) Value: 24
  misc_feature: MA Experiment 20000437 PARAMETER Experiment Name: At_Drought_P Parameter: Tissue Value: Whole Plant
  misc_feature: MA Experiment 20000437 PARAMETER Experiment Name: At_Drought_P Parameter: Treatment Value: Drought vs. No Drought
  misc_feature: MA Experiment ID: 20000495 Result: Up-regulated in Transcription
  misc_feature: MA Experiment 20000495 PARAMETER Experiment Name: At_Guard_Cells_P Parameter: Harvest Date Value: 8/2/2002
  misc_feature: MA Experiment 20000495 PARAMETER Experiment Name: At_Guard_Cells_P Parameter: Organism Value: A. thaliana
  misc_feature: MA Experiment 20000495 PARAMETER Experiment Name: At_Guard_Cells_P Parameter: Tissue Value: Guard Cells vs. Leaves

SEQ ID NO: 92638 - protein, 363 aa, Arabidopsis thaliana; identical to SEQ ID NO: 88882
  peptide (1)..(363): Ceres Seq. ID no. 12713450
  misc_feature (106)..(363): Homolog of NCBI NO: 15220642 NR Description: hypothetical protein; protein id: At1g68080.1
  misc_feature (1)..(108): Homolog of NCBI NO: 15220642 NR Description: hypothetical protein; protein id: At1g68080.1

SEQ ID NO: 92639 - protein, 241 aa, Arabidopsis thaliana; identical to SEQ ID NO: 70722
  peptide (1)..(241): Ceres Seq. ID no. 12713451
  misc_feature (1)..(241): Homolog of NCBI NO: 15220642 NR Description: hypothetical protein; protein id: At1g68080.1

SEQ ID NO: 92640 - protein, 181 aa, Arabidopsis thaliana; identical to SEQ ID NO: 88884
  peptide (1)..(181): Ceres Seq. ID no. 12713452
  misc_feature (1)..(181): Homolog of NCBI NO: 15220642 NR Description: hypothetical protein; protein id: At1g68080.1

SEQ ID NO: 92641 - DNA, 1047 bp, Arabidopsis thaliana; identical to SEQ ID NO: 88885
  misc_feature (1)..(1047): Ceres Seq. ID no. 12713453
  misc_feature: MA Experiment ID: 20000436 Result: Down-regulated in Transcription
  misc_feature: MA Experiment 20000436 PARAMETER Experiment Name: At_Drought_P Parameter: Age (day) Value: 7
  misc_feature: MA Experiment 20000436 PARAMETER Experiment Name: At_Drought_P Parameter: Organism Value: A. thaliana
  misc_feature: MA Experiment 20000436 PARAMETER Experiment Name: At_Drought_P Parameter: Plant Line Value: WS
  misc_feature: MA Experiment 20000436 PARAMETER Experiment Name: At_Drought_P Parameter: Timepoint (hr) Value: 12
  misc_feature: MA Experiment 20000436 PARAMETER Experiment Name: At_Drought_P Parameter: Tissue Value: Whole Plant
  misc_feature: MA Experiment 20000436 PARAMETER Experiment Name: At_Drought_P Parameter: Treatment Value: Drought vs. No Drought
  misc_feature: MA Experiment ID: 20000439 Result: Up-regulated in Transcription
  misc_feature: MA Experiment 20000439 PARAMETER Experiment Name: At_Roots__P Parameter: Age (day) Value: 14 vs. 21
  misc_feature: MA Experiment 20000439 PARAMETER Experiment Name: At_Roots__P Parameter: Organism Value: A. thaliana
  misc_feature: MA Experiment 20000439 PARAMETER Experiment Name: At_Roots__P Parameter: Tissue Value: Roots vs. Whole Plant

SEQ ID NO: 92642 - protein, 348 aa, Arabidopsis thaliana; identical to SEQ ID NO: 88886
  peptide (1)..(348): Ceres Seq. ID no. 12713454
  misc_feature (208)..(268): Pfam Name: WRKY DNA -binding domain Pfam Description: WRKY DNA -binding domain
  misc_feature (1)..(348): Homolog of NCBI NO: 15221291 NR Description: WRKY family transcription factor; protein id: supported by cDNA: gi_15990587 [Arabidopsis thaliana]
  misc_feature (61)..(331): Homolog of NCBI NO: 15234284 NR Description: WRKY family transcription factor; protein id: supported by cDNA: gi_19172391 [Arabidopsis thaliana]
  misc_feature (40)..(340): Homolog of NCBI NO: 18407554 NR Description: WRKY family transcription factor; protein id: supported by cDNA: gi_12658409, supported by cDNA: gi_15810266 thaliana] >gi|20978780|sp|Q9C519|WRK6_ARATH WRKY transcription
  misc_feature (16)..(346): Homolog of NCBI NO: 15242221 NR Description: WRKY family transcription factor; protein id:
  misc_feature (1)..(297): Homolog of NCBI NO: 18415833 NR Description: WRKY family transcription factor; protein id: supported by cDNA: gi_15990589 [Arabidopsis thaliana]
  misc_feature (24)..(297): Homolog of NCBI NO: 11357339 NR Description: hypothetical protein AT4g22070 - Arabidopsis >gi|2961352|emb|CAA18110.1| putative protein [Arabidopsis >gi|7269052|emb|CAB79162.1| putative protein [Arabidopsis
  misc_feature (59)..(294): Homolog of NCBI NO: 30686070 NR Description: WRKY family transcription factor [Arabidopsis >gi|20978774|sp|Q8VWV6|WR61_ARATH Probable WRKY transcription
  misc_feature (186)..(292): Homolog of NCBI NO: 30013667 NR Description: Avr9/Cf-9 rapidly elicited protein 126 [Nicotiana
  misc_feature (3)..(341): Homolog of NCBI NO: 15233516 NR Description: WRKY family transcription factor; protein id: supported by cDNA: gi_15990593 [Arabidopsis thaliana]
  misc_feature (193)..(290): Homolog of NCBI NO: 5042446 NR Description: putative WRKY DNA binding protein [Oryza sativa

SEQ ID NO: 92643 - protein, 306 aa, Arabidopsis thaliana; identical to SEQ ID NO: 88887
  peptide (1)..(306): Ceres Seq. ID no. 12713455
  misc_feature (166)..(226): Pfam Name: WRKY DNA -binding domain Pfam Description: WRKY DNA -binding domain
  misc_feature (1)..(306): Homolog of NCBI NO: 15221291 NR Description: WRKY family transcription factor; protein id: supported by cDNA: gi_15990587 [Arabidopsis thaliana]
  misc_feature (19)..(289): Homolog of NCBI NO: 15234284 NR Description: WRKY family transcription factor; protein id: supported by cDNA: gi_19172391 [Arabidopsis thaliana]
  misc_feature (1)..(298): Homolog of NCBI NO: 18407554 NR Description: WRKY family transcription factor; protein id: supported by cDNA: gi_12658409, supported by cDNA: gi_15810266 thaliana] >gi|20978780|sp|Q9C519|WRK6_ARATH WRKY transcription
  misc_feature (1)..(304): Homolog of NCBI NO: 15242221 NR Description: WRKY family transcription factor; protein id:
  misc_feature (1)..(255): Homolog of NCBI NO: 18415833 NR Description: WRKY family transcription factor; protein id: supported by cDNA: gi_15990589 [Arabidopsis thaliana]
  misc_feature (1)..(255): Homolog of NCBI NO: 11357339 NR Description: hypothetical protein AT4g22070 - Arabidopsis >gi|2961352|emb|CAA18110.1| putative protein [Arabidopsis >gi|7269052|emb|CAB79162.1| putative protein [Arabidopsis
  misc_feature (17)..(252): Homolog of NCBI NO: 30686070 NR Description: WRKY family transcription factor [Arabidopsis >gi|20978774|sp|Q8VWV6|WR61_ARATH Probable WRKY transcription
  misc_feature (144)..(250): Homolog of NCBI NO: 30013667 NR Description: Avr9/Cf-9 rapidly elicited protein 126 [Nicotiana
  misc_feature (1)..(299): Homolog of NCBI NO: 15233516 NR Description: WRKY family transcription factor; protein id: supported by cDNA: gi_15990593 [Arabidopsis thaliana]
  misc_feature (151)..(248): Homolog of NCBI NO: 5042446 NR Description: putative WRKY DNA binding protein [Oryza sativa

SEQ ID NO: 92644 - protein, 274 aa, Arabidopsis thaliana; identical to SEQ ID NO: 88888
  peptide (1)..(274): Ceres Seq. ID no. 12713456
  misc_feature (134)..(194): Pfam Name: WRKY DNA -binding domain Pfam Description: WRKY DNA -binding domain
  misc_feature (1)..(274): Homolog of NCBI NO: 15221291 NR Description: WRKY family transcription factor; protein id: supported by cDNA: gi_15990587 [Arabidopsis thaliana]
  misc_feature (1)..(257): Homolog of NCBI NO: 15234284 NR Description: WRKY family transcription factor; protein id: supported by cDNA: gi_19172391 [Arabidopsis thaliana]
  misc_feature (1)..(266): Homolog of NCBI NO: 18407554 NR Description: WRKY family transcription factor; protein id: supported by cDNA: gi_12658409, supported by cDNA: gi_15810266 thaliana] >gi|20978780|sp|Q9C519|WRK6_ARATH WRKY transcription
  misc_feature (1)..(272): Homolog of NCBI NO: 15242221 NR Description: WRKY family transcription factor; protein id:
  misc_feature (1)..(223): Homolog of NCBI NO: 18415833 NR Description: WRKY family transcription factor; protein id: supported by cDNA: gi_15990589 [Arabidopsis thaliana]
  misc_feature (1)..(223): Homolog of NCBI NO: 11357339 NR Description: hypothetical protein AT4g22070 - Arabidopsis >gi|2961352|emb|CAA18110.1| putative protein [Arabidopsis >gi|7269052|emb|CAB79162.1| putative protein [Arabidopsis
  misc_feature (1)..(220): Homolog of NCBI NO: 30686070 NR Description: WRKY family transcription factor [Arabidopsis >gi|20978774|sp|Q8VWV6|WR61_ARATH Probable WRKY transcription
  misc_feature (112)..(218): Homolog of NCBI NO: 30013667 NR Description: Avr9/Cf-9 rapidly elicited protein 126 [Nicotiana
  misc_feature (1)..(267): Homolog of NCBI NO: 15233516 NR Description: WRKY family transcription factor; protein id: supported by cDNA: gi_15990593 [Arabidopsis thaliana]
  misc_feature (119)..(216): Homolog of NCBI NO: 5042446 NR Description: putative WRKY DNA binding protein [Oryza sativa

SEQ ID NO: 92645 - DNA, 1029 bp, Arabidopsis thaliana; identical to SEQ ID NO: 88889
  misc_feature (1)..(1029): Ceres Seq. ID no. 12713457
  misc_feature: MA Experiment ID: 20001451 Result: Up-regulated in Transcription
  misc_feature: MA Experiment 20001451 PARAMETER Experiment Name: At_Far-red-induction_P Parameter: Age (day) Value: 7
  misc_feature: MA Experiment 20001451 PARAMETER Experiment Name: At_Far-red-induction_P Parameter: Light Value: Far-red vs. White
  misc_feature: MA Experiment 20001451 PARAMETER Experiment Name: At_Far-red-induction_P Parameter: Organism Value: A. thaliana
  misc_feature: MA Experiment 20001451 PARAMETER Experiment Name: At_Far-red-induction_P Parameter: Plant Line Value: Columbia
  misc_feature: MA Experiment 20001451 PARAMETER Experiment Name: At_Far-red-induction_P Parameter: Timepoint (hr) Value: 24
  misc_feature: MA Experiment 20001451 PARAMETER Experiment Name: At_Far-red-induction_P Parameter: Tissue Value: Whole Plant

SEQ ID NO: 92646 - protein, 342 aa, Arabidopsis thaliana; identical to SEQ ID NO: 88890
  peptide (1)..(342): Ceres Seq. ID no. 12713458
  misc_feature (17)..(342): Homolog of NCBI NO: 15221295 NR Description: MtN21-like protein; protein id: At1g68170.1
  misc_feature (11)..(342): Homolog of NCBI NO: 15222541 NR Description: MtN21 nodulin protein, putative; protein id: [Arabidopsis thaliana] >gi|11761475|gb|AAG40088.1|AC079374_4
  misc_feature (11)..(302): Homolog of NCBI NO: 25518509 NR Description: hypothetical protein F4F7.12 [imported] -
  misc_feature (6)..(185): Homolog of NCBI NO: 38345836 NR Description: OSJNBa0070M12.19 [Oryza sativa (japonica
  misc_feature (183)..(309): Homolog of NCBI NO: 38345836 NR Description: OSJNBa0070M12.19 [Oryza sativa (japonica
  misc_feature (7)..(188): Homolog of NCBI NO: 34894456 NR Description: putative MtN21 [Oryza sativa (japonica
  misc_feature (186)..(312): Homolog of NCBI NO: 34894456 NR Description: putative MtN21 [Oryza sativa (japonica
  misc_feature (14)..(152): Homolog of NCBI NO: 38605909 NR Description: OSJNBb0088C09.3 [Oryza sativa (japonica
  misc_feature (186)..(330): Homolog of NCBI NO: 38605909 NR Description: OSJNBb0088C09.3 [Oryza sativa (japonica
  misc_feature (17)..(185): Homolog of NCBI NO: 5777632 NR Description: CAA303720.1 protein [Oryza sativa]

SEQ ID NO: 92647 - protein, 336 aa, Arabidopsis thaliana; identical to SEQ ID NO: 88891
  peptide (1)..(336): Ceres Seq. ID no. 12713459
  misc_feature (11)..(336): Homolog of NCBI NO: 15221295 NR Description: MtN21-like protein; protein id: At1g68170.1
  misc_feature (5)..(336): Homolog of NCBI NO: 15222541 NR Description: MtN21 nodulin protein, putative; protein id: [Arabidopsis thaliana] >gi|11761475|gb|AAG40088.1|AC079374_4
  misc_feature (5)..(296): Homolog of NCBI NO: 25518509 NR Description: hypothetical protein F4F7.12 [imported] -
  misc_feature (1)..(179): Homolog of NCBI NO: 38345836 NR Description: OSJNBa0070M12.19 [Oryza sativa (japonica
  misc_feature (177)..(303): Homolog of NCBI NO: 38345836 NR Description: OSJNBa0070M12.19 [Oryza sativa (japonica
  misc_feature (1)..(182): Homolog of NCBI NO: 34894456 NR Description: putative MtN21 [Oryza sativa (japonica
  misc_feature (180)..(306): Homolog of NCBI NO: 34894456 NR Description: putative MtN21 [Oryza sativa (japonica
  misc_feature (8)..(146): Homolog of NCBI NO: 38605909 NR Description: OSJNBb0088C09.3 [Oryza sativa (japonica
  misc_feature (180)..(324): Homolog of NCBI NO: 38605909 NR Description: OSJNBb0088C09.3 [Oryza sativa (japonica
  misc_feature (11)..(179): Homolog of NCBI NO: 5777632 NR Description: CAA303720.1 protein [Oryza sativa]

SEQ ID NO: 92648 - protein, 332 aa, Arabidopsis thaliana; identical to SEQ ID NO: 88892
  peptide (1)..(332): Ceres Seq. ID no. 12713460
  misc_feature (7)..(332): Homolog of NCBI NO: 15221295 NR Description: MtN21-like protein; protein id: At1g68170.1
  misc_feature (1)..(332): Homolog of NCBI NO: 15222541 NR Description: MtN21 nodulin protein, putative; protein id: [Arabidopsis thaliana] >gi|11761475|gb|AAG40088.1|AC079374_4
  misc_feature (1)..(292): Homolog of NCBI NO: 25518509 NR Description: hypothetical protein F4F7.12 [imported] -
  misc_feature (1)..(175): Homolog of NCBI NO: 38345836 NR Description: OSJNBa0070M12.19 [Oryza sativa (japonica
  misc_feature (173)..(299): Homolog of NCBI NO: 38345836 NR Description: OSJNBa0070M12.19 [Oryza sativa (japonica
  misc_feature (1)..(178): Homolog of NCBI NO: 34894456 NR Description: putative MtN21 [Oryza sativa (japonica
  misc_feature (176)..(302): Homolog of NCBI NO: 34894456 NR Description: putative MtN21 [Oryza sativa (japonica
  misc_feature (4)..(142): Homolog of NCBI NO: 38605909 NR Description: OSJNBb0088C09.3 [Oryza sativa (japonica
  misc_feature (176)..(320): Homolog of NCBI NO: 38605909 NR Description: OSJNBb0088C09.3 [Oryza sativa (japonica
  misc_feature (7)..(175): Homolog of NCBI NO: 5777632 NR Description: CAA303720.1 protein [Oryza sativa]

SEQ ID NO: 92649 - DNA, 1293 bp, Arabidopsis thaliana; identical to SEQ ID NO: 88893
  misc_feature (1)..(1293): Ceres Seq. ID no. 12713545
  misc_feature: MA Experiment ID: 108461 Result: Up-regulated in Transcription
  misc_feature: MA Experiment 108461 PARAMETER Experiment Name: At_Germinating_Seeds_cDNA_P Parameter: Age (day) Value: 1 vs. 0
  misc_feature: MA Experiment 108461 PARAMETER Experiment Name: At_Germinating_Seeds_cDNA_P Parameter: Tissue Value: Germinating Seeds
  misc_feature: MA Experiment ID: 108462 Result: Up-regulated in Transcription
  misc_feature: MA Experiment 108462 PARAMETER Experiment Name: At_Germinating_Seeds_cDNA_P Parameter: Age (day) Value: 2 vs. 0
  misc_feature: MA Experiment 108462 PARAMETER Experiment Name: At_Germinating_Seeds_cDNA_P Parameter: Tissue Value: Germinating Seeds
  misc_feature: MA Experiment ID: 108463 Result: Up-regulated in Transcription
  misc_feature: MA Experiment 108463 PARAMETER Experiment Name: At_Germinating_Seeds_cDNA_P Parameter: Age (day) Value: 3 vs. 0
  misc_feature: MA Experiment 108463 PARAMETER Experiment Name: At_Germinating_Seeds_cDNA_P Parameter: Tissue Value: Germinating Seeds
  misc_feature: MA Experiment ID: 108464 Result: Up-regulated in Transcription
  misc_feature: MA Experiment 108464 PARAMETER Experiment Name: At_Germinating_Seeds_cDNA_P Parameter: Age (day) Value: 4 vs. 0
  misc_feature: MA Experiment 108464 PARAMETER Experiment Name: At_Germinating_Seeds_cDNA_P Parameter: Tissue Value: Germinating Seeds
  misc_feature: MA Experiment ID: 108473 Result: Down-regulated in Transcription
  misc_feature: MA Experiment 108473 PARAMETER Experiment Name: At_Drought_Flowers_cDNA_P Parameter: Timepoint (hr) Value: 7 d
  misc_feature: MA Experiment 108473 PARAMETER Experiment Name: At_Drought_Flowers_cDNA_P Parameter: Tissue Value: Flower
  misc_feature: MA Experiment 108473 PARAMETER Experiment Name: At_Drought_Flowers_cDNA_P Parameter: Treatment Value: Drought vs. No Drought
  misc_feature: MA Experiment ID: 108595 Result: Down-regulated in Transcription
  misc_feature: MA Experiment 108595 PARAMETER Experiment Name: At_Ler-pi_Ovule_cDNA_P Parameter: Plant Line Value: null
  misc_feature: MA Experiment ID: 108668 Result: Down-regulated in Transcription
  misc_feature: MA Experiment 108668 PARAMETER Experiment Name: At_2mM_SA_cDNA_P Parameter: Plant Line Value: WS
  misc_feature: MA Experiment 108668 PARAMETER Experiment Name: At_2mM_SA_cDNA_P Parameter: Timepoint (hr) Value: 6
  misc_feature: MA Experiment 108668 PARAMETER Experiment Name: At_2mM_SA_cDNA_P Parameter: Treatment Value: 2mM SA vs. No Treatment
  misc_feature: MA Experiment ID: 20000069 Result: Down-regulated in Transcription
  misc_feature: MA Experiment 20000069 PARAMETER Experiment Name: At_100uM_ABA_Mutants_cDNA_P Parameter: Plant Line Value: CS23
  misc_feature: MA Experiment 20000069 PARAMETER Experiment Name: At_100uM_ABA_Mutants_cDNA_P Parameter: Timepoint (hr) Value: 6
  misc_feature: MA Experiment 20000069 PARAMETER Experiment Name: At_100uM_ABA_Mutants_cDNA_P Parameter: Tissue Value: Aerial
  misc_feature: MA Experiment 20000069 PARAMETER Experiment Name: At_100uM_ABA_Mutants_cDNA_P Parameter: Treatment Value: 100uM ABA vs. No Treatment
  misc_feature: MA Experiment ID: 20000070 Result: Down-regulated in Transcription
  misc_feature: MA Experiment 20000070 PARAMETER Experiment Name: At_100uM_ABA_Mutants_cDNA_P Parameter: Plant Line Value: CS24
  misc_feature: MA Experiment 20000070 PARAMETER Experiment Name: At_100uM_ABA_Mutants_cDNA_P Parameter: Timepoint (hr) Value: 6
  misc_feature: MA Experiment 20000070 PARAMETER Experiment Name: At_100uM_ABA_Mutants_cDNA_P Parameter: Tissue Value: Aerial
  misc_feature: MA Experiment 20000070 PARAMETER Experiment Name: At_100uM_ABA_Mutants_cDNA_P Parameter: Treatment Value: 100uM ABA vs. No Treatment
  misc_feature: MA Experiment ID: 20000071 Result: Down-regulated in Transcription
  misc_feature: MA Experiment 20000071 PARAMETER Experiment Name: At_100uM_ABA_Mutants_cDNA_P Parameter: Plant Line Value: CS8104
  misc_feature: MA Experiment 20000071 PARAMETER Experiment Name: At_100uM_ABA_Mutants_cDNA_P Parameter: Timepoint (hr) Value: 6
  misc_feature: MA Experiment 20000071 PARAMETER Experiment Name: At_100uM_ABA_Mutants_cDNA_P Parameter: Tissue Value: Aerial
  misc_feature: MA Experiment 20000071 PARAMETER Experiment Name: At_100uM_ABA_Mutants_cDNA_P Parameter: Treatment Value: 100uM ABA vs. No Treatment
  misc_feature: MA Experiment ID: 20000072 Result: Down-regulated in Transcription
  misc_feature: MA Experiment 20000072 PARAMETER Experiment Name: At_100uM_ABA_Mutants_cDNA_P Parameter: Plant Line Value: CS8105
  misc_feature: MA Experiment 20000072 PARAMETER Experiment Name: At_100uM_ABA_Mutants_cDNA_P Parameter: Timepoint (hr) Value: 6
  misc_feature: MA Experiment 20000072 PARAMETER Experiment Name: At_100uM_ABA_Mutants_cDNA_P Parameter: Tissue Value: Aerial
  misc_feature: MA Experiment 20000072 PARAMETER Experiment Name: At_100uM_ABA_Mutants_cDNA_P Parameter: Treatment Value: 100uM ABA vs. No Treatment
  misc_feature: MA Experiment ID: 20000087 Result: Down-regulated in Transcription
  misc_feature: MA Experiment 20000087 PARAMETER Experiment Name: At_100uM_ABA_Mutants_cDNA_P Parameter: Plant Line Value: WS
  misc_feature: MA Experiment 20000087 PARAMETER Experiment Name: At_100uM_ABA_Mutants_cDNA_P Parameter: Timepoint (hr) Value: 6
  misc_feature: MA Experiment 20000087 PARAMETER Experiment Name: At_100uM_ABA_Mutants_cDNA_P Parameter: Tissue Value: Aerial
  misc_feature: MA Experiment 20000087 PARAMETER Experiment Name: At_100uM_ABA_Mutants_cDNA_P Parameter: Treatment Value: 100uM ABA vs. No Treatment
  misc_feature: MA Experiment ID: 20000113 Result: Down-regulated in Transcription
  misc_feature: MA Experiment 20000113 PARAMETER Experiment Name: At_42deg_Heat_cDNA_P Parameter: Temperature (deg C) Value: 42 vs. 22
  misc_feature: MA Experiment 20000113 PARAMETER Experiment Name: At_42deg_Heat_cDNA_P Parameter: Timepoint (hr) Value: 8
  misc_feature: MA Experiment 20000113 PARAMETER Experiment Name: At_42deg_Heat_cDNA_P Parameter: Tissue Value: Aerial
  misc_feature: MA Experiment ID: 20000117 Result: Down-regulated in Transcription
  misc_feature: MA Experiment 20000117 PARAMETER Experiment Name: At_100uM_ABA_Mutants_cDNA_P Parameter: Plant Line Value: Columbia
  misc_feature: MA Experiment 20000117 PARAMETER Experiment Name: At_100uM_ABA_Mutants_cDNA_P Parameter: Timepoint (hr) Value: 6
  misc_feature: MA Experiment 20000117 PARAMETER Experiment Name: At_100uM_ABA_Mutants_cDNA_P Parameter: Tissue Value: Aerial
  misc_feature: MA Experiment 20000117 PARAMETER Experiment Name: At_100uM_ABA_Mutants_cDNA_P Parameter: Treatment Value: 100uM ABA vs. No Treatment

SEQ ID NO: 92650 - protein, 430 aa, Arabidopsis thaliana; identical to SEQ ID NO: 47881
  peptide (1)..(430): Ceres Seq. ID no. 12713546
  misc_feature (339)..(363): Pfam Name: Leucine Rich Repeat Pfam Description: Leucine Rich Repeat
  misc_feature (1)..(430): Homolog of NCBI NO: 18409119 NR Description: leucine rich repeat protein family; protein id: supported by cDNA: gi_13605580 [Arabidopsis thaliana]
  misc_feature (9)..(428): Homolog of NCBI NO: 15230865 NR Description: leucine rich repeat protein family; protein id:
  misc_feature (36)..(428): Homolog of NCBI NO: 11994758 NR Description: contains similarity to elicitor-inducible
  misc_feature (36)..(422): Homolog of NCBI NO: 15222215 NR Description: leucine rich repeat protein family; protein id:
  misc_feature (1)..(423): Homolog of NCBI NO: 34894182 NR Description: P0439B06.12 [Oryza sativa (japonica
  misc_feature (28)..(406): Homolog of NCBI NO: 15220050 NR Description: leucine rich repeat protein family; protein id: [Arabidopsis thaliana] >gi|22096215|sp|Q9SSD1|TMM_ARATH TOO MANY protein precursor (TMM) >gi|25406630|pir||C96832
  misc_feature (28)..(406): Homolog of NCBI NO: 26452151 NR Description: GPI-anchored protein [Arabidopsis thaliana]
  misc_feature (11)..(415): Homolog of NCBI NO: 7487680 NR Description: hypothetical protein T5F17.10 - Arabidopsis
  misc_feature (11)..(415): Homolog of NCBI NO: 15236148 NR Description: leucine rich repeat protein family (fragment);
  misc_feature (29)..(422): Homolog of NCBI NO: 15228004 NR Description: leucine rich repeat protein family; protein id: [Arabidopsis thaliana] >gi|25408813|pir||D84858 hypothetical

SEQ ID NO: 92651 - protein, 395 aa, Arabidopsis thaliana; identical to SEQ ID NO: 47882
  peptide (1)..(395): Ceres Seq. ID no. 12713547
  misc_feature (304)..(328): Pfam Name: Leucine Rich Repeat Pfam Description: Leucine Rich Repeat
  misc_feature (1)..(395): Homolog of NCBI NO: 18409119 NR Description: leucine rich repeat protein family; protein id: supported by cDNA: gi_13605580 [Arabidopsis thaliana]
  misc_feature (1)..(393): Homolog of NCBI NO: 15230865 NR Description: leucine rich repeat protein family; protein id:
  misc_feature (1)..(393): Homolog of NCBI NO: 11994758 NR Description: contains similarity to elicitor-inducible
  misc_feature (1)..(387): Homolog of NCBI NO: 15222215 NR Description: leucine rich repeat protein family; protein id:
  misc_feature (1)..(388): Homolog of NCBI NO: 34894182 NR Description: P0439B06.12 [Oryza sativa (japonica
  misc_feature (1)..(371): Homolog of NCBI NO: 15220050 NR Description: leucine rich repeat protein family; protein id: [Arabidopsis thaliana] >gi|22096215|sp|Q9SSD1|TMM_ARATH TOO MANY protein precursor (TMM) >gi|25406630|pir||C96832
  misc_feature (1)..(371): Homolog of NCBI NO: 26452151 NR Description: GPI-anchored protein [Arabidopsis thaliana]
  misc_feature (1)..(380): Homolog of NCBI NO: 7487680 NR Description: hypothetical protein T5F17.10 - Arabidopsis
  misc_feature (1)..(380): Homolog of NCBI NO: 15236148 NR Description: leucine rich repeat protein family (fragment);
  misc_feature (1)..(387): Homolog of NCBI NO: 15228004 NR Description: leucine rich repeat protein family; protein id: [Arabidopsis thaliana] >gi|25408813|pir||D84858 hypothetical

SEQ ID NO: 92652 - protein, 338 aa, Arabidopsis thaliana; identical to SEQ ID NO: 88896
  peptide (1)..(338): Ceres Seq. ID no. 12713548
  misc_feature (247)..(271): Pfam Name: Leucine Rich Repeat Pfam Description: Leucine Rich Repeat
  misc_feature (1)..(338): Homolog of NCBI NO: 18409119 NR Description: leucine rich repeat protein family; protein id: supported by cDNA: gi_13605580 [Arabidopsis thaliana]
  misc_feature (1)..(336): Homolog of NCBI NO: 15230865 NR Description: leucine rich repeat protein family; protein id:
  misc_feature (1)..(336): Homolog of NCBI NO: 11994758 NR Description: contains similarity to elicitor-inducible
  misc_feature (1)..(330): Homolog of NCBI NO: 15222215 NR Description: leucine rich repeat protein family; protein id:
  misc_feature (1)..(331): Homolog of NCBI NO: 34894182 NR Description: P0439B06.12 [Oryza sativa (japonica
  misc_feature (1)..(314): Homolog of NCBI NO: 15220050 NR Description: leucine rich repeat protein family; protein id: [Arabidopsis thaliana] >gi|22096215|sp|Q9SSD1|TMM_ARATH TOO MANY protein precursor (TMM) >gi|25406630|pir||C96832
  misc_feature (1)..(314): Homolog of NCBI NO: 26452151 NR Description: GPI-anchored protein [Arabidopsis thaliana]
  misc_feature (1)..(323): Homolog of NCBI NO: 7487680 NR Description: hypothetical protein T5F17.10 - Arabidopsis
  misc_feature (1)..(323): Homolog of NCBI NO: 15236148 NR Description: leucine rich repeat protein family (fragment);
  misc_feature (1)..(330): Homolog of NCBI NO: 15228004 NR Description: leucine rich repeat protein family; protein id: [Arabidopsis thaliana] >gi|25408813|pir||D84858 hypothetical

SEQ ID NO: 92653 - DNA, 2226 bp, Arabidopsis thaliana; identical to SEQ ID NO: 88897
  misc_feature (1)..(2226): Ceres Seq. ID no. 12713632
  misc_feature: MA Experiment ID: 20000307 Result: Down-regulated in Transcription
  misc_feature: MA Experiment 20000307 PARAMETER Experiment Name: At_Germinating_Seeds_Sub_P Parameter: Age (hr) Value: 24 vs. 0
  misc_feature: MA Experiment 20000307 PARAMETER Experiment Name: At_Germinating_Seeds_Sub_P Parameter: Organism Value: A. thaliana
  misc_feature: MA Experiment 20000307 PARAMETER Experiment Name: At_Germinating_Seeds_Sub_P Parameter: Plant Line Value: WS
  misc_feature: MA Experiment 20000307 PARAMETER Experiment Name: At_Germinating_Seeds_Sub_P Parameter: Tissue Value: Germinating Seeds
  misc_feature: MA Experiment ID: 20000355 Result: Up-regulated in Transcription
  misc_feature: MA Experiment 20000355 PARAMETER Experiment Name: At_Siliques_Sub_P Parameter: Age (day) Value: 21
  misc_feature: MA Experiment 20000355 PARAMETER Experiment Name: At_Siliques_Sub_P Parameter: Organism Value: A. thaliana
  misc_feature: MA Experiment 20000355 PARAMETER Experiment Name: At_Siliques_Sub_P Parameter: Plant Line Value: WS
  misc_feature: MA Experiment 20000355 PARAMETER Experiment Name: At_Siliques_Sub_P Parameter: Tissue Value: Less Than 5mm Siliques vs. Whole Plant

SEQ ID NO: 92654 - protein, 741 aa, Arabidopsis thaliana; identical to SEQ ID NO: 88898
  peptide (1)..(741): Ceres Seq. ID no. 12713633
  misc_feature (425)..(459): Pfam Name: PPR repeat Pfam Description: PPR repeat
  misc_feature (35)..(736): Homolog of NCBI NO: 15234006 NR Description: putative protein; protein id: At4g18750.1
  misc_feature (4)..(741): Homolog of NCBI NO: 38606535 NR Description: OSJNBa0016O02.23 [Oryza sativa (japonica
  misc_feature (2)..(702): Homolog of NCBI NO: 38567725 NR Description: B1358B12.23 [Oryza sativa (japonica
  misc_feature (2)..(702): Homolog of NCBI NO: 38347057 NR Description: OSJNBa0060P14.4 [Oryza sativa (japonica
  misc_feature (1)..(741): Homolog of NCBI NO: 38423978 NR Description: PPR-repeat protein-like [Oryza sativa (japonica
  misc_feature (34)..(729): Homolog of NCBI NO: 15233590 NR Description: putative protein; protein id: At4g21300.1
  misc_feature (2)..(713): Homolog of NCBI NO: 18394615 NR Description: hypothetical protein; protein id: At1g18485.1
  misc_feature (57)..(737): Homolog of NCBI NO: 34897084 NR Description: hypothetical protein [Oryza sativa (japonica group)] >gi|12957718|gb|AAK09236.1| hypothetical protein [Oryza
  misc_feature (2)..(713): Homolog of NCBI NO: 25402861 NR Description: protein F15H18.4 [imported] - Arabidopsis >gi|6714305|gb|AAF26001.1|AC013354_20 F15H18.4 [Arabidopsis
  misc_feature (2)..(735): Homolog of NCBI NO: 15236324 NR Description: putative protein; protein id: At4g13650.1

SEQ ID NO: 92655 - protein, 721 aa, Arabidopsis thaliana; identical to SEQ ID NO: 88899
  peptide (1)..(721): Ceres Seq. ID no. 12713634
  misc_feature (405)..(439): Pfam Name: PPR repeat Pfam Description: PPR repeat
  misc_feature (15)..(716): Homolog of NCBI NO: 15234006 NR Description: putative protein; protein id: At4g18750.1
  misc_feature (1)..(721): Homolog of NCBI NO: 38606535 NR Description: OSJNBa0016O02.23 [Oryza sativa (japonica
  misc_feature (1)..(682): Homolog of NCBI NO: 38567725 NR Description: B1358B12.23 [Oryza sativa (japonica
  misc_feature (1)..(682): Homolog of NCBI NO: 38347057 NR Description: OSJNBa0060P14.4 [Oryza sativa (japonica
  misc_feature (1)..(721): Homolog of NCBI NO: 38423978 NR Description: PPR-repeat protein-like [Oryza sativa (japonica
  misc_feature (14)..(709): Homolog of NCBI NO: 15233590 NR Description: putative protein; protein id: At4g21300.1
  misc_feature (1)..(693): Homolog of NCBI NO: 18394615 NR Description: hypothetical protein; protein id: At1g18485.1
  misc_feature (37)..(717): Homolog of NCBI NO: 34897084 NR Description: hypothetical protein [Oryza sativa (japonica group)] >gi|12957718|gb|AAK09236.1| hypothetical protein [Oryza
  misc_feature (1)..(693): Homolog of NCBI NO: 25402861 NR Description: protein F15H18.4 [imported] - Arabidopsis >gi|6714305|gb|AAF26001.1|AC013354_20 F15H18.4 [Arabidopsis
  misc_feature (1)..(715): Homolog of NCBI NO: 15236324 NR Description: putative protein; protein id: At4g13650.1

SEQ ID NO: 92656 - protein, 643 aa, Arabidopsis thaliana; identical to SEQ ID NO: 88900
  peptide (1)..(643): Ceres Seq. ID no. 12713635
  misc_feature (327)..(361): Pfam Name: PPR repeat Pfam Description: PPR repeat
  misc_feature (1)..(638): Homolog of NCBI NO: 15234006 NR Description: putative protein; protein id: At4g18750.1
  misc_feature (1)..(643): Homolog of NCBI NO: 38606535 NR Description: OSJNBa0016O02.23 [Oryza sativa (japonica
  misc_feature (1)..(604): Homolog of NCBI NO: 38567725 NR Description: B1358B12.23 [Oryza sativa (japonica
  misc_feature (1)..(604): Homolog of NCBI NO: 38347057 NR Description: OSJNBa0060P14.4 [Oryza sativa (japonica
  misc_feature (1)..(643): Homolog of NCBI NO: 38423978 NR Description: PPR-repeat protein-like [Oryza sativa (japonica
  misc_feature (1)..(631): Homolog of NCBI NO: 15233590 NR Description: putative protein; protein id: At4g21300.1
  misc_feature (1)..(615): Homolog of NCBI NO: 18394615 NR Description: hypothetical protein; protein id: At1g18485.1
  misc_feature (1)..(639): Homolog of NCBI NO: 34897084 NR Description: hypothetical protein [Oryza sativa (japonica group)] >gi|12957718|gb|AAK09236.1| hypothetical protein [Oryza
  misc_feature (1)..(615): Homolog of NCBI NO: 25402861 NR Description: protein F15H18.4 [imported] - Arabidopsis >gi|6714305|gb|AAF26001.1|AC013354_20 F15H18.4 [Arabidopsis
  misc_feature (1)..(637): Homolog of NCBI NO: 15236324 NR Description: putative protein; protein id: At4g13650.1

SEQ ID NO: 92657 - DNA, 1153 bp, Arabidopsis thaliana; identical to SEQ ID NO: 88901
  misc_feature (1)..(1153): Ceres Seq. ID no. 12713671
  misc_feature: MA Experiment ID: 20001905 Result: Up-regulated in Transcription
  misc_feature: MA Experiment 20001905 PARAMETER Experiment Name: At_Drought_Reproduction_P Parameter: Age (day) Value: 40
  misc_feature: MA Experiment 20001905 PARAMETER Experiment Name: At_Drought_Reproduction_P Parameter: Organism Value: A. thaliana
  misc_feature: MA Experiment 20001905 PARAMETER Experiment Name: At_Drought_Reproduction_P Parameter: Plant Line Value: WS
  misc_feature: MA Experiment 20001905 PARAMETER Experiment Name: At_Drought_Reproduction_P Parameter: Timepoint (day) Value: 10
  misc_feature: MA Experiment 20001905 PARAMETER Experiment Name: At_Drought_Reproduction_P Parameter: Tissue Value: Rosettes
  misc_feature: MA Experiment 20001905 PARAMETER Experiment Name: At_Drought_Reproduction_P Parameter: Treatment Value: Drought vs. No Drought

SEQ ID NO: 92658 - protein, 252 aa, Arabidopsis thaliana; identical to SEQ ID NO: 41677
  peptide (1)..(252): Ceres Seq. ID no. 12713672
  misc_feature (2)..(139): Pfam Name: Eukaryotic protein of unknown function (DUF862) Pfam Description: Eukaryotic protein of unknown function (DUF862)
  misc_feature (1)..(252): Homolog of NCBI NO: 15235955 NR Description: putative protein; protein id: At4g25680.1, by cDNA: 122917. [Arabidopsis thaliana] >gi|7486773|pir||T09560
  misc_feature (1)..(252): Homolog of NCBI NO: 15235952 NR Description: putative protein; protein id: At4g25660.1, by cDNA: 20902. [Arabidopsis thaliana] >gi|7486771|pir||T09558
  misc_feature (1)..(246): Homolog of NCBI NO: 37536408 NR Description: unknown protein [Oryza sativa (japonica
  misc_feature (3)..(100): Homolog of NCBI NO: 34897764 NR Description: hypothetical protein [Oryza sativa (japonica group)] >gi|6907109|dbj|BAA90636.1| hypothetical protein [Oryza
  misc_feature (14)..(243): Homolog of NCBI NO: 18400749 NR Description: expressed protein; protein id: At2g25190.1, by cDNA: 14105., supported by cDNA: gi_13877550, supported by gi_20148724 [Arabidopsis thaliana] >gi|25354456|pir||D84645
  misc_feature (34)..(206): Homolog of NCBI NO: 18420889 NR Description: putative protein; protein id: At5g25170.1,
  misc_feature (34)..(142): Homolog of NCBI NO: 18412886 NR Description: expressed protein; protein id: At1g80690.1, by cDNA: 40037. [Arabidopsis thaliana]
  misc_feature (34)..(142): Homolog of NCBI NO: 25354458 NR Description: hypothetical protein F23A5.4 [imported] - thaliana >gi|6503281|gb|AAF14657.1|AC011713_5 Contains similarity
  misc_feature (13)..(142): Homolog of NCBI NO: 17529024 NR Description: unknown protein [Arabidopsis thaliana]
  misc_feature (1)..(142): Homolog of NCBI NO: 15238059 NR Description: putative protein; protein id: At5g47310.1

SEQ ID NO: 92659 - protein, 180 aa, Arabidopsis thaliana; identical to SEQ ID NO: 41678
  peptide (1)..(180): Ceres Seq. ID no. 12713673
  misc_feature (1)..(67): Pfam Name: Eukaryotic protein of unknown function (DUF862) Pfam Description: Eukaryotic protein of unknown function (DUF862)
  misc_feature (1)..(180): Homolog of NCBI NO: 15235955 NR Description: putative protein; protein id: At4g25680.1, by cDNA: 122917. [Arabidopsis thaliana] >gi|7486773|pir||T09560
  misc_feature (1)..(180): Homolog of NCBI NO: 15235952 NR Description: putative protein; protein id: At4g25660.1, by cDNA: 20902. [Arabidopsis thaliana] >gi|7486771|pir||T09558
  misc_feature (1)..(174): Homolog of NCBI NO: 37536408 NR Description: unknown protein [Oryza sativa (japonica
  misc_feature (1)..(28): Homolog of NCBI NO: 34897764 NR Description: hypothetical protein [Oryza sativa (japonica group)] >gi|6907109|dbj|BAA90636.1| hypothetical protein [Oryza
  misc_feature (1)..(171): Homolog of NCBI NO: 18400749 NR Description: expressed protein; protein id: At2g25190.1, by cDNA: 14105., supported by cDNA: gi_13877550, supported by gi_20148724 [Arabidopsis thaliana] >gi|25354456|pir||D84645
  misc_feature (1)..(134): Homolog of NCBI NO: 18420889 NR Description: putative protein; protein id: At5g25170.1,
  misc_feature (1)..(70): Homolog of NCBI NO: 18412886 NR Description: expressed protein; protein id: At1g80690.1, by cDNA: 40037. [Arabidopsis thaliana]
  misc_feature (1)..(70): Homolog of NCBI NO: 25354458 NR Description: hypothetical protein F23A5.4 [imported] - thaliana >gi|6503281|gb|AAF14657.1|AC011713_5 Contains similarity
  misc_feature (1)..(70): Homolog of NCBI NO: 17529024 NR Description: unknown protein [Arabidopsis thaliana]
  misc_feature (1)..(70): Homolog of NCBI NO: 15238059 NR Description: putative protein; protein id: At5g47310.1

SEQ ID NO: 92660 - protein, 162 aa, Arabidopsis thaliana; identical to SEQ ID NO: 41679
  peptide (1)..(162): Ceres Seq. ID no. 12713674
  misc_feature (1)..(162): Homolog of NCBI NO: 15235955 NR Description: putative protein; protein id: At4g25680.1, by cDNA: 122917. [Arabidopsis thaliana] >gi|7486773|pir||T09560
  misc_feature (1)..(162): Homolog of NCBI NO: 15235952 NR Description: putative protein; protein id: At4g25660.1, by cDNA: 20902. [Arabidopsis thaliana] >gi|7486771|pir||T09558
  misc_feature (1)..(156): Homolog of NCBI NO: 37536408 NR Description: unknown protein [Oryza sativa (japonica
  misc_feature (1)..(153): Homolog of NCBI NO: 18400749 NR Description: expressed protein; protein id: At2g25190.1, by cDNA: 14105., supported by cDNA: gi_13877550, supported by gi_20148724 [Arabidopsis thaliana] >gi|25354456|pir||D84645
  misc_feature (1)..(116): Homolog of NCBI NO: 18420889 NR Description: putative protein; protein id: At5g25170.1,
  misc_feature (1)..(52): Homolog of NCBI NO: 18412886 NR Description: expressed protein; protein id: At1g80690.1, by cDNA: 40037. [Arabidopsis thaliana]
  misc_feature (1)..(52): Homolog of NCBI NO: 25354458 NR Description: hypothetical protein F23A5.4 [imported] - thaliana >gi|6503281|gb|AAF14657.1|AC011713_5 Contains similarity
  misc_feature (1)..(52): Homolog of NCBI NO: 17529024 NR Description: unknown protein [Arabidopsis thaliana]
  misc_feature (1)..(52): Homolog of NCBI NO: 15238059 NR Description: putative protein; protein id: At5g47310.1
  misc_feature (1)..(52): Homolog of NCBI NO: 30684058 NR Description: expressed protein [Arabidopsis thaliana] AT4g17486/AT4g17486 [Arabidopsis thaliana]

SEQ ID NO: 92661 - DNA, 1188 bp, Arabidopsis thaliana; identical to SEQ ID NO: 88905
  misc_feature (1)..(1188): Ceres Seq. ID no. 12713680
  misc_feature: MA Experiment ID: 20000171 Result: Down-regulated in Transcription
  misc_feature: MA Experiment 20000171 PARAMETER Experiment Name: At_42deg_Heat_P Parameter: Age (day) Value: 14
  misc_feature: MA Experiment 20000171 PARAMETER Experiment Name: At_42deg_Heat_P Parameter: Organism Value: A. thaliana
  misc_feature: MA Experiment 20000171 PARAMETER Experiment Name: At_42deg_Heat_P Parameter: Plant Line Value: WS
  misc_feature: MA Experiment 20000171 PARAMETER Experiment Name: At_42deg_Heat_P Parameter: Temperature (deg C) Value: 42 vs. 22
  misc_feature: MA Experiment 20000171 PARAMETER Experiment Name: At_42deg_Heat_P Parameter: Timepoint (hr) Value: 1
  misc_feature: MA Experiment 20000171 PARAMETER Experiment Name: At_42deg_Heat_P Parameter: Tissue Value: Aerial
  misc_feature: MA Experiment ID: 20000173 Result: Down-regulated in Transcription
  misc_feature: MA Experiment 20000173 PARAMETER Experiment Name: At_42deg_Heat_P Parameter: Age (day) Value: 14
  misc_feature: MA Experiment 20000173 PARAMETER Experiment Name: At_42deg_Heat_P Parameter: Organism Value: A. thaliana
  misc_feature: MA Experiment 20000173 PARAMETER Experiment Name: At_42deg_Heat_P Parameter: Plant Line Value: WS
  misc_feature: MA Experiment 20000173 PARAMETER Experiment Name: At_42deg_Heat_P Parameter: Temperature (deg C) Value: 42 vs. 22
  misc_feature: MA Experiment 20000173 PARAMETER Experiment Name: At_42deg_Heat_P Parameter: Timepoint (hr) Value: 6
  misc_feature: MA Experiment 20000173 PARAMETER Experiment Name: At_42deg_Heat_P Parameter: Tissue Value: Aerial
  misc_feature: MA Experiment ID: 20000180 Result: Up-regulated in Transcription
  misc_feature: MA Experiment 20000180 PARAMETER Experiment Name: At_Germinating_Seeds_P Parameter: Age (hr) Value: 24 vs. 0
  misc_feature: MA Experiment 20000180 PARAMETER Experiment Name: At_Germinating_Seeds_P Parameter: Tissue Value: Germinating Seeds
  misc_feature: MA Experiment ID: 20000184 Result: Down-regulated in Transcription
  misc_feature: MA Experiment 20000184 PARAMETER Experiment Name: At_Shoots__P Parameter: Age (day) Value: 7
  misc_feature: MA Experiment 20000184 PARAMETER Experiment Name: At_Shoots__P Parameter: Tissue Value: Shoots vs. Whole Plant
  misc_feature: MA Experiment ID: 20000264 Result: Down-regulated in Transcription
  misc_feature: MA Experiment 20000264 PARAMETER Experiment Name: At_Open_Flower_P Parameter: Age (day) Value: 21
  misc_feature: MA Experiment 20000264 PARAMETER Experiment Name: At_Open_Flower_P Parameter: Plant Line Value: WS
  misc_feature: MA Experiment 20000264 PARAMETER Experiment Name: At_Open_Flower_P Parameter: Tissue Value: Open Flower vs. Whole Plant
  misc_feature: MA Experiment ID: 20000265 Result: Down-regulated in Transcription
  misc_feature: MA Experiment 20000265 PARAMETER Experiment Name: At_Open_Flower_P Parameter: Age (day) Value: 21
  misc_feature: MA Experiment 20000265 PARAMETER Experiment Name: At_Open_Flower_P Parameter: Plant Line Value: WS
  misc_feature: MA Experiment 20000265 PARAMETER Experiment Name: At_Open_Flower_P Parameter: Tissue Value: Closed Flower vs. Whole Plant
  misc_feature: MA Experiment ID: 20000451 Result: Up-regulated in Transcription
  misc_feature: MA Experiment 20000451 PARAMETER Experiment Name: At_CS6879_Shoots-Roots_P Parameter: Age (day) Value: 14
  misc_feature: MA Experiment 20000451 PARAMETER Experiment Name: At_CS6879_Shoots-Roots_P Parameter: Organism Value: A. thaliana
  misc_feature: MA Experiment 20000451 PARAMETER Experiment Name: At_CS6879_Shoots-Roots_P Parameter: Plant Line Value: CS6879 vs. WS
  misc_feature: MA Experiment 20000451 PARAMETER Experiment Name: At_CS6879_Shoots-Roots_P Parameter: Tissue Value: Roots
  misc_feature: MA Experiment ID: 20000452 Result: Up-regulated in Transcription
  misc_feature: MA Experiment 20000452 PARAMETER Experiment Name: At_CS6879_Shoots-Roots_P Parameter: Age (day) Value: 14
  misc_feature: MA Experiment 20000452 PARAMETER Experiment Name: At_CS6879_Shoots-Roots_P Parameter: Organism Value: A. thaliana
  misc_feature: MA Experiment 20000452 PARAMETER Experiment Name: At_CS6879_Shoots-Roots_P Parameter: Plant Line Value: CS6879 vs. WS
  misc_feature: MA Experiment 20000452 PARAMETER Experiment Name: At_CS6879_Shoots-Roots_P Parameter: Tissue Value: Shoots
  misc_feature: MA Experiment ID: 20001558 Result: Down-regulated in Transcription
  misc_feature: MA Experiment 20001558 PARAMETER Experiment Name: At_Drought_Soil_Dry_P Parameter: Age (day) Value: 27
  misc_feature: MA Experiment 20001558 PARAMETER Experiment Name: At_Drought_Soil_Dry_P Parameter: Organism Value: A. thaliana
  misc_feature: MA Experiment 20001558 PARAMETER Experiment Name: At_Drought_Soil_Dry_P Parameter: Plant Line Value: WS
  misc_feature: MA Experiment 20001558 PARAMETER Experiment Name: At_Drought_Soil_Dry_P Parameter: Post Timepoint (hr) Value: 6
  misc_feature: MA Experiment 20001558 PARAMETER Experiment Name: At_Drought_Soil_Dry_P Parameter: Post-Treatment Value: Re-Water vs. No Drought
  misc_feature: MA Experiment 20001558 PARAMETER Experiment Name: At_Drought_Soil_Dry_P Parameter: Timepoint (day) Value: 13
  misc_feature: MA Experiment 20001558 PARAMETER Experiment Name: At_Drought_Soil_Dry_P Parameter: Treatment Value: Drought vs. No Drought

SEQ ID NO: 92662 - protein, 298 aa, Arabidopsis thaliana; identical to SEQ ID NO: 88906
  peptide (1)..(298): Ceres Seq. ID no. 12713681
  misc_feature (40)..(289): Pfam Name: Glutamine cyclotransferase Pfam Description: Glutamine cyclotransferase
  misc_feature (1)..(289): Homolog of NCBI NO: 18416607 NR Description: glutamine cyclotransferase precursor - like protein id: At4g25720.1, supported by cDNA: 114197. [Arabidopsis >gi|25054886|gb|AAN71928.1| putative glutamine cyclotransferase
  misc_feature (1)..(289): Homolog of NCBI NO: 21536884 NR Description: glutamine cyclotransferase precursor-like protein
  misc_feature (1)..(289): Homolog of NCBI NO: 7484984 NR Description: glutaminyl-peptide cyclotransferase homolog - Arabidopsis thaliana >gi|4914464|emb|CAB43703.1| glutamine
  misc_feature (71)..(289): Homolog of NCBI NO: 7484740 NR Description: glutaminyl-peptide cyclotransferase (EC 2.3.2.5) - papaya >gi|3342798|gb|AAC27745.1| glutamine cyclotransferase
  misc_feature (78)..(292): Homolog of NCBI NO: 24413973 NR Description: putative glutaminyl-peptide cyclotransferase
  misc_feature (78)..(289): Homolog of NCBI NO: 16126885 NR Description: glutamine cyclotransferase [Caulobacter
  misc_feature (35)..(289): Homolog of NCBI NO: 31790364 NR Description: putative glutamine cyclotransferase [uncultured
  misc_feature (79)..(289): Homolog of NCBI NO: 21231655 NR Description: glutamine cyclotransferase [Xanthomonas pv. campestris str. ATCC 33913] >gi|21113351|gb|AAM41496.1| cyclotransferase [Xanthomonas campestris pv. campestris str. ATCC
  misc_feature (79)..(289): Homolog of NCBI NO: 22970826 NR Description: hypothetical protein [Chloroflexus aurantiacus]
  misc_feature (78)..(289): Homolog of NCBI NO: 16124007 NR Description: putative exported protein [Yersinia pestis]

SEQ ID NO: 92663 - protein, 284 aa, Arabidopsis thaliana; identical to SEQ ID NO: 88907
  peptide (1)..(284): Ceres Seq. ID no. 12713682
  misc_feature (26)..(275): Pfam Name: Glutamine cyclotransferase Pfam Description: Glutamine cyclotransferase
  misc_feature (1)..(275): Homolog of NCBI NO: 18416607 NR Description: glutamine cyclotransferase precursor - like protein id: At4g25720.1, supported by cDNA: 114197. [Arabidopsis >gi|25054886|gb|AAN71928.1| putative glutamine cyclotransferase
  misc_feature (1)..(275): Homolog of NCBI NO: 21536884 NR Description: glutamine cyclotransferase precursor-like protein
  misc_feature (1)..(275): Homolog of NCBI NO: 7484984 NR Description: glutaminyl-peptide cyclotransferase homolog - Arabidopsis thaliana >gi|4914464|emb|CAB43703.1| glutamine
  misc_feature (57)..(275): Homolog of NCBI NO: 7484740 NR Description: glutaminyl-peptide cyclotransferase (EC 2.3.2.5) - papaya >gi|3342798|gb|AAC27745.1| glutamine cyclotransferase
  misc_feature (64)..(278): Homolog of NCBI NO: 24413973 NR Description: putative glutaminyl-peptide cyclotransferase
  misc_feature (64)..(275): Homolog of NCBI NO: 16126885 NR Description: glutamine cyclotransferase [Caulobacter
  misc_feature (21)..(275): Homolog of NCBI NO: 31790364 NR Description: putative glutamine cyclotransferase [uncultured
  misc_feature (65)..(275): Homolog of NCBI NO: 21231655 NR Description: glutamine cyclotransferase [Xanthomonas pv. campestris str. ATCC 33913] >gi|21113351|gb|AAM41496.1| cyclotransferase [Xanthomonas campestris pv. campestris str. ATCC
  misc_feature (65)..(275): Homolog of NCBI NO: 22970826 NR Description: hypothetical protein [Chloroflexus aurantiacus]
  misc_feature (64)..(275): Homolog of NCBI NO: 16124007 NR Description: putative exported protein [Yersinia pestis]

SEQ ID NO: 92664 - protein, 260 aa, Arabidopsis thaliana; identical to SEQ ID NO: 88908
  peptide (1)..(260): Ceres Seq. ID no. 12713683
  misc_feature (2)..(251): Pfam Name: Glutamine cyclotransferase Pfam Description: Glutamine cyclotransferase
  misc_feature (1)..(251): Homolog of NCBI NO: 18416607 NR Description: glutamine cyclotransferase precursor - like protein id: At4g25720.1, supported by cDNA: 114197. [Arabidopsis >gi|25054886|gb|AAN71928.1| putative glutamine cyclotransferase
  misc_feature (1)..(251): Homolog of NCBI NO: 21536884 NR Description: glutamine cyclotransferase precursor-like protein
  misc_feature (1)..(251): Homolog of NCBI NO: 7484984 NR Description: glutaminyl-peptide cyclotransferase homolog - Arabidopsis thaliana >gi|4914464|emb|CAB43703.1| glutamine
  misc_feature (33)..(251): Homolog of NCBI NO: 7484740 NR Description: glutaminyl-peptide cyclotransferase (EC 2.3.2.5) - papaya >gi|3342798|gb|AAC27745.1| glutamine cyclotransferase
  misc_feature (40)..(254): Homolog of NCBI NO: 24413973 NR Description: putative glutaminyl-peptide cyclotransferase
  misc_feature (40)..(251): Homolog of NCBI NO: 16126885 NR Description: glutamine cyclotransferase [Caulobacter
  misc_feature (1)..(251): Homolog of NCBI NO: 31790364 NR Description: putative glutamine cyclotransferase [uncultured
  misc_feature (41)..(251): Homolog of NCBI NO: 21231655 NR Description: glutamine cyclotransferase [Xanthomonas pv. campestris str. ATCC 33913] >gi|21113351|gb|AAM41496.1| cyclotransferase [Xanthomonas campestris pv. campestris str. ATCC
  misc_feature (41)..(251): Homolog of NCBI NO: 22970826 NR Description: hypothetical protein [Chloroflexus aurantiacus]
  misc_feature (40)..(251): Homolog of NCBI NO: 16124007 NR Description: putative exported protein [Yersinia pestis]

SEQ ID NO: 92665 - DNA, 3153 bp, Arabidopsis thaliana; identical to SEQ ID NO: 88909
  misc_feature (1)..(3153): Ceres Seq. ID no. 12713760
  misc_feature: MA Experiment ID: 20000355 Result: Up-regulated in Transcription
  misc_feature: MA Experiment 20000355 PARAMETER Experiment Name: At_Siliques_Sub_P Parameter: Age (day) Value: 21
  misc_feature: MA Experiment 20000355 PARAMETER Experiment Name: At_Siliques_Sub_P Parameter: Organism Value: A. thaliana
  misc_feature: MA Experiment 20000355 PARAMETER Experiment Name: At_Siliques_Sub_P Parameter: Plant Line Value: WS
  misc_feature: MA Experiment 20000355 PARAMETER Experiment Name: At_Siliques_Sub_P Parameter: Tissue Value: Less Than 5mm Siliques vs. Whole Plant
  misc_feature: MA Experiment ID: 20000440 Result: Up-regulated in Transcription
  misc_feature: MA Experiment 20000440 PARAMETER Experiment Name: At_Closed-Flower__Sub_P Parameter: Tissue Value: Closed Flower vs. Whole Plant

SEQ ID NO: 92666 - protein, 1050 aa, Arabidopsis thaliana; identical to SEQ ID NO: 88910
  peptide (1)..(1050): Ceres Seq. ID no. 12713761
  misc_feature (17)..(201): Homolog of NCBI NO: 34897878 NR Description: Similar to Arabidopsis thaliana DNA chromosome 4,
  misc_feature (470)..(636): Homolog of NCBI NO: 15237873 NR Description: cellulose synthase catalytic subunit -like protein id: At5g16910.1 [Arabidopsis thaliana]
  misc_feature (184)..(640): Homolog of NCBI NO: 28411807 NR Description: cellulose synthase-4 [Oryza sativa (japonica
  misc_feature (707)..(1033): Homolog of NCBI NO: 28411807 NR Description: cellulose synthase-4 [Oryza sativa (japonica
  misc_feature (184)..(640): Homolog of NCBI NO: 30103013 NR Description: putative cellulose synthase catalytic subunit
  misc_feature (707)..(1033): Homolog of NCBI NO: 30103013 NR Description: putative cellulose synthase catalytic subunit
  misc_feature (184)..(640): Homolog of NCBI NO: 9622880 NR Description: cellulose synthase-4 [Zea mays]
  misc_feature (244)..(635): Homolog of NCBI NO: 21954719 NR Description: cellulose synthase catalytic subunit [Mesotaenium
  misc_feature (714)..(1042): Homolog of NCBI NO: 21954719 NR Description: cellulose synthase catalytic subunit [Mesotaenium
  misc_feature (707)..(1033): Homolog of NCBI NO: 9622880 NR Description: cellulose synthase-4 [Zea mays]

SEQ ID NO: 92667 - protein, 984 aa, Arabidopsis thaliana; identical to SEQ ID NO: 88911
  peptide (1)..(984): Ceres Seq. ID no. 12713762
  misc_feature (1)..(135): Homolog of NCBI NO: 34897878 NR Description: Similar to Arabidopsis thaliana DNA chromosome 4,
  misc_feature (404)..(570): Homolog of NCBI NO: 15237873 NR Description: cellulose synthase catalytic subunit -like protein id: At5g16910.1 [Arabidopsis thaliana]
  misc_feature (118)..(574): Homolog of NCBI NO: 28411807 NR Description: cellulose synthase-4 [Oryza sativa (japonica
  misc_feature (641)..(967): Homolog of NCBI NO: 28411807 NR Description: cellulose synthase-4 [Oryza sativa (japonica
  misc_feature (118)..(574): Homolog of NCBI NO: 30103013 NR Description: putative cellulose synthase catalytic subunit
  misc_feature (641)..(967): Homolog of NCBI NO: 30103013 NR Description: putative cellulose synthase catalytic subunit
  misc_feature (118)..(574): Homolog of NCBI NO: 9622880 NR Description: cellulose synthase-4 [Zea mays]
  misc_feature (178)..(569): Homolog of NCBI NO: 21954719 NR Description: cellulose synthase catalytic subunit [Mesotaenium
  misc_feature (648)..(976): Homolog of NCBI NO: 21954719 NR Description: cellulose synthase catalytic subunit [Mesotaenium
  misc_feature (641)..(967): Homolog of NCBI NO: 9622880 NR Description: cellulose synthase-4 [Zea mays]

SEQ ID NO: 92668 - protein, 957 aa, Arabidopsis thaliana; identical to SEQ ID NO: 88912
  peptide (1)..(957): Ceres Seq. ID no. 12713763
  misc_feature (1)..(108): Homolog of NCBI NO: 34897878 NR Description: Similar to Arabidopsis thaliana DNA chromosome 4,
  misc_feature (377)..(543): Homolog of NCBI NO: 15237873 NR Description: cellulose synthase catalytic subunit -like protein id: At5g16910.1 [Arabidopsis thaliana]
  misc_feature (91)..(547): Homolog of NCBI NO: 28411807 NR Description: cellulose synthase-4 [Oryza sativa (japonica
  misc_feature (614)..(940): Homolog of NCBI NO: 28411807 NR Description: cellulose synthase-4 [Oryza sativa (japonica
  misc_feature (91)..(547): Homolog of NCBI NO: 30103013 NR Description: putative cellulose synthase catalytic subunit
  misc_feature (614)..(940): Homolog of NCBI NO: 30103013 NR Description: putative cellulose synthase catalytic subunit
  misc_feature (91)..(547): Homolog of NCBI NO: 9622880 NR Description: cellulose synthase-4 [Zea mays]
  misc_feature (151)..(542): Homolog of NCBI NO: 21954719 NR Description: cellulose synthase catalytic subunit [Mesotaenium
  misc_feature (621)..(949): Homolog of NCBI NO: 21954719 NR Description: cellulose synthase catalytic subunit [Mesotaenium
  misc_feature (614)..(940): Homolog of NCBI NO: 9622880 NR Description: cellulose synthase-4 [Zea mays]

SEQ ID NO: 92669 - DNA, 651 bp, Arabidopsis thaliana; identical to SEQ ID NO: 88913
  misc_feature (1)..(651): Ceres Seq. ID no. 12713807
  misc_feature: MA Experiment ID: 20000314 Result: Down-regulated in Transcription
  misc_feature: MA Experiment 20000314 PARAMETER Experiment Name: At_14day_Shoots-Roots_Sub_P Parameter: Age (day) Value: 14
  misc_feature: MA Experiment 20000314 PARAMETER Experiment Name: At_14day_Shoots-Roots_Sub_P Parameter: Organism Value: A. thaliana
  misc_feature: MA Experiment 20000314 PARAMETER Experiment Name: At_14day_Shoots-Roots_Sub_P Parameter: Plant Line Value: WS
  misc_feature: MA Experiment 20000314 PARAMETER Experiment Name: At_14day_Shoots-Roots_Sub_P Parameter: Tissue Value: Roots vs. Whole Plant
  misc_feature: MA Experiment ID: 20000315 Result: Down-regulated in Transcription
  misc_feature: MA Experiment 20000315 PARAMETER Experiment Name: At_14day_Shoots-Roots_Sub_P Parameter: Age (day) Value: 14
  misc_feature: MA Experiment 20000315 PARAMETER Experiment Name: At_14day_Shoots-Roots_Sub_P Parameter: Organism Value: A. thaliana
  misc_feature: MA Experiment 20000315 PARAMETER Experiment Name: At_14day_Shoots-Roots_Sub_P Parameter: Plant Line Value: WS
  misc_feature: MA Experiment 20000315 PARAMETER Experiment Name: At_14day_Shoots-Roots_Sub_P Parameter: Tissue Value: Shoots vs. Whole Plant
  misc_feature: MA Experiment ID: 20000352 Result: Up-regulated in Transcription
  misc_feature: MA Experiment 20000352 PARAMETER Experiment Name: At_Drought_Sub_P Parameter: Age (day) Value: 7
  misc_feature: MA Experiment 20000352 PARAMETER Experiment Name: At_Drought_Sub_P Parameter: Organism Value: A. thaliana
  misc_feature: MA Experiment 20000352 PARAMETER Experiment Name: At_Drought_Sub_P Parameter: Plant Line Value: WS
  misc_feature: MA Experiment 20000352 PARAMETER Experiment Name: At_Drought_Sub_P Parameter: Timepoint (hr) Value: 6
  misc_feature: MA Experiment 20000352 PARAMETER Experiment Name: At_Drought_Sub_P Parameter: Tissue Value: Whole Plant
  misc_feature: MA Experiment 20000352 PARAMETER Experiment Name: At_Drought_Sub_P Parameter: Treatment Value: Drought vs. No Drought
  misc_feature: MA Experiment ID: 20000355 Result: Down-regulated in Transcription
  misc_feature: MA Experiment 20000355 PARAMETER Experiment Name: At_Siliques_Sub_P Parameter: Age (day) Value: 21
  misc_feature: MA Experiment 20000355 PARAMETER Experiment Name: At_Siliques_Sub_P Parameter: Organism Value: A. thaliana
  misc_feature: MA Experiment 20000355 PARAMETER Experiment Name: At_Siliques_Sub_P Parameter: Plant Line Value: WS
  misc_feature: MA Experiment 20000355 PARAMETER Experiment Name: At_Siliques_Sub_P Parameter: Tissue Value: Less Than 5mm Siliques vs. Whole Plant
  misc_feature: MA Experiment ID: 20000440 Result: Down-regulated in Transcription
  misc_feature: MA Experiment 20000440 PARAMETER Experiment Name: At_Closed-Flower__Sub_P Parameter: Tissue Value: Closed Flower vs. Whole Plant
  misc_feature: MA Experiment ID: 20000634 Result: Up-regulated in Transcription
  misc_feature: MA Experiment 20000634 PARAMETER Experiment Name: At_10percent_PEG_Sub_P Parameter: Age (day) Value: 12
  misc_feature: MA Experiment 20000634 PARAMETER Experiment Name: At_10percent_PEG_Sub_P Parameter: Organism Value: A. thaliana
  misc_feature: MA Experiment 20000634 PARAMETER Experiment Name: At_10percent_PEG_Sub_P Parameter: Plant Line Value: WS
  misc_feature: MA Experiment 20000634 PARAMETER Experiment Name: At_10percent_PEG_Sub_P Parameter: Timepoint (day) Value: 12
  misc_feature: MA Experiment 20000634 PARAMETER Experiment Name: At_10percent_PEG_Sub_P Parameter: Tissue Value: Whole Plant
  misc_feature: MA Experiment 20000634 PARAMETER Experiment Name: At_10percent_PEG_Sub_P Parameter: Treatment Value: 10% PEG vs. No Treatment

SEQ ID NO: 92670 - protein, 216 aa, Arabidopsis thaliana; identical to SEQ ID NO: 24745
  peptide (1)..(216): Ceres Seq. ID no. 12713808
  misc_feature (101)..(184): Pfam Name: Pollen allergen Pfam Description: Pollen allergen
  misc_feature (1)..(216): Homolog of NCBI NO: 15233841 NR Description: putative pollen allergen; protein id: supported by cDNA: gi_14190354, supported by cDNA: gi_15215878
  misc_feature (1)..(216): Homolog of NCBI NO: 15231303 NR Description: putative protein; protein id: At3g45970.1, by cDNA: 27534., supported by cDNA: gi_14190436, supported by
  misc_feature (1)..(216): Homolog of NCBI NO: 21555265 NR Description: Expansin-like 1 precursor (At-EXPL1)
  misc_feature (1)..(216): Homolog of NCBI NO: 20138389 NR Description: Expansin-like 3 precursor (At-EXPL3)
  misc_feature (1)..(216): Homolog of NCBI NO: 30692657 NR Description: expansin protein family (EXPL3) [Arabidopsis >gi|26449323|dbj|BAC41789.1| unknown protein [Arabidopsis
  misc_feature (1)..(215): Homolog of NCBI NO: 33111959 NR Description: expansin-like protein [Quercus robur]
  misc_feature (8)..(215): Homolog of NCBI NO: 21654743 NR Description: expansin-like protein 1 [Oryza sativa]
  misc_feature (8)..(215): Homolog of NCBI NO: 25136297 NR Description: expansin-like protein [Oryza sativa (japonica
  misc_feature (1)..(215): Homolog of NCBI NO: 37536544 NR Description: putative pollen allergen [Oryza sativa (japonica group)] >gi|10140765|gb|AAG13596.1| putative pollen allergen sativa] >gi|31433332|gb|AAP54861.1| putative pollen allergen
  misc_feature (8)..(215): Homolog of NCBI NO: 20502989 NR Description: Putative pollen allergen [Oryza sativa (japonica

SEQ ID NO: 92671 - protein, 149 aa, Arabidopsis thaliana; identical to SEQ ID NO: 24746
  peptide (1)..(149): Ceres Seq. ID no. 12713809
  misc_feature (34)..(117): Pfam Name: Pollen allergen Pfam Description: Pollen allergen
  misc_feature (1)..(149): Homolog of NCBI NO: 15233841 NR Description: putative pollen allergen; protein id: supported by cDNA: gi_14190354, supported by cDNA: gi_15215878
  misc_feature (1)..(149): Homolog of NCBI NO: 15231303 NR Description: putative protein; protein id: At3g45970.1, by cDNA: 27534., supported by cDNA: gi_14190436, supported by
  misc_feature (1)..(149): Homolog of NCBI NO: 21555265 NR Description: Expansin-like 1 precursor (At-EXPL1)
  misc_feature (1)..(149): Homolog of NCBI NO: 20138389 NR Description: Expansin-like 3 precursor (At-EXPL3)
  misc_feature (1)..(149): Homolog of NCBI NO: 30692657 NR Description: expansin protein family (EXPL3) [Arabidopsis >gi|26449323|dbj|BAC41789.1| unknown protein [Arabidopsis
  misc_feature (1)..(148): Homolog of NCBI NO: 33111959 NR Description: expansin-like protein [Quercus robur]
  misc_feature (1)..(148): Homolog of NCBI NO: 21654743 NR Description: expansin-like protein 1 [Oryza sativa]
  misc_feature (1)..(148): Homolog of NCBI NO: 25136297 NR Description: expansin-like protein [Oryza sativa (japonica
  misc_feature (1)..(148): Homolog of NCBI NO: 37536544 NR Description: putative pollen allergen [Oryza sativa (japonica group)] >gi|10140765|gb|AAG13596.1| putative pollen allergen sativa] >gi|31433332|gb|AAP54861.1| putative pollen allergen
  misc_feature (1)..(148): Homolog of NCBI NO: 20502989 NR Description: Putative pollen allergen [Oryza sativa (japonica

SEQ ID NO: 92672 - protein, 116 aa, Arabidopsis thaliana; identical to SEQ ID NO: 88916
  peptide (1)..(116): Ceres Seq. ID no. 12713810
  misc_feature (1)..(84): Pfam Name: Pollen allergen Pfam Description: Pollen allergen
  misc_feature (1)..(116): Homolog of NCBI NO: 15233841 NR Description: putative pollen allergen; protein id: supported by cDNA: gi_14190354, supported by cDNA: gi_15215878
  misc_feature (1)..(116): Homolog of NCBI NO: 15231303 NR Description: putative protein; protein id: At3g45970.1, by cDNA: 27534., supported by cDNA: gi_14190436, supported by
  misc_feature (1)..(116): Homolog of NCBI NO: 21555265 NR Description: Expansin-like 1 precursor (At-EXPL1)
  misc_feature (1)..(116): Homolog of NCBI NO: 20138389 NR Description: Expansin-like 3 precursor (At-EXPL3)
  misc_feature (1)..(116): Homolog of NCBI NO: 30692657 NR Description: expansin protein family (EXPL3) [Arabidopsis >gi|26449323|dbj|BAC41789.1| unknown protein [Arabidopsis
  misc_feature (1)..(115): Homolog of NCBI NO: 33111959 NR Description: expansin-like protein [Quercus robur]
  misc_feature (1)..(115): Homolog of NCBI NO: 21654743 NR Description: expansin-like protein 1 [Oryza sativa]
  misc_feature (1)..(115): Homolog of NCBI NO: 25136297 NR Description: expansin-like protein [Oryza sativa (japonica
  misc_feature (1)..(115): Homolog of NCBI NO: 37536544 NR Description: putative pollen allergen [Oryza sativa (japonica group)] >gi|10140765|gb|AAG13596.1| putative pollen allergen sativa] >gi|31433332|gb|AAP54861.1| putative pollen allergen
  misc_feature (1)..(115): Homolog of NCBI NO: 20502989 NR Description: Putative pollen allergen [Oryza sativa (japonica

SEQ ID NO: 92673 - DNA, 2814 bp, Arabidopsis thaliana; identical to SEQ ID NO: 88917
  misc_feature (1)..(2814): Ceres Seq. ID no. 12713826
  misc_feature: MA Experiment ID: 20000179 Result: Down-regulated in Transcription
  misc_feature: MA Experiment 20000179 PARAMETER Experiment Name: At_Germinating_Seeds_P Parameter: Age (hr) Value: 6 vs. 0
  misc_feature: MA Experiment 20000179 PARAMETER Experiment Name: At_Germinating_Seeds_P Parameter: Tissue Value: Germinating Seeds
  misc_feature: MA Experiment ID: 20000180 Result: Down-regulated in Transcription
  misc_feature: MA Experiment 20000180 PARAMETER Experiment Name: At_Germinating_Seeds_P Parameter: Age (hr) Value: 24 vs. 0
  misc_feature: MA Experiment 20000180 PARAMETER Experiment Name: At_Germinating_Seeds_P Parameter: Tissue Value: Germinating Seeds

SEQ ID NO: 92674 - protein, 937 aa, Arabidopsis thaliana; identical to SEQ ID NO: 88918
  peptide (1)..(937): Ceres Seq. ID no. 12713827
  misc_feature (690)..(765): Pfam Name: Galactose binding lectin domain Pfam Description: Galactose binding lectin domain
  misc_feature (1)..(770): Homolog of NCBI NO: 25326168 NR Description: probable beta-galactosidase [imported] -
  misc_feature (1)..(770): Homolog of NCBI NO: 30679742 NR Description: glycosyl hydrolase family 35 (beta-galactosidase)
  misc_feature (1)..(765): Homolog of NCBI NO: 18418558 NR Description: glycosyl hydrolase family 35 protein id: At4g35010.1 [Arabidopsis thaliana]
  misc_feature (123)..(765): Homolog of NCBI NO: 7484826 NR Description: beta-galactosidase homolog M4E13.70 - Arabidopsis
  misc_feature (1)..(89): Homolog of NCBI NO: 7484826 NR Description: beta-galactosidase homolog M4E13.70 - Arabidopsis
  misc_feature (1)..(654): Homolog of NCBI NO: 10862896 NR Description: putative beta-galactosidase [Nicotiana tabacum]
  misc_feature (1)..(764): Homolog of NCBI NO: 30699255 NR Description: glycosyl hydrolase family 35 (beta-galactosidase)
  misc_feature (1)..(750): Homolog of NCBI NO: 26451843 NR Description: unknown protein [Arabidopsis thaliana]
  misc_feature (1)..(603): Homolog of NCBI NO: 15081596 NR Description: putative beta-galactosidase BG1 [Vitis vinifera]
  misc_feature (558)..(764): Homolog of NCBI NO: 15081596 NR Description: putative beta-galactosidase BG1 [Vitis vinifera]

SEQ ID NO: 92675 - protein, 833 aa, Arabidopsis thaliana; identical to SEQ ID NO: 88919
  peptide (1)..(833): Ceres Seq. ID no. 12713828
  misc_feature (586)..(661): Pfam Name: Galactose binding lectin domain Pfam Description: Galactose binding lectin domain
  misc_feature (1)..(666): Homolog of NCBI NO: 25326168 NR Description: probable beta-galactosidase [imported] -
  misc_feature (1)..(666): Homolog of NCBI NO: 30679742 NR Description: glycosyl hydrolase family 35 (beta-galactosidase)
  misc_feature (1)..(661): Homolog of NCBI NO: 18418558 NR Description: glycosyl hydrolase family 35 protein id: At4g35010.1 [Arabidopsis thaliana]
  misc_feature (19)..(661): Homolog of NCBI NO: 7484826 NR Description: beta-galactosidase homolog M4E13.70 - Arabidopsis
  misc_feature (1)..(550): Homolog of NCBI NO: 10862896 NR Description: putative beta-galactosidase [Nicotiana tabacum]
  misc_feature (1)..(660): Homolog of NCBI NO: 30699255 NR Description: glycosyl hydrolase family 35 (beta-galactosidase)
  misc_feature (1)..(646): Homolog of NCBI NO: 26451843 NR Description: unknown protein [Arabidopsis thaliana]
  misc_feature (1)..(499): Homolog of NCBI NO: 15081596 NR Description: putative beta-galactosidase BG1 [Vitis vinifera]
  misc_feature (454)..(660): Homolog of NCBI NO: 15081596 NR Description: putative beta-galactosidase BG1 [Vitis vinifera]
  misc_feature (1)..(496): Homolog of NCBI NO: 7939621 NR Description: beta-galactosidase [Lycopersicon esculentum]

SEQ ID NO: 92676 - protein, 832 aa, Arabidopsis thaliana; identical to SEQ ID NO: 88920
  peptide (1)..(832): Ceres Seq. ID no. 12713829
  misc_feature (585)..(660): Pfam Name: Galactose binding lectin domain Pfam Description: Galactose binding lectin domain
  misc_feature (1)..(665): Homolog of NCBI NO: 25326168 NR Description: probable beta-galactosidase [imported] -
  misc_feature (1)..(665): Homolog of NCBI NO: 30679742 NR Description: glycosyl hydrolase family 35 (beta-galactosidase)
  misc_feature (1)..(660): Homolog of NCBI NO: 18418558 NR Description: glycosyl hydrolase family 35 protein id: At4g35010.1 [Arabidopsis thaliana]
  misc_feature (18)..(660): Homolog of NCBI NO: 7484826 NR Description: beta-galactosidase homolog M4E13.70 - Arabidopsis
  misc_feature (1)..(549): Homolog of NCBI NO: 10862896 NR Description: putative beta-galactosidase [Nicotiana tabacum]
  misc_feature (1)..(659): Homolog of NCBI NO: 30699255 NR Description: glycosyl hydrolase family 35 (beta-galactosidase)
  misc_feature (1)..(645): Homolog of NCBI NO: 26451843 NR Description: unknown protein [Arabidopsis thaliana]
  misc_feature (1)..(498): Homolog of NCBI NO: 15081596 NR Description: putative beta-galactosidase BG1 [Vitis vinifera]
  misc_feature (453)..(659): Homolog of NCBI NO: 15081596 NR Description: putative beta-galactosidase BG1 [Vitis vinifera]
  misc_feature (1)..(495): Homolog of NCBI NO: 7939621 NR Description: beta-galactosidase [Lycopersicon esculentum]

SEQ ID NO: 92677 - DNA, 3813 bp, Arabidopsis thaliana; identical to SEQ ID NO: 88921
  misc_feature (1)..(3813): Ceres Seq. ID no. 12713844
  misc_feature: MA Experiment ID: 20000173 Result: Down-regulated in Transcription
  misc_feature: MA Experiment 20000173 PARAMETER Experiment Name: At_42deg_Heat_P Parameter: Age (day) Value: 14
  misc_feature: MA Experiment 20000173 PARAMETER Experiment Name: At_42deg_Heat_P Parameter: Organism Value: A. thaliana
  misc_feature: MA Experiment 20000173 PARAMETER Experiment Name: At_42deg_Heat_P Parameter: Plant Line Value: WS
  misc_feature: MA Experiment 20000173 PARAMETER Experiment Name: At_42deg_Heat_P Parameter: Temperature (deg C) Value: 42 vs. 22
  misc_feature: MA Experiment 20000173 PARAMETER Experiment Name: At_42deg_Heat_P Parameter: Timepoint (hr) Value: 6
  misc_feature: MA Experiment 20000173 PARAMETER Experiment Name: At_42deg_Heat_P Parameter: Tissue Value: Aerial
  misc_feature: MA Experiment ID: 20000496 Result: Up-regulated in Transcription
  misc_feature: MA Experiment 20000496 PARAMETER Experiment Name: At_Guard_Cells_P Parameter: Harvest Date Value: 7/19/2002
  misc_feature: MA Experiment 20000496 PARAMETER Experiment Name: At_Guard_Cells_P Parameter: Organism Value: Canola
  misc_feature: MA Experiment 20000496 PARAMETER Experiment Name: At_Guard_Cells_P Parameter: Tissue Value: Guard Cells vs. Leaves

SEQ ID NO: 92678 - protein, 1270 aa, Arabidopsis thaliana; identical to SEQ ID NO: 88922
  peptide (1)..(1270): Ceres Seq. ID no. 12713845
  misc_feature (546)..(1255): Homolog of NCBI NO: 21306600 NR Description: Hypothetical protein [Oryza sativa (japonica
  misc_feature (3)..(129): Homolog of NCBI NO: 21306600 NR Description: Hypothetical protein [Oryza sativa (japonica
  misc_feature (417)..(497): Homolog of NCBI NO: 21306600 NR Description: Hypothetical protein [Oryza sativa (japonica
  misc_feature (168)..(449): Homolog of NCBI NO: 37531198 NR Description: hypothetical protein [Oryza sativa (japonica group)] >gi|20177643|gb|AAM14698.1| Hypothetical protein [Oryza
  misc_feature (3)..(129): Homolog of NCBI NO: 37531198 NR Description: hypothetical protein [Oryza sativa (japonica group)] >gi|20177643|gb|AAM14698.1| Hypothetical protein [Oryza

SEQ ID NO: 92679 - protein, 1233 aa, Arabidopsis thaliana; identical to SEQ ID NO: 88923
  peptide (1)..(1233): Ceres Seq. ID no. 12713846
  misc_feature (509)..(1218): Homolog of NCBI NO: 21306600 NR Description: Hypothetical protein [Oryza sativa (japonica
  misc_feature (1)..(92): Homolog of NCBI NO: 21306600 NR Description: Hypothetical protein [Oryza sativa (japonica
  misc_feature (380)..(460): Homolog of NCBI NO: 21306600 NR Description: Hypothetical protein [Oryza sativa (japonica
  misc_feature (131)..(412): Homolog of NCBI NO: 37531198 NR Description: hypothetical protein [Oryza sativa (japonica group)] >gi|20177643|gb|AAM14698.1| Hypothetical protein [Oryza
  misc_feature (1)..(92): Homolog of NCBI NO: 37531198 NR Description: hypothetical protein [Oryza sativa (japonica group)] >gi|20177643|gb|AAM14698.1| Hypothetical protein [Oryza

SEQ ID NO: 92680 - protein, 1221 aa, Arabidopsis thaliana; identical to SEQ ID NO: 88924
  peptide (1)..(1221): Ceres Seq. ID no. 12713847
  misc_feature (497)..(1206): Homolog of NCBI NO: 21306600 NR Description: Hypothetical protein [Oryza sativa (japonica
  misc_feature (1)..(80): Homolog of NCBI NO: 21306600 NR Description: Hypothetical protein [Oryza sativa (japonica
  misc_feature (368)..(448): Homolog of NCBI NO: 21306600 NR Description: Hypothetical protein [Oryza sativa (japonica
  misc_feature (119)..(400): Homolog of NCBI NO: 37531198 NR Description: hypothetical protein [Oryza sativa (japonica group)] >gi|20177643|gb|AAM14698.1| Hypothetical protein [Oryza
  misc_feature (1)..(80): Homolog of NCBI NO: 37531198 NR Description: hypothetical protein [Oryza sativa (japonica group)] >gi|20177643|gb|AAM14698.1| Hypothetical protein [Oryza

SEQ ID NO: 92681 - DNA, 930 bp, Arabidopsis thaliana; identical to SEQ ID NO: 88925
  misc_feature (1)..(930): Ceres Seq. ID no. 12713863
  misc_feature: MA Experiment ID: 20000315 Result: Down-regulated in Transcription
  misc_feature: MA Experiment 20000315 PARAMETER Experiment Name: At_14day_Shoots-Roots_Sub_P Parameter: Age (day) Value: 14
  misc_feature: MA Experiment 20000315 PARAMETER Experiment Name: At_14day_Shoots-Roots_Sub_P Parameter: Organism Value: A. thaliana
  misc_feature: MA Experiment 20000315 PARAMETER Experiment Name: At_14day_Shoots-Roots_Sub_P Parameter: Plant Line Value: WS
  misc_feature: MA Experiment 20000315 PARAMETER Experiment Name: At_14day_Shoots-Roots_Sub_P Parameter: Tissue Value: Shoots vs. Whole Plant

SEQ ID NO: 92682 - protein, 309 aa, Arabidopsis thaliana; identical to SEQ ID NO: 88926
  peptide (1)..(309): Ceres Seq. ID no. 12713864
  misc_feature (10)..(182): Pfam Name: Ubiquitin fusion degradation protein UFD1 Pfam Description: Ubiquitin fusion degradation protein UFD1
  misc_feature (1)..(309): Homolog of NCBI NO: 18420341 NR Description: putative ubiquitin-dependent proteolytic protein; id: At4g38930.1, supported by cDNA: gi_16930496 [Arabidopsis >gi|16930497|gb|AAL31934.1|AF419602_1 AT4g38930/F19H22_30
  misc_feature (1)..(309): Homolog of NCBI NO: 7488221 NR Description: probable ubiquitin-dependent proteolytic protein -
  misc_feature (1)..(309): Homolog of NCBI NO: 18399646 NR Description: putative ubiquitin fusion-degradation protein;
  misc_feature (1)..(309): Homolog of NCBI NO: 21592947 NR Description: putative ubiquitin fusion-degradation protein
  misc_feature (2)..(309): Homolog of NCBI NO: 25347017 NR Description: probable ubiquitin fusion-degradation protein
  misc_feature (1)..(308): Homolog of NCBI NO: 38345534 NR Description: OSJNBa0020J04.9 [Oryza sativa (japonica
  misc_feature (32)..(309): Homolog of NCBI NO: 7488408 NR Description: probable ubiquitin fusion-degradation protein
  misc_feature (38)..(309): Homolog of NCBI NO: 30684115 NR Description: ubiquitin fusion degradation (UFD) protein,
  misc_feature (13)..(232): Homolog of NCBI NO: 16758158 NR Description: ubiquitin fusion degradation 1-like [Rattus
  misc_feature (13)..(232): Homolog of NCBI NO: 20891983 NR Description: ubiquitin fusion degradation 1 like [Mus >gi|13879310|gb|AAH06630.1| Unknown (protein for MGC:11477) [Mus

SEQ ID NO: 92683 - protein, 272 aa, Arabidopsis thaliana; identical to SEQ ID NO: 88927
  peptide (1)..(272): Ceres Seq. ID no. 12713865
  misc_feature (1)..(145): Pfam Name: Ubiquitin fusion degradation protein UFD1 Pfam Description: Ubiquitin fusion degradation protein UFD1
  misc_feature (1)..(272): Homolog of NCBI NO: 18420341 NR Description: putative ubiquitin-dependent proteolytic protein; id: At4g38930.1, supported by cDNA: gi_16930496 [Arabidopsis >gi|16930497|gb|AAL31934.1|AF419602_1 AT4g38930/F19H22_30
  misc_feature (1)..(272): Homolog of NCBI NO: 7488221 NR Description: probable ubiquitin-dependent proteolytic protein -
  misc_feature (1)..(272): Homolog of NCBI NO: 18399646 NR Description: putative ubiquitin fusion-degradation protein;
  misc_feature (1)..(272): Homolog of NCBI NO: 21592947 NR Description: putative ubiquitin fusion-degradation protein
  misc_feature (1)..(272): Homolog of NCBI NO: 25347017 NR Description: probable ubiquitin fusion-degradation protein
  misc_feature (1)..(271): Homolog of NCBI NO: 38345534 NR Description: OSJNBa0020J04.9 [Oryza sativa (japonica
  misc_feature (1)..(272): Homolog of NCBI NO: 7488408 NR Description: probable ubiquitin fusion-degradation protein
  misc_feature (1)..(272): Homolog of NCBI NO: 30684115 NR Description: ubiquitin fusion degradation (UFD) protein,
  misc_feature (1)..(195): Homolog of NCBI NO: 16758158 NR Description: ubiquitin fusion degradation 1-like [Rattus
  misc_feature (1)..(195): Homolog of NCBI NO: 20891983 NR Description: ubiquitin fusion degradation 1 like [Mus >gi|13879310|gb|AAH06630.1| Unknown (protein for MGC:11477) [Mus

SEQ ID NO: 92684 - protein, 255 aa, Arabidopsis thaliana; identical to SEQ ID NO: 88928
  peptide (1)..(255): Ceres Seq. ID no. 12713866
  misc_feature (1)..(128): Pfam Name: Ubiquitin fusion degradation protein UFD1 Pfam Description: Ubiquitin fusion degradation protein UFD1
  misc_feature (1)..(255): Homolog of NCBI NO: 18420341 NR Description: putative ubiquitin-dependent proteolytic protein; id: At4g38930.1, supported by cDNA: gi_16930496 [Arabidopsis >gi|16930497|gb|AAL31934.1|AF419602_1 AT4g38930/F19H22_30
  misc_feature (1)..(255): Homolog of NCBI NO: 7488221 NR Description: probable ubiquitin-dependent proteolytic protein -
  misc_feature (1)..(255): Homolog of NCBI NO: 18399646 NR Description: putative ubiquitin fusion-degradation protein;
  misc_feature (1)..(255): Homolog of NCBI NO: 21592947 NR Description: putative ubiquitin fusion-degradation protein
  misc_feature (1)..(255): Homolog of NCBI NO: 25347017 NR Description: probable ubiquitin fusion-degradation protein
  misc_feature (1)..(254): Homolog of NCBI NO: 38345534 NR Description: OSJNBa0020J04.9 [Oryza sativa (japonica
  misc_feature (1)..(255): Homolog of NCBI NO: 7488408 NR Description: probable ubiquitin fusion-degradation protein
  misc_feature (1)..(255): Homolog of NCBI NO: 30684115 NR Description: ubiquitin fusion degradation (UFD) protein,
  misc_feature (1)..(178): Homolog of NCBI NO: 16758158 NR Description: ubiquitin fusion degradation 1-like [Rattus
  misc_feature (1)..(178): Homolog of NCBI NO: 20891983 NR Description: ubiquitin fusion degradation 1 like [Mus >gi|13879310|gb|AAH06630.1| Unknown (protein for MGC:11477) [Mus

SEQ ID NO: 92685 - DNA, 2328 bp, Arabidopsis thaliana; identical to SEQ ID NO: 88929
  misc_feature (1)..(2328): Ceres Seq. ID no. 12713915
  misc_feature: MA Experiment ID: 20000314 Result: Up-regulated in Transcription
  misc_feature: MA Experiment 20000314 PARAMETER Experiment Name: At_14day_Shoots-Roots_Sub_P Parameter: Age (day) Value: 14
  misc_feature: MA Experiment 20000314 PARAMETER Experiment Name: At_14day_Shoots-Roots_Sub_P Parameter: Organism Value: A. thaliana
  misc_feature: MA Experiment 20000314 PARAMETER Experiment Name: At_14day_Shoots-Roots_Sub_P Parameter: Plant Line Value: WS
  misc_feature: MA Experiment 20000314 PARAMETER Experiment Name: At_14day_Shoots-Roots_Sub_P Parameter: Tissue Value: Roots vs. Whole Plant
  misc_feature: MA Experiment ID: 20000315 Result: Down-regulated in Transcription
  misc_feature: MA Experiment 20000315 PARAMETER Experiment Name: At_14day_Shoots-Roots_Sub_P Parameter: Age (day) Value: 14
  misc_feature: MA Experiment 20000315 PARAMETER Experiment Name: At_14day_Shoots-Roots_Sub_P Parameter: Organism Value: A. thaliana
  misc_feature: MA Experiment 20000315 PARAMETER Experiment Name: At_14day_Shoots-Roots_Sub_P Parameter: Plant Line Value: WS
  misc_feature: MA Experiment 20000315 PARAMETER Experiment Name: At_14day_Shoots-Roots_Sub_P Parameter: Tissue Value: Shoots vs. Whole Plant
  misc_feature: MA Experiment ID: 20000328 Result: Down-regulated in Transcription
  misc_feature: MA Experiment 20000328 PARAMETER Experiment Name: At_42deg_Heat_Sub_P Parameter: Age (day) Value: 14
  misc_feature: MA Experiment 20000328 PARAMETER Experiment Name: At_42deg_Heat_Sub_P Parameter: Organism Value: A. thaliana
  misc_feature: MA Experiment 20000328 PARAMETER Experiment Name: At_42deg_Heat_Sub_P Parameter: Plant Line Value: WS
  misc_feature: MA Experiment 20000328 PARAMETER Experiment Name: At_42deg_Heat_Sub_P Parameter: Temperature (deg C) Value: 42 vs. 22
  misc_feature: MA Experiment 20000328 PARAMETER Experiment Name: At_42deg_Heat_Sub_P Parameter: Timepoint (hr) Value: 6
  misc_feature: MA Experiment 20000328 PARAMETER Experiment Name: At_42deg_Heat_Sub_P Parameter: Tissue Value: Aerial
  misc_feature: MA Experiment ID: 20000347 Result: Up-regulated in Transcription
  misc_feature: MA Experiment 20000347 PARAMETER Experiment Name: At_2mM_SA_Sub_P Parameter: Age (day) Value: 14
  misc_feature: MA Experiment 20000347 PARAMETER Experiment Name: At_2mM_SA_Sub_P Parameter: Organism Value: A. thaliana
  misc_feature: MA Experiment 20000347 PARAMETER Experiment Name: At_2mM_SA_Sub_P Parameter: Plant Line Value: WS
  misc_feature: MA Experiment 20000347 PARAMETER Experiment Name: At_2mM_SA_Sub_P Parameter: Timepoint (hr) Value: 6
  misc_feature: MA Experiment 20000347 PARAMETER Experiment Name: At_2mM_SA_Sub_P Parameter: Tissue Value: Aerial
  misc_feature: MA Experiment 20000347 PARAMETER Experiment Name: At_2mM_SA_Sub_P Parameter: Treatment Value: 2mM SA vs. No Treatment
  misc_feature: MA Experiment ID: 20000355 Result: Down-regulated in Transcription
  misc_feature: MA Experiment 20000355 PARAMETER Experiment Name: At_Siliques_Sub_P Parameter: Age (day) Value: 21
  misc_feature: MA Experiment 20000355 PARAMETER Experiment Name: At_Siliques_Sub_P Parameter: Organism Value: A. thaliana
  misc_feature: MA Experiment 20000355 PARAMETER Experiment Name: At_Siliques_Sub_P Parameter: Plant Line Value: WS
  misc_feature: MA Experiment 20000355 PARAMETER Experiment Name: At_Siliques_Sub_P Parameter: Tissue Value: Less Than 5mm Siliques vs. Whole Plant
  misc_feature: MA Experiment ID: 20000440 Result: Down-regulated in Transcription
  misc_feature: MA Experiment 20000440 PARAMETER Experiment Name: At_Closed-Flower__Sub_P Parameter: Tissue Value: Closed Flower vs. Whole Plant

SEQ ID NO: 92686 - protein, 775 aa, Arabidopsis thaliana; identical to SEQ ID NO: 88930
  peptide (1)..(775): Ceres Seq. ID no. 12713916
  misc_feature (93)..(775): Homolog of NCBI NO: 15235005 NR Description: leucine-rich repeat transmembrane protein kinase, protein id: At4g39270.1, supported by cDNA: gi_20466769
  misc_feature (93)..(775): Homolog of NCBI NO: 20466770 NR Description: receptor protein kinase-like protein [Arabidopsis
  misc_feature (1)..(342): Homolog of NCBI NO: 15235005 NR Description: leucine-rich repeat transmembrane protein kinase, protein id: At4g39270.1, supported by cDNA: gi_20466769
  misc_feature (1)..(342): Homolog of NCBI NO: 20466770 NR Description: receptor protein kinase-like protein [Arabidopsis
  misc_feature (94)..(771): Homolog of NCBI NO: 15226721 NR Description: leucine-rich repeat transmembrane protein kinase, protein id: At2g16250.1 [Arabidopsis thaliana]
  misc_feature (4)..(775): Homolog of NCBI NO: 34394416 NR Description: putative Systemin receptor SR160 precursor [Oryza
  misc_feature (125)..(721): Homolog of NCBI NO: 34915200 NR Description: putative receptor-like protein kinase [Oryza
  misc_feature (17)..(330): Homolog of NCBI NO: 34393421 NR Description: putative OsLRK1(receptor-type protein kinase)
  misc_feature (400)..(695): Homolog of NCBI NO: 34393421 NR Description: putative OsLRK1(receptor-type protein kinase)
  misc_feature (9)..(333): Homolog of NCBI NO: 15229189 NR Description: leucine-rich repeat transmembrane protein kinase, protein id: At3g49670.1 [Arabidopsis thaliana]

SEQ ID NO: 92687 - protein, 542 aa, Arabidopsis thaliana; identical to SEQ ID NO: 88931
  peptide (1)..(542): Ceres Seq. ID no. 12713917
  misc_feature (1)..(542): Homolog of NCBI NO: 15235005 NR Description: leucine-rich repeat transmembrane protein kinase, protein id: At4g39270.1, supported by cDNA: gi_20466769
  misc_feature (1)..(542): Homolog of NCBI NO: 20466770 NR Description: receptor protein kinase-like protein [Arabidopsis
  misc_feature (1)..(109): Homolog of NCBI NO: 15235005 NR Description: leucine-rich repeat transmembrane protein kinase, protein id: At4g39270.1, supported by cDNA: gi_20466769
  misc_feature (1)..(109): Homolog of NCBI NO: 20466770 NR Description: receptor protein kinase-like protein [Arabidopsis
  misc_feature (1)..(538): Homolog of NCBI NO: 15226721 NR Description: leucine-rich repeat transmembrane protein kinase, protein id: At2g16250.1 [Arabidopsis thaliana]
  misc_feature (1)..(542): Homolog of NCBI NO: 34394416 NR Description: putative Systemin receptor SR160 precursor [Oryza
  misc_feature (1)..(488): Homolog of NCBI NO: 34915200 NR Description: putative receptor-like protein kinase [Oryza
  misc_feature (1)..(97): Homolog of NCBI NO: 34393421 NR Description: putative OsLRK1(receptor-type protein kinase)
  misc_feature (167)..(462): Homolog of NCBI NO: 34393421 NR Description: putative OsLRK1(receptor-type protein kinase)
  misc_feature (1)..(100): Homolog of NCBI NO: 15229189 NR Description: leucine-rich repeat transmembrane protein kinase, protein id: At3g49670.1 [Arabidopsis thaliana]

SEQ ID NO: 92688 - protein, 466 aa, Arabidopsis thaliana; identical to SEQ ID NO: 88932
  peptide (1)..(466): Ceres Seq. ID no. 12713918
  misc_feature (1)..(466): Homolog of NCBI NO: 15235005 NR Description: leucine-rich repeat transmembrane protein kinase, protein id: At4g39270.1, supported by cDNA: gi_20466769
  misc_feature (1)..(466): Homolog of NCBI NO: 20466770 NR Description: receptor protein kinase-like protein [Arabidopsis
  misc_feature (1)..(33): Homolog of NCBI NO: 15235005 NR Description: leucine-rich repeat transmembrane protein kinase, protein id: At4g39270.1, supported by cDNA: gi_20466769
  misc_feature (1)..(33): Homolog of NCBI NO: 20466770 NR Description: receptor protein kinase-like protein [Arabidopsis
  misc_feature (1)..(462): Homolog of NCBI NO: 15226721 NR Description: leucine-rich repeat transmembrane protein kinase, protein id: At2g16250.1 [Arabidopsis thaliana]
  misc_feature (1)..(466): Homolog of NCBI NO: 34394416 NR Description: putative Systemin receptor SR160 precursor [Oryza
  misc_feature (1)..(412): Homolog of NCBI NO: 34915200 NR Description: putative receptor-like protein kinase [Oryza
  misc_feature (1)..(21): Homolog of NCBI NO: 34393421 NR Description: putative OsLRK1(receptor-type protein kinase)
  misc_feature (91)..(386): Homolog of NCBI NO: 34393421 NR Description: putative OsLRK1(receptor-type protein kinase)
  misc_feature (1)..(24): Homolog of NCBI NO: 15229189 NR Description: leucine-rich repeat transmembrane protein kinase, protein id: At3g49670.1 [Arabidopsis thaliana]

SEQ ID NO: 92689 - DNA, 1724 bp, Arabidopsis thaliana; identical to SEQ ID NO: 88933
  misc_feature (1)..(1724): Ceres Seq. ID no. 12713945
  misc_feature: MA Experiment ID: 108461 Result: Up-regulated in Transcription
  misc_feature: MA Experiment 108461 PARAMETER Experiment Name: At_Germinating_Seeds_cDNA_P Parameter: Age (day) Value: 1 vs. 0
  misc_feature: MA Experiment 108461 PARAMETER Experiment Name: At_Germinating_Seeds_cDNA_P Parameter: Tissue Value: Germinating Seeds
  misc_feature: MA Experiment ID: 108462 Result: Up-regulated in Transcription
  misc_feature: MA Experiment 108462 PARAMETER Experiment Name: At_Germinating_Seeds_cDNA_P Parameter: Age (day) Value: 2 vs. 0
  misc_feature: MA Experiment 108462 PARAMETER Experiment Name: At_Germinating_Seeds_cDNA_P Parameter: Tissue Value: Germinating Seeds
  misc_feature: MA Experiment ID: 108463 Result: Up-regulated in Transcription
  misc_feature: MA Experiment 108463 PARAMETER Experiment Name: At_Germinating_Seeds_cDNA_P Parameter: Age (day) Value: 3 vs. 0
  misc_feature: MA Experiment 108463 PARAMETER Experiment Name: At_Germinating_Seeds_cDNA_P Parameter: Tissue Value: Germinating Seeds
  misc_feature: MA Experiment ID: 108464 Result: Up-regulated in Transcription
  misc_feature: MA Experiment 108464 PARAMETER Experiment Name: At_Germinating_Seeds_cDNA_P Parameter: Age (day) Value: 4 vs. 0
  misc_feature: MA Experiment 108464 PARAMETER Experiment Name: At_Germinating_Seeds_cDNA_P Parameter: Tissue Value: Germinating Seeds
  misc_feature: MA Experiment ID: 108474 Result: Down-regulated in Transcription
  misc_feature: MA Experiment 108474 PARAMETER Experiment Name: At_Drought_Flowers_cDNA_P Parameter: Timepoint (hr) Value: null
  misc_feature: MA Experiment 108474 PARAMETER Experiment Name: At_Drought_Flowers_cDNA_P Parameter: Treatment Value: Drought vs. No Drought
  misc_feature: MA Experiment ID: 108501 Result: Up-regulated in Transcription
  misc_feature: MA Experiment 108501 PARAMETER Experiment Name: At_ap2_floral_buds_cDNA_P Parameter: Plant Line Value: ap2 (Ler.)
  misc_feature: MA Experiment 108501 PARAMETER Experiment Name: At_ap2_floral_buds_cDNA_P Parameter: Tissue Value: Closed Flower
  misc_feature: MA Experiment ID: 108595 Result: Up-regulated in Transcription
  misc_feature: MA Experiment 108595 PARAMETER Experiment Name: At_Ler-pi_Ovule_cDNA_P Parameter: Plant Line Value: null
  misc_feature: MA Experiment ID: 20000184 Result: Down-regulated in Transcription
  misc_feature: MA Experiment 20000184 PARAMETER Experiment Name: At_Shoots__P Parameter: Age (day) Value: 7
  misc_feature: MA Experiment 20000184 PARAMETER Experiment Name: At_Shoots__P Parameter: Tissue Value: Shoots vs. Whole Plant
  misc_feature: MA Experiment ID: 20000234 Result: Up-regulated in Transcription
  misc_feature: MA Experiment 20000234 PARAMETER Experiment Name: At_Siliques_P Parameter: Age (day) Value: 21
  misc_feature: MA Experiment 20000234 PARAMETER Experiment Name: At_Siliques_P Parameter: Organism Value: A. thaliana
  misc_feature: MA Experiment 20000234 PARAMETER Experiment Name: At_Siliques_P Parameter: Plant Line Value: WS
  misc_feature: MA Experiment 20000234 PARAMETER Experiment Name: At_Siliques_P Parameter: Tissue Value: Less Than 5mm Siliques vs. Whole Plant
  misc_feature: MA Experiment ID: 20000264 Result: Up-regulated in Transcription
  misc_feature: MA Experiment 20000264 PARAMETER Experiment Name: At_Open_Flower_P Parameter: Age (day) Value: 21
  misc_feature: MA Experiment 20000264 PARAMETER Experiment Name: At_Open_Flower_P Parameter: Plant Line Value: WS
  misc_feature: MA Experiment 20000264 PARAMETER Experiment Name: At_Open_Flower_P Parameter: Tissue Value: Open Flower vs. Whole Plant
  misc_feature: MA Experiment ID: 20000265 Result: Up-regulated in Transcription
  misc_feature: MA Experiment 20000265 PARAMETER Experiment Name: At_Open_Flower_P Parameter: Age (day) Value: 21
  misc_feature: MA Experiment 20000265 PARAMETER Experiment Name: At_Open_Flower_P Parameter: Plant Line Value: WS
  misc_feature: MA Experiment 20000265 PARAMETER Experiment Name: At_Open_Flower_P Parameter: Tissue Value: Closed Flower vs. Whole Plant
  misc_feature: MA Experiment ID: 20000286 Result: Up-regulated in Transcription
  misc_feature: MA Experiment 20000286 PARAMETER Experiment Name: At_Open_Flower_P Parameter: Age (day) Value: 21
  misc_feature: MA Experiment 20000286 PARAMETER Experiment Name: At_Open_Flower_P Parameter: Plant Line Value: WS
  misc_feature: MA Experiment 20000286 PARAMETER Experiment Name: At_Open_Flower_P Parameter: Tissue Value: Half Open vs. Whole Plant
  misc_feature: MA Experiment ID: 20000438 Result: Down-regulated in Transcription
  misc_feature: MA Experiment 20000438 PARAMETER Experiment Name: At_Shoots__P Parameter: Age (day) Value: 14
  misc_feature: MA Experiment 20000438 PARAMETER Experiment Name: At_Shoots__P Parameter: Tissue Value: Shoots vs. Whole Plant
  misc_feature: MA Experiment ID: 20000709 Result: Down-regulated in Transcription
  misc_feature: MA Experiment 20000709 PARAMETER Experiment Name: At_15mM_NH4NO3_L-to-H_P Parameter: Age (hr) Value: 14
  misc_feature: MA Experiment 20000709 PARAMETER Experiment Name: At_15mM_NH4NO3_L-to-H_P Parameter: Organism Value: A. thaliana
  misc_feature: MA Experiment 20000709 PARAMETER Experiment Name: At_15mM_NH4NO3_L-to-H_P Parameter: Plant Line Value: WS
  misc_feature: MA Experiment 20000709 PARAMETER Experiment Name: At_15mM_NH4NO3_L-to-H_P Parameter: Timepoint (hr) Value: 4
  misc_feature: MA Experiment 20000709 PARAMETER Experiment Name: At_15mM_NH4NO3_L-to-H_P Parameter: Tissue Value: Aerial
  misc_feature: MA Experiment 20000709 PARAMETER Experiment Name: At_15mM_NH4NO3_L-to-H_P Parameter: Treatment Value: 15mM NH4NO3 vs. 30mM Mannitol
  misc_feature: MA Experiment ID: 20000794 Result: Up-regulated in Transcription
  misc_feature: MA Experiment 20000794 PARAMETER Experiment Name: At_Petals_P Parameter: Age (day) Value: 23-25 days
  misc_feature: MA Experiment 20000794 PARAMETER Experiment Name: At_Petals_P Parameter: Plant Line Value: WS
  misc_feature: MA Experiment 20000794 PARAMETER Experiment Name: At_Petals_P Parameter: Tissue Value: Petals vs. Whole plant
  misc_feature: MA Experiment ID: 20001768 Result: Up-regulated in Transcription
  misc_feature: MA Experiment 20001768 PARAMETER Experiment Name: At_Far-red-enriched-adult_P Parameter: Age (day) Value: 28
  misc_feature: MA Experiment 20001768 PARAMETER Experiment Name: At_Far-red-enriched-adult_P Parameter: Light Value: Far-red enriched vs. White
  misc_feature: MA Experiment 20001768 PARAMETER Experiment Name: At_Far-red-enriched-adult_P Parameter: Organism Value: A. thaliana
  misc_feature: MA Experiment 20001768 PARAMETER Experiment Name: At_Far-red-enriched-adult_P Parameter: Plant Line Value: Columbia
  misc_feature: MA Experiment 20001768 PARAMETER Experiment Name: At_Far-red-enriched-adult_P Parameter: Timepoint (hr) Value: 1
  misc_feature: MA Experiment 20001768 PARAMETER Experiment Name: At_Far-red-enriched-adult_P Parameter: Tissue Value: Aerial
  misc_feature: MA Experiment ID: 20001771 Result: Up-regulated in Transcription
  misc_feature: MA Experiment 20001771 PARAMETER Experiment Name: At_Far-red-enriched-adult_P Parameter: Age (day) Value: 28
  misc_feature: MA Experiment 20001771 PARAMETER Experiment Name: At_Far-red-enriched-adult_P Parameter: Light Value: Far-red enriched vs. White
  misc_feature: MA Experiment 20001771 PARAMETER Experiment Name: At_Far-red-enriched-adult_P Parameter: Organism Value: A. thaliana
  misc_feature: MA Experiment 20001771 PARAMETER Experiment Name: At_Far-red-enriched-adult_P Parameter: Plant Line Value: Columbia
  misc_feature: MA Experiment 20001771 PARAMETER Experiment Name: At_Far-red-enriched-adult_P Parameter: Timepoint (hr) Value: 16
  misc_feature: MA Experiment 20001771 PARAMETER Experiment Name: At_Far-red-enriched-adult_P Parameter: Tissue Value: Aerial
  misc_feature: MA Experiment ID: 20001773 Result: Up-regulated in Transcription
  misc_feature: MA Experiment 20001773 PARAMETER Experiment Name: At_Far-red-enriched-adult_P Parameter: Age (day) Value: 30
  misc_feature: MA Experiment 20001773 PARAMETER Experiment Name: At_Far-red-enriched-adult_P Parameter: Light Value: Far-red enriched vs. White
  misc_feature: MA Experiment 20001773 PARAMETER Experiment Name: At_Far-red-enriched-adult_P Parameter: Organism Value: A. thaliana
  misc_feature: MA Experiment 20001773 PARAMETER Experiment Name: At_Far-red-enriched-adult_P Parameter: Plant Line Value: Columbia
  misc_feature: MA Experiment 20001773 PARAMETER Experiment Name: At_Far-red-enriched-adult_P Parameter: Timepoint (hr) Value: 48
  misc_feature: MA Experiment 20001773 PARAMETER Experiment Name: At_Far-red-enriched-adult_P Parameter: Tissue Value: Aerial

SEQ ID NO: 92690 - protein, 516 aa, Arabidopsis thaliana; identical to SEQ ID NO: 88934
  peptide (1)..(516): Ceres Seq. ID no. 12713946
  misc_feature (1)..(516): Homolog of NCBI NO: 7430717 NR Description: cytochrome P450 homolog F23K16.110 - Arabidopsis
  misc_feature (1)..(515): Homolog of NCBI NO: 30692374 NR Description: cytochrome P450 family [Arabidopsis thaliana]
  misc_feature (1)..(513): Homolog of NCBI NO: 15227788 NR Description: cytochrome P450, putative; protein id: supported by cDNA: gi_13877660 [Arabidopsis thaliana]
  misc_feature (45)..(515): Homolog of NCBI NO: 30692374 NR Description: cytochrome P450 family [Arabidopsis thaliana]
  misc_feature (1)..(514): Homolog of NCBI NO: 15236695 NR Description: cytochrome P450, putative; protein id: [Arabidopsis thaliana] >gi|7430714|pir||T04628 cytochrome P450
  misc_feature (1)..(512): Homolog of NCBI NO: 15218645 NR Description: cytochrome P450, putative; protein id: At1g65340.1
  misc_feature (1)..(514): Homolog of NCBI NO: 15235108 NR Description: cytochrome p450 family; protein id: At4g39510.1, by cDNA: 120342., supported by cDNA: gi_16604437 [Arabidopsis
  misc_feature (3)..(512): Homolog of NCBI NO: 15242968 NR Description: cytochrome P450, putative; protein id: [Arabidopsis thaliana] >gi|10177398|dbj|BAB10529.1| cytochrome
  misc_feature (3)..(512): Homolog of NCBI NO: 26451485 NR Description: putative cytochrome P450 [Arabidopsis thaliana]
  misc_feature (1)..(516): Homolog of NCBI NO: 15220272 NR Description: cytochrome P450, putative; protein id: [Arabidopsis thaliana] >gi|25282626|pir||B96517 hypothetical

SEQ ID NO: 92691 - protein, 476 aa, Arabidopsis thaliana; identical to SEQ ID NO: 88935
  peptide (1)..(476): Ceres Seq. ID no. 12713947
  misc_feature (1)..(476): Homolog of NCBI NO: 7430717 NR Description: cytochrome P450 homolog F23K16.110 - Arabidopsis
  misc_feature (1)..(475): Homolog of NCBI NO: 30692374 NR Description: cytochrome P450 family [Arabidopsis thaliana]
  misc_feature (1)..(473): Homolog of NCBI NO: 15227788 NR Description: cytochrome P450, putative; protein id: supported by cDNA: gi_13877660 [Arabidopsis thaliana]
  misc_feature (5)..(475): Homolog of NCBI NO: 30692374 NR Description: cytochrome P450 family [Arabidopsis thaliana]
  misc_feature (1)..(474): Homolog of NCBI NO: 15236695 NR Description: cytochrome P450, putative; protein id: [Arabidopsis thaliana] >gi|7430714|pir||T04628 cytochrome P450
  misc_feature (1)..(472): Homolog of NCBI NO: 15218645 NR Description: cytochrome P450, putative; protein id: At1g65340.1
  misc_feature (1)..(474): Homolog of NCBI NO: 15235108 NR Description: cytochrome p450 family; protein id: At4g39510.1, by cDNA: 120342., supported by cDNA: gi_16604437 [Arabidopsis
  misc_feature (1)..(472): Homolog of NCBI NO: 15242968 NR Description: cytochrome P450, putative; protein id: [Arabidopsis thaliana] >gi|10177398|dbj|BAB10529.1| cytochrome
  misc_feature (1)..(472): Homolog of NCBI NO: 26451485 NR Description: putative cytochrome P450 [Arabidopsis thaliana]
  misc_feature (1)..(476): Homolog of NCBI NO: 15220272 NR Description: cytochrome P450, putative; protein id: [Arabidopsis thaliana] >gi|25282626|pir||B96517 hypothetical

SEQ ID NO: 92692 - protein, 438 aa, Arabidopsis thaliana; identical to SEQ ID NO: 88936
  peptide (1)..(438): Ceres Seq. ID no. 12713948
  misc_feature (1)..(438): Homolog of NCBI NO: 7430717 NR Description: cytochrome P450 homolog F23K16.110 - Arabidopsis
  misc_feature (1)..(437): Homolog of NCBI NO: 30692374 NR Description: cytochrome P450 family [Arabidopsis thaliana]
  misc_feature (1)..(435): Homolog of NCBI NO: 15227788 NR Description: cytochrome P450, putative; protein id: supported by cDNA: gi_13877660 [Arabidopsis thaliana]
  misc_feature (1)..(437): Homolog of NCBI NO: 30692374 NR Description: cytochrome P450 family [Arabidopsis thaliana]
  misc_feature (1)..(436): Homolog of NCBI NO: 15236695 NR Description: cytochrome P450, putative; protein id: [Arabidopsis thaliana] >gi|7430714|pir||T04628 cytochrome P450
  misc_feature (1)..(434): Homolog of NCBI NO: 15218645 NR Description: cytochrome P450, putative; protein id: At1g65340.1
  misc_feature (1)..(436): Homolog of NCBI NO: 15235108 NR Description: cytochrome p450 family; protein id: At4g39510.1, by cDNA: 120342., supported by cDNA: gi_16604437 [Arabidopsis
  misc_feature (1)..(434): Homolog of NCBI NO: 15242968 NR Description: cytochrome P450, putative; protein id: [Arabidopsis thaliana] >gi|10177398|dbj|BAB10529.1| cytochrome
  misc_feature (1)..(434): Homolog of NCBI NO: 26451485 NR Description: putative cytochrome P450 [Arabidopsis thaliana]
  misc_feature (1)..(438): Homolog of NCBI NO: 15220272 NR Description: cytochrome P450, putative; protein id: [Arabidopsis thaliana] >gi|25282626|pir||B96517 hypothetical

SEQ ID NO: 92693 - DNA, 1437 bp, Arabidopsis thaliana; identical to SEQ ID NO: 88937
  misc_feature (1)..(1437): Ceres Seq. ID no. 12714053
  misc_feature: MA Experiment ID: 20000180 Result: Up-regulated in Transcription
  misc_feature: MA Experiment 20000180 PARAMETER Experiment Name: At_Germinating_Seeds_P Parameter: Age (hr) Value: 24 vs. 0
  misc_feature: MA Experiment 20000180 PARAMETER Experiment Name: At_Germinating_Seeds_P Parameter: Tissue Value: Germinating Seeds
  misc_feature: MA Experiment ID: 20000286 Result: Up-regulated in Transcription
  misc_feature: MA Experiment 20000286 PARAMETER Experiment Name: At_Open_Flower_P Parameter: Age (day) Value: 21
  misc_feature: MA Experiment 20000286 PARAMETER Experiment Name: At_Open_Flower_P Parameter: Plant Line Value: WS
  misc_feature: MA Experiment 20000286 PARAMETER Experiment Name: At_Open_Flower_P Parameter: Tissue Value: Half Open vs. Whole Plant

SEQ ID NO: 92694 - protein, 478 aa, Arabidopsis thaliana; identical to SEQ ID NO: 88938
  peptide (1)..(478): Ceres Seq. ID no. 12714054
  misc_feature (23)..(474): Pfam Name: Glycosyl hydrolase family 9 Pfam Description: Glycosyl hydrolase family 9
  misc_feature (1)..(478): Homolog of NCBI NO: 30681176 NR Description: glycosyl hydrolase family 9 [Arabidopsis thaliana]
  misc_feature (1)..(478): Homolog of NCBI NO: 7484848 NR Description: cellulase (EC 3.2.1.4) F17A8.90 - Arabidopsis
  misc_feature (1)..(478): Homolog of NCBI NO: 15236526 NR Description: glycosyl hydrolase family 9; protein id:
  misc_feature (7)..(478): Homolog of NCBI NO: 1363496 NR Description: cellulase (EC 3.2.1.4) 3D precursor - pepper
  misc_feature (7)..(478): Homolog of NCBI NO: 1655543 NR Description: cellulase; endo-beta-1,4-glucanase [Capsicum
  misc_feature (23)..(478): Homolog of NCBI NO: 1039431 NR Description: cellulase [Phaseolus vulgaris]
  misc_feature (23)..(478): Homolog of NCBI NO: 1346225 NR Description: Endoglucanase precursor (Endo-1,4-beta-glucanase) cellulase) >gi|7488761|pir||T11783 cellulase (EC 3.2.1.4)
  misc_feature (18)..(478): Homolog of NCBI NO: 575404 NR Description: cellulase [Sambucus nigra]
  misc_feature (6)..(478): Homolog of NCBI NO: 7488977 NR Description: cellulase (EC 3.2.1.4) Cel1 precursor - tomato
  misc_feature (18)..(478): Homolog of NCBI NO: 1076692 NR Description: cellulase (EC 3.2.1.4) - European elder (fragment)

SEQ ID NO: 92695 - protein, 471 aa, Arabidopsis thaliana; identical to SEQ ID NO: 88939
  peptide (1)..(471): Ceres Seq. ID no. 12714055
  misc_feature (16)..(467): Pfam Name: Glycosyl hydrolase family 9 Pfam Description: Glycosyl hydrolase family 9
  misc_feature (1)..(471): Homolog of NCBI NO: 30681176 NR Description: glycosyl hydrolase family 9 [Arabidopsis thaliana]
  misc_feature (1)..(471): Homolog of NCBI NO: 7484848 NR Description: cellulase (EC 3.2.1.4) F17A8.90 - Arabidopsis
  misc_feature (1)..(471): Homolog of NCBI NO: 15236526 NR Description: glycosyl hydrolase family 9; protein id:
  misc_feature (1)..(471): Homolog of NCBI NO: 1363496 NR Description: cellulase (EC 3.2.1.4) 3D precursor - pepper
  misc_feature (1)..(471): Homolog of NCBI NO: 1655543 NR Description: cellulase; endo-beta-1,4-glucanase [Capsicum
  misc_feature (16)..(471): Homolog of NCBI NO: 1039431 NR Description: cellulase [Phaseolus vulgaris]
  misc_feature (16)..(471): Homolog of NCBI NO: 1346225 NR Description: Endoglucanase precursor (Endo-1,4-beta-glucanase) cellulase) >gi|7488761|pir||T11783 cellulase (EC 3.2.1.4)
  misc_feature (11)..(471): Homolog of NCBI NO: 575404 NR Description: cellulase [Sambucus nigra]
  misc_feature (1)..(471): Homolog of NCBI NO: 7488977 NR Description: cellulase (EC 3.2.1.4) Cel1 precursor - tomato
  misc_feature (11)..(471): Homolog of NCBI NO: 1076692 NR Description: cellulase (EC 3.2.1.4) - European elder (fragment)

SEQ ID NO: 92696 - protein, 467 aa, Arabidopsis thaliana; identical to SEQ ID NO: 88940
  peptide (1)..(467): Ceres Seq. ID no. 12714056
  misc_feature (12)..(463): Pfam Name: Glycosyl hydrolase family 9 Pfam Description: Glycosyl hydrolase family 9
  misc_feature (1)..(467): Homolog of NCBI NO: 30681176 NR Description: glycosyl hydrolase family 9 [Arabidopsis thaliana]
  misc_feature (1)..(467): Homolog of NCBI NO: 7484848 NR Description: cellulase (EC 3.2.1.4) F17A8.90 - Arabidopsis
  misc_feature (1)..(467): Homolog of NCBI NO: 15236526 NR Description: glycosyl hydrolase family 9; protein id:
  misc_feature (1)..(467): Homolog of NCBI NO: 1363496 NR Description: cellulase (EC 3.2.1.4) 3D precursor - pepper
  misc_feature (1)..(467): Homolog of NCBI NO: 1655543 NR Description: cellulase; endo-beta-1,4-glucanase [Capsicum
  misc_feature (12)..(467): Homolog of NCBI NO: 1039431 NR Description: cellulase [Phaseolus vulgaris]
  misc_feature (12)..(467): Homolog of NCBI NO: 1346225 NR Description: Endoglucanase precursor (Endo-1,4-beta-glucanase) cellulase) >gi|7488761|pir||T11783 cellulase (EC 3.2.1.4)
  misc_feature (7)..(467): Homolog of NCBI NO: 575404 NR Description: cellulase [Sambucus nigra]
  misc_feature (1)..(467): Homolog of NCBI NO: 7488977 NR Description: cellulase (EC 3.2.1.4) Cel1 precursor - tomato
  misc_feature (7)..(467): Homolog of NCBI NO: 1076692 NR Description: cellulase (EC 3.2.1.4) - European elder (fragment)

SEQ ID NO: 92697 - DNA, 1361 bp, Arabidopsis thaliana; identical to SEQ ID NO: 88941
  misc_feature (1)..(1361): Ceres Seq. ID no. 12714097
  misc_feature: MA Experiment ID: 20000173 Result: Down-regulated in Transcription
  misc_feature: MA Experiment 20000173 PARAMETER Experiment Name: At_42deg_Heat_P Parameter: Age (day) Value: 14
  misc_feature: MA Experiment 20000173 PARAMETER Experiment Name: At_42deg_Heat_P Parameter: Organism Value: A. thaliana
  misc_feature: MA Experiment 20000173 PARAMETER Experiment Name: At_42deg_Heat_P Parameter: Plant Line Value: WS
  misc_feature: MA Experiment 20000173 PARAMETER Experiment Name: At_42deg_Heat_P Parameter: Temperature (deg C) Value: 42 vs. 22
  misc_feature: MA Experiment 20000173 PARAMETER Experiment Name: At_42deg_Heat_P Parameter: Timepoint (hr) Value: 6
  misc_feature: MA Experiment 20000173 PARAMETER Experiment Name: At_42deg_Heat_P Parameter: Tissue Value: Aerial
  misc_feature: MA Experiment ID: 20000179 Result: Up-regulated in Transcription
  misc_feature: MA Experiment 20000179 PARAMETER Experiment Name: At_Germinating_Seeds_P Parameter: Age (hr) Value: 6 vs. 0
  misc_feature: MA Experiment 20000179 PARAMETER Experiment Name: At_Germinating_Seeds_P Parameter: Tissue Value: Germinating Seeds
  misc_feature: MA Experiment ID: 20000439 Result: Down-regulated in Transcription
  misc_feature: MA Experiment 20000439 PARAMETER Experiment Name: At_Roots__P Parameter: Age (day) Value: 14 vs. 21
  misc_feature: MA Experiment 20000439 PARAMETER Experiment Name: At_Roots__P Parameter: Organism Value: A. thaliana
  misc_feature: MA Experiment 20000439 PARAMETER Experiment Name: At_Roots__P Parameter: Tissue Value: Roots vs. Whole Plant
  misc_feature: MA Experiment ID: 20000451 Result: Up-regulated in Transcription
  misc_feature: MA Experiment 20000451 PARAMETER Experiment Name: At_CS6879_Shoots-Roots_P Parameter: Age (day) Value: 14
  misc_feature: MA Experiment 20000451 PARAMETER Experiment Name: At_CS6879_Shoots-Roots_P Parameter: Organism Value: A. thaliana
  misc_feature: MA Experiment 20000451 PARAMETER Experiment Name: At_CS6879_Shoots-Roots_P Parameter: Plant Line Value: CS6879 vs. WS
  misc_feature: MA Experiment 20000451 PARAMETER Experiment Name: At_CS6879_Shoots-Roots_P Parameter: Tissue Value: Roots
  misc_feature: MA Experiment ID: 20001905 Result: Down-regulated in Transcription
  misc_feature: MA Experiment 20001905 PARAMETER Experiment Name: At_Drought_Reproduction_P Parameter: Age (day) Value: 40
  misc_feature: MA Experiment 20001905 PARAMETER Experiment Name: At_Drought_Reproduction_P Parameter: Organism Value: A. thaliana
  misc_feature: MA Experiment 20001905 PARAMETER Experiment Name: At_Drought_Reproduction_P Parameter: Plant Line Value: WS
  misc_feature: MA Experiment 20001905 PARAMETER Experiment Name: At_Drought_Reproduction_P Parameter: Timepoint (day) Value: 10
  misc_feature: MA Experiment 20001905 PARAMETER Experiment Name: At_Drought_Reproduction_P Parameter: Tissue Value: Rosettes
  misc_feature: MA Experiment 20001905 PARAMETER Experiment Name: At_Drought_Reproduction_P Parameter: Treatment Value: Drought vs. No Drought

SEQ ID NO: 92698 - protein, 349 aa, Arabidopsis thaliana; identical to SEQ ID NO: 88942
  peptide (1)..(349): Ceres Seq. ID no. 12714098
  misc_feature (1)..(349): Homolog of NCBI NO: 30681236 NR Description: hydrolase family [Arabidopsis thaliana] Unknown protein [Arabidopsis thaliana]
  misc_feature (1)..(349): Homolog of NCBI NO: 21595837 NR Description: polyneuridine aldehyde esterase, putative
  misc_feature (1)..(349): Homolog of NCBI NO: 15218463 NR Description: polyneuridine aldehyde esterase, putative; id: At1g33990.1, supported by cDNA: 8327., supported by cDNA: [Arabidopsis thaliana] >gi|10092445|gb|AAG12848.1|AC079286_5
  misc_feature (96)..(349): Homolog of NCBI NO: 7485010 NR Description: host response protein homolog T5L19.30 - thaliana >gi|4538993|emb|CAB39614.1| putative host response [Arabidopsis thaliana] >gi|7267686|emb|CAB78113.1| putative host
  misc_feature (96)..(349): Homolog of NCBI NO: 25518661 NR Description: hypothetical protein F12G12.19 - Arabidopsis >gi|10086476|gb|AAG12536.1|AC015446_17 Unknown protein
  misc_feature (56)..(348): Homolog of NCBI NO: 15230077 NR Description: alpha/beta hydrolase, putative; protein id: [Arabidopsis thaliana] >gi|10092202|gb|AAG12619.1|AC074284_5
  misc_feature (67)..(349): Homolog of NCBI NO: 15222699 NR Description: hypothetical protein; protein id: At1g26360.1
  misc_feature (61)..(349): Homolog of NCBI NO: 25404802 NR Description: probable alpha/beta hydrolase F23O10.18 - Arabidopsis thaliana >gi|12325081|gb|AAG52490.1|AC018364_8
  misc_feature (82)..(349): Homolog of NCBI NO: 15222256 NR Description: polyneuridine aldehyde esterase, putative; id: At1g69240.1 [Arabidopsis thaliana]
  misc_feature (140)..(330): Homolog of NCBI NO: 25518436 NR Description: hypothetical protein T1K7.26 - Arabidopsis >gi|9797761|gb|AAF98579.1|AC013427_22 Contains similarity to protein from Oryza sativa gb|Z34271 and contains an alpha/beta

SEQ ID NO: 92699 - protein, 342 aa, Arabidopsis thaliana; identical to SEQ ID NO: 88943
  peptide (1)..(342): Ceres Seq. ID no. 12714099
  misc_feature (1)..(342): Homolog of NCBI NO: 30681236 NR Description: hydrolase family [Arabidopsis thaliana] Unknown protein [Arabidopsis thaliana]
  misc_feature (1)..(342): Homolog of NCBI NO: 21595837 NR Description: polyneuridine aldehyde esterase, putative
  misc_feature (1)..(342): Homolog of NCBI NO: 15218463 NR Description: polyneuridine aldehyde esterase, putative; id: At1g33990.1, supported by cDNA: 8327., supported by cDNA: [Arabidopsis thaliana] >gi|10092445|gb|AAG12848.1|AC079286_5
  misc_feature (89)..(342): Homolog of NCBI NO: 7485010 NR Description: host response protein homolog T5L19.30 - thaliana >gi|4538993|emb|CAB39614.1| putative host response [Arabidopsis thaliana] >gi|7267686|emb|CAB78113.1| putative host
  misc_feature (89)..(342): Homolog of NCBI NO: 25518661 NR Description: hypothetical protein F12G12.19 - Arabidopsis >gi|10086476|gb|AAG12536.1|AC015446_17 Unknown protein
  misc_feature (49)..(341): Homolog of NCBI NO: 15230077 NR Description: alpha/beta hydrolase, putative; protein id: [Arabidopsis thaliana] >gi|10092202|gb|AAG12619.1|AC074284_5
  misc_feature (60)..(342): Homolog of NCBI NO: 15222699 NR Description: hypothetical protein; protein id: At1g26360.1
  misc_feature (54)..(342): Homolog of NCBI NO: 25404802 NR Description: probable alpha/beta hydrolase F23O10.18 - Arabidopsis thaliana >gi|12325081|gb|AAG52490.1|AC018364_8
  misc_feature (75)..(342): Homolog of NCBI NO: 15222256 NR Description: polyneuridine aldehyde esterase, putative; id: At1g69240.1 [Arabidopsis thaliana]
  misc_feature (133)..(323): Homolog of NCBI NO: 25518436 NR Description: hypothetical protein T1K7.26 - Arabidopsis >gi|9797761|gb|AAF98579.1|AC013427_22 Contains similarity to protein from Oryza sativa gb|Z34271 and contains an alpha/beta

SEQ ID NO: 92700 - protein, 302 aa, Arabidopsis thaliana; identical to SEQ ID NO: 88944
  peptide (1)..(302): Ceres Seq. ID no. 12714100
  misc_feature (1)..(302): Homolog of NCBI NO: 30681236 NR Description: hydrolase family [Arabidopsis thaliana] Unknown protein [Arabidopsis thaliana]
  misc_feature (1)..(302): Homolog of NCBI NO: 21595837 NR Description: polyneuridine aldehyde esterase, putative
  misc_feature (1)..(302): Homolog of NCBI NO: 15218463 NR Description: polyneuridine aldehyde esterase, putative; id: At1g33990.1, supported by cDNA: 8327., supported by cDNA: [Arabidopsis thaliana] >gi|10092445|gb|AAG12848.1|AC079286_5
  misc_feature (49)..(302): Homolog of NCBI NO: 7485010 NR Description: host response protein homolog T5L19.30 - thaliana >gi|4538993|emb|CAB39614.1| putative host response [Arabidopsis thaliana] >gi|7267686|emb|CAB78113.1| putative host
  misc_feature (49)..(302): Homolog of NCBI NO: 25518661 NR Description: hypothetical protein F12G12.19 - Arabidopsis >gi|10086476|gb|AAG12536.1|AC015446_17 Unknown protein
  misc_feature (9)..(301): Homolog of NCBI NO: 15230077 NR Description: alpha/beta hydrolase, putative; protein id: [Arabidopsis thaliana] >gi|10092202|gb|AAG12619.1|AC074284_5
  misc_feature (20)..(302): Homolog of NCBI NO: 15222699 NR Description: hypothetical protein; protein id: At1g26360.1
  misc_feature (14)..(302): Homolog of NCBI NO: 25404802 NR Description: probable alpha/beta hydrolase F23O10.18 - Arabidopsis thaliana >gi|12325081|gb|AAG52490.1|AC018364_8
  misc_feature (35)..(302): Homolog of NCBI NO: 15222256 NR Description: polyneuridine aldehyde esterase, putative; id: At1g69240.1 [Arabidopsis thaliana]
  misc_feature (93)..(283): Homolog of NCBI NO: 25518436 NR Description: hypothetical protein T1K7.26 - Arabidopsis >gi|9797761|gb|AAF98579.1|AC013427_22 Contains similarity to protein from Oryza sativa gb|Z34271 and contains an alpha/beta

SEQ ID NO: 92701 - DNA, 876 bp, Arabidopsis thaliana; identical to SEQ ID NO: 88945
  misc_feature (1)..(876): Ceres Seq. ID no. 12714246

SEQ ID NO: 92702 - protein, 291 aa, Arabidopsis thaliana; identical to SEQ ID NO: 88946
  peptide (1)..(291): Ceres Seq. ID no. 12714247
  misc_feature (134)..(227): Pfam Name: Glutaredoxin Pfam Description: Glutaredoxin
  misc_feature (99)..(291): Homolog of NCBI NO: 15235179 NR Description: putative protein; protein id: At4g10630.1
  misc_feature (1)..(98): Homolog of NCBI NO: 15235179 NR Description: putative protein; protein id: At4g10630.1
  misc_feature (51)..(291): Homolog of NCBI NO: 15223291 NR Description: unknown protein; protein id: At1g32760.1 thaliana] >gi|6714276|gb|AAF25972.1|AC017118_9 F6N18.14
  misc_feature (77)..(291): Homolog of NCBI NO: 15237554 NR Description: putative protein; protein id: At5g03870.1
  misc_feature (127)..(291): Homolog of NCBI NO: 38346321 NR Description: OJ000126_13.3 [Oryza sativa (japonica
  misc_feature (102)..(290): Homolog of NCBI NO: 15217659 NR Description: peptide transporter, putative; protein id: supported by cDNA: gi_15810442, supported by cDNA: gi_17381051
  misc_feature (102)..(290): Homolog of NCBI NO: 17381052 NR Description: putative peptide transporter protein [Arabidopsis
  misc_feature (44)..(290): Homolog of NCBI NO: 34899868 NR Description: OJ1714_H10.16 [Oryza sativa (japonica
  misc_feature (122)..(291): Homolog of NCBI NO: 15240974 NR Description: putative protein; protein id: At5g01420.1
  misc_feature (122)..(291): Homolog of NCBI NO: 26451045 NR Description: unknown protein [Arabidopsis thaliana]

SEQ ID NO: 92703 - protein, 240 aa, Arabidopsis thaliana; identical to SEQ ID NO: 88947
  peptide (1)..(240): Ceres Seq. ID no. 12714248
  misc_feature (83)..(176): Pfam Name: Glutaredoxin Pfam Description: Glutaredoxin
  misc_feature (48)..(240): Homolog of NCBI NO: 15235179 NR Description: putative protein; protein id: At4g10630.1
  misc_feature (1)..(47): Homolog of NCBI NO: 15235179 NR Description: putative protein; protein id: At4g10630.1
  misc_feature (1)..(240): Homolog of NCBI NO: 15223291 NR Description: unknown protein; protein id: At1g32760.1 thaliana] >gi|6714276|gb|AAF25972.1|AC017118_9 F6N18.14
  misc_feature (26)..(240): Homolog of NCBI NO: 15237554 NR Description: putative protein; protein id: At5g03870.1
  misc_feature (76)..(240): Homolog of NCBI NO: 38346321 NR Description: OJ000126_13.3 [Oryza sativa (japonica
  misc_feature (51)..(239): Homolog of NCBI NO: 15217659 NR Description: peptide transporter, putative; protein id: supported by cDNA: gi_15810442, supported by cDNA: gi_17381051
  misc_feature (51)..(239): Homolog of NCBI NO: 17381052 NR Description: putative peptide transporter protein [Arabidopsis
  misc_feature (1)..(239): Homolog of NCBI NO: 34899868 NR Description: OJ1714_H10.16 [Oryza sativa (japonica
  misc_feature (71)..(240): Homolog of NCBI NO: 15240974 NR Description: putative protein; protein id: At5g01420.1
  misc_feature (71)..(240): Homolog of NCBI NO: 26451045 NR Description: unknown protein [Arabidopsis thaliana]

SEQ ID NO: 92704 - protein, 205 aa, Arabidopsis thaliana; identical to SEQ ID NO: 88948
  peptide (1)..(205): Ceres Seq. ID no. 12714249
  misc_feature (48)..(141): Pfam Name: Glutaredoxin Pfam Description: Glutaredoxin
  misc_feature (13)..(205): Homolog of NCBI NO: 15235179 NR Description: putative protein; protein id: At4g10630.1
  misc_feature (1)..(12): Homolog of NCBI NO: 15235179 NR Description: putative protein; protein id: At4g10630.1
  misc_feature (1)..(205): Homolog of NCBI NO: 15223291 NR Description: unknown protein; protein id: At1g32760.1 thaliana] >gi|6714276|gb|AAF25972.1|AC017118_9 F6N18.14
  misc_feature (1)..(205): Homolog of NCBI NO: 15237554 NR Description: putative protein; protein id: At5g03870.1
  misc_feature (41)..(205): Homolog of NCBI NO: 38346321 NR Description: OJ000126_13.3 [Oryza sativa (japonica
  misc_feature (16)..(204): Homolog of NCBI NO: 15217659 NR Description: peptide transporter, putative; protein id: supported by cDNA: gi_15810442, supported by cDNA: gi_17381051
  misc_feature (16)..(204): Homolog of NCBI NO: 17381052 NR Description: putative peptide transporter protein [Arabidopsis
  misc_feature (1)..(204): Homolog of NCBI NO: 34899868 NR Description: OJ1714_H10.16 [Oryza sativa (japonica
  misc_feature (36)..(205): Homolog of NCBI NO: 15240974 NR Description: putative protein; protein id: At5g01420.1
  misc_feature (36)..(205): Homolog of NCBI NO: 26451045 NR Description: unknown protein [Arabidopsis thaliana]

SEQ ID NO: 92705 - DNA, 522 bp, Arabidopsis thaliana; identical to SEQ ID NO: 88949
  misc_feature (1)..(522): Ceres Seq. ID no. 12714298
  misc_feature: MA Experiment ID: 20000314 Result: Down-regulated in Transcription
  misc_feature: MA Experiment 20000314 PARAMETER Experiment Name: At_14day_Shoots-Roots_Sub_P Parameter: Age (day) Value: 14
  misc_feature: MA Experiment 20000314 PARAMETER Experiment Name: At_14day_Shoots-Roots_Sub_P Parameter: Organism Value: A. thaliana
  misc_feature: MA Experiment 20000314 PARAMETER Experiment Name: At_14day_Shoots-Roots_Sub_P Parameter: Plant Line Value: WS
  misc_feature: MA Experiment 20000314 PARAMETER Experiment Name: At_14day_Shoots-Roots_Sub_P Parameter: Tissue Value: Roots vs. Whole Plant
  misc_feature: MA Experiment ID: 20000315 Result: Down-regulated in Transcription
  misc_feature: MA Experiment 20000315 PARAMETER Experiment Name: At_14day_Shoots-Roots_Sub_P Parameter: Age (day) Value: 14
  misc_feature: MA Experiment 20000315 PARAMETER Experiment Name: At_14day_Shoots-Roots_Sub_P Parameter: Organism Value: A. thaliana
  misc_feature: MA Experiment 20000315 PARAMETER Experiment Name: At_14day_Shoots-Roots_Sub_P Parameter: Plant Line Value: WS
  misc_feature: MA Experiment 20000315 PARAMETER Experiment Name: At_14day_Shoots-Roots_Sub_P Parameter: Tissue Value: Shoots vs. Whole Plant
  misc_feature: MA Experiment ID: 20000328 Result: Down-regulated in Transcription
  misc_feature: MA Experiment 20000328 PARAMETER Experiment Name: At_42deg_Heat_Sub_P Parameter: Age (day) Value: 14
  misc_feature: MA Experiment 20000328 PARAMETER Experiment Name: At_42deg_Heat_Sub_P Parameter: Organism Value: A. thaliana
  misc_feature: MA Experiment 20000328 PARAMETER Experiment Name: At_42deg_Heat_Sub_P Parameter: Plant Line Value: WS
  misc_feature: MA Experiment 20000328 PARAMETER Experiment Name: At_42deg_Heat_Sub_P Parameter: Temperature (deg C) Value: 42 vs. 22
  misc_feature: MA Experiment 20000328 PARAMETER Experiment Name: At_42deg_Heat_Sub_P Parameter: Timepoint (hr) Value: 6
  misc_feature: MA Experiment 20000328 PARAMETER Experiment Name: At_42deg_Heat_Sub_P Parameter: Tissue Value: Aerial

SEQ ID NO: 92706 - protein, 173 aa, Arabidopsis thaliana; identical to SEQ ID NO: 88950
  peptide (1)..(173): Ceres Seq. ID no. 12714299
  misc_feature (47)..(173): Pfam Name: Reverse transcriptase (RNA-dependent DNA polymerase) Pfam Description: Reverse transcriptase (RNA-dependent DNA
  misc_feature (24)..(173): Homolog of NCBI NO: 15225653 NR Description: putative retroelement pol polyprotein; protein At2g14400.1 [Arabidopsis thaliana] >gi|25411562|pir||G84516
  misc_feature (47)..(173): Homolog of NCBI NO: 15225651 NR Description: putative retroelement pol polyprotein; protein At2g14380.1 [Arabidopsis thaliana] >gi|25411560|pir||E84516
  misc_feature (47)..(173): Homolog of NCBI NO: 30693475 NR Description: GAG-POL precursor (gypsy_Ty3-element) [Oryza
  misc_feature (30)..(173): Homolog of NCBI NO: 30686804 NR Description: retrotransposon gag protein family [Arabidopsis
  misc_feature (53)..(173): Homolog of NCBI NO: 15226511 NR Description: putative retroelement pol polyprotein; protein At2g15410.1 [Arabidopsis thaliana] >gi|25411637|pir||F84528
  misc_feature (48)..(173): Homolog of NCBI NO: 15225007 NR Description: putative retroelement pol polyprotein; protein At2g13330.1 [Arabidopsis thaliana] >gi|25411489|pir||H84506
  misc_feature (47)..(173): Homolog of NCBI NO: 18412374 NR Description: hypothetical protein; protein id: At4g03800.1
  misc_feature (28)..(173): Homolog of NCBI NO: 20161451 NR Description: putative polyprotein [Oryza sativa (japonica
  misc_feature (30)..(173): Homolog of NCBI NO: 27552545 NR Description: putative polyprotein [Oryza sativa (japonica
  misc_feature (65)..(173): Homolog of NCBI NO: 13559346 NR Description: reverse transcriptase [Spinacia oleracea]

SEQ ID NO: 92707 - protein, 167 aa, Arabidopsis thaliana; identical to SEQ ID NO: 88951
  peptide (1)..(167): Ceres Seq. ID no. 12714300
  misc_feature (41)..(167): Pfam Name: Reverse transcriptase (RNA-dependent DNA polymerase) Pfam Description: Reverse transcriptase (RNA-dependent DNA
  misc_feature (18)..(167): Homolog of NCBI NO: 15225653 NR Description: putative retroelement pol polyprotein; protein At2g14400.1 [Arabidopsis thaliana] >gi|25411562|pir||G84516
  misc_feature (41)..(167): Homolog of NCBI NO: 15225651 NR Description: putative retroelement pol polyprotein; protein At2g14380.1 [Arabidopsis thaliana] >gi|25411560|pir||E84516
  misc_feature (41)..(167): Homolog of NCBI NO: 30693475 NR Description: GAG-POL precursor (gypsy_Ty3-element) [Oryza
  misc_feature (24)..(167): Homolog of NCBI NO: 30686804 NR Description: retrotransposon gag protein family [Arabidopsis
  misc_feature (47)..(167): Homolog of NCBI NO: 15226511 NR Description: putative retroelement pol polyprotein; protein At2g15410.1 [Arabidopsis thaliana] >gi|25411637|pir||F84528
  misc_feature (42)..(167): Homolog of NCBI NO: 15225007 NR Description: putative retroelement pol polyprotein; protein At2g13330.1 [Arabidopsis thaliana] >gi|25411489|pir||H84506
  misc_feature (41)..(167): Homolog of NCBI NO: 18412374 NR Description: hypothetical protein; protein id: At4g03800.1
  misc_feature (22)..(167): Homolog of NCBI NO: 20161451 NR Description: putative polyprotein [Oryza sativa (japonica
  misc_feature (24)..(167): Homolog of NCBI NO: 27552545 NR Description: putative polyprotein [Oryza sativa (japonica
  misc_feature (59)..(167): Homolog of NCBI NO: 13559346 NR Description: reverse transcriptase [Spinacia oleracea]

SEQ ID NO: 92708 - DNA, 1287 bp, Arabidopsis thaliana; identical to SEQ ID NO: 88952
  misc_feature (1)..(1287): Ceres Seq. ID no. 12714383
  misc_feature: MA Experiment ID: 20000179 Result: Up-regulated in Transcription
  misc_feature: MA Experiment 20000179 PARAMETER Experiment Name: At_Germinating_Seeds_P Parameter: Age (hr) Value: 6 vs. 0
  misc_feature: MA Experiment 20000179 PARAMETER Experiment Name: At_Germinating_Seeds_P Parameter: Tissue Value: Germinating Seeds
  misc_feature: MA Experiment ID: 20000180 Result: Up-regulated in Transcription
  misc_feature: MA Experiment 20000180 PARAMETER Experiment Name: At_Germinating_Seeds_P Parameter: Age (hr) Value: 24 vs. 0
  misc_feature: MA Experiment 20000180 PARAMETER Experiment Name: At_Germinating_Seeds_P Parameter: Tissue Value: Germinating Seeds
  misc_feature: MA Experiment ID: 20000265 Result: Down-regulated in Transcription
  misc_feature: MA Experiment 20000265 PARAMETER Experiment Name: At_Open_Flower_P Parameter: Age (day) Value: 21
  misc_feature: MA Experiment 20000265 PARAMETER Experiment Name: At_Open_Flower_P Parameter: Plant Line Value: WS
  misc_feature: MA Experiment 20000265 PARAMETER Experiment Name: At_Open_Flower_P Parameter: Tissue Value: Closed Flower vs. Whole Plant
  misc_feature: MA Experiment ID: 20000495 Result: Down-regulated in Transcription
  misc_feature: MA Experiment 20000495 PARAMETER Experiment Name: At_Guard_Cells_P Parameter: Harvest Date Value: 8/2/2002
  misc_feature: MA Experiment 20000495 PARAMETER Experiment Name: At_Guard_Cells_P Parameter: Organism Value: A. thaliana
  misc_feature: MA Experiment 20000495 PARAMETER Experiment Name: At_Guard_Cells_P Parameter: Tissue Value: Guard Cells vs. Leaves

SEQ ID NO: 92709 - protein, 418 aa, Arabidopsis thaliana; identical to SEQ ID NO: 41313
  peptide (1)..(418): Ceres Seq. ID no. 12714384
  misc_feature (3)..(418): Pfam Name: Caspase domain Pfam Description: Caspase domain
  misc_feature (1)..(418): Homolog of NCBI NO: 15219345 NR Description: hypothetical protein common family; protein id: supported by cDNA: gi_19347868 [Arabidopsis thaliana]
  misc_feature (1)..(418): Homolog of NCBI NO: 33304380 NR Description: metacaspase 7 [Arabidopsis thaliana]
  misc_feature (1)..(418): Homolog of NCBI NO: 15219342 NR Description: hypothetical protein common family; protein id:
  misc_feature (8)..(418): Homolog of NCBI NO: 23343885 NR Description: metacaspase 1 [Lycopersicon esculentum]
  misc_feature (1)..(418): Homolog of NCBI NO: 4235430 NR Description: latex-abundant protein [Hevea brasiliensis]
  misc_feature (1)..(418): Homolog of NCBI NO: 40644374 NR Description: metacaspase type II [Picea abies]
  misc_feature (185)..(418): Homolog of NCBI NO: 15219340 NR Description: hypothetical protein common family; protein id:
  misc_feature (1)..(166): Homolog of NCBI NO: 15219340 NR Description: hypothetical protein common family; protein id:
  misc_feature (3)..(418): Homolog of NCBI NO: 34908928 NR Description: putative latex-abundant protein [Oryza sativa
  misc_feature (1)..(418): Homolog of NCBI NO: 32482818 NR Description: metacaspase 4 [Arabidopsis thaliana]

SEQ ID NO: 92710 - protein, 390 aa, Arabidopsis thaliana; identical to SEQ ID NO: 41314
  peptide (1)..(390): Ceres Seq. ID no. 12714385
  misc_feature (1)..(390): Pfam Name: Caspase domain Pfam Description: Caspase domain
  misc_feature (1)..(390): Homolog of NCBI NO: 15219345 NR Description: hypothetical protein common family; protein id: supported by cDNA: gi_19347868 [Arabidopsis thaliana]
  misc_feature (1)..(390): Homolog of NCBI NO: 33304380 NR Description: metacaspase 7 [Arabidopsis thaliana]
  misc_feature (1)..(390): Homolog of NCBI NO: 15219342 NR Description: hypothetical protein common family; protein id:
  misc_feature (1)..(390): Homolog of NCBI NO: 23343885 NR Description: metacaspase 1 [Lycopersicon esculentum]
  misc_feature (1)..(390): Homolog of NCBI NO: 4235430 NR Description: latex-abundant protein [Hevea brasiliensis]
  misc_feature (1)..(390): Homolog of NCBI NO: 40644374 NR Description: metacaspase type II [Picea abies]
  misc_feature (157)..(390): Homolog of NCBI NO: 15219340 NR Description: hypothetical protein common family; protein id:
  misc_feature (1)..(138): Homolog of NCBI NO: 15219340 NR Description: hypothetical protein common family; protein id:
  misc_feature (1)..(390): Homolog of NCBI NO: 34908928 NR Description: putative latex-abundant protein [Oryza sativa
  misc_feature (1)..(390): Homolog of NCBI NO: 32482818 NR Description: metacaspase 4 [Arabidopsis thaliana]

SEQ ID NO: 92711 - protein, 308 aa, Arabidopsis thaliana; identical to SEQ ID NO: 88955
  peptide (1)..(308): Ceres Seq. ID no. 12714386
  misc_feature (1)..(308): Pfam Name: Caspase domain Pfam Description: Caspase domain
  misc_feature (1)..(308): Homolog of NCBI NO: 15219345 NR Description: hypothetical protein common family; protein id: supported by cDNA: gi_19347868 [Arabidopsis thaliana]
  misc_feature (1)..(308): Homolog of NCBI NO: 33304380 NR Description: metacaspase 7 [Arabidopsis thaliana]
  misc_feature (1)..(308): Homolog of NCBI NO: 15219342 NR Description: hypothetical protein common family; protein id:
  misc_feature (1)..(308): Homolog of NCBI NO: 23343885 NR Description: metacaspase 1 [Lycopersicon esculentum]
  misc_feature (1)..(308): Homolog of NCBI NO: 4235430 NR Description: latex-abundant protein [Hevea brasiliensis]
  misc_feature (1)..(308): Homolog of NCBI NO: 40644374 NR Description: metacaspase type II [Picea abies]
  misc_feature (75)..(308): Homolog of NCBI NO: 15219340 NR Description: hypothetical protein common family; protein id:
  misc_feature (1)..(56): Homolog of NCBI NO: 15219340 NR Description: hypothetical protein common family; protein id:
  misc_feature (1)..(308): Homolog of NCBI NO: 34908928 NR Description: putative latex-abundant protein [Oryza sativa
  misc_feature (1)..(308): Homolog of NCBI NO: 32482818 NR Description: metacaspase 4 [Arabidopsis thaliana]

SEQ ID NO: 92712 - DNA, 1599 bp, Arabidopsis thaliana; identical to SEQ ID NO: 88956
  misc_feature (1)..(1599): Ceres Seq. ID no. 12714405
  misc_feature: MA Experiment ID: 108434 Result: Up-regulated in Transcription
  misc_feature: MA Experiment 108434 PARAMETER Experiment Name: At_Root_Tips_cDNA_P Parameter: Tissue Value: Root Tips
  misc_feature: MA Experiment ID: 108435 Result: Up-regulated in Transcription
  misc_feature: MA Experiment 108435 PARAMETER Experiment Name: At_stm_Mutants_cDNA_P Parameter: Plant Line Value: wt Landsburg vs stm
  misc_feature: MA Experiment 108435 PARAMETER Experiment Name: At_stm_Mutants_cDNA_P Parameter: Tissue Value: Shoot Apical Meristem Region
  misc_feature: MA Experiment ID: 20000184 Result: Up-regulated in Transcription
  misc_feature: MA Experiment 20000184 PARAMETER Experiment Name: At_Shoots__P Parameter: Age (day) Value: 7
  misc_feature: MA Experiment 20000184 PARAMETER Experiment Name: At_Shoots__P Parameter: Tissue Value: Shoots vs. Whole Plant
  misc_feature: MA Experiment ID: 20000185 Result: Up-regulated in Transcription
  misc_feature: MA Experiment 20000185 PARAMETER Experiment Name: At_Roots__P Parameter: Age (day) Value: 7 vs. 21
  misc_feature: MA Experiment 20000185 PARAMETER Experiment Name: At_Roots__P Parameter: Organism Value: A. thaliana
  misc_feature: MA Experiment 20000185 PARAMETER Experiment Name: At_Roots__P Parameter: Tissue Value: Roots vs. Whole Plant
  misc_feature: MA Experiment ID: 20000234 Result: Up-regulated in Transcription
  misc_feature: MA Experiment 20000234 PARAMETER Experiment Name: At_Siliques_P Parameter: Age (day) Value: 21
  misc_feature: MA Experiment 20000234 PARAMETER Experiment Name: At_Siliques_P Parameter: Organism Value: A. thaliana
  misc_feature: MA Experiment 20000234 PARAMETER Experiment Name: At_Siliques_P Parameter: Plant Line Value: WS
  misc_feature: MA Experiment 20000234 PARAMETER Experiment Name: At_Siliques_P Parameter: Tissue Value: Less Than 5mm Siliques vs. Whole Plant
  misc_feature: MA Experiment ID: 20000235 Result: Up-regulated in Transcription
  misc_feature: MA Experiment 20000235 PARAMETER Experiment Name: At_Siliques_P Parameter: Age (day) Value: 21
  misc_feature: MA Experiment 20000235 PARAMETER Experiment Name: At_Siliques_P Parameter: Organism Value: A. thaliana
  misc_feature: MA Experiment 20000235 PARAMETER Experiment Name: At_Siliques_P Parameter: Plant Line Value: WS
  misc_feature: MA Experiment 20000235 PARAMETER Experiment Name: At_Siliques_P Parameter: Tissue Value: 5-10mm Siliques vs. Whole Plant
  misc_feature: MA Experiment ID: 20000264 Result: Up-regulated in Transcription
  misc_feature: MA Experiment 20000264 PARAMETER Experiment Name: At_Open_Flower_P Parameter: Age (day) Value: 21
  misc_feature: MA Experiment 20000264 PARAMETER Experiment Name: At_Open_Flower_P Parameter: Plant Line Value: WS
  misc_feature: MA Experiment 20000264 PARAMETER Experiment Name: At_Open_Flower_P Parameter: Tissue Value: Open Flower vs. Whole Plant
  misc_feature: MA Experiment ID: 20000265 Result: Up-regulated in Transcription
  misc_feature: MA Experiment 20000265 PARAMETER Experiment Name: At_Open_Flower_P Parameter: Age (day) Value: 21
  misc_feature: MA Experiment 20000265 PARAMETER Experiment Name: At_Open_Flower_P Parameter: Plant Line Value: WS
  misc_feature: MA Experiment 20000265 PARAMETER Experiment Name: At_Open_Flower_P Parameter: Tissue Value: Closed Flower vs. Whole Plant
  misc_feature: MA Experiment ID: 20000286 Result: Up-regulated in Transcription
  misc_feature: MA Experiment 20000286 PARAMETER Experiment Name: At_Open_Flower_P Parameter: Age (day) Value: 21
  misc_feature: MA Experiment 20000286 PARAMETER Experiment Name: At_Open_Flower_P Parameter: Plant Line Value: WS
  misc_feature: MA Experiment 20000286 PARAMETER Experiment Name: At_Open_Flower_P Parameter: Tissue Value: Half Open vs. Whole Plant
  misc_feature: MA Experiment ID: 20000439 Result: Up-regulated in Transcription
  misc_feature: MA Experiment 20000439 PARAMETER Experiment Name: At_Roots__P Parameter: Age (day) Value: 14 vs. 21
  misc_feature: MA Experiment 20000439 PARAMETER Experiment Name: At_Roots__P Parameter: Organism Value: A. thaliana
  misc_feature: MA Experiment 20000439 PARAMETER Experiment Name: At_Roots__P Parameter: Tissue Value: Roots vs. Whole Plant
  misc_feature: MA Experiment ID: 20000495 Result: Up-regulated in Transcription
  misc_feature: MA Experiment 20000495 PARAMETER Experiment Name: At_Guard_Cells_P Parameter: Harvest Date Value: 8/2/2002
  misc_feature: MA Experiment 20000495 PARAMETER Experiment Name: At_Guard_Cells_P Parameter: Organism Value: A. thaliana
  misc_feature: MA Experiment 20000495 PARAMETER Experiment Name: At_Guard_Cells_P Parameter: Tissue Value: Guard Cells vs. Leaves

SEQ ID NO: 92713 - protein, 422 aa, Arabidopsis thaliana; identical to SEQ ID NO: 28404
  peptide (1)..(422): Ceres Seq. ID no. 12714406
  misc_feature (237)..(398): Pfam Name: Glyceraldehyde 3-phosphate dehydrogenase, Pfam Description: Glyceraldehyde 3-phosphate dehydrogenase,
  misc_feature (1)..(422): Homolog of NCBI NO: 15219406 NR Description: glyceraldehyde-3-phosphate dehydrogenase, protein id: At1g79530.1, supported by cDNA: gi_13194783
  misc_feature (1)..(421): Homolog of NCBI NO: 15219206 NR Description: putative glyceraldehyde-3-phosphate protein id: At1g16300.1, supported by cDNA: 94597. [Arabidopsis
  misc_feature (1)..(421): Homolog of NCBI NO: 21618027 NR Description: putative glyceraldehyde-3-phosphate dehydrogenase
  misc_feature (1)..(421): Homolog of NCBI NO: 27754473 NR Description: putative glyceraldehyde-3-phosphate dehydrogenase
  misc_feature (1)..(421): Homolog of NCBI NO: 25284351 NR Description: hypothetical protein F3O9.10 - Arabidopsis
  misc_feature (1)..(421): Homolog of NCBI NO: 18072805 NR Description: glyceraldehyde-3-phosphate dehydrogenase
  misc_feature (1)..(420): Homolog of NCBI NO: 2129471 NR Description: glyceraldehyde-3-phosphate dehydrogenase
  misc_feature (1)..(420): Homolog of NCBI NO: 2129472 NR Description: glyceraldehyde-3-phosphate dehydrogenase
  misc_feature (60)..(420): Homolog of NCBI NO: 3059140 NR Description: NAD-dependent glyceraldehyde-3-phosphate
  misc_feature (67)..(422): Homolog of NCBI NO: 3059122 NR Description: glyeraldehyde-3-phosphate dehydrogenase [Marsilea

SEQ ID NO: 92714 - protein, 297 aa, Arabidopsis thaliana; identical to SEQ ID NO: 28405
  peptide (1)..(297): Ceres Seq. ID no. 12714407
  misc_feature (112)..(273): Pfam Name: Glyceraldehyde 3-phosphate dehydrogenase, Pfam Description: Glyceraldehyde 3-phosphate dehydrogenase,
  misc_feature (1)..(297): Homolog of NCBI NO: 15219406 NR Description: glyceraldehyde-3-phosphate dehydrogenase, protein id: At1g79530.1, supported by cDNA: gi_13194783
  misc_feature (1)..(296): Homolog of NCBI NO: 15219206 NR Description: putative glyceraldehyde-3-phosphate protein id: At1g16300.1, supported by cDNA: 94597. [Arabidopsis
  misc_feature (1)..(296): Homolog of NCBI NO: 21618027 NR Description: putative glyceraldehyde-3-phosphate dehydrogenase
  misc_feature (1)..(296): Homolog of NCBI NO: 27754473 NR Description: putative glyceraldehyde-3-phosphate dehydrogenase
  misc_feature (1)..(296): Homolog of NCBI NO: 25284351 NR Description: hypothetical protein F3O9.10 - Arabidopsis
  misc_feature (1)..(296): Homolog of NCBI NO: 18072805 NR Description: glyceraldehyde-3-phosphate dehydrogenase
  misc_feature (1)..(295): Homolog of NCBI NO: 2129471 NR Description: glyceraldehyde-3-phosphate dehydrogenase
  misc_feature (1)..(295): Homolog of NCBI NO: 2129472 NR Description: glyceraldehyde-3-phosphate dehydrogenase
  misc_feature (1)..(295): Homolog of NCBI NO: 3059140 NR Description: NAD-dependent glyceraldehyde-3-phosphate
  misc_feature (1)..(297): Homolog of NCBI NO: 3059122 NR Description: glyeraldehyde-3-phosphate dehydrogenase [Marsilea

SEQ ID NO: 92715 - protein, 294 aa, Arabidopsis thaliana; identical to SEQ ID NO: 28406
  peptide (1)..(294): Ceres Seq. ID no. 12714408
  misc_feature (109)..(270): Pfam Name: Glyceraldehyde 3-phosphate dehydrogenase, Pfam Description: Glyceraldehyde 3-phosphate dehydrogenase,
  misc_feature (1)..(294): Homolog of NCBI NO: 15219406 NR Description: glyceraldehyde-3-phosphate dehydrogenase, protein id: At1g79530.1, supported by cDNA: gi_13194783
  misc_feature (1)..(293): Homolog of NCBI NO: 15219206 NR Description: putative glyceraldehyde-3-phosphate protein id: At1g16300.1, supported by cDNA: 94597. [Arabidopsis
  misc_feature (1)..(293): Homolog of NCBI NO: 21618027 NR Description: putative glyceraldehyde-3-phosphate dehydrogenase
  misc_feature (1)..(293): Homolog of NCBI NO: 27754473 NR Description: putative glyceraldehyde-3-phosphate dehydrogenase
  misc_feature (1)..(293): Homolog of NCBI NO: 25284351 NR Description: hypothetical protein F3O9.10 - Arabidopsis
  misc_feature (1)..(293): Homolog of NCBI NO: 18072805 NR Description: glyceraldehyde-3-phosphate dehydrogenase
  misc_feature (1)..(292): Homolog of NCBI NO: 2129471 NR Description: glyceraldehyde-3-phosphate dehydrogenase
  misc_feature (1)..(292): Homolog of NCBI NO: 2129472 NR Description: glyceraldehyde-3-phosphate dehydrogenase
  misc_feature (1)..(292): Homolog of NCBI NO: 3059140 NR Description: NAD-dependent glyceraldehyde-3-phosphate
  misc_feature (1)..(294): Homolog of NCBI NO: 3059122 NR Description: glyeraldehyde-3-phosphate dehydrogenase [Marsilea

SEQ ID NO: 92716 - DNA, 1887 bp, Arabidopsis thaliana; identical to SEQ ID NO: 88960
  misc_feature (1)..(1887): Ceres Seq. ID no. 12714409
  misc_feature: MA Experiment ID: 20001451 Result: Down-regulated in Transcription
  misc_feature: MA Experiment 20001451 PARAMETER Experiment Name: At_Far-red-induction_P Parameter: Age (day) Value: 7
  misc_feature: MA Experiment 20001451 PARAMETER Experiment Name: At_Far-red-induction_P Parameter: Light Value: Far-red vs. White
  misc_feature: MA Experiment 20001451 PARAMETER Experiment Name: At_Far-red-induction_P Parameter: Organism Value: A. thaliana
  misc_feature: MA Experiment 20001451 PARAMETER Experiment Name: At_Far-red-induction_P Parameter: Plant Line Value: Columbia
  misc_feature: MA Experiment 20001451 PARAMETER Experiment Name: At_Far-red-induction_P Parameter: Timepoint (hr) Value: 24
  misc_feature: MA Experiment 20001451 PARAMETER Experiment Name: At_Far-red-induction_P Parameter: Tissue Value: Whole Plant

SEQ ID NO: 92717 - protein, 628 aa, Arabidopsis thaliana; identical to SEQ ID NO: 88961
  peptide (1)..(628): Ceres Seq. ID no. 12714410
  misc_feature (11)..(46): Pfam Name: PPR repeat Pfam Description: PPR repeat
  misc_feature (1)..(493): Homolog of NCBI NO: 15231863 NR Description: putative protein; protein id: At3g53700.1, by cDNA: gi_15982930 [Arabidopsis thaliana]
  misc_feature (1)..(587): Homolog of NCBI NO: 33859440 NR Description: PPR protein [Oryza sativa (indica cultivar-group)]
  misc_feature (1)..(584): Homolog of NCBI NO: 37535708 NR Description: putative membrane-associated protein [Oryza
  misc_feature (1)..(584): Homolog of NCBI NO: 37535672 NR Description: putative chloroplast RNA processing protein
  misc_feature (8)..(410): Homolog of NCBI NO: 15235288 NR Description: membrane-associated salt-inducible-like protein; id: At4g20090.1 [Arabidopsis thaliana] >gi|7485730|pir||T04893
  misc_feature (17)..(493): Homolog of NCBI NO: 15218325 NR Description: hypothetical protein; protein id: At1g09900.1
  misc_feature (8)..(440): Homolog of NCBI NO: 15242446 NR Description: putative protein; protein id: At5g39710.1
  misc_feature (1)..(607): Homolog of NCBI NO: 15227371 NR Description: hypothetical protein; protein id: At2g17140.1
  misc_feature (1)..(428): Homolog of NCBI NO: 15221549 NR Description: PPR-repeat protein; protein id: At1g62670.1
  misc_feature (1)..(503): Homolog of NCBI NO: 30840221 NR Description: fertility restorer [Raphanus sativus]

SEQ ID NO: 92718 - protein, 609 aa, Arabidopsis thaliana; identical to SEQ ID NO: 88962
  peptide (1)..(609): Ceres Seq. ID no. 12714411
  misc_feature (1)..(27): Pfam Name: PPR repeat Pfam Description: PPR repeat
  misc_feature (1)..(474): Homolog of NCBI NO: 15231863 NR Description: putative protein; protein id: At3g53700.1, by cDNA: gi_15982930 [Arabidopsis thaliana]
  misc_feature (1)..(568): Homolog of NCBI NO: 33859440 NR Description: PPR protein [Oryza sativa (indica cultivar-group)]
  misc_feature (1)..(565): Homolog of NCBI NO: 37535708 NR Description: putative membrane-associated protein [Oryza
  misc_feature (1)..(565): Homolog of NCBI NO: 37535672 NR Description: putative chloroplast RNA processing protein
  misc_feature (1)..(391): Homolog of NCBI NO: 15235288 NR Description: membrane-associated salt-inducible-like protein; id: At4g20090.1 [Arabidopsis thaliana] >gi|7485730|pir||T04893
  misc_feature (1)..(474): Homolog of NCBI NO: 15218325 NR Description: hypothetical protein; protein id: At1g09900.1
  misc_feature (1)..(421): Homolog of NCBI NO: 15242446 NR Description: putative protein; protein id: At5g39710.1
  misc_feature (1)..(588): Homolog of NCBI NO: 15227371 NR Description: hypothetical protein; protein id: At2g17140.1
  misc_feature (1)..(409): Homolog of NCBI NO: 15221549 NR Description: PPR-repeat protein; protein id: At1g62670.1
  misc_feature (1)..(484): Homolog of NCBI NO: 30840221 NR Description: fertility restorer [Raphanus sativus]

SEQ ID NO: 92719 - protein, 608 aa, Arabidopsis thaliana; identical to SEQ ID NO: 88963
  peptide (1)..(608): Ceres Seq. ID no. 12714412
  misc_feature (1)..(26): Pfam Name: PPR repeat Pfam Description: PPR repeat
  misc_feature (1)..(473): Homolog of NCBI NO: 15231863 NR Description: putative protein; protein id: At3g53700.1, by cDNA: gi_15982930 [Arabidopsis thaliana]
  misc_feature (1)..(567): Homolog of NCBI NO: 33859440 NR Description: PPR protein [Oryza sativa (indica cultivar-group)]
  misc_feature (1)..(564): Homolog of NCBI NO: 37535708 NR Description: putative membrane-associated protein [Oryza
  misc_feature (1)..(564): Homolog of NCBI NO: 37535672 NR Description: putative chloroplast RNA processing protein
  misc_feature (1)..(390): Homolog of NCBI NO: 15235288 NR Description: membrane-associated salt-inducible-like protein; id: At4g20090.1 [Arabidopsis thaliana] >gi|7485730|pir||T04893
  misc_feature (1)..(473): Homolog of NCBI NO: 15218325 NR Description: hypothetical protein; protein id: At1g09900.1
  misc_feature (1)..(420): Homolog of NCBI NO: 15242446 NR Description: putative protein; protein id: At5g39710.1
  misc_feature (1)..(587): Homolog of NCBI NO: 15227371 NR Description: hypothetical protein; protein id: At2g17140.1
  misc_feature (1)..(408): Homolog of NCBI NO: 15221549 NR Description: PPR-repeat protein; protein id: At1g62670.1
  misc_feature (1)..(483): Homolog of NCBI NO: 30840221 NR Description: fertility restorer [Raphanus sativus]

SEQ ID NO: 92720 - DNA, 4464 bp, Arabidopsis thaliana; identical to SEQ ID NO: 88964
  misc_feature (1)..(4464): Ceres Seq. ID no. 12714439
  misc_feature: MA Experiment ID: 20000347 Result: Up-regulated in Transcription
  misc_feature: MA Experiment 20000347 PARAMETER Experiment Name: At_2mM_SA_Sub_P Parameter: Age (day) Value: 14
  misc_feature: MA Experiment 20000347 PARAMETER Experiment Name: At_2mM_SA_Sub_P Parameter: Organism Value: A. thaliana
  misc_feature: MA Experiment 20000347 PARAMETER Experiment Name: At_2mM_SA_Sub_P Parameter: Plant Line Value: WS
  misc_feature: MA Experiment 20000347 PARAMETER Experiment Name: At_2mM_SA_Sub_P Parameter: Timepoint (hr) Value: 6
  misc_feature: MA Experiment 20000347 PARAMETER Experiment Name: At_2mM_SA_Sub_P Parameter: Tissue Value: Aerial
  misc_feature: MA Experiment 20000347 PARAMETER Experiment Name: At_2mM_SA_Sub_P Parameter: Treatment Value: 2mM SA vs. No Treatment
  misc_feature: MA Experiment ID: 20000355 Result: Down-regulated in Transcription
  misc_feature: MA Experiment 20000355 PARAMETER Experiment Name: At_Siliques_Sub_P Parameter: Age (day) Value: 21
  misc_feature: MA Experiment 20000355 PARAMETER Experiment Name: At_Siliques_Sub_P Parameter: Organism Value: A. thaliana
  misc_feature: MA Experiment 20000355 PARAMETER Experiment Name: At_Siliques_Sub_P Parameter: Plant Line Value: WS
  misc_feature: MA Experiment 20000355 PARAMETER Experiment Name: At_Siliques_Sub_P Parameter: Tissue Value: Less Than 5mm Siliques vs. Whole Plant

SEQ ID NO: 92721 - protein, 1487 aa, Arabidopsis thaliana; identical to SEQ ID NO: 88965
  peptide (1)..(1487): Ceres Seq. ID no. 12714440
  misc_feature (1086)..(1487): Homolog of NCBI NO: 30699443 NR Description: WAK-like kinase (WLK) [Arabidopsis thaliana]
  misc_feature (846)..(1060): Homolog of NCBI NO: 30699443 NR Description: WAK-like kinase (WLK) [Arabidopsis thaliana]
  misc_feature (760)..(1042): Homolog of NCBI NO: 25518691 NR Description: hypothetical protein T24D18.19 - Arabidopsis >gi|6587815|gb|AAF18506.1|AC010924_19 Similar to gb|U44028 thaliana transcription factor CKC and contains a PF|00069
  misc_feature (1086)..(1362): Homolog of NCBI NO: 25518691 NR Description: hypothetical protein T24D18.19 - Arabidopsis >gi|6587815|gb|AAF18506.1|AC010924_19 Similar to gb|U44028 thaliana transcription factor CKC and contains a PF|00069
  misc_feature (8)..(153): Homolog of NCBI NO: 25518691 NR Description: hypothetical protein T24D18.19 - Arabidopsis >gi|6587815|gb|AAF18506.1|AC010924_19 Similar to gb|U44028 thaliana transcription factor CKC and contains a PF|00069
  misc_feature (361)..(432): Homolog of NCBI NO: 25518691 NR Description: hypothetical protein T24D18.19 - Arabidopsis >gi|6587815|gb|AAF18506.1|AC010924_19 Similar to gb|U44028 thaliana transcription factor CKC and contains a PF|00069
  misc_feature (190)..(258): Homolog of NCBI NO: 25518691 NR Description: hypothetical protein T24D18.19 - Arabidopsis >gi|6587815|gb|AAF18506.1|AC010924_19 Similar to gb|U44028 thaliana transcription factor CKC and contains a PF|00069
  misc_feature (1)..(759): Homolog of NCBI NO: 15222427 NR Description: WAK-like kinase (WLK); protein id: At1g69730.1
  misc_feature (760)..(873): Homolog of NCBI NO: 30699443 NR Description: WAK-like kinase (WLK) [Arabidopsis thaliana]
  misc_feature (1082)..(1487): Homolog of NCBI NO: 15219134 NR Description: WAK-like kinase (WLK); protein id: At1g16130.1

SEQ ID NO: 92722 - protein, 1409 aa, Arabidopsis thaliana; identical to SEQ ID NO: 88966
  peptide (1)..(1409): Ceres Seq. ID no. 12714441
  misc_feature (1008)..(1409): Homolog of NCBI NO: 30699443 NR Description: WAK-like kinase (WLK) [Arabidopsis thaliana]
  misc_feature (768)..(982): Homolog of NCBI NO: 30699443 NR Description: WAK-like kinase (WLK) [Arabidopsis thaliana]
  misc_feature (682)..(964): Homolog of NCBI NO: 25518691 NR Description: hypothetical protein T24D18.19 - Arabidopsis >gi|6587815|gb|AAF18506.1|AC010924_19 Similar to gb|U44028 thaliana transcription factor CKC and contains a PF|00069
  misc_feature (1008)..(1284): Homolog of NCBI NO: 25518691 NR Description: hypothetical protein T24D18.19 - Arabidopsis >gi|6587815|gb|AAF18506.1|AC010924_19 Similar to gb|U44028 thaliana transcription factor CKC and contains a PF|00069
  misc_feature (1)..(75): Homolog of NCBI NO: 25518691 NR Description: hypothetical protein T24D18.19 - Arabidopsis >gi|6587815|gb|AAF18506.1|AC010924_19 Similar to gb|U44028 thaliana transcription factor CKC and contains a PF|00069
  misc_feature (283)..(354): Homolog of NCBI NO: 25518691 NR Description: hypothetical protein T24D18.19 - Arabidopsis >gi|6587815|gb|AAF18506.1|AC010924_19 Similar to gb|U44028 thaliana transcription factor CKC and contains a PF|00069
  misc_feature (112)..(180): Homolog of NCBI NO: 25518691 NR Description: hypothetical protein T24D18.19 - Arabidopsis >gi|6587815|gb|AAF18506.1|AC010924_19 Similar to gb|U44028 thaliana transcription factor CKC and contains a PF|00069
  misc_feature (1)..(681): Homolog of NCBI NO: 15222427 NR Description: WAK-like kinase (WLK); protein id: At1g69730.1
  misc_feature (682)..(795): Homolog of NCBI NO: 30699443 NR Description: WAK-like kinase (WLK) [Arabidopsis thaliana]
  misc_feature (1004)..(1409): Homolog of NCBI NO: 15219134 NR Description: WAK-like kinase (WLK); protein id: At1g16130.1

SEQ ID NO: 92723 - protein, 1373 aa, Arabidopsis thaliana; identical to SEQ ID NO: 88967
  peptide (1)..(1373): Ceres Seq. ID no. 12714442
  misc_feature (972)..(1373): Homolog of NCBI NO: 30699443 NR Description: WAK-like kinase (WLK) [Arabidopsis thaliana]
  misc_feature (732)..(946): Homolog of NCBI NO: 30699443 NR Description: WAK-like kinase (WLK) [Arabidopsis thaliana]
  misc_feature (646)..(928): Homolog of NCBI NO: 25518691 NR Description: hypothetical protein T24D18.19 - Arabidopsis >gi|6587815|gb|AAF18506.1|AC010924_19 Similar to gb|U44028 thaliana transcription factor CKC and contains a PF|00069
  misc_feature (972)..(1248): Homolog of NCBI NO: 25518691 NR Description: hypothetical protein T24D18.19 - Arabidopsis >gi|6587815|gb|AAF18506.1|AC010924_19 Similar to gb|U44028 thaliana transcription factor CKC and contains a PF|00069
  misc_feature (1)..(39): Homolog of NCBI NO: 25518691 NR Description: hypothetical protein T24D18.19 - Arabidopsis >gi|6587815|gb|AAF18506.1|AC010924_19 Similar to gb|U44028 thaliana transcription factor CKC and contains a PF|00069
  misc_feature (247)..(318): Homolog of NCBI NO: 25518691 NR Description: hypothetical protein T24D18.19 - Arabidopsis >gi|6587815|gb|AAF18506.1|AC010924_19 Similar to gb|U44028 thaliana transcription factor CKC and contains a PF|00069
  misc_feature (76)..(144): Homolog of NCBI NO: 25518691 NR Description: hypothetical protein T24D18.19 - Arabidopsis >gi|6587815|gb|AAF18506.1|AC010924_19 Similar to gb|U44028 thaliana transcription factor CKC and contains a PF|00069
  misc_feature (1)..(645): Homolog of NCBI NO: 15222427 NR Description: WAK-like kinase (WLK); protein id: At1g69730.1
  misc_feature (646)..(759): Homolog of NCBI NO: 30699443 NR Description: WAK-like kinase (WLK) [Arabidopsis thaliana]
  misc_feature (968)..(1373): Homolog of NCBI NO: 15219134 NR Description: WAK-like kinase (WLK); protein id: At1g16130.1

SEQ ID NO: 92724 - DNA, 933 bp, Arabidopsis thaliana; identical to SEQ ID NO: 88968
  misc_feature (1)..(933): Ceres Seq. ID no. 12714443
  misc_feature: MA Experiment ID: 20000173 Result: Down-regulated in Transcription
  misc_feature: MA Experiment 20000173 PARAMETER Experiment Name: At_42deg_Heat_P Parameter: Age (day) Value: 14
  misc_feature: MA Experiment 20000173 PARAMETER Experiment Name: At_42deg_Heat_P Parameter: Organism Value: A. thaliana
  misc_feature: MA Experiment 20000173 PARAMETER Experiment Name: At_42deg_Heat_P Parameter: Plant Line Value: WS
  misc_feature: MA Experiment 20000173 PARAMETER Experiment Name: At_42deg_Heat_P Parameter: Temperature (deg C) Value: 42 vs. 22
  misc_feature: MA Experiment 20000173 PARAMETER Experiment Name: At_42deg_Heat_P Parameter: Timepoint (hr) Value: 6
  misc_feature: MA Experiment 20000173 PARAMETER Experiment Name: At_42deg_Heat_P Parameter: Tissue Value: Aerial
  misc_feature: MA Experiment ID: 20000214 Result: Down-regulated in Transcription
  misc_feature: MA Experiment 20000214 PARAMETER Experiment Name: At_4deg_Cold_P Parameter: Timepoint (hr) Value: 6
  misc_feature: MA Experiment ID: 20000227 Result: Down-regulated in Transcription
  misc_feature: MA Experiment 20000227 PARAMETER Experiment Name: At_Root-Tips-vs-Tops_P Parameter: Tissue Value: Root Tips vs. Root Tops
  misc_feature: MA Experiment ID: 20000234 Result: Down-regulated in Transcription
  misc_feature: MA Experiment 20000234 PARAMETER Experiment Name: At_Siliques_P Parameter: Age (day) Value: 21
  misc_feature: MA Experiment 20000234 PARAMETER Experiment Name: At_Siliques_P Parameter: Organism Value: A. thaliana
  misc_feature: MA Experiment 20000234 PARAMETER Experiment Name: At_Siliques_P Parameter: Plant Line Value: WS
  misc_feature: MA Experiment 20000234 PARAMETER Experiment Name: At_Siliques_P Parameter: Tissue Value: Less Than 5mm Siliques vs. Whole Plant
  misc_feature: MA Experiment ID: 20000264 Result: Down-regulated in Transcription
  misc_feature: MA Experiment 20000264 PARAMETER Experiment Name: At_Open_Flower_P Parameter: Age (day) Value: 21
  misc_feature: MA Experiment 20000264 PARAMETER Experiment Name: At_Open_Flower_P Parameter: Plant Line Value: WS
  misc_feature: MA Experiment 20000264 PARAMETER Experiment Name: At_Open_Flower_P Parameter: Tissue Value: Open Flower vs. Whole Plant
  misc_feature: MA Experiment ID: 20000439 Result: Down-regulated in Transcription
  misc_feature: MA Experiment 20000439 PARAMETER Experiment Name: At_Roots__P Parameter: Age (day) Value: 14 vs. 21
  misc_feature: MA Experiment 20000439 PARAMETER Experiment Name: At_Roots__P Parameter: Organism Value: A. thaliana
  misc_feature: MA Experiment 20000439 PARAMETER Experiment Name: At_Roots__P Parameter: Tissue Value: Roots vs. Whole Plant
  misc_feature: MA Experiment ID: 20000441 Result: Up-regulated in Transcription
  misc_feature: MA Experiment 20000441 PARAMETER Experiment Name: At_1uM_BR-BRZ__P Parameter: Tissue Value: Shoot Apices
  misc_feature: MA Experiment 20000441 PARAMETER Experiment Name: At_1uM_BR-BRZ__P Parameter: Treatment Value: 1uM BR vs. No Treatment
  misc_feature: MA Experiment ID: 20000576 Result: Down-regulated in Transcription
  misc_feature: MA Experiment 20000576 PARAMETER Experiment Name: At_100uM_ABA_Mutants__P Parameter: Organism Value: A. thaliana
  misc_feature: MA Experiment 20000576 PARAMETER Experiment Name: At_100uM_ABA_Mutants__P Parameter: Plant Line Value: CS23
  misc_feature: MA Experiment 20000576 PARAMETER Experiment Name: At_100uM_ABA_Mutants__P Parameter: Timepoint (hr) Value: 6
  misc_feature: MA Experiment 20000576 PARAMETER Experiment Name: At_100uM_ABA_Mutants__P Parameter: Tissue Value: Whole Plant
  misc_feature: MA Experiment 20000576 PARAMETER Experiment Name: At_100uM_ABA_Mutants__P Parameter: Treatment Value: 1uM ABA vs. No Treatment
  misc_feature: MA Experiment ID: 20000606 Result: Up-regulated in Transcription
  misc_feature: MA Experiment 20000606 PARAMETER Experiment Name: At_CS8548_Mutant_P Parameter: Age (day) Value: 14
  misc_feature: MA Experiment 20000606 PARAMETER Experiment Name: At_CS8548_Mutant_P Parameter: Plant Line Value: CS8548 vs. wt
  misc_feature: MA Experiment 20000606 PARAMETER Experiment Name: At_CS8548_Mutant_P Parameter: Tissue Value: Whole Plant
  misc_feature: MA Experiment ID: 20000794 Result: Down-regulated in Transcription
  misc_feature: MA Experiment 20000794 PARAMETER Experiment Name: At_Petals_P Parameter: Age (day) Value: 23-25 days
  misc_feature: MA Experiment 20000794 PARAMETER Experiment Name: At_Petals_P Parameter: Plant Line Value: WS
  misc_feature: MA Experiment 20000794 PARAMETER Experiment Name: At_Petals_P Parameter: Tissue Value: Petals vs. Whole plant
  misc_feature: MA Experiment ID: 20001248 Result: Up-regulated in Transcription
  misc_feature: MA Experiment 20001248 PARAMETER Experiment Name: At_Far-red-induction_P Parameter: Age (day) Value: 7
  misc_feature: MA Experiment 20001248 PARAMETER Experiment Name: At_Far-red-induction_P Parameter: Light Value: Far-red vs. White
  misc_feature: MA Experiment 20001248 PARAMETER Experiment Name: At_Far-red-induction_P Parameter: Organism Value: A. thaliana
  misc_feature: MA Experiment 20001248 PARAMETER Experiment Name: At_Far-red-induction_P Parameter: Plant Line Value: Columbia
  misc_feature: MA Experiment 20001248 PARAMETER Experiment Name: At_Far-red-induction_P Parameter: Timepoint (hr) Value: 4
  misc_feature: MA Experiment 20001248 PARAMETER Experiment Name: At_Far-red-induction_P Parameter: Tissue Value: Whole Plant
  misc_feature: MA Experiment ID: 20001450 Result: Up-regulated in Transcription
  misc_feature: MA Experiment 20001450 PARAMETER Experiment Name: At_Far-red-induction_P Parameter: Age (day) Value: 7
  misc_feature: MA Experiment 20001450 PARAMETER Experiment Name: At_Far-red-induction_P Parameter: Light Value: Far-red vs. White
  misc_feature: MA Experiment 20001450 PARAMETER Experiment Name: At_Far-red-induction_P Parameter: Organism Value: A. thaliana
  misc_feature: MA Experiment 20001450 PARAMETER Experiment Name: At_Far-red-induction_P Parameter: Plant Line Value: Columbia
  misc_feature: MA Experiment 20001450 PARAMETER Experiment Name: At_Far-red-induction_P Parameter: Timepoint (hr) Value: 8
  misc_feature: MA Experiment 20001450 PARAMETER Experiment Name: At_Far-red-induction_P Parameter: Tissue Value: Whole Plant
  misc_feature: MA Experiment ID: 20001451 Result: Up-regulated in Transcription
  misc_feature: MA Experiment 20001451 PARAMETER Experiment Name: At_Far-red-induction_P Parameter: Age (day) Value: 7
  misc_feature: MA Experiment 20001451 PARAMETER Experiment Name: At_Far-red-induction_P Parameter: Light Value: Far-red vs. White
  misc_feature: MA Experiment 20001451 PARAMETER Experiment Name: At_Far-red-induction_P Parameter: Organism Value: A. thaliana
  misc_feature: MA Experiment 20001451 PARAMETER Experiment Name: At_Far-red-induction_P Parameter: Plant Line Value: Columbia
  misc_feature: MA Experiment 20001451 PARAMETER Experiment Name: At_Far-red-induction_P Parameter: Timepoint (hr) Value: 24
  misc_feature: MA Experiment 20001451 PARAMETER Experiment Name: At_Far-red-induction_P Parameter: Tissue Value: Whole Plant
  misc_feature: MA Experiment ID: 20001554 Result: Down-regulated in Transcription
  misc_feature: MA Experiment 20001554 PARAMETER Experiment Name: At_Drought_Soil_Dry_P Parameter: Age (day) Value: 21
  misc_feature: MA Experiment 20001554 PARAMETER Experiment Name: At_Drought_Soil_Dry_P Parameter: Organism Value: A. thaliana
  misc_feature: MA Experiment 20001554 PARAMETER Experiment Name: At_Drought_Soil_Dry_P Parameter: Plant Line Value: WS
  misc_feature: MA Experiment 20001554 PARAMETER Experiment Name: At_Drought_Soil_Dry_P Parameter: Post Timepoint (hr) Value: None
  misc_feature: MA Experiment 20001554 PARAMETER Experiment Name: At_Drought_Soil_Dry_P Parameter: Post-Treatment Value: None
  misc_feature: MA Experiment 20001554 PARAMETER Experiment Name: At_Drought_Soil_Dry_P Parameter: Timepoint (day) Value: 7
  misc_feature: MA Experiment 20001554 PARAMETER Experiment Name: At_Drought_Soil_Dry_P Parameter: Treatment Value: Drought vs. No Drought
  misc_feature: MA Experiment ID: 20001555 Result: Down-regulated in Transcription
  misc_feature: MA Experiment 20001555 PARAMETER Experiment Name: At_Drought_Soil_Dry_P Parameter: Age (day) Value: 24
  misc_feature: MA Experiment 20001555 PARAMETER Experiment Name: At_Drought_Soil_Dry_P Parameter: Organism Value: A. thaliana
  misc_feature: MA Experiment 20001555 PARAMETER Experiment Name: At_Drought_Soil_Dry_P Parameter: Plant Line Value: WS
  misc_feature: MA Experiment 20001555 PARAMETER Experiment Name: At_Drought_Soil_Dry_P Parameter: Post Timepoint (hr) Value: None
  misc_feature: MA Experiment 20001555 PARAMETER Experiment Name: At_Drought_Soil_Dry_P Parameter: Post-Treatment Value: None
  misc_feature: MA Experiment 20001555 PARAMETER Experiment Name: At_Drought_Soil_Dry_P Parameter: Timepoint (day) Value: 10
  misc_feature: MA Experiment 20001555 PARAMETER Experiment Name: At_Drought_Soil_Dry_P Parameter: Treatment Value: Drought vs. No Drought
  misc_feature: MA Experiment ID: 20001556 Result: Down-regulated in Transcription
  misc_feature: MA Experiment 20001556 PARAMETER Experiment Name: At_Drought_Soil_Dry_P Parameter: Age (day) Value: 26
  misc_feature: MA Experiment 20001556 PARAMETER Experiment Name: At_Drought_Soil_Dry_P Parameter: Organism Value: A. thaliana
  misc_feature: MA Experiment 20001556 PARAMETER Experiment Name: At_Drought_Soil_Dry_P Parameter: Plant Line Value: WS
  misc_feature: MA Experiment 20001556 PARAMETER Experiment Name: At_Drought_Soil_Dry_P Parameter: Post Timepoint (hr) Value: None
  misc_feature: MA Experiment 20001556 PARAMETER Experiment Name: At_Drought_Soil_Dry_P Parameter: Post-Treatment Value: None
  misc_feature: MA Experiment 20001556 PARAMETER Experiment Name: At_Drought_Soil_Dry_P Parameter: Timepoint (day) Value: 12
  misc_feature: MA Experiment 20001556 PARAMETER Experiment Name: At_Drought_Soil_Dry_P Parameter: Treatment Value: Drought vs. No Drought
  misc_feature: MA Experiment ID: 20001557 Result: Down-regulated in Transcription
  misc_feature: MA Experiment 20001557 PARAMETER Experiment Name: At_Drought_Soil_Dry_P Parameter: Age (day) Value: 27
  misc_feature: MA Experiment 20001557 PARAMETER Experiment Name: At_Drought_Soil_Dry_P Parameter: Organism Value: A. thaliana
  misc_feature: MA Experiment 20001557 PARAMETER Experiment Name: At_Drought_Soil_Dry_P Parameter: Plant Line Value: WS
  misc_feature: MA Experiment 20001557 PARAMETER Experiment Name: At_Drought_Soil_Dry_P Parameter: Post Timepoint (hr) Value: 3
  misc_feature: MA Experiment 20001557 PARAMETER Experiment Name: At_Drought_Soil_Dry_P Parameter: Post-Treatment Value: Re-Water vs. No Drought
  misc_feature: MA Experiment 20001557 PARAMETER Experiment Name: At_Drought_Soil_Dry_P Parameter: Timepoint (day) Value: 13
  misc_feature: MA Experiment 20001557 PARAMETER Experiment Name: At_Drought_Soil_Dry_P Parameter: Treatment Value: Drought vs. No Drought
  misc_feature: MA Experiment ID: 20001558 Result: Down-regulated in Transcription
  misc_feature: MA Experiment 20001558 PARAMETER Experiment Name: At_Drought_Soil_Dry_P Parameter: Age (day) Value: 27
  misc_feature: MA Experiment 20001558 PARAMETER Experiment Name: At_Drought_Soil_Dry_P Parameter: Organism Value: A. thaliana
  misc_feature: MA Experiment 20001558 PARAMETER Experiment Name: At_Drought_Soil_Dry_P Parameter: Plant Line Value: WS
  misc_feature: MA Experiment 20001558 PARAMETER Experiment Name: At_Drought_Soil_Dry_P Parameter: Post Timepoint (hr) Value: 6
  misc_feature: MA Experiment 20001558 PARAMETER Experiment Name: At_Drought_Soil_Dry_P Parameter: Post-Treatment Value: Re-Water vs. No Drought
  misc_feature: MA Experiment 20001558 PARAMETER Experiment Name: At_Drought_Soil_Dry_P Parameter: Timepoint (day) Value: 13
  misc_feature: MA Experiment 20001558 PARAMETER Experiment Name: At_Drought_Soil_Dry_P Parameter: Treatment Value: Drought vs. No Drought
  misc_feature: MA Experiment ID: 20001904 Result: Down-regulated in Transcription
  misc_feature: MA Experiment 20001904 PARAMETER Experiment Name: At_Drought_Reproduction_P Parameter: Age (day) Value: 37
  misc_feature: MA Experiment 20001904 PARAMETER Experiment Name: At_Drought_Reproduction_P Parameter: Organism Value: A. thaliana
  misc_feature: MA Experiment 20001904 PARAMETER Experiment Name: At_Drought_Reproduction_P Parameter: Plant Line Value: WS
  misc_feature: MA Experiment 20001904 PARAMETER Experiment Name: At_Drought_Reproduction_P Parameter: Timepoint (day) Value: 7
  misc_feature: MA Experiment 20001904 PARAMETER Experiment Name: At_Drought_Reproduction_P Parameter: Tissue Value: Rosettes
  misc_feature: MA Experiment 20001904 PARAMETER Experiment Name: At_Drought_Reproduction_P Parameter: Treatment Value: Drought vs. No Drought
  misc_feature: MA Experiment ID: 20001905 Result: Down-regulated in Transcription
  misc_feature: MA Experiment 20001905 PARAMETER Experiment Name: At_Drought_Reproduction_P Parameter: Age (day) Value: 40
  misc_feature: MA Experiment 20001905 PARAMETER Experiment Name: At_Drought_Reproduction_P Parameter: Organism Value: A. thaliana
  misc_feature: MA Experiment 20001905 PARAMETER Experiment Name: At_Drought_Reproduction_P Parameter: Plant Line Value: WS
  misc_feature: MA Experiment 20001905 PARAMETER Experiment Name: At_Drought_Reproduction_P Parameter: Timepoint (day) Value: 10
  misc_feature: MA Experiment 20001905 PARAMETER Experiment Name: At_Drought_Reproduction_P Parameter: Tissue Value: Rosettes
  misc_feature: MA Experiment 20001905 PARAMETER Experiment Name: At_Drought_Reproduction_P Parameter: Treatment Value: Drought vs. No Drought
  misc_feature: MA Experiment ID: 20001906 Result: Down-regulated in Transcription
  misc_feature: MA Experiment 20001906 PARAMETER Experiment Name: At_Drought_Reproduction_P Parameter: Age (day) Value: 35
  misc_feature: MA Experiment 20001906 PARAMETER Experiment Name: At_Drought_Reproduction_P Parameter: Organism Value: A. thaliana
  misc_feature: MA Experiment 20001906 PARAMETER Experiment Name: At_Drought_Reproduction_P Parameter: Plant Line Value: WS
  misc_feature: MA Experiment 20001906 PARAMETER Experiment Name: At_Drought_Reproduction_P Parameter: Timepoint (day) Value: 5
  misc_feature: MA Experiment 20001906 PARAMETER Experiment Name: At_Drought_Reproduction_P Parameter: Tissue Value: Siliques
  misc_feature: MA Experiment 20001906 PARAMETER Experiment Name: At_Drought_Reproduction_P Parameter: Treatment Value: Drought vs. No Drought

SEQ ID NO: 92725 - protein, 310 aa, Arabidopsis thaliana; identical to SEQ ID NO: 88969
  peptide (1)..(310): Ceres Seq. ID no. 12714444
  misc_feature (50)..(120): Pfam Name: AP2 domain Pfam Description: AP2 domain
  misc_feature (1)..(310): Homolog of NCBI NO: 15219975 NR Description: ovule development protein, putative; protein id:
  misc_feature (1)..(310): Homolog of NCBI NO: 34221733 NR Description: putative AP2 domain transcription factor
  misc_feature (1)..(182): Homolog of NCBI NO: 26449695 NR Description: unknown protein [Arabidopsis thaliana]
  misc_feature (1)..(250): Homolog of NCBI NO: 25518475 NR Description: hypothetical protein T24D18.16 - Arabidopsis >gi|6587812|gb|AAF18503.1|AC010924_16 Similar to gb|U44028 factor CKC from Arabidopsis thaliana and contains two PF|00847
  misc_feature (1)..(250): Homolog of NCBI NO: 18394319 NR Description: ovule development protein, putative; protein id: supported by cDNA: gi_15028184 [Arabidopsis thaliana]
  misc_feature (48)..(260): Homolog of NCBI NO: 28201307 NR Description: putative ovule development protein antitegumenta
  misc_feature (1)..(252): Homolog of NCBI NO: 15223777 NR Description: ovule development protein, putative; protein id:
  misc_feature (1)..(252): Homolog of NCBI NO: 25405447 NR Description: hypothetical protein F11M15.6 [imported] - thaliana >gi|4836931|gb|AAD30633.1|AC006085_6 Hypothetical
  misc_feature (48)..(235): Homolog of NCBI NO: 15237965 NR Description: ovule development protein, putative; protein id: [Arabidopsis thaliana] >gi|11358596|pir||T51580 ovule development
  misc_feature (33)..(213): Homolog of NCBI NO: 20330778 NR Description: Putative ovule development protein antitegumenta

SEQ ID NO: 92726 - protein, 185 aa, Arabidopsis thaliana; identical to SEQ ID NO: 88970
  peptide (1)..(185): Ceres Seq. ID no. 12714445
  misc_feature (1)..(185): Homolog of NCBI NO: 15219975 NR Description: ovule development protein, putative; protein id:
  misc_feature (1)..(185): Homolog of NCBI NO: 34221733 NR Description: putative AP2 domain transcription factor
  misc_feature (1)..(57): Homolog of NCBI NO: 26449695 NR Description: unknown protein [Arabidopsis thaliana]
  misc_feature (1)..(125): Homolog of NCBI NO: 25518475 NR Description: hypothetical protein T24D18.16 - Arabidopsis >gi|6587812|gb|AAF18503.1|AC010924_16 Similar to gb|U44028 factor CKC from Arabidopsis thaliana and contains two PF|00847
  misc_feature (1)..(125): Homolog of NCBI NO: 18394319 NR Description: ovule development protein, putative; protein id: supported by cDNA: gi_15028184 [Arabidopsis thaliana]
  misc_feature (1)..(135): Homolog of NCBI NO: 28201307 NR Description: putative ovule development protein antitegumenta
  misc_feature (1)..(127): Homolog of NCBI NO: 15223777 NR Description: ovule development protein, putative; protein id:
  misc_feature (1)..(127): Homolog of NCBI NO: 25405447 NR Description: hypothetical protein F11M15.6 [imported] - thaliana >gi|4836931|gb|AAD30633.1|AC006085_6 Hypothetical
  misc_feature (1)..(110): Homolog of NCBI NO: 15237965 NR Description: ovule development protein, putative; protein id: [Arabidopsis thaliana] >gi|11358596|pir||T51580 ovule development
  misc_feature (1)..(88): Homolog of NCBI NO: 20330778 NR Description: Putative ovule development protein antitegumenta

SEQ ID NO: 92727 - DNA, 1212 bp, Arabidopsis thaliana; identical to SEQ ID NO: 88971
  misc_feature (1)..(1212): Ceres Seq. ID no. 12714465
  misc_feature: MA Experiment ID: 20000171 Result: Up-regulated in Transcription
  misc_feature: MA Experiment 20000171 PARAMETER Experiment Name: At_42deg_Heat_P Parameter: Age (day) Value: 14
  misc_feature: MA Experiment 20000171 PARAMETER Experiment Name: At_42deg_Heat_P Parameter: Organism Value: A. thaliana
  misc_feature: MA Experiment 20000171 PARAMETER Experiment Name: At_42deg_Heat_P Parameter: Plant Line Value: WS
  misc_feature: MA Experiment 20000171 PARAMETER Experiment Name: At_42deg_Heat_P Parameter: Temperature (deg C) Value: 42 vs. 22
  misc_feature: MA Experiment 20000171 PARAMETER Experiment Name: At_42deg_Heat_P Parameter: Timepoint (hr) Value: 1
  misc_feature: MA Experiment 20000171 PARAMETER Experiment Name: At_42deg_Heat_P Parameter: Tissue Value: Aerial
  misc_feature: MA Experiment ID: 20000234 Result: Up-regulated in Transcription
  misc_feature: MA Experiment 20000234 PARAMETER Experiment Name: At_Siliques_P Parameter: Age (day) Value: 21
  misc_feature: MA Experiment 20000234 PARAMETER Experiment Name: At_Siliques_P Parameter: Organism Value: A. thaliana
  misc_feature: MA Experiment 20000234 PARAMETER Experiment Name: At_Siliques_P Parameter: Plant Line Value: WS
  misc_feature: MA Experiment 20000234 PARAMETER Experiment Name: At_Siliques_P Parameter: Tissue Value: Less Than 5mm Siliques vs. Whole Plant
  misc_feature: MA Experiment ID: 20000235 Result: Up-regulated in Transcription
  misc_feature: MA Experiment 20000235 PARAMETER Experiment Name: At_Siliques_P Parameter: Age (day) Value: 21
  misc_feature: MA Experiment 20000235 PARAMETER Experiment Name: At_Siliques_P Parameter: Organism Value: A. thaliana
  misc_feature: MA Experiment 20000235 PARAMETER Experiment Name: At_Siliques_P Parameter: Plant Line Value: WS
  misc_feature: MA Experiment 20000235 PARAMETER Experiment Name: At_Siliques_P Parameter: Tissue Value: 5-10mm Siliques vs. Whole Plant
  misc_feature: MA Experiment ID: 20000264 Result: Up-regulated in Transcription
  misc_feature: MA Experiment 20000264 PARAMETER Experiment Name: At_Open_Flower_P Parameter: Age (day) Value: 21
  misc_feature: MA Experiment 20000264 PARAMETER Experiment Name: At_Open_Flower_P Parameter: Plant Line Value: WS
  misc_feature: MA Experiment 20000264 PARAMETER Experiment Name: At_Open_Flower_P Parameter: Tissue Value: Open Flower vs. Whole Plant
  misc_feature: MA Experiment ID: 20000265 Result: Up-regulated in Transcription
  misc_feature: MA Experiment 20000265 PARAMETER Experiment Name: At_Open_Flower_P Parameter: Age (day) Value: 21
  misc_feature: MA Experiment 20000265 PARAMETER Experiment Name: At_Open_Flower_P Parameter: Plant Line Value: WS
  misc_feature: MA Experiment 20000265 PARAMETER Experiment Name: At_Open_Flower_P Parameter: Tissue Value: Closed Flower vs. Whole Plant
  misc_feature: MA Experiment ID: 20000286 Result: Up-regulated in Transcription
  misc_feature: MA Experiment 20000286 PARAMETER Experiment Name: At_Open_Flower_P Parameter: Age (day) Value: 21
  misc_feature: MA Experiment 20000286 PARAMETER Experiment Name: At_Open_Flower_P Parameter: Plant Line Value: WS
  misc_feature: MA Experiment 20000286 PARAMETER Experiment Name: At_Open_Flower_P Parameter: Tissue Value: Half Open vs. Whole Plant
  misc_feature: MA Experiment ID: 20000495 Result: Up-regulated in Transcription
  misc_feature: MA Experiment 20000495 PARAMETER Experiment Name: At_Guard_Cells_P Parameter: Harvest Date Value: 8/2/2002
  misc_feature: MA Experiment 20000495 PARAMETER Experiment Name: At_Guard_Cells_P Parameter: Organism Value: A. thaliana
  misc_feature: MA Experiment 20000495 PARAMETER Experiment Name: At_Guard_Cells_P Parameter: Tissue Value: Guard Cells vs. Leaves
  misc_feature: MA Experiment ID: 20001560 Result: Up-regulated in Transcription
  misc_feature: MA Experiment 20001560 PARAMETER Experiment Name: At_Drought_Soil_Dry_P Parameter: Age (day) Value: 28
  misc_feature: MA Experiment 20001560 PARAMETER Experiment Name: At_Drought_Soil_Dry_P Parameter: Organism Value: A. thaliana
  misc_feature: MA Experiment 20001560 PARAMETER Experiment Name: At_Drought_Soil_Dry_P Parameter: Plant Line Value: WS
  misc_feature: MA Experiment 20001560 PARAMETER Experiment Name: At_Drought_Soil_Dry_P Parameter: Post Timepoint (hr) Value: None
  misc_feature: MA Experiment 20001560 PARAMETER Experiment Name: At_Drought_Soil_Dry_P Parameter: Post-Treatment Value: None
  misc_feature: MA Experiment 20001560 PARAMETER Experiment Name: At_Drought_Soil_Dry_P Parameter: Timepoint (day) Value: 14
  misc_feature: MA Experiment 20001560 PARAMETER Experiment Name: At_Drought_Soil_Dry_P Parameter: Treatment Value: Drought vs. No Drought

SEQ ID NO: 92728 - protein, 403 aa, Arabidopsis thaliana; identical to SEQ ID NO: 88972
  peptide (1)..(403): Ceres Seq. ID no. 12714466
  misc_feature (3)..(398): Pfam Name: Sugar (and other) transporter Pfam Description: Sugar (and other) transporter
  misc_feature (3)..(403): Homolog of NCBI NO: 25308946 NR Description: probable sugar transporter, 77409-81599 - Arabidopsis thaliana >gi|12324590|gb|AAG52251.1|AC011717_19
  misc_feature (3)..(403): Homolog of NCBI NO: 30699453 NR Description: hexose transporter, putative [Arabidopsis >gi|30699455|ref|NP_178100.3| hexose transporter, putative
  misc_feature (3)..(403): Homolog of NCBI NO: 7715596 NR Description: F20B17.24 [Arabidopsis thaliana]
  misc_feature (41)..(403): Homolog of NCBI NO: 19347894 NR Description: putative hexose transporter protein [Arabidopsis
  misc_feature (3)..(399): Homolog of NCBI NO: 27261731 NR Description: sugar transporter [Citrus unshiu]
  misc_feature (3)..(400): Homolog of NCBI NO: 15220399 NR Description: integral membrane protein, putative; protein id:
  misc_feature (3)..(204): Homolog of NCBI NO: 30793849 NR Description: putative hexose transporter protein [Arabidopsis >gi|30794114|gb|AAP40499.1| putative hexose transporter protein
  misc_feature (3)..(398): Homolog of NCBI NO: 8347246 NR Description: hexose transporter [Solanum tuberosum]
  misc_feature (3)..(398): Homolog of NCBI NO: 8347248 NR Description: hexose transporter [Zea mays]
  misc_feature (3)..(400): Homolog of NCBI NO: 18417892 NR Description: sugar transporter-like protein; protein id: supported by cDNA: gi_16648752, supported by cDNA: gi_20259505 thaliana] >gi|16648753|gb|AAL25568.1| AT5g16150/T21H19_70

SEQ ID NO: 92729 - protein, 363 aa, Arabidopsis thaliana; identical to SEQ ID NO: 88973
  peptide (1)..(363): Ceres Seq. ID no. 12714467
  misc_feature (1)..(358): Pfam Name: Sugar (and other) transporter Pfam Description: Sugar (and other) transporter
  misc_feature (1)..(363): Homolog of NCBI NO: 25308946 NR Description: probable sugar transporter, 77409-81599 - Arabidopsis thaliana >gi|12324590|gb|AAG52251.1|AC011717_19
  misc_feature (1)..(363): Homolog of NCBI NO: 30699453 NR Description: hexose transporter, putative [Arabidopsis >gi|30699455|ref|NP_178100.3| hexose transporter, putative
  misc_feature (1)..(363): Homolog of NCBI NO: 7715596 NR Description: F20B17.24 [Arabidopsis thaliana]
  misc_feature (1)..(363): Homolog of NCBI NO: 19347894 NR Description: putative hexose transporter protein [Arabidopsis
  misc_feature (1)..(359): Homolog of NCBI NO: 27261731 NR Description: sugar transporter [Citrus unshiu]
  misc_feature (1)..(360): Homolog of NCBI NO: 15220399 NR Description: integral membrane protein, putative; protein id:
  misc_feature (1)..(164): Homolog of NCBI NO: 30793849 NR Description: putative hexose transporter protein [Arabidopsis >gi|30794114|gb|AAP40499.1| putative hexose transporter protein
  misc_feature (1)..(358): Homolog of NCBI NO: 8347246 NR Description: hexose transporter [Solanum tuberosum]
  misc_feature (1)..(358): Homolog of NCBI NO: 8347248 NR Description: hexose transporter [Zea mays]
  misc_feature (1)..(360): Homolog of NCBI NO: 18417892 NR Description: sugar transporter-like protein; protein id: supported by cDNA: gi_16648752, supported by cDNA: gi_20259505 thaliana] >gi|16648753|gb|AAL25568.1| AT5g16150/T21H19_70

SEQ ID NO: 92730 - protein, 349 aa, Arabidopsis thaliana; identical to SEQ ID NO: 88974
  peptide (1)..(349): Ceres Seq. ID no. 12714468
  misc_feature (1)..(344): Pfam Name: Sugar (and other) transporter Pfam Description: Sugar (and other) transporter
  misc_feature (1)..(349): Homolog of NCBI NO: 25308946 NR Description: probable sugar transporter, 77409-81599 - Arabidopsis thaliana >gi|12324590|gb|AAG52251.1|AC011717_19
  misc_feature (1)..(349): Homolog of NCBI NO: 30699453 NR Description: hexose transporter, putative [Arabidopsis >gi|30699455|ref|NP_178100.3| hexose transporter, putative
  misc_feature (1)..(349): Homolog of NCBI NO: 7715596 NR Description: F20B17.24 [Arabidopsis thaliana]
  misc_feature (1)..(349): Homolog of NCBI NO: 19347894 NR Description: putative hexose transporter protein [Arabidopsis
  misc_feature (1)..(345): Homolog of NCBI NO: 27261731 NR Description: sugar transporter [Citrus unshiu]
  misc_feature (1)..(346): Homolog of NCBI NO: 15220399 NR Description: integral membrane protein, putative; protein id:
  misc_feature (1)..(150): Homolog of NCBI NO: 30793849 NR Description: putative hexose transporter protein [Arabidopsis >gi|30794114|gb|AAP40499.1| putative hexose transporter protein
  misc_feature (1)..(344): Homolog of NCBI NO: 8347246 NR Description: hexose transporter [Solanum tuberosum]
  misc_feature (1)..(344): Homolog of NCBI NO: 8347248 NR Description: hexose transporter [Zea mays]
  misc_feature (1)..(346): Homolog of NCBI NO: 18417892 NR Description: sugar transporter-like protein; protein id: supported by cDNA: gi_16648752, supported by cDNA: gi_20259505 thaliana] >gi|16648753|gb|AAL25568.1| AT5g16150/T21H19_70

SEQ ID NO: 92731 - DNA, 2496 bp, Arabidopsis thaliana; identical to SEQ ID NO: 88975
  misc_feature (1)..(2496): Ceres Seq. ID no. 12714500
  misc_feature: MA Experiment ID: 20000171 Result: Up-regulated in Transcription
  misc_feature: MA Experiment 20000171 PARAMETER Experiment Name: At_42deg_Heat_P Parameter: Age (day) Value: 14
  misc_feature: MA Experiment 20000171 PARAMETER Experiment Name: At_42deg_Heat_P Parameter: Organism Value: A. thaliana
  misc_feature: MA Experiment 20000171 PARAMETER Experiment Name: At_42deg_Heat_P Parameter: Plant Line Value: WS
  misc_feature: MA Experiment 20000171 PARAMETER Experiment Name: At_42deg_Heat_P Parameter: Temperature (deg C) Value: 42 vs. 22
  misc_feature: MA Experiment 20000171 PARAMETER Experiment Name: At_42deg_Heat_P Parameter: Timepoint (hr) Value: 1
  misc_feature: MA Experiment 20000171 PARAMETER Experiment Name: At_42deg_Heat_P Parameter: Tissue Value: Aerial
  misc_feature: MA Experiment ID: 20000173 Result: Up-regulated in Transcription
  misc_feature: MA Experiment 20000173 PARAMETER Experiment Name: At_42deg_Heat_P Parameter: Age (day) Value: 14
  misc_feature: MA Experiment 20000173 PARAMETER Experiment Name: At_42deg_Heat_P Parameter: Organism Value: A. thaliana
  misc_feature: MA Experiment 20000173 PARAMETER Experiment Name: At_42deg_Heat_P Parameter: Plant Line Value: WS
  misc_feature: MA Experiment 20000173 PARAMETER Experiment Name: At_42deg_Heat_P Parameter: Temperature (deg C) Value: 42 vs. 22
  misc_feature: MA Experiment 20000173 PARAMETER Experiment Name: At_42deg_Heat_P Parameter: Timepoint (hr) Value: 6
  misc_feature: MA Experiment 20000173 PARAMETER Experiment Name: At_42deg_Heat_P Parameter: Tissue Value: Aerial
  misc_feature: MA Experiment ID: 20000495 Result: Down-regulated in Transcription
  misc_feature: MA Experiment 20000495 PARAMETER Experiment Name: At_Guard_Cells_P Parameter: Harvest Date Value: 8/2/2002
  misc_feature: MA Experiment 20000495 PARAMETER Experiment Name: At_Guard_Cells_P Parameter: Organism Value: A. thaliana
  misc_feature: MA Experiment 20000495 PARAMETER Experiment Name: At_Guard_Cells_P Parameter: Tissue Value: Guard Cells vs. Leaves
  misc_feature: MA Experiment ID: 20001451 Result: Down-regulated in Transcription
  misc_feature: MA Experiment 20001451 PARAMETER Experiment Name: At_Far-red-induction_P Parameter: Age (day) Value: 7
  misc_feature: MA Experiment 20001451 PARAMETER Experiment Name: At_Far-red-induction_P Parameter: Light Value: Far-red vs. White
  misc_feature: MA Experiment 20001451 PARAMETER Experiment Name: At_Far-red-induction_P Parameter: Organism Value: A. thaliana
  misc_feature: MA Experiment 20001451 PARAMETER Experiment Name: At_Far-red-induction_P Parameter: Plant Line Value: Columbia
  misc_feature: MA Experiment 20001451 PARAMETER Experiment Name: At_Far-red-induction_P Parameter: Timepoint (hr) Value: 24
  misc_feature: MA Experiment 20001451 PARAMETER Experiment Name: At_Far-red-induction_P Parameter: Tissue Value: Whole Plant
  misc_feature: MA Experiment ID: 20001557 Result: Up-regulated in Transcription
  misc_feature: MA Experiment 20001557 PARAMETER Experiment Name: At_Drought_Soil_Dry_P Parameter: Age (day) Value: 27
  misc_feature: MA Experiment 20001557 PARAMETER Experiment Name: At_Drought_Soil_Dry_P Parameter: Organism Value: A. thaliana
  misc_feature: MA Experiment 20001557 PARAMETER Experiment Name: At_Drought_Soil_Dry_P Parameter: Plant Line Value: WS
  misc_feature: MA Experiment 20001557 PARAMETER Experiment Name: At_Drought_Soil_Dry_P Parameter: Post Timepoint (hr) Value: 3
  misc_feature: MA Experiment 20001557 PARAMETER Experiment Name: At_Drought_Soil_Dry_P Parameter: Post-Treatment Value: Re-Water vs. No Drought
  misc_feature: MA Experiment 20001557 PARAMETER Experiment Name: At_Drought_Soil_Dry_P Parameter: Timepoint (day) Value: 13
  misc_feature: MA Experiment 20001557 PARAMETER Experiment Name: At_Drought_Soil_Dry_P Parameter: Treatment Value: Drought vs. No Drought

SEQ ID NO: 92732 - protein, 831 aa, Arabidopsis thaliana; identical to SEQ ID NO: 78067
  peptide (1)..(831): Ceres Seq. ID no. 12714501
  misc_feature (1)..(831): Homolog of NCBI NO: 39645395 NR Description: Unknown (protein for MGC:76295) [Silurana
  misc_feature (1)..(830): Homolog of NCBI NO: 34856875 NR Description: similar to osmotic stress protein [Rattus
  misc_feature (1)..(825): Homolog of NCBI NO: 29881532 NR Description: Unknown (protein for MGC:55506) [Danio rerio]
  misc_feature (1)..(831): Homolog of NCBI NO: 40254361 NR Description: osmotic stress protein; osmotic stress protein 94 [Mus musculus] >gi|31077176|sp|P48722|OS94_MOUSE Osmotic stress
  misc_feature (1)..(830): Homolog of NCBI NO: 30525062 NR Description: heat shock protein 4 [Cyprinus carpio]
  misc_feature (1)..(831): Homolog of NCBI NO: 1098541 NR Description: osmotic stress protein 94
  misc_feature (1)..(830): Homolog of NCBI NO: 31077164 NR Description: Osmotic stress protein 94 (Heat shock 70-related
  misc_feature (1)..(825): Homolog of NCBI NO: 40788905 NR Description: KIAA0201 [Homo sapiens]
  misc_feature (2)..(626): Homolog of NCBI NO: 7441858 NR Description: heat shock protein 70 - fission yeast pombe) >gi|3090716|gb|AAC18441.1| Pss1 [Schizosaccharomyces
  misc_feature (2)..(626): Homolog of NCBI NO: 12230134 NR Description: HEAT SHOCK PROTEIN HOMOLOG PSS1

SEQ ID NO: 92733 - protein, 775 aa, Arabidopsis thaliana; identical to SEQ ID NO: 78068
  peptide (1)..(775): Ceres Seq. ID no. 12714502
  misc_feature (1)..(775): Homolog of NCBI NO: 39645395 NR Description: Unknown (protein for MGC:76295) [Silurana
  misc_feature (1)..(774): Homolog of NCBI NO: 34856875 NR Description: similar to osmotic stress protein [Rattus
  misc_feature (1)..(769): Homolog of NCBI NO: 29881532 NR Description: Unknown (protein for MGC:55506) [Danio rerio]
  misc_feature (1)..(775): Homolog of NCBI NO: 40254361 NR Description: osmotic stress protein; osmotic stress protein 94 [Mus musculus] >gi|31077176|sp|P48722|OS94_MOUSE Osmotic stress
  misc_feature (1)..(774): Homolog of NCBI NO: 30525062 NR Description: heat shock protein 4 [Cyprinus carpio]
  misc_feature (1)..(775): Homolog of NCBI NO: 1098541 NR Description: osmotic stress protein 94
  misc_feature (1)..(774): Homolog of NCBI NO: 31077164 NR Description: Osmotic stress protein 94 (Heat shock 70-related
  misc_feature (1)..(769): Homolog of NCBI NO: 40788905 NR Description: KIAA0201 [Homo sapiens]
  misc_feature (1)..(570): Homolog of NCBI NO: 7441858 NR Description: heat shock protein 70 - fission yeast pombe) >gi|3090716|gb|AAC18441.1| Pss1 [Schizosaccharomyces
  misc_feature (1)..(570): Homolog of NCBI NO: 12230134 NR Description: HEAT SHOCK PROTEIN HOMOLOG PSS1

SEQ ID NO: 92734 - protein, 774 aa, Arabidopsis thaliana; identical to SEQ ID NO: 78069
  peptide (1)..(774): Ceres Seq. ID no. 12714503
  misc_feature (1)..(774): Homolog of NCBI NO: 39645395 NR Description: Unknown (protein for MGC:76295) [Silurana
  misc_feature (1)..(773): Homolog of NCBI NO: 34856875 NR Description: similar to osmotic stress protein [Rattus
  misc_feature (1)..(768): Homolog of NCBI NO: 29881532 NR Description: Unknown (protein for MGC:55506) [Danio rerio]
  misc_feature (1)..(774): Homolog of NCBI NO: 40254361 NR Description: osmotic stress protein; osmotic stress protein 94 [Mus musculus] >gi|31077176|sp|P48722|OS94_MOUSE Osmotic stress
  misc_feature (1)..(773): Homolog of NCBI NO: 30525062 NR Description: heat shock protein 4 [Cyprinus carpio]
  misc_feature (1)..(774): Homolog of NCBI NO: 1098541 NR Description: osmotic stress protein 94
  misc_feature (1)..(773): Homolog of NCBI NO: 31077164 NR Description: Osmotic stress protein 94 (Heat shock 70-related
  misc_feature (1)..(768): Homolog of NCBI NO: 40788905 NR Description: KIAA0201 [Homo sapiens]
  misc_feature (1)..(569): Homolog of NCBI NO: 7441858 NR Description: heat shock protein 70 - fission yeast pombe) >gi|3090716|gb|AAC18441.1| Pss1 [Schizosaccharomyces
  misc_feature (1)..(569): Homolog of NCBI NO: 12230134 NR Description: HEAT SHOCK PROTEIN HOMOLOG PSS1

SEQ ID NO: 92735 - DNA, 2115 bp, Arabidopsis thaliana; identical to SEQ ID NO: 88979
  misc_feature (1)..(2115): Ceres Seq. ID no. 12714588
  misc_feature: MA Experiment ID: 20000315 Result: Down-regulated in Transcription
  misc_feature: MA Experiment 20000315 PARAMETER Experiment Name: At_14day_Shoots-Roots_Sub_P Parameter: Age (day) Value: 14
  misc_feature: MA Experiment 20000315 PARAMETER Experiment Name: At_14day_Shoots-Roots_Sub_P Parameter: Organism Value: A. thaliana
  misc_feature: MA Experiment 20000315 PARAMETER Experiment Name: At_14day_Shoots-Roots_Sub_P Parameter: Plant Line Value: WS
  misc_feature: MA Experiment 20000315 PARAMETER Experiment Name: At_14day_Shoots-Roots_Sub_P Parameter: Tissue Value: Shoots vs. Whole Plant
  misc_feature: MA Experiment ID: 20000355 Result: Down-regulated in Transcription
  misc_feature: MA Experiment 20000355 PARAMETER Experiment Name: At_Siliques_Sub_P Parameter: Age (day) Value: 21
  misc_feature: MA Experiment 20000355 PARAMETER Experiment Name: At_Siliques_Sub_P Parameter: Organism Value: A. thaliana
  misc_feature: MA Experiment 20000355 PARAMETER Experiment Name: At_Siliques_Sub_P Parameter: Plant Line Value: WS
  misc_feature: MA Experiment 20000355 PARAMETER Experiment Name: At_Siliques_Sub_P Parameter: Tissue Value: Less Than 5mm Siliques vs. Whole Plant
  misc_feature: MA Experiment ID: 20000634 Result: Up-regulated in Transcription
  misc_feature: MA Experiment 20000634 PARAMETER Experiment Name: At_10percent_PEG_Sub_P Parameter: Age (day) Value: 12
  misc_feature: MA Experiment 20000634 PARAMETER Experiment Name: At_10percent_PEG_Sub_P Parameter: Organism Value: A. thaliana
  misc_feature: MA Experiment 20000634 PARAMETER Experiment Name: At_10percent_PEG_Sub_P Parameter: Plant Line Value: WS
  misc_feature: MA Experiment 20000634 PARAMETER Experiment Name: At_10percent_PEG_Sub_P Parameter: Timepoint (day) Value: 12
  misc_feature: MA Experiment 20000634 PARAMETER Experiment Name: At_10percent_PEG_Sub_P Parameter: Tissue Value: Whole Plant
  misc_feature: MA Experiment 20000634 PARAMETER Experiment Name: At_10percent_PEG_Sub_P Parameter: Treatment Value: 10% PEG vs. No Treatment

SEQ ID NO: 92736 - protein, 704 aa, Arabidopsis thaliana; identical to SEQ ID NO: 88980
  peptide (1)..(704): Ceres Seq. ID no. 12714589
  misc_feature (121)..(407): Pfam Name: Protein kinase domain Pfam Description: Protein kinase domain
  misc_feature (1)..(655): Homolog of NCBI NO: 15221833 NR Description: protein kinase, putative; protein id: At1g18670.1
  misc_feature (1)..(442): Homolog of NCBI NO: 15221219 NR Description: putative protein kinase; protein id: At1g74330.1
  misc_feature (1)..(701): Homolog of NCBI NO: 33146814 NR Description: putative cyclin-dependent kinase CDC2C [Oryza
  misc_feature (1)..(467): Homolog of NCBI NO: 18032144 NR Description: cyclin-dependent kinase CDC2C [Arabidopsis
  misc_feature (1)..(467): Homolog of NCBI NO: 22327464 NR Description: cdc2-like protein; protein id: At5g39420.1,
  misc_feature (502)..(700): Homolog of NCBI NO: 18032144 NR Description: cyclin-dependent kinase CDC2C [Arabidopsis
  misc_feature (520)..(700): Homolog of NCBI NO: 22327464 NR Description: cdc2-like protein; protein id: At5g39420.1,
  misc_feature (81)..(550): Homolog of NCBI NO: 34914694 NR Description: putative CRK1 protein [Oryza sativa (japonica group)] >gi|15528648|dbj|BAB64715.1| putative CRK1 protein [Oryza
  misc_feature (7)..(458): Homolog of NCBI NO: 15217565 NR Description: putative protein kinase; protein id: At1g09600.1
  misc_feature (7)..(458): Homolog of NCBI NO: 25402555 NR Description: hypothetical protein [imported] - Arabidopsis >gi|3482933|gb|AAC33218.1| Similar to cdc2 protein kinases

SEQ ID NO: 92737 - protein, 540 aa, Arabidopsis thaliana; identical to SEQ ID NO: 88981
  peptide (1)..(540): Ceres Seq. ID no. 12714590
  misc_feature (1)..(243): Pfam Name: Protein kinase domain Pfam Description: Protein kinase domain
  misc_feature (1)..(491): Homolog of NCBI NO: 15221833 NR Description: protein kinase, putative; protein id: At1g18670.1
  misc_feature (1)..(278): Homolog of NCBI NO: 15221219 NR Description: putative protein kinase; protein id: At1g74330.1
  misc_feature (1)..(537): Homolog of NCBI NO: 33146814 NR Description: putative cyclin-dependent kinase CDC2C [Oryza
  misc_feature (1)..(303): Homolog of NCBI NO: 18032144 NR Description: cyclin-dependent kinase CDC2C [Arabidopsis
  misc_feature (1)..(303): Homolog of NCBI NO: 22327464 NR Description: cdc2-like protein; protein id: At5g39420.1,
  misc_feature (338)..(536): Homolog of NCBI NO: 18032144 NR Description: cyclin-dependent kinase CDC2C [Arabidopsis
  misc_feature (356)..(536): Homolog of NCBI NO: 22327464 NR Description: cdc2-like protein; protein id: At5g39420.1,
  misc_feature (1)..(386): Homolog of NCBI NO: 34914694 NR Description: putative CRK1 protein [Oryza sativa (japonica group)] >gi|15528648|dbj|BAB64715.1| putative CRK1 protein [Oryza
  misc_feature (1)..(294): Homolog of NCBI NO: 15217565 NR Description: putative protein kinase; protein id: At1g09600.1
  misc_feature (1)..(294): Homolog of NCBI NO: 25402555 NR Description: hypothetical protein [imported] - Arabidopsis >gi|3482933|gb|AAC33218.1| Similar to cdc2 protein kinases

SEQ ID NO: 92738 - protein, 503 aa, Arabidopsis thaliana; identical to SEQ ID NO: 88982
  peptide (1)..(503): Ceres Seq. ID no. 12714591
  misc_feature (1)..(206): Pfam Name: Protein kinase domain Pfam Description: Protein kinase domain
  misc_feature (1)..(454): Homolog of NCBI NO: 15221833 NR Description: protein kinase, putative; protein id: At1g18670.1
  misc_feature (1)..(241): Homolog of NCBI NO: 15221219 NR Description: putative protein kinase; protein id: At1g74330.1
  misc_feature (1)..(500): Homolog of NCBI NO: 33146814 NR Description: putative cyclin-dependent kinase CDC2C [Oryza
  misc_feature (1)..(266): Homolog of NCBI NO: 18032144 NR Description: cyclin-dependent kinase CDC2C [Arabidopsis
  misc_feature (1)..(266): Homolog of NCBI NO: 22327464 NR Description: cdc2-like protein; protein id: At5g39420.1,
  misc_feature (301)..(499): Homolog of NCBI NO: 18032144 NR Description: cyclin-dependent kinase CDC2C [Arabidopsis
  misc_feature (319)..(499): Homolog of NCBI NO: 22327464 NR Description: cdc2-like protein; protein id: At5g39420.1,
  misc_feature (1)..(349): Homolog of NCBI NO: 34914694 NR Description: putative CRK1 protein [Oryza sativa (japonica group)] >gi|15528648|dbj|BAB64715.1| putative CRK1 protein [Oryza
  misc_feature (1)..(257): Homolog of NCBI NO: 15217565 NR Description: putative protein kinase; protein id: At1g09600.1
  misc_feature (1)..(257): Homolog of NCBI NO: 25402555 NR Description: hypothetical protein [imported] - Arabidopsis >gi|3482933|gb|AAC33218.1| Similar to cdc2 protein kinases

SEQ ID NO: 92739 - DNA, 1114 bp, Arabidopsis thaliana; identical to SEQ ID NO: 88983
  misc_feature (1)..(1114): Ceres Seq. ID no. 12714596
  misc_feature: MA Experiment ID: 108462 Result: Down-regulated in Transcription
  misc_feature: MA Experiment 108462 PARAMETER Experiment Name: At_Germinating_Seeds_cDNA_P Parameter: Age (day) Value: 2 vs. 0
  misc_feature: MA Experiment 108462 PARAMETER Experiment Name: At_Germinating_Seeds_cDNA_P Parameter: Tissue Value: Germinating Seeds
  misc_feature: MA Experiment ID: 108463 Result: Down-regulated in Transcription
  misc_feature: MA Experiment 108463 PARAMETER Experiment Name: At_Germinating_Seeds_cDNA_P Parameter: Age (day) Value: 3 vs. 0
  misc_feature: MA Experiment 108463 PARAMETER Experiment Name: At_Germinating_Seeds_cDNA_P Parameter: Tissue Value: Germinating Seeds
  misc_feature: MA Experiment ID: 108464 Result: Down-regulated in Transcription
  misc_feature: MA Experiment 108464 PARAMETER Experiment Name: At_Germinating_Seeds_cDNA_P Parameter: Age (day) Value: 4 vs. 0
  misc_feature: MA Experiment 108464 PARAMETER Experiment Name: At_Germinating_Seeds_cDNA_P Parameter: Tissue Value: Germinating Seeds
  misc_feature: MA Experiment ID: 108573 Result: Up-regulated in Transcription
  misc_feature: MA Experiment 108573 PARAMETER Experiment Name: At_Drought_cDNA_P Parameter: Timepoint (hr) Value: 6
  misc_feature: MA Experiment 108573 PARAMETER Experiment Name: At_Drought_cDNA_P Parameter: Tissue Value: Aerial
  misc_feature: MA Experiment 108573 PARAMETER Experiment Name: At_Drought_cDNA_P Parameter: Treatment Value: Drought vs. No Drought
  misc_feature: MA Experiment ID: 108594 Result: Up-regulated in Transcription
  misc_feature: MA Experiment 108594 PARAMETER Experiment Name: At_Ler-rhl_Root_cDNA_P Parameter: Plant Line Value: null
  misc_feature: MA Experiment ID: 108595 Result: Down-regulated in Transcription
  misc_feature: MA Experiment 108595 PARAMETER Experiment Name: At_Ler-pi_Ovule_cDNA_P Parameter: Plant Line Value: null
  misc_feature: MA Experiment ID: 20000185 Result: Down-regulated in Transcription
  misc_feature: MA Experiment 20000185 PARAMETER Experiment Name: At_Roots__P Parameter: Age (day) Value: 7 vs. 21
  misc_feature: MA Experiment 20000185 PARAMETER Experiment Name: At_Roots__P Parameter: Organism Value: A. thaliana
  misc_feature: MA Experiment 20000185 PARAMETER Experiment Name: At_Roots__P Parameter: Tissue Value: Roots vs. Whole Plant
  misc_feature: MA Experiment ID: 20000439 Result: Down-regulated in Transcription
  misc_feature: MA Experiment 20000439 PARAMETER Experiment Name: At_Roots__P Parameter: Age (day) Value: 14 vs. 21
  misc_feature: MA Experiment 20000439 PARAMETER Experiment Name: At_Roots__P Parameter: Organism Value: A. thaliana
  misc_feature: MA Experiment 20000439 PARAMETER Experiment Name: At_Roots__P Parameter: Tissue Value: Roots vs. Whole Plant
  misc_feature: MA Experiment ID: 20001757 Result: Up-regulated in Transcription
  misc_feature: MA Experiment 20001757 PARAMETER Experiment Name: At_50mM_NH4NO3_L-to-H_P Parameter: Timepoint (hr) Value: 6
  misc_feature: MA Experiment 20001757 PARAMETER Experiment Name: At_50mM_NH4NO3_L-to-H_P Parameter: Tissue Value: Leaf
  misc_feature: MA Experiment 20001757 PARAMETER Experiment Name: At_50mM_NH4NO3_L-to-H_P Parameter: Treatment Value: 50mM NH4NO3 vs 100mM Mannitol

SEQ ID NO: 92740 - protein, 261 aa, Arabidopsis thaliana; identical to SEQ ID NO: 88984
  peptide (1)..(261): Ceres Seq. ID no. 12714597
  misc_feature (1)..(261): Homolog of NCBI NO: 15221223 NR Description: putative RING zinc finger protein; protein id: supported by cDNA: 29883. [Arabidopsis thaliana]
  misc_feature (1)..(261): Homolog of NCBI NO: 21592563 NR Description: putative RING zinc finger protein [Arabidopsis
  misc_feature (1)..(261): Homolog of NCBI NO: 15228658 NR Description: unknown protein; protein id: At3g29270.1 thaliana] >gi|27754358|gb|AAO22628.1| unknown protein thaliana] >gi|28394061|gb|AAO42438.1| unknown protein
  misc_feature (1)..(261): Homolog of NCBI NO: 11994767 NR Description: RING zinc finger protein-like [Arabidopsis
  misc_feature (1)..(261): Homolog of NCBI NO: 21594048 NR Description: unknown [Arabidopsis thaliana]
  misc_feature (1)..(261): Homolog of NCBI NO: 18409246 NR Description: expressed protein; protein id: At1g69330.1, by cDNA: 6632., supported by cDNA: gi_19699329 [Arabidopsis

SEQ ID NO: 92741 - protein, 136 aa, Arabidopsis thaliana; identical to SEQ ID NO: 88985
  peptide (1)..(136): Ceres Seq. ID no. 12714598
  misc_feature (1)..(136): Homolog of NCBI NO: 15221223 NR Description: putative RING zinc finger protein; protein id: supported by cDNA: 29883. [Arabidopsis thaliana]
  misc_feature (1)..(136): Homolog of NCBI NO: 21592563 NR Description: putative RING zinc finger protein [Arabidopsis
  misc_feature (1)..(136): Homolog of NCBI NO: 15228658 NR Description: unknown protein; protein id: At3g29270.1 thaliana] >gi|27754358|gb|AAO22628.1| unknown protein thaliana] >gi|28394061|gb|AAO42438.1| unknown protein
  misc_feature (1)..(136): Homolog of NCBI NO: 11994767 NR Description: RING zinc finger protein-like [Arabidopsis
  misc_feature (1)..(136): Homolog of NCBI NO: 21594048 NR Description: unknown [Arabidopsis thaliana]
  misc_feature (1)..(136): Homolog of NCBI NO: 18409246 NR Description: expressed protein; protein id: At1g69330.1, by cDNA: 6632., supported by cDNA: gi_19699329 [Arabidopsis

SEQ ID NO: 92742 - protein, 132 aa, Arabidopsis thaliana; identical to SEQ ID NO: 88986
  peptide (1)..(132): Ceres Seq. ID no. 12714599
  misc_feature (1)..(132): Homolog of NCBI NO: 15221223 NR Description: putative RING zinc finger protein; protein id: supported by cDNA: 29883. [Arabidopsis thaliana]
  misc_feature (1)..(132): Homolog of NCBI NO: 21592563 NR Description: putative RING zinc finger protein [Arabidopsis
  misc_feature (1)..(132): Homolog of NCBI NO: 15228658 NR Description: unknown protein; protein id: At3g29270.1 thaliana] >gi|27754358|gb|AAO22628.1| unknown protein thaliana] >gi|28394061|gb|AAO42438.1| unknown protein
  misc_feature (1)..(132): Homolog of NCBI NO: 11994767 NR Description: RING zinc finger protein-like [Arabidopsis
  misc_feature (1)..(132): Homolog of NCBI NO: 21594048 NR Description: unknown [Arabidopsis thaliana]
  misc_feature (1)..(132): Homolog of NCBI NO: 18409246 NR Description: expressed protein; protein id: At1g69330.1, by cDNA: 6632., supported by cDNA: gi_19699329 [Arabidopsis

SEQ ID NO: 92743 - DNA, 3780 bp, Arabidopsis thaliana; identical to SEQ ID NO: 88987
  misc_feature (1)..(3780): Ceres Seq. ID no. 12714653
  misc_feature: MA Experiment ID: 20000314 Result: Up-regulated in Transcription
  misc_feature: MA Experiment 20000314 PARAMETER Experiment Name: At_14day_Shoots-Roots_Sub_P Parameter: Age (day) Value: 14
  misc_feature: MA Experiment 20000314 PARAMETER Experiment Name: At_14day_Shoots-Roots_Sub_P Parameter: Organism Value: A. thaliana
  misc_feature: MA Experiment 20000314 PARAMETER Experiment Name: At_14day_Shoots-Roots_Sub_P Parameter: Plant Line Value: WS
  misc_feature: MA Experiment 20000314 PARAMETER Experiment Name: At_14day_Shoots-Roots_Sub_P Parameter: Tissue Value: Roots vs. Whole Plant
  misc_feature: MA Experiment ID: 20000347 Result: Up-regulated in Transcription
  misc_feature: MA Experiment 20000347 PARAMETER Experiment Name: At_2mM_SA_Sub_P Parameter: Age (day) Value: 14
  misc_feature: MA Experiment 20000347 PARAMETER Experiment Name: At_2mM_SA_Sub_P Parameter: Organism Value: A. thaliana
  misc_feature: MA Experiment 20000347 PARAMETER Experiment Name: At_2mM_SA_Sub_P Parameter: Plant Line Value: WS
  misc_feature: MA Experiment 20000347 PARAMETER Experiment Name: At_2mM_SA_Sub_P Parameter: Timepoint (hr) Value: 6
  misc_feature: MA Experiment 20000347 PARAMETER Experiment Name: At_2mM_SA_Sub_P Parameter: Tissue Value: Aerial
  misc_feature: MA Experiment 20000347 PARAMETER Experiment Name: At_2mM_SA_Sub_P Parameter: Treatment Value: 2mM SA vs. No Treatment

SEQ ID NO: 92744 - protein, 1259 aa, Arabidopsis thaliana; identical to SEQ ID NO: 88988
  peptide (1)..(1259): Ceres Seq. ID no. 12714654
  misc_feature (685)..(772): Pfam Name: Domain of Unknown function Pfam Description: Domain of Unknown function
  misc_feature (10)..(750): Homolog of NCBI NO: 15221896 NR Description: hypothetical protein; protein id: At1g18920.1
  misc_feature (2)..(485): Homolog of NCBI NO: 9279663 NR Description: gb|AAD55299.1~gene_id:MIE15.8~similar to unknown
  misc_feature (2)..(485): Homolog of NCBI NO: 15229615 NR Description: zinc finger protein, putative; protein id: supported by cDNA: gi_20453198 [Arabidopsis thaliana] AT3g18290/MIE15_8 [Arabidopsis thaliana]
  misc_feature (912)..(1259): Homolog of NCBI NO: 9279663 NR Description: gb|AAD55299.1~gene_id:MIE15.8~similar to unknown
  misc_feature (912)..(1259): Homolog of NCBI NO: 15229615 NR Description: zinc finger protein, putative; protein id: supported by cDNA: gi_20453198 [Arabidopsis thaliana] AT3g18290/MIE15_8 [Arabidopsis thaliana]
  misc_feature (615)..(858): Homolog of NCBI NO: 9279663 NR Description: gb|AAD55299.1~gene_id:MIE15.8~similar to unknown
  misc_feature (615)..(858): Homolog of NCBI NO: 15229615 NR Description: zinc finger protein, putative; protein id: supported by cDNA: gi_20453198 [Arabidopsis thaliana] AT3g18290/MIE15_8 [Arabidopsis thaliana]
  misc_feature (921)..(1259): Homolog of NCBI NO: 34911328 NR Description: putative zinc finger protein [Oryza sativa
  misc_feature (615)..(848): Homolog of NCBI NO: 34911328 NR Description: putative zinc finger protein [Oryza sativa
  misc_feature (2)..(172): Homolog of NCBI NO: 34911328 NR Description: putative zinc finger protein [Oryza sativa

SEQ ID NO: 92745 - protein, 1101 aa, Arabidopsis thaliana; identical to SEQ ID NO: 88989
  peptide (1)..(1101): Ceres Seq. ID no. 12714655
  misc_feature (527)..(614): Pfam Name: Domain of Unknown function Pfam Description: Domain of Unknown function
  misc_feature (1)..(592): Homolog of NCBI NO: 15221896 NR Description: hypothetical protein; protein id: At1g18920.1
  misc_feature (1)..(327): Homolog of NCBI NO: 9279663 NR Description: gb|AAD55299.1~gene_id:MIE15.8~similar to unknown
  misc_feature (1)..(327): Homolog of NCBI NO: 15229615 NR Description: zinc finger protein, putative; protein id: supported by cDNA: gi_20453198 [Arabidopsis thaliana] AT3g18290/MIE15_8 [Arabidopsis thaliana]
  misc_feature (754)..(1101): Homolog of NCBI NO: 9279663 NR Description: gb|AAD55299.1~gene_id:MIE15.8~similar to unknown
  misc_feature (754)..(1101): Homolog of NCBI NO: 15229615 NR Description: zinc finger protein, putative; protein id: supported by cDNA: gi_20453198 [Arabidopsis thaliana] AT3g18290/MIE15_8 [Arabidopsis thaliana]
  misc_feature (457)..(700): Homolog of NCBI NO: 9279663 NR Description: gb|AAD55299.1~gene_id:MIE15.8~similar to unknown
  misc_feature (457)..(700): Homolog of NCBI NO: 15229615 NR Description: zinc finger protein, putative; protein id: supported by cDNA: gi_20453198 [Arabidopsis thaliana] AT3g18290/MIE15_8 [Arabidopsis thaliana]
  misc_feature (763)..(1101): Homolog of NCBI NO: 34911328 NR Description: putative zinc finger protein [Oryza sativa
  misc_feature (457)..(690): Homolog of NCBI NO: 34911328 NR Description: putative zinc finger protein [Oryza sativa
  misc_feature (1)..(14): Homolog of NCBI NO: 34911328 NR Description: putative zinc finger protein [Oryza sativa

SEQ ID NO: 92746 - protein, 1067 aa, Arabidopsis thaliana; identical to SEQ ID NO: 88990
  peptide (1)..(1067): Ceres Seq. ID no. 12714656
  misc_feature (493)..(580): Pfam Name: Domain of Unknown function Pfam Description: Domain of Unknown function
  misc_feature (1)..(558): Homolog of NCBI NO: 15221896 NR Description: hypothetical protein; protein id: At1g18920.1
  misc_feature (1)..(293): Homolog of NCBI NO: 9279663 NR Description: gb|AAD55299.1~gene_id:MIE15.8~similar to unknown
  misc_feature (1)..(293): Homolog of NCBI NO: 15229615 NR Description: zinc finger protein, putative; protein id: supported by cDNA: gi_20453198 [Arabidopsis thaliana] AT3g18290/MIE15_8 [Arabidopsis thaliana]
  misc_feature (720)..(1067): Homolog of NCBI NO: 9279663 NR Description: gb|AAD55299.1~gene_id:MIE15.8~similar to unknown
  misc_feature (720)..(1067): Homolog of NCBI NO: 15229615 NR Description: zinc finger protein, putative; protein id: supported by cDNA: gi_20453198 [Arabidopsis thaliana] AT3g18290/MIE15_8 [Arabidopsis thaliana]
  misc_feature (423)..(666): Homolog of NCBI NO: 9279663 NR Description: gb|AAD55299.1~gene_id:MIE15.8~similar to unknown
  misc_feature (423)..(666): Homolog of NCBI NO: 15229615 NR Description: zinc finger protein, putative; protein id: supported by cDNA: gi_20453198 [Arabidopsis thaliana] AT3g18290/MIE15_8 [Arabidopsis thaliana]
  misc_feature (729)..(1067): Homolog of NCBI NO: 34911328 NR Description: putative zinc finger protein [Oryza sativa
  misc_feature (423)..(656): Homolog of NCBI NO: 34911328 NR Description: putative zinc finger protein [Oryza sativa
  misc_feature (100)..(232): Homolog of NCBI NO: 34911328 NR Description: putative zinc finger protein [Oryza sativa

SEQ ID NO: 92747 - DNA, 1177 bp, Arabidopsis thaliana; identical to SEQ ID NO: 88991
  misc_feature (1)..(1177): Ceres Seq. ID no. 12714661
  misc_feature: MA Experiment ID: 108434 Result: Up-regulated in Transcription
  misc_feature: MA Experiment 108434 PARAMETER Experiment Name: At_Root_Tips_cDNA_P Parameter: Tissue Value: Root Tips
  misc_feature: MA Experiment ID: 108464 Result: Up-regulated in Transcription
  misc_feature: MA Experiment 108464 PARAMETER Experiment Name: At_Germinating_Seeds_cDNA_P Parameter: Age (day) Value: 4 vs. 0
  misc_feature: MA Experiment 108464 PARAMETER Experiment Name: At_Germinating_Seeds_cDNA_P Parameter: Tissue Value: Germinating Seeds
  misc_feature: MA Experiment ID: 108573 Result: Up-regulated in Transcription
  misc_feature: MA Experiment 108573 PARAMETER Experiment Name: At_Drought_cDNA_P Parameter: Timepoint (hr) Value: 6
  misc_feature: MA Experiment 108573 PARAMETER Experiment Name: At_Drought_cDNA_P Parameter: Tissue Value: Aerial
  misc_feature: MA Experiment 108573 PARAMETER Experiment Name: At_Drought_cDNA_P Parameter: Treatment Value: Drought vs. No Drought
  misc_feature: MA Experiment ID: 108574 Result: Down-regulated in Transcription
  misc_feature: MA Experiment 108574 PARAMETER Experiment Name: At_Wounding__cDNA_P Parameter: Timepoint (hr) Value: 1
  misc_feature: MA Experiment 108574 PARAMETER Experiment Name: At_Wounding__cDNA_P Parameter: Tissue Value: Aerial
  misc_feature: MA Experiment 108574 PARAMETER Experiment Name: At_Wounding__cDNA_P Parameter: Treatment Value: Wounding vs. No Wounding
  misc_feature: MA Experiment ID: 108576 Result: Down-regulated in Transcription
  misc_feature: MA Experiment 108576 PARAMETER Experiment Name: At_42deg_Heat_cDNA_P Parameter: Temperature (deg C) Value: 42 vs. 22
  misc_feature: MA Experiment 108576 PARAMETER Experiment Name: At_42deg_Heat_cDNA_P Parameter: Timepoint (hr) Value: 1
  misc_feature: MA Experiment 108576 PARAMETER Experiment Name: At_42deg_Heat_cDNA_P Parameter: Tissue Value: Aerial
  misc_feature: MA Experiment ID: 108595 Result: Down-regulated in Transcription
  misc_feature: MA Experiment 108595 PARAMETER Experiment Name: At_Ler-pi_Ovule_cDNA_P Parameter: Plant Line Value: null
  misc_feature: MA Experiment ID: 20000087 Result: Down-regulated in Transcription
  misc_feature: MA Experiment 20000087 PARAMETER Experiment Name: At_100uM_ABA_Mutants_cDNA_P Parameter: Plant Line Value: WS
  misc_feature: MA Experiment 20000087 PARAMETER Experiment Name: At_100uM_ABA_Mutants_cDNA_P Parameter: Timepoint (hr) Value: 6
  misc_feature: MA Experiment 20000087 PARAMETER Experiment Name: At_100uM_ABA_Mutants_cDNA_P Parameter: Tissue Value: Aerial
  misc_feature: MA Experiment 20000087 PARAMETER Experiment Name: At_100uM_ABA_Mutants_cDNA_P Parameter: Treatment Value: 100uM ABA vs. No Treatment
  misc_feature: MA Experiment ID: 20000185 Result: Up-regulated in Transcription
  misc_feature: MA Experiment 20000185 PARAMETER Experiment Name: At_Roots__P Parameter: Age (day) Value: 7 vs. 21
  misc_feature: MA Experiment 20000185 PARAMETER Experiment Name: At_Roots__P Parameter: Organism Value: A. thaliana
  misc_feature: MA Experiment 20000185 PARAMETER Experiment Name: At_Roots__P Parameter: Tissue Value: Roots vs. Whole Plant
  misc_feature: MA Experiment ID: 20000214 Result: Up-regulated in Transcription
  misc_feature: MA Experiment 20000214 PARAMETER Experiment Name: At_4deg_Cold_P Parameter: Timepoint (hr) Value: 6
  misc_feature: MA Experiment ID: 20000224 Result: Down-regulated in Transcription
  misc_feature: MA Experiment ID: 20000227 Result: Down-regulated in Transcription
  misc_feature: MA Experiment 20000227 PARAMETER Experiment Name: At_Root-Tips-vs-Tops_P Parameter: Tissue Value: Root Tips vs. Root Tops
  misc_feature: MA Experiment ID: 20000234 Result: Down-regulated in Transcription
  misc_feature: MA Experiment 20000234 PARAMETER Experiment Name: At_Siliques_P Parameter: Age (day) Value: 21
  misc_feature: MA Experiment 20000234 PARAMETER Experiment Name: At_Siliques_P Parameter: Organism Value: A. thaliana
  misc_feature: MA Experiment 20000234 PARAMETER Experiment Name: At_Siliques_P Parameter: Plant Line Value: WS
  misc_feature: MA Experiment 20000234 PARAMETER Experiment Name: At_Siliques_P Parameter: Tissue Value: Less Than 5mm Siliques vs. Whole Plant
  misc_feature: MA Experiment ID: 20000264 Result: Down-regulated in Transcription
  misc_feature: MA Experiment 20000264 PARAMETER Experiment Name: At_Open_Flower_P Parameter: Age (day) Value: 21
  misc_feature: MA Experiment 20000264 PARAMETER Experiment Name: At_Open_Flower_P Parameter: Plant Line Value: WS
  misc_feature: MA Experiment 20000264 PARAMETER Experiment Name: At_Open_Flower_P Parameter: Tissue Value: Open Flower vs. Whole Plant
  misc_feature: MA Experiment ID: 20000286 Result: Down-regulated in Transcription
  misc_feature: MA Experiment 20000286 PARAMETER Experiment Name: At_Open_Flower_P Parameter: Age (day) Value: 21
  misc_feature: MA Experiment 20000286 PARAMETER Experiment Name: At_Open_Flower_P Parameter: Plant Line Value: WS
  misc_feature: MA Experiment 20000286 PARAMETER Experiment Name: At_Open_Flower_P Parameter: Tissue Value: Half Open vs. Whole Plant
  misc_feature: MA Experiment ID: 20000439 Result: Up-regulated in Transcription
  misc_feature: MA Experiment 20000439 PARAMETER Experiment Name: At_Roots__P Parameter: Age (day) Value: 14 vs. 21
  misc_feature: MA Experiment 20000439 PARAMETER Experiment Name: At_Roots__P Parameter: Organism Value: A. thaliana
  misc_feature: MA Experiment 20000439 PARAMETER Experiment Name: At_Roots__P Parameter: Tissue Value: Roots vs. Whole Plant
  misc_feature: MA Experiment ID: 20001248 Result: Up-regulated in Transcription
  misc_feature: MA Experiment 20001248 PARAMETER Experiment Name: At_Far-red-induction_P Parameter: Age (day) Value: 7
  misc_feature: MA Experiment 20001248 PARAMETER Experiment Name: At_Far-red-induction_P Parameter: Light Value: Far-red vs. White
  misc_feature: MA Experiment 20001248 PARAMETER Experiment Name: At_Far-red-induction_P Parameter: Organism Value: A. thaliana
  misc_feature: MA Experiment 20001248 PARAMETER Experiment Name: At_Far-red-induction_P Parameter: Plant Line Value: Columbia
  misc_feature: MA Experiment 20001248 PARAMETER Experiment Name: At_Far-red-induction_P Parameter: Timepoint (hr) Value: 4
  misc_feature: MA Experiment 20001248 PARAMETER Experiment Name: At_Far-red-induction_P Parameter: Tissue Value: Whole Plant
  misc_feature: MA Experiment ID: 20001450 Result: Up-regulated in Transcription
  misc_feature: MA Experiment 20001450 PARAMETER Experiment Name: At_Far-red-induction_P Parameter: Age (day) Value: 7
  misc_feature: MA Experiment 20001450 PARAMETER Experiment Name: At_Far-red-induction_P Parameter: Light Value: Far-red vs. White
  misc_feature: MA Experiment 20001450 PARAMETER Experiment Name: At_Far-red-induction_P Parameter: Organism Value: A. thaliana
  misc_feature: MA Experiment 20001450 PARAMETER Experiment Name: At_Far-red-induction_P Parameter: Plant Line Value: Columbia
  misc_feature: MA Experiment 20001450 PARAMETER Experiment Name: At_Far-red-induction_P Parameter: Timepoint (hr) Value: 8
  misc_feature: MA Experiment 20001450 PARAMETER Experiment Name: At_Far-red-induction_P Parameter: Tissue Value: Whole Plant
  misc_feature: MA Experiment ID: 20001558 Result: Down-regulated in Transcription
  misc_feature: MA Experiment 20001558 PARAMETER Experiment Name: At_Drought_Soil_Dry_P Parameter: Age (day) Value: 27
  misc_feature: MA Experiment 20001558 PARAMETER Experiment Name: At_Drought_Soil_Dry_P Parameter: Organism Value: A. thaliana
  misc_feature: MA Experiment 20001558 PARAMETER Experiment Name: At_Drought_Soil_Dry_P Parameter: Plant Line Value: WS
  misc_feature: MA Experiment 20001558 PARAMETER Experiment Name: At_Drought_Soil_Dry_P Parameter: Post Timepoint (hr) Value: 6
  misc_feature: MA Experiment 20001558 PARAMETER Experiment Name: At_Drought_Soil_Dry_P Parameter: Post-Treatment Value: Re-Water vs. No Drought
  misc_feature: MA Experiment 20001558 PARAMETER Experiment Name: At_Drought_Soil_Dry_P Parameter: Timepoint (day) Value: 13
  misc_feature: MA Experiment 20001558 PARAMETER Experiment Name: At_Drought_Soil_Dry_P Parameter: Treatment Value: Drought vs. No Drought
  misc_feature: MA Experiment ID: 20001560 Result: Down-regulated in Transcription
  misc_feature: MA Experiment 20001560 PARAMETER Experiment Name: At_Drought_Soil_Dry_P Parameter: Age (day) Value: 28
  misc_feature: MA Experiment 20001560 PARAMETER Experiment Name: At_Drought_Soil_Dry_P Parameter: Organism Value: A. thaliana
  misc_feature: MA Experiment 20001560 PARAMETER Experiment Name: At_Drought_Soil_Dry_P Parameter: Plant Line Value: WS
  misc_feature: MA Experiment 20001560 PARAMETER Experiment Name: At_Drought_Soil_Dry_P Parameter: Post Timepoint (hr) Value: None
  misc_feature: MA Experiment 20001560 PARAMETER Experiment Name: At_Drought_Soil_Dry_P Parameter: Post-Treatment Value: None
  misc_feature: MA Experiment 20001560 PARAMETER Experiment Name: At_Drought_Soil_Dry_P Parameter: Timepoint (day) Value: 14
  misc_feature: MA Experiment 20001560 PARAMETER Experiment Name: At_Drought_Soil_Dry_P Parameter: Treatment Value: Drought vs. No Drought

SEQ ID NO: 92748 - protein, 265 aa, Arabidopsis thaliana; identical to SEQ ID NO: 40934
  peptide (1)..(265): Ceres Seq. ID no. 12714662
  misc_feature (95)..(142): Pfam Name: Myb-like DNA-binding domain Pfam Description: Myb-like DNA-binding domain
  misc_feature (1)..(265): Homolog of NCBI NO: 15221408 NR Description: myb family transcription factor; protein id: supported by cDNA: 117643., supported by cDNA: gi_17979192, by cDNA: gi_20465856 [Arabidopsis thaliana]
  misc_feature (5)..(259): Homolog of NCBI NO: 15221922 NR Description: myb family transcription factor; protein id: supported by cDNA: 41381., supported by cDNA: gi_15028048, by cDNA: gi_19310830 [Arabidopsis thaliana]
  misc_feature (5)..(259): Homolog of NCBI NO: 21593684 NR Description: Myb-related transcription activator, putative
  misc_feature (6)..(188): Homolog of NCBI NO: 28629811 NR Description: transcription factor Myb1 [Malus xiaojinensis]
  misc_feature (19)..(188): Homolog of NCBI NO: 15222521 NR Description: DNA binding protein MybSt1, putative; protein id: [Arabidopsis thaliana] >gi|25406021|pir||F96722 hypothetical
  misc_feature (22)..(220): Homolog of NCBI NO: 15238083 NR Description: Myb-related transcription activator-like; protein At5g47390.1, supported by cDNA: 102806., supported by cDNA:
  misc_feature (22)..(163): Homolog of NCBI NO: 37536856 NR Description: putative Myb-related protein [Oryza sativa
  misc_feature (22)..(163): Homolog of NCBI NO: 24850307 NR Description: transcription factor MYBS3 [Oryza sativa
  misc_feature (8)..(194): Homolog of NCBI NO: 34906364 NR Description: unnamed protein product [Oryza sativa (japonica group)] >gi|9558504|dbj|BAB03423.1| unnamed protein product
  misc_feature (5)..(163): Homolog of NCBI NO: 7705206 NR Description: MybSt1 [Solanum tuberosum]

SEQ ID NO: 92749 - protein, 241 aa, Arabidopsis thaliana; identical to SEQ ID NO: 40935
  peptide (1)..(241): Ceres Seq. ID no. 12714663
  misc_feature (71)..(118): Pfam Name: Myb-like DNA-binding domain Pfam Description: Myb-like DNA-binding domain
  misc_feature (1)..(241): Homolog of NCBI NO: 15221408 NR Description: myb family transcription factor; protein id: supported by cDNA: 117643., supported by cDNA: gi_17979192, by cDNA: gi_20465856 [Arabidopsis thaliana]
  misc_feature (1)..(235): Homolog of NCBI NO: 15221922 NR Description: myb family transcription factor; protein id: supported by cDNA: 41381., supported by cDNA: gi_15028048, by cDNA: gi_19310830 [Arabidopsis thaliana]
  misc_feature (1)..(235): Homolog of NCBI NO: 21593684 NR Description: Myb-related transcription activator, putative
  misc_feature (1)..(164): Homolog of NCBI NO: 28629811 NR Description: transcription factor Myb1 [Malus xiaojinensis]
  misc_feature (1)..(164): Homolog of NCBI NO: 15222521 NR Description: DNA binding protein MybSt1, putative; protein id: [Arabidopsis thaliana] >gi|25406021|pir||F96722 hypothetical
  misc_feature (1)..(196): Homolog of NCBI NO: 15238083 NR Description: Myb-related transcription activator-like; protein At5g47390.1, supported by cDNA: 102806., supported by cDNA:
  misc_feature (1)..(139): Homolog of NCBI NO: 37536856 NR Description: putative Myb-related protein [Oryza sativa
  misc_feature (1)..(139): Homolog of NCBI NO: 24850307 NR Description: transcription factor MYBS3 [Oryza sativa
  misc_feature (1)..(170): Homolog of NCBI NO: 34906364 NR Description: unnamed protein product [Oryza sativa (japonica group)] >gi|9558504|dbj|BAB03423.1| unnamed protein product
  misc_feature (1)..(139): Homolog of NCBI NO: 7705206 NR Description: MybSt1 [Solanum tuberosum]

SEQ ID NO: 92750 - protein, 230 aa, Arabidopsis thaliana; identical to SEQ ID NO: 40936
  peptide (1)..(230): Ceres Seq. ID no. 12714664
  misc_feature (60)..(107): Pfam Name: Myb-like DNA-binding domain Pfam Description: Myb-like DNA-binding domain
  misc_feature (1)..(230): Homolog of NCBI NO: 15221408 NR Description: myb family transcription factor; protein id: supported by cDNA: 117643., supported by cDNA: gi_17979192, by cDNA: gi_20465856 [Arabidopsis thaliana]
  misc_feature (1)..(224): Homolog of NCBI NO: 15221922 NR Description: myb family transcription factor; protein id: supported by cDNA: 41381., supported by cDNA: gi_15028048, by cDNA: gi_19310830 [Arabidopsis thaliana]
  misc_feature (1)..(224): Homolog of NCBI NO: 21593684 NR Description: Myb-related transcription activator, putative
  misc_feature (1)..(153): Homolog of NCBI NO: 28629811 NR Description: transcription factor Myb1 [Malus xiaojinensis]
  misc_feature (1)..(153): Homolog of NCBI NO: 15222521 NR Description: DNA binding protein MybSt1, putative; protein id: [Arabidopsis thaliana] >gi|25406021|pir||F96722 hypothetical
  misc_feature (1)..(185): Homolog of NCBI NO: 15238083 NR Description: Myb-related transcription activator-like; protein At5g47390.1, supported by cDNA: 102806., supported by cDNA:
  misc_feature (1)..(128): Homolog of NCBI NO: 37536856 NR Description: putative Myb-related protein [Oryza sativa
  misc_feature (1)..(128): Homolog of NCBI NO: 24850307 NR Description: transcription factor MYBS3 [Oryza sativa
  misc_feature (1)..(159): Homolog of NCBI NO: 34906364 NR Description: unnamed protein product [Oryza sativa (japonica group)] >gi|9558504|dbj|BAB03423.1| unnamed protein product
  misc_feature (1)..(128): Homolog of NCBI NO: 7705206 NR Description: MybSt1 [Solanum tuberosum]

SEQ ID NO: 92751 - DNA, 663 bp, Arabidopsis thaliana; identical to SEQ ID NO: 88995
  misc_feature (1)..(663): Ceres Seq. ID no. 12714690
  misc_feature: MA Experiment ID: 20000184 Result: Down-regulated in Transcription
  misc_feature: MA Experiment 20000184 PARAMETER Experiment Name: At_Shoots__P Parameter: Age (day) Value: 7
  misc_feature: MA Experiment 20000184 PARAMETER Experiment Name: At_Shoots__P Parameter: Tissue Value: Shoots vs. Whole Plant
  misc_feature: MA Experiment ID: 20000496 Result: Up-regulated in Transcription
  misc_feature: MA Experiment 20000496 PARAMETER Experiment Name: At_Guard_Cells_P Parameter: Harvest Date Value: 7/19/2002
  misc_feature: MA Experiment 20000496 PARAMETER Experiment Name: At_Guard_Cells_P Parameter: Organism Value: Canola
  misc_feature: MA Experiment 20000496 PARAMETER Experiment Name: At_Guard_Cells_P Parameter: Tissue Value: Guard Cells vs. Leaves
  misc_feature: MA Experiment ID: 20001247 Result: Down-regulated in Transcription
  misc_feature: MA Experiment 20001247 PARAMETER Experiment Name: At_Far-red-induction_P Parameter: Age (day) Value: 7
  misc_feature: MA Experiment 20001247 PARAMETER Experiment Name: At_Far-red-induction_P Parameter: Light Value: Far-red vs. White
  misc_feature: MA Experiment 20001247 PARAMETER Experiment Name: At_Far-red-induction_P Parameter: Organism Value: A. thaliana
  misc_feature: MA Experiment 20001247 PARAMETER Experiment Name: At_Far-red-induction_P Parameter: Plant Line Value: Columbia
  misc_feature: MA Experiment 20001247 PARAMETER Experiment Name: At_Far-red-induction_P Parameter: Timepoint (hr) Value: 1
  misc_feature: MA Experiment 20001247 PARAMETER Experiment Name: At_Far-red-induction_P Parameter: Tissue Value: Whole Plant
  misc_feature: MA Experiment ID: 20001451 Result: Down-regulated in Transcription
  misc_feature: MA Experiment 20001451 PARAMETER Experiment Name: At_Far-red-induction_P Parameter: Age (day) Value: 7
  misc_feature: MA Experiment 20001451 PARAMETER Experiment Name: At_Far-red-induction_P Parameter: Light Value: Far-red vs. White
  misc_feature: MA Experiment 20001451 PARAMETER Experiment Name: At_Far-red-induction_P Parameter: Organism Value: A. thaliana
  misc_feature: MA Experiment 20001451 PARAMETER Experiment Name: At_Far-red-induction_P Parameter: Plant Line Value: Columbia
  misc_feature: MA Experiment 20001451 PARAMETER Experiment Name: At_Far-red-induction_P Parameter: Timepoint (hr) Value: 24
  misc_feature: MA Experiment 20001451 PARAMETER Experiment Name: At_Far-red-induction_P Parameter: Tissue Value: Whole Plant

SEQ ID NO: 92752 - protein, 220 aa, Arabidopsis thaliana; identical to SEQ ID NO: 88996
  peptide (1)..(220): Ceres Seq. ID no. 12714691
  misc_feature (132)..(154): Pfam Name: MORN repeat Pfam Description: MORN repeat
  misc_feature (4)..(220): Homolog of NCBI NO: 15222086 NR Description: hypothetical protein; protein id: At1g75010.1
  misc_feature (4)..(220): Homolog of NCBI NO: 25406404 NR Description: hypothetical protein F9E10.14 [imported] -
  misc_feature (4)..(220): Homolog of NCBI NO: 5882723 NR Description: F25A4.3 [Arabidopsis thaliana]
  misc_feature (98)..(205): Homolog of NCBI NO: 29346157 NR Description: putative phosphatidylinositol-4-phosphate 5-kinase
  misc_feature (67)..(208): Homolog of NCBI NO: 40062709 NR Description: MORN repeat protein [uncultured bacterium 314]
  misc_feature (65)..(209): Homolog of NCBI NO: 22330351 NR Description: putative phosphatidylinositol-4-phosphate protein id: At1g60890.1, supported by cDNA: gi_18491176
  misc_feature (65)..(209): Homolog of NCBI NO: 25404297 NR Description: hypothetical protein T7P1.4 [imported] -
  misc_feature (63)..(210): Homolog of NCBI NO: 29247595 NR Description: GLP_302_43026_44162 [Giardia lamblia ATCC 50803]
  misc_feature (67)..(209): Homolog of NCBI NO: 29346157 NR Description: putative phosphatidylinositol-4-phosphate 5-kinase
  misc_feature (64)..(209): Homolog of NCBI NO: 40062709 NR Description: MORN repeat protein [uncultured bacterium 314]

SEQ ID NO: 92753 - protein, 175 aa, Arabidopsis thaliana; identical to SEQ ID NO: 88997
  peptide (1)..(175): Ceres Seq. ID no. 12714692
  misc_feature (87)..(109): Pfam Name: MORN repeat Pfam Description: MORN repeat
  misc_feature (1)..(175): Homolog of NCBI NO: 15222086 NR Description: hypothetical protein; protein id: At1g75010.1
  misc_feature (1)..(175): Homolog of NCBI NO: 25406404 NR Description: hypothetical protein F9E10.14 [imported] -
  misc_feature (1)..(175): Homolog of NCBI NO: 5882723 NR Description: F25A4.3 [Arabidopsis thaliana]
  misc_feature (53)..(160): Homolog of NCBI NO: 29346157 NR Description: putative phosphatidylinositol-4-phosphate 5-kinase
  misc_feature (22)..(163): Homolog of NCBI NO: 40062709 NR Description: MORN repeat protein [uncultured bacterium 314]
  misc_feature (20)..(164): Homolog of NCBI NO: 22330351 NR Description: putative phosphatidylinositol-4-phosphate protein id: At1g60890.1, supported by cDNA: gi_18491176
  misc_feature (20)..(164): Homolog of NCBI NO: 25404297 NR Description: hypothetical protein T7P1.4 [imported] -
  misc_feature (18)..(165): Homolog of NCBI NO: 29247595 NR Description: GLP_302_43026_44162 [Giardia lamblia ATCC 50803]
  misc_feature (22)..(164): Homolog of NCBI NO: 29346157 NR Description: putative phosphatidylinositol-4-phosphate 5-kinase
  misc_feature (19)..(164): Homolog of NCBI NO: 40062709 NR Description: MORN repeat protein [uncultured bacterium 314]

SEQ ID NO: 92754 - protein, 158 aa, Arabidopsis thaliana; identical to SEQ ID NO: 88998
  peptide (1)..(158): Ceres Seq. ID no. 12714693
  misc_feature (70)..(92): Pfam Name: MORN repeat Pfam Description: MORN repeat
  misc_feature (1)..(158): Homolog of NCBI NO: 15222086 NR Description: hypothetical protein; protein id: At1g75010.1
  misc_feature (1)..(158): Homolog of NCBI NO: 25406404 NR Description: hypothetical protein F9E10.14 [imported] -
  misc_feature (1)..(158): Homolog of NCBI NO: 5882723 NR Description: F25A4.3 [Arabidopsis thaliana]
  misc_feature (36)..(143): Homolog of NCBI NO: 29346157 NR Description: putative phosphatidylinositol-4-phosphate 5-kinase
  misc_feature (5)..(146): Homolog of NCBI NO: 40062709 NR Description: MORN repeat protein [uncultured bacterium 314]
  misc_feature (3)..(147): Homolog of NCBI NO: 22330351 NR Description: putative phosphatidylinositol-4-phosphate protein id: At1g60890.1, supported by cDNA: gi_18491176
  misc_feature (3)..(147): Homolog of NCBI NO: 25404297 NR Description: hypothetical protein T7P1.4 [imported] -
  misc_feature (1)..(148): Homolog of NCBI NO: 29247595 NR Description: GLP_302_43026_44162 [Giardia lamblia ATCC 50803]
  misc_feature (5)..(147): Homolog of NCBI NO: 29346157 NR Description: putative phosphatidylinositol-4-phosphate 5-kinase
  misc_feature (2)..(147): Homolog of NCBI NO: 40062709 NR Description: MORN repeat protein [uncultured bacterium 314]

SEQ ID NO: 92755 - DNA, 741 bp, Arabidopsis thaliana; identical to SEQ ID NO: 88999
  misc_feature (1)..(741): Ceres Seq. ID no. 12714698
  misc_feature: MA Experiment ID: 20000355 Result: Down-regulated in Transcription
  misc_feature: MA Experiment 20000355 PARAMETER Experiment Name: At_Siliques_Sub_P Parameter: Age (day) Value: 21
  misc_feature: MA Experiment 20000355 PARAMETER Experiment Name: At_Siliques_Sub_P Parameter: Organism Value: A. thaliana
  misc_feature: MA Experiment 20000355 PARAMETER Experiment Name: At_Siliques_Sub_P Parameter: Plant Line Value: WS
  misc_feature: MA Experiment 20000355 PARAMETER Experiment Name: At_Siliques_Sub_P Parameter: Tissue Value: Less Than 5mm Siliques vs. Whole Plant
  misc_feature: MA Experiment ID: 20000440 Result: Up-regulated in Transcription
  misc_feature: MA Experiment 20000440 PARAMETER Experiment Name: At_Closed-Flower__Sub_P Parameter: Tissue Value: Closed Flower vs. Whole Plant

SEQ ID NO: 92756 - protein, 246 aa, Arabidopsis thaliana; identical to SEQ ID NO: 89000
  peptide (1)..(246): Ceres Seq. ID no. 12714699
  misc_feature (31)..(243): Pfam Name: Thaumatin family Pfam Description: Thaumatin family
  misc_feature (1)..(246): Homolog of NCBI NO: 15222090 NR Description: thaumatin-like protein; protein id: At1g75050.1
  misc_feature (1)..(246): Homolog of NCBI NO: 15222088 NR Description: thaumatin-like protein (PR-5); protein id: supported by cDNA: gi_2435405 [Arabidopsis thaliana]
  misc_feature (1)..(246): Homolog of NCBI NO: 2435406 NR Description: thaumatin-like protein [Arabidopsis thaliana]
  misc_feature (1)..(243): Homolog of NCBI NO: 15222089 NR Description: thaumatin-like protein; protein id: At1g75040.1, by cDNA: gi_14334527, supported by cDNA: gi_1448918, supported by
  misc_feature (1)..(242): Homolog of NCBI NO: 30686314 NR Description: thaumatin family [Arabidopsis thaliana]
  misc_feature (1)..(242): Homolog of NCBI NO: 28973703 NR Description: putative pathogenesis-related protein 5 precursor
  misc_feature (19)..(243): Homolog of NCBI NO: 6273385 NR Description: SCUTL2 [Vitis vinifera]
  misc_feature (1)..(172): Homolog of NCBI NO: 5882717 NR Description: Identical to gb|U83490 thaumatin-like protein Arabidopsis thaliana. (This gene is cut off.) EST gb|T20787 comes
  misc_feature (18)..(245): Homolog of NCBI NO: 20330768 NR Description: Putative thaumatin-like protein [Oryza sativa
  misc_feature (5)..(244): Homolog of NCBI NO: 18420282 NR Description: putative thaumatin-like protein; protein id: supported by cDNA: 32152., supported by cDNA: gi_17979354, by cDNA: gi_20466020 [Arabidopsis thaliana]

SEQ ID NO: 92757 - DNA, 1197 bp, Arabidopsis thaliana; identical to SEQ ID NO: 89001
  misc_feature (1)..(1197): Ceres Seq. ID no. 12714706
  misc_feature: MA Experiment ID: 20000315 Result: Down-regulated in Transcription
  misc_feature: MA Experiment 20000315 PARAMETER Experiment Name: At_14day_Shoots-Roots_Sub_P Parameter: Age (day) Value: 14
  misc_feature: MA Experiment 20000315 PARAMETER Experiment Name: At_14day_Shoots-Roots_Sub_P Parameter: Organism Value: A. thaliana
  misc_feature: MA Experiment 20000315 PARAMETER Experiment Name: At_14day_Shoots-Roots_Sub_P Parameter: Plant Line Value: WS
  misc_feature: MA Experiment 20000315 PARAMETER Experiment Name: At_14day_Shoots-Roots_Sub_P Parameter: Tissue Value: Shoots vs. Whole Plant
  misc_feature: MA Experiment ID: 20000355 Result: Up-regulated in Transcription
  misc_feature: MA Experiment 20000355 PARAMETER Experiment Name: At_Siliques_Sub_P Parameter: Age (day) Value: 21
  misc_feature: MA Experiment 20000355 PARAMETER Experiment Name: At_Siliques_Sub_P Parameter: Organism Value: A. thaliana
  misc_feature: MA Experiment 20000355 PARAMETER Experiment Name: At_Siliques_Sub_P Parameter: Plant Line Value: WS
  misc_feature: MA Experiment 20000355 PARAMETER Experiment Name: At_Siliques_Sub_P Parameter: Tissue Value: Less Than 5mm Siliques vs. Whole Plant
  misc_feature: MA Experiment ID: 20000440 Result: Up-regulated in Transcription
  misc_feature: MA Experiment 20000440 PARAMETER Experiment Name: At_Closed-Flower__Sub_P Parameter: Tissue Value: Closed Flower vs. Whole Plant

SEQ ID NO: 92758 - protein, 73 aa, Arabidopsis thaliana; identical to SEQ ID NO: 89002
  peptide (1)..(73): Ceres Seq. ID no. 12714707
  misc_feature (1)..(60): Pfam Name: Family of unknown function (DUF706) Pfam Description: Family of unknown function (DUF706)
  misc_feature (1)..(60): Homolog of NCBI NO: 7487428 NR Description: hypothetical protein T25K17.70 - Arabidopsis >gi|4539422|emb|CAB38955.1| putative protein [Arabidopsis >gi|7269477|emb|CAB79481.1| putative protein [Arabidopsis
  misc_feature (1)..(60): Homolog of NCBI NO: 30687167 NR Description: expressed protein [Arabidopsis thaliana]
  misc_feature (1)..(60): Homolog of NCBI NO: 21536858 NR Description: unknown [Arabidopsis thaliana]
  misc_feature (1)..(60): Homolog of NCBI NO: 15241891 NR Description: putative protein; protein id: At5g56640.1, by cDNA: 113619. [Arabidopsis thaliana] gene_id:MIK19.9~pir||T06010~similar to unknown protein
  misc_feature (1)..(60): Homolog of NCBI NO: 18399158 NR Description: expressed protein; protein id: At2g19800.1, by cDNA: 254633. [Arabidopsis thaliana]
  misc_feature (1)..(60): Homolog of NCBI NO: 21554393 NR Description: unknown [Arabidopsis thaliana]
  misc_feature (1)..(60): Homolog of NCBI NO: 7262695 NR Description: Strong similarity to an unknown protein from
  misc_feature (1)..(60): Homolog of NCBI NO: 7527731 NR Description: T5E21.2 [Arabidopsis thaliana]
  misc_feature (1)..(60): Homolog of NCBI NO: 30683840 NR Description: expressed protein [Arabidopsis thaliana] unknown protein [Arabidopsis thaliana]
  misc_feature (1)..(60): Homolog of NCBI NO: 26451656 NR Description: unknown protein [Arabidopsis thaliana]

SEQ ID NO: 92759 - protein, 72 aa, Arabidopsis thaliana; identical to SEQ ID NO: 89003
  peptide (1)..(72): Ceres Seq. ID no. 12714708
  misc_feature (35)..(72): Homolog of NCBI NO: 7487428 NR Description: hypothetical protein T25K17.70 - Arabidopsis >gi|4539422|emb|CAB38955.1| putative protein [Arabidopsis >gi|7269477|emb|CAB79481.1| putative protein [Arabidopsis
  misc_feature (35)..(72): Homolog of NCBI NO: 30687167 NR Description: expressed protein [Arabidopsis thaliana]
  misc_feature (34)..(72): Homolog of NCBI NO: 21536858 NR Description: unknown [Arabidopsis thaliana]
  misc_feature (34)..(72): Homolog of NCBI NO: 15241891 NR Description: putative protein; protein id: At5g56640.1, by cDNA: 113619. [Arabidopsis thaliana] gene_id:MIK19.9~pir||T06010~similar to unknown protein
  misc_feature (39)..(72): Homolog of NCBI NO: 18399158 NR Description: expressed protein; protein id: At2g19800.1, by cDNA: 254633. [Arabidopsis thaliana]
  misc_feature (39)..(72): Homolog of NCBI NO: 21554393 NR Description: unknown [Arabidopsis thaliana]
  misc_feature (41)..(72): Homolog of NCBI NO: 7262695 NR Description: Strong similarity to an unknown protein from
  misc_feature (57)..(72): Homolog of NCBI NO: 7527731 NR Description: T5E21.2 [Arabidopsis thaliana]
  misc_feature (41)..(72): Homolog of NCBI NO: 30683840 NR Description: expressed protein [Arabidopsis thaliana] unknown protein [Arabidopsis thaliana]
  misc_feature (41)..(72): Homolog of NCBI NO: 26451656 NR Description: unknown protein [Arabidopsis thaliana]

SEQ ID NO: 92760 - protein, 38 aa, Arabidopsis thaliana; identical to SEQ ID NO: 89004
  peptide (1)..(38): Ceres Seq. ID no. 12714709

SEQ ID NO: 92761 - DNA, 1042 bp, Arabidopsis thaliana; identical to SEQ ID NO: 89005
  misc_feature (1)..(1042): Ceres Seq. ID no. 12714710
  misc_feature: MA Experiment ID: 20000328 Result: Up-regulated in Transcription
  misc_feature: MA Experiment 20000328 PARAMETER Experiment Name: At_42deg_Heat_Sub_P Parameter: Age (day) Value: 14
  misc_feature: MA Experiment 20000328 PARAMETER Experiment Name: At_42deg_Heat_Sub_P Parameter: Organism Value: A. thaliana
  misc_feature: MA Experiment 20000328 PARAMETER Experiment Name: At_42deg_Heat_Sub_P Parameter: Plant Line Value: WS
  misc_feature: MA Experiment 20000328 PARAMETER Experiment Name: At_42deg_Heat_Sub_P Parameter: Temperature (deg C) Value: 42 vs. 22
  misc_feature: MA Experiment 20000328 PARAMETER Experiment Name: At_42deg_Heat_Sub_P Parameter: Timepoint (hr) Value: 6
  misc_feature: MA Experiment 20000328 PARAMETER Experiment Name: At_42deg_Heat_Sub_P Parameter: Tissue Value: Aerial
  misc_feature: MA Experiment ID: 20000352 Result: Up-regulated in Transcription
  misc_feature: MA Experiment 20000352 PARAMETER Experiment Name: At_Drought_Sub_P Parameter: Age (day) Value: 7
  misc_feature: MA Experiment 20000352 PARAMETER Experiment Name: At_Drought_Sub_P Parameter: Organism Value: A. thaliana
  misc_feature: MA Experiment 20000352 PARAMETER Experiment Name: At_Drought_Sub_P Parameter: Plant Line Value: WS
  misc_feature: MA Experiment 20000352 PARAMETER Experiment Name: At_Drought_Sub_P Parameter: Timepoint (hr) Value: 6
  misc_feature: MA Experiment 20000352 PARAMETER Experiment Name: At_Drought_Sub_P Parameter: Tissue Value: Whole Plant
  misc_feature: MA Experiment 20000352 PARAMETER Experiment Name: At_Drought_Sub_P Parameter: Treatment Value: Drought vs. No Drought

SEQ ID NO: 92762 - protein, 336 aa, Arabidopsis thaliana; identical to SEQ ID NO: 89006
  peptide (1)..(336): Ceres Seq. ID no. 12714711
  misc_feature (1)..(336): Homolog of NCBI NO: 30687163 NR Description: glycosyltransferase family 8 [Arabidopsis >gi|23296356|gb|AAN13051.1| galactinol synthase [Arabidopsis
  misc_feature (97)..(336): Homolog of NCBI NO: 7487427 NR Description: hypothetical protein T25K17.60 - Arabidopsis >gi|4539421|emb|CAB38954.1| putative protein [Arabidopsis >gi|7269476|emb|CAB79480.1| putative protein [Arabidopsis
  misc_feature (1)..(121): Homolog of NCBI NO: 7487427 NR Description: hypothetical protein T25K17.60 - Arabidopsis >gi|4539421|emb|CAB38954.1| putative protein [Arabidopsis >gi|7269476|emb|CAB79480.1| putative protein [Arabidopsis
  misc_feature (4)..(336): Homolog of NCBI NO: 15237827 NR Description: galactinol synthase; protein id: At5g23790.1 thaliana] >gi|10176846|dbj|BAB10052.1| galactinol synthase
  misc_feature (1)..(336): Homolog of NCBI NO: 30692339 NR Description: galactinol synthase, putative [Arabidopsis
  misc_feature (19)..(336): Homolog of NCBI NO: 18874402 NR Description: galactinol synthase [Cucumis melo]
  misc_feature (19)..(336): Homolog of NCBI NO: 29569824 NR Description: galactinol synthase [Cucumis sativus]
  misc_feature (6)..(336): Homolog of NCBI NO: 4588376 NR Description: galactinol synthase [Brassica napus]
  misc_feature (24)..(336): Homolog of NCBI NO: 15223567 NR Description: water stress-induced protein, putative; protein At1g56600.1, supported by cDNA: gi_15215761, supported by cDNA:
  misc_feature (25)..(336): Homolog of NCBI NO: 15226522 NR Description: putative galactinol synthase; protein id: supported by cDNA: 124236., supported by cDNA: gi_15810148,

SEQ ID NO: 92763 - protein, 333 aa, Arabidopsis thaliana; identical to SEQ ID NO: 89007
  peptide (1)..(333): Ceres Seq. ID no. 12714712
  misc_feature (1)..(333): Homolog of NCBI NO: 30687163 NR Description: glycosyltransferase family 8 [Arabidopsis >gi|23296356|gb|AAN13051.1| galactinol synthase [Arabidopsis
  misc_feature (94)..(333): Homolog of NCBI NO: 7487427 NR Description: hypothetical protein T25K17.60 - Arabidopsis >gi|4539421|emb|CAB38954.1| putative protein [Arabidopsis >gi|7269476|emb|CAB79480.1| putative protein [Arabidopsis
  misc_feature (1)..(118): Homolog of NCBI NO: 7487427 NR Description: hypothetical protein T25K17.60 - Arabidopsis >gi|4539421|emb|CAB38954.1| putative protein [Arabidopsis >gi|7269476|emb|CAB79480.1| putative protein [Arabidopsis
  misc_feature (1)..(333): Homolog of NCBI NO: 15237827 NR Description: galactinol synthase; protein id: At5g23790.1 thaliana] >gi|10176846|dbj|BAB10052.1| galactinol synthase
  misc_feature (1)..(333): Homolog of NCBI NO: 30692339 NR Description: galactinol synthase, putative [Arabidopsis
  misc_feature (16)..(333): Homolog of NCBI NO: 18874402 NR Description: galactinol synthase [Cucumis melo]
  misc_feature (16)..(333): Homolog of NCBI NO: 29569824 NR Description: galactinol synthase [Cucumis sativus]
  misc_feature (3)..(333): Homolog of NCBI NO: 4588376 NR Description: galactinol synthase [Brassica napus]
  misc_feature (21)..(333): Homolog of NCBI NO: 15223567 NR Description: water stress-induced protein, putative; protein At1g56600.1, supported by cDNA: gi_15215761, supported by cDNA:
  misc_feature (22)..(333): Homolog of NCBI NO: 15226522 NR Description: putative galactinol synthase; protein id: supported by cDNA: 124236., supported by cDNA: gi_15810148,

SEQ ID NO: 92764 - protein, 331 aa, Arabidopsis thaliana; identical to SEQ ID NO: 89008
  peptide (1)..(331): Ceres Seq. ID no. 12714713
  misc_feature (1)..(331): Homolog of NCBI NO: 30687163 NR Description: glycosyltransferase family 8 [Arabidopsis >gi|23296356|gb|AAN13051.1| galactinol synthase [Arabidopsis
  misc_feature (92)..(331): Homolog of NCBI NO: 7487427 NR Description: hypothetical protein T25K17.60 - Arabidopsis >gi|4539421|emb|CAB38954.1| putative protein [Arabidopsis >gi|7269476|emb|CAB79480.1| putative protein [Arabidopsis
  misc_feature (1)..(116): Homolog of NCBI NO: 7487427 NR Description: hypothetical protein T25K17.60 - Arabidopsis >gi|4539421|emb|CAB38954.1| putative protein [Arabidopsis >gi|7269476|emb|CAB79480.1| putative protein [Arabidopsis
  misc_feature (1)..(331): Homolog of NCBI NO: 15237827 NR Description: galactinol synthase; protein id: At5g23790.1 thaliana] >gi|10176846|dbj|BAB10052.1| galactinol synthase
  misc_feature (1)..(331): Homolog of NCBI NO: 30692339 NR Description: galactinol synthase, putative [Arabidopsis
  misc_feature (14)..(331): Homolog of NCBI NO: 18874402 NR Description: galactinol synthase [Cucumis melo]
  misc_feature (14)..(331): Homolog of NCBI NO: 29569824 NR Description: galactinol synthase [Cucumis sativus]
  misc_feature (1)..(331): Homolog of NCBI NO: 4588376 NR Description: galactinol synthase [Brassica napus]
  misc_feature (19)..(331): Homolog of NCBI NO: 15223567 NR Description: water stress-induced protein, putative; protein At1g56600.1, supported by cDNA: gi_15215761, supported by cDNA:
  misc_feature (20)..(331): Homolog of NCBI NO: 15226522 NR Description: putative galactinol synthase; protein id: supported by cDNA: 124236., supported by cDNA: gi_15810148,

SEQ ID NO: 92765 - DNA, 2221 bp, Arabidopsis thaliana; identical to SEQ ID NO: 89009
  misc_feature (1)..(2221): Ceres Seq. ID no. 12714714
  misc_feature: MA Experiment ID: 20000315 Result: Down-regulated in Transcription
  misc_feature: MA Experiment 20000315 PARAMETER Experiment Name: At_14day_Shoots-Roots_Sub_P Parameter: Age (day) Value: 14
  misc_feature: MA Experiment 20000315 PARAMETER Experiment Name: At_14day_Shoots-Roots_Sub_P Parameter: Organism Value: A. thaliana
  misc_feature: MA Experiment 20000315 PARAMETER Experiment Name: At_14day_Shoots-Roots_Sub_P Parameter: Plant Line Value: WS
  misc_feature: MA Experiment 20000315 PARAMETER Experiment Name: At_14day_Shoots-Roots_Sub_P Parameter: Tissue Value: Shoots vs. Whole Plant

SEQ ID NO: 92766 - protein, 728 aa, Arabidopsis thaliana; identical to SEQ ID NO: 89010
  peptide (1)..(728): Ceres Seq. ID no. 12714715
  misc_feature (8)..(725): Homolog of NCBI NO: 3869280 NR Description: beta-galactosidase precursor [Carica papaya]
  misc_feature (1)..(725): Homolog of NCBI NO: 1352078 NR Description: Beta-galactosidase precursor (Lactase) (Acid beta-
  misc_feature (1)..(725): Homolog of NCBI NO: 12583687 NR Description: beta-D-galactosidase [Pyrus pyrifolia]
  misc_feature (13)..(725): Homolog of NCBI NO: 14970839 NR Description: beta-galactosidase [Fragaria x ananassa]
  misc_feature (11)..(725): Homolog of NCBI NO: 1352077 NR Description: Beta-galactosidase precursor (Lactase) (Acid beta-
  misc_feature (21)..(725): Homolog of NCBI NO: 15231354 NR Description: glycosyl hydrolase family 35 protein id: At3g13750.1, supported by cDNA: gi_20260595
  misc_feature (11)..(725): Homolog of NCBI NO: 4138137 NR Description: ss-galactosidase [Lycopersicon esculentum]
  misc_feature (21)..(725): Homolog of NCBI NO: 20260596 NR Description: galactosidase, putative [Arabidopsis thaliana]
  misc_feature (24)..(726): Homolog of NCBI NO: 1168654 NR Description: Beta-galactosidase precursor (Lactase)
  misc_feature (9)..(726): Homolog of NCBI NO: 20514290 NR Description: beta-galactosidase [Oryza sativa (japonica

SEQ ID NO: 92767 - protein, 670 aa, Arabidopsis thaliana; identical to SEQ ID NO: 89011
  peptide (1)..(670): Ceres Seq. ID no. 12714716
  misc_feature (1)..(667): Homolog of NCBI NO: 3869280 NR Description: beta-galactosidase precursor [Carica papaya]
  misc_feature (1)..(667): Homolog of NCBI NO: 1352078 NR Description: Beta-galactosidase precursor (Lactase) (Acid beta-
  misc_feature (1)..(667): Homolog of NCBI NO: 12583687 NR Description: beta-D-galactosidase [Pyrus pyrifolia]
  misc_feature (1)..(667): Homolog of NCBI NO: 14970839 NR Description: beta-galactosidase [Fragaria x ananassa]
  misc_feature (1)..(667): Homolog of NCBI NO: 1352077 NR Description: Beta-galactosidase precursor (Lactase) (Acid beta-
  misc_feature (1)..(667): Homolog of NCBI NO: 15231354 NR Description: glycosyl hydrolase family 35 protein id: At3g13750.1, supported by cDNA: gi_20260595
  misc_feature (1)..(667): Homolog of NCBI NO: 4138137 NR Description: ss-galactosidase [Lycopersicon esculentum]
  misc_feature (1)..(667): Homolog of NCBI NO: 20260596 NR Description: galactosidase, putative [Arabidopsis thaliana]
  misc_feature (1)..(668): Homolog of NCBI NO: 1168654 NR Description: Beta-galactosidase precursor (Lactase)
  misc_feature (1)..(668): Homolog of NCBI NO: 20514290 NR Description: beta-galactosidase [Oryza sativa (japonica

SEQ ID NO: 92768 - protein, 589 aa, Arabidopsis thaliana; identical to SEQ ID NO: 89012
  peptide (1)..(589): Ceres Seq. ID no. 12714717
  misc_feature (1)..(586): Homolog of NCBI NO: 3869280 NR Description: beta-galactosidase precursor [Carica papaya]
  misc_feature (1)..(586): Homolog of NCBI NO: 1352078 NR Description: Beta-galactosidase precursor (Lactase) (Acid beta-
  misc_feature (1)..(586): Homolog of NCBI NO: 12583687 NR Description: beta-D-galactosidase [Pyrus pyrifolia]
  misc_feature (1)..(586): Homolog of NCBI NO: 14970839 NR Description: beta-galactosidase [Fragaria x ananassa]
  misc_feature (1)..(586): Homolog of NCBI NO: 1352077 NR Description: Beta-galactosidase precursor (Lactase) (Acid beta-
  misc_feature (1)..(586): Homolog of NCBI NO: 15231354 NR Description: glycosyl hydrolase family 35 protein id: At3g13750.1, supported by cDNA: gi_20260595
  misc_feature (1)..(586): Homolog of NCBI NO: 4138137 NR Description: ss-galactosidase [Lycopersicon esculentum]
  misc_feature (1)..(586): Homolog of NCBI NO: 20260596 NR Description: galactosidase, putative [Arabidopsis thaliana]
  misc_feature (1)..(587): Homolog of NCBI NO: 1168654 NR Description: Beta-galactosidase precursor (Lactase)
  misc_feature (1)..(587): Homolog of NCBI NO: 20514290 NR Description: beta-galactosidase [Oryza sativa (japonica

SEQ ID NO: 92769 - DNA, 1472 bp, Arabidopsis thaliana; identical to SEQ ID NO: 89013
  misc_feature (1)..(1472): Ceres Seq. ID no. 12714735
  misc_feature: MA Experiment ID: 20000180 Result: Down-regulated in Transcription
  misc_feature: MA Experiment 20000180 PARAMETER Experiment Name: At_Germinating_Seeds_P Parameter: Age (hr) Value: 24 vs. 0
  misc_feature: MA Experiment 20000180 PARAMETER Experiment Name: At_Germinating_Seeds_P Parameter: Tissue Value: Germinating Seeds
  misc_feature: MA Experiment ID: 20000264 Result: Down-regulated in Transcription
  misc_feature: MA Experiment 20000264 PARAMETER Experiment Name: At_Open_Flower_P Parameter: Age (day) Value: 21
  misc_feature: MA Experiment 20000264 PARAMETER Experiment Name: At_Open_Flower_P Parameter: Plant Line Value: WS
  misc_feature: MA Experiment 20000264 PARAMETER Experiment Name: At_Open_Flower_P Parameter: Tissue Value: Open Flower vs. Whole Plant

SEQ ID NO: 92770 - protein, 159 aa, Arabidopsis thaliana; identical to SEQ ID NO: 89014
  peptide (1)..(159): Ceres Seq. ID no. 12714736
  misc_feature (1)..(94): Pfam Name: Calcineurin-like phosphoesterase Pfam Description: Calcineurin-like phosphoesterase
  misc_feature (1)..(159): Homolog of NCBI NO: 15236841 NR Description: phosphoprotein phosphatase (PPX-1); protein id: [Arabidopsis thaliana] >gi|1346782|sp|P48529|PPX1_ARATH
  misc_feature (1)..(159): Homolog of NCBI NO: 15240488 NR Description: serine/threonine protein phosphatase; protein id:
  misc_feature (1)..(159): Homolog of NCBI NO: 629550 NR Description: phosphoprotein phosphatase (EC 3.1.3.16) X-2 EP128) - Arabidopsis thaliana >gi|397590|emb|CAA80312.1| protein
  misc_feature (1)..(159): Homolog of NCBI NO: 4506027 NR Description: protein phosphatase 4 (formerly X), catalytic Protein phosphatase 4, catalytic subunit [Homo sapiens] protein phosphatase 4, catalytic subunit; protein phosphatase X
  misc_feature (1)..(159): Homolog of NCBI NO: 5410609 NR Description: protein phosphatase 4 catalytic subunit discoideum] >gi|28829486|gb|AAO52019.1| similar to Dictyostelium (Slime mold). Protein phosphatase 4 catalytic subunit (EC
  misc_feature (1)..(159): Homolog of NCBI NO: 130788 NR Description: SERINE/THREONINE PROTEIN PHOSPHATASE 4 (PP4)
  misc_feature (1)..(159): Homolog of NCBI NO: 346323 NR Description: phosphoprotein phosphatase (EC 3.1.3.16) X
  misc_feature (1)..(159): Homolog of NCBI NO: 4101701 NR Description: serine/threonine phosphatase [Takifugu rubripes]
  misc_feature (1)..(159): Homolog of NCBI NO: 17864424 NR Description: Protein phosphatase 19C CG32505-PA
  misc_feature (11)..(130): Homolog of NCBI NO: 40746125 NR Description: hypothetical protein AN0103.2 [Aspergillus

SEQ ID NO: 92771 - protein, 137 aa, Arabidopsis thaliana; identical to SEQ ID NO: 89015
  peptide (1)..(137): Ceres Seq. ID no. 12714737
  misc_feature (1)..(72): Pfam Name: Calcineurin-like phosphoesterase Pfam Description: Calcineurin-like phosphoesterase
  misc_feature (1)..(137): Homolog of NCBI NO: 15236841 NR Description: phosphoprotein phosphatase (PPX-1); protein id: [Arabidopsis thaliana] >gi|1346782|sp|P48529|PPX1_ARATH
  misc_feature (1)..(137): Homolog of NCBI NO: 15240488 NR Description: serine/threonine protein phosphatase; protein id:
  misc_feature (1)..(137): Homolog of NCBI NO: 629550 NR Description: phosphoprotein phosphatase (EC 3.1.3.16) X-2 EP128) - Arabidopsis thaliana >gi|397590|emb|CAA80312.1| protein
  misc_feature (1)..(137): Homolog of NCBI NO: 4506027 NR Description: protein phosphatase 4 (formerly X), catalytic Protein phosphatase 4, catalytic subunit [Homo sapiens] protein phosphatase 4, catalytic subunit; protein phosphatase X
  misc_feature (1)..(137): Homolog of NCBI NO: 5410609 NR Description: protein phosphatase 4 catalytic subunit discoideum] >gi|28829486|gb|AAO52019.1| similar to Dictyostelium (Slime mold). Protein phosphatase 4 catalytic subunit (EC
  misc_feature (1)..(137): Homolog of NCBI NO: 130788 NR Description: SERINE/THREONINE PROTEIN PHOSPHATASE 4 (PP4)
  misc_feature (1)..(137): Homolog of NCBI NO: 346323 NR Description: phosphoprotein phosphatase (EC 3.1.3.16) X
  misc_feature (1)..(137): Homolog of NCBI NO: 4101701 NR Description: serine/threonine phosphatase [Takifugu rubripes]
  misc_feature (1)..(137): Homolog of NCBI NO: 17864424 NR Description: Protein phosphatase 19C CG32505-PA
  misc_feature (1)..(108): Homolog of NCBI NO: 40746125 NR Description: hypothetical protein AN0103.2 [Aspergillus

SEQ ID NO: 92772 - protein, 119 aa, Arabidopsis thaliana; identical to SEQ ID NO: 89016
  peptide (1)..(119): Ceres Seq. ID no. 12714738
  misc_feature (44)..(119): Pfam Name: Calcineurin-like phosphoesterase Pfam Description: Calcineurin-like phosphoesterase
  misc_feature (1)..(119): Homolog of NCBI NO: 15236841 NR Description: phosphoprotein phosphatase (PPX-1); protein id: [Arabidopsis thaliana] >gi|1346782|sp|P48529|PPX1_ARATH
  misc_feature (1)..(119): Homolog of NCBI NO: 15240488 NR Description: serine/threonine protein phosphatase; protein id:
  misc_feature (1)..(119): Homolog of NCBI NO: 629550 NR Description: phosphoprotein phosphatase (EC 3.1.3.16) X-2 EP128) - Arabidopsis thaliana >gi|397590|emb|CAA80312.1| protein
  misc_feature (1)..(119): Homolog of NCBI NO: 4506027 NR Description: protein phosphatase 4 (formerly X), catalytic Protein phosphatase 4, catalytic subunit [Homo sapiens] protein phosphatase 4, catalytic subunit; protein phosphatase X
  misc_feature (2)..(119): Homolog of NCBI NO: 5410609 NR Description: protein phosphatase 4 catalytic subunit discoideum] >gi|28829486|gb|AAO52019.1| similar to Dictyostelium (Slime mold). Protein phosphatase 4 catalytic subunit (EC
  misc_feature (1)..(119): Homolog of NCBI NO: 130788 NR Description: SERINE/THREONINE PROTEIN PHOSPHATASE 4 (PP4)
  misc_feature (1)..(119): Homolog of NCBI NO: 346323 NR Description: phosphoprotein phosphatase (EC 3.1.3.16) X
  misc_feature (1)..(119): Homolog of NCBI NO: 4101701 NR Description: serine/threonine phosphatase [Takifugu rubripes]
  misc_feature (2)..(119): Homolog of NCBI NO: 17864424 NR Description: Protein phosphatase 19C CG32505-PA
  misc_feature (1)..(119): Homolog of NCBI NO: 40746125 NR Description: hypothetical protein AN0103.2 [Aspergillus

SEQ ID NO: 92773 - DNA, 1484 bp, Arabidopsis thaliana; identical to SEQ ID NO: 89017
  misc_feature (1)..(1484): Ceres Seq. ID no. 12714754
  misc_feature: MA Experiment ID: 108577 Result: Down-regulated in Transcription
  misc_feature: MA Experiment 108577 PARAMETER Experiment Name: At_42deg_Heat_cDNA_P Parameter: Temperature (deg C) Value: 42 vs. 22
  misc_feature: MA Experiment 108577 PARAMETER Experiment Name: At_42deg_Heat_cDNA_P Parameter: Timepoint (hr) Value: 6
  misc_feature: MA Experiment 108577 PARAMETER Experiment Name: At_42deg_Heat_cDNA_P Parameter: Tissue Value: Aerial
  misc_feature: MA Experiment ID: 108585 Result: Up-regulated in Transcription
  misc_feature: MA Experiment 108585 PARAMETER Experiment Name: At_5mM_NaNP_cDNA_P Parameter: Timepoint (hr) Value: 6
  misc_feature: MA Experiment 108585 PARAMETER Experiment Name: At_5mM_NaNP_cDNA_P Parameter: Tissue Value: Aerial
  misc_feature: MA Experiment 108585 PARAMETER Experiment Name: At_5mM_NaNP_cDNA_P Parameter: Treatment Value: null
  misc_feature: MA Experiment ID: 108668 Result: Up-regulated in Transcription
  misc_feature: MA Experiment 108668 PARAMETER Experiment Name: At_2mM_SA_cDNA_P Parameter: Plant Line Value: WS
  misc_feature: MA Experiment 108668 PARAMETER Experiment Name: At_2mM_SA_cDNA_P Parameter: Timepoint (hr) Value: 6
  misc_feature: MA Experiment 108668 PARAMETER Experiment Name: At_2mM_SA_cDNA_P Parameter: Treatment Value: 2mM SA vs. No Treatment
  misc_feature: MA Experiment ID: 20000090 Result: Up-regulated in Transcription
  misc_feature: MA Experiment ID: 20000111 Result: Down-regulated in Transcription
  misc_feature: MA Experiment 20000111 PARAMETER Experiment Name: At_42deg_Heat_cDNA_P Parameter: Temperature (deg C) Value: 42 vs. 22
  misc_feature: MA Experiment 20000111 PARAMETER Experiment Name: At_42deg_Heat_cDNA_P Parameter: Timepoint (hr) Value: 6
  misc_feature: MA Experiment 20000111 PARAMETER Experiment Name: At_42deg_Heat_cDNA_P Parameter: Tissue Value: Aerial
  misc_feature: MA Experiment ID: 20000173 Result: Down-regulated in Transcription
  misc_feature: MA Experiment 20000173 PARAMETER Experiment Name: At_42deg_Heat_P Parameter: Age (day) Value: 14
  misc_feature: MA Experiment 20000173 PARAMETER Experiment Name: At_42deg_Heat_P Parameter: Organism Value: A. thaliana
  misc_feature: MA Experiment 20000173 PARAMETER Experiment Name: At_42deg_Heat_P Parameter: Plant Line Value: WS
  misc_feature: MA Experiment 20000173 PARAMETER Experiment Name: At_42deg_Heat_P Parameter: Temperature (deg C) Value: 42 vs. 22
  misc_feature: MA Experiment 20000173 PARAMETER Experiment Name: At_42deg_Heat_P Parameter: Timepoint (hr) Value: 6
  misc_feature: MA Experiment 20000173 PARAMETER Experiment Name: At_42deg_Heat_P Parameter: Tissue Value: Aerial
  misc_feature: MA Experiment ID: 20000180 Result: Up-regulated in Transcription
  misc_feature: MA Experiment 20000180 PARAMETER Experiment Name: At_Germinating_Seeds_P Parameter: Age (hr) Value: 24 vs. 0
  misc_feature: MA Experiment 20000180 PARAMETER Experiment Name: At_Germinating_Seeds_P Parameter: Tissue Value: Germinating Seeds
  misc_feature: MA Experiment ID: 20000182 Result: Up-regulated in Transcription
  misc_feature: MA Experiment 20000182 PARAMETER Experiment Name: At_2mM_SA_P Parameter: Age (day) Value: 14
  misc_feature: MA Experiment 20000182 PARAMETER Experiment Name: At_2mM_SA_P Parameter: Organism Value: A. thaliana
  misc_feature: MA Experiment 20000182 PARAMETER Experiment Name: At_2mM_SA_P Parameter: Plant Line Value: WS
  misc_feature: MA Experiment 20000182 PARAMETER Experiment Name: At_2mM_SA_P Parameter: Timepoint (hr) Value: 6
  misc_feature: MA Experiment 20000182 PARAMETER Experiment Name: At_2mM_SA_P Parameter: Tissue Value: Aerial
  misc_feature: MA Experiment 20000182 PARAMETER Experiment Name: At_2mM_SA_P Parameter: Treatment Value: 2mM SA vs. No Treatment
  misc_feature: MA Experiment ID: 20000438 Result: Down-regulated in Transcription
  misc_feature: MA Experiment 20000438 PARAMETER Experiment Name: At_Shoots__P Parameter: Age (day) Value: 14
  misc_feature: MA Experiment 20000438 PARAMETER Experiment Name: At_Shoots__P Parameter: Tissue Value: Shoots vs. Whole Plant

SEQ ID NO: 92774 - protein, 415 aa, Arabidopsis thaliana; identical to SEQ ID NO: 89018
  peptide (1)..(415): Ceres Seq. ID no. 12714755
  misc_feature (183)..(413): Pfam Name: 2-oxoacid dehydrogenases acyltransferase Pfam Description: 2-oxoacid dehydrogenases acyltransferase
  misc_feature (8)..(415): Homolog of NCBI NO: 18416889 NR Description: putative dihydrolipoamide succinyltransferase; id: At4g26910.1, supported by cDNA: 101175. [Arabidopsis
  misc_feature (10)..(415): Homolog of NCBI NO: 30687405 NR Description: dihydrolipoamide succinyltransferase -related thaliana] >gi|24030315|gb|AAN41326.1| putative dihydrolipoamide
  misc_feature (8)..(415): Homolog of NCBI NO: 21618217 NR Description: putative dihydrolipoamide succinyltransferase
  misc_feature (51)..(415): Homolog of NCBI NO: 30687411 NR Description: dihydrolipoamide succinyltransferase -related
  misc_feature (27)..(415): Homolog of NCBI NO: 4210332 NR Description: 2-oxoglutarate dehydrogenase E2 subunit
  misc_feature (100)..(415): Homolog of NCBI NO: 7484908 NR Description: dihydrolipoamide S-succinyltransferase homolog - Arabidopsis thaliana >gi|4455214|emb|CAB36537.1| putative succinyltransferase [Arabidopsis thaliana]
  misc_feature (27)..(415): Homolog of NCBI NO: 15240454 NR Description: 2-oxoglutarate dehydrogenase E2 subunit; protein At5g55070.1, supported by cDNA: gi_14596218 [Arabidopsis
  misc_feature (10)..(415): Homolog of NCBI NO: 21740743 NR Description: OSJNBa0072K14.8 [Oryza sativa (japonica
  misc_feature (164)..(414): Homolog of NCBI NO: 22967670 NR Description: hypothetical protein [Rhodospirillum rubrum]
  misc_feature (45)..(168): Homolog of NCBI NO: 22967670 NR Description: hypothetical protein [Rhodospirillum rubrum]

SEQ ID NO: 92775 - protein, 365 aa, Arabidopsis thaliana; identical to SEQ ID NO: 89019
  peptide (1)..(365): Ceres Seq. ID no. 12714756
  misc_feature (133)..(363): Pfam Name: 2-oxoacid dehydrogenases acyltransferase Pfam Description: 2-oxoacid dehydrogenases acyltransferase
  misc_feature (1)..(365): Homolog of NCBI NO: 18416889 NR Description: putative dihydrolipoamide succinyltransferase; id: At4g26910.1, supported by cDNA: 101175. [Arabidopsis
  misc_feature (1)..(365): Homolog of NCBI NO: 30687405 NR Description: dihydrolipoamide succinyltransferase -related thaliana] >gi|24030315|gb|AAN41326.1| putative dihydrolipoamide
  misc_feature (1)..(365): Homolog of NCBI NO: 21618217 NR Description: putative dihydrolipoamide succinyltransferase
  misc_feature (1)..(365): Homolog of NCBI NO: 30687411 NR Description: dihydrolipoamide succinyltransferase -related
  misc_feature (1)..(365): Homolog of NCBI NO: 4210332 NR Description: 2-oxoglutarate dehydrogenase E2 subunit
  misc_feature (50)..(365): Homolog of NCBI NO: 7484908 NR Description: dihydrolipoamide S-succinyltransferase homolog - Arabidopsis thaliana >gi|4455214|emb|CAB36537.1| putative succinyltransferase [Arabidopsis thaliana]
  misc_feature (1)..(365): Homolog of NCBI NO: 15240454 NR Description: 2-oxoglutarate dehydrogenase E2 subunit; protein At5g55070.1, supported by cDNA: gi_14596218 [Arabidopsis
  misc_feature (1)..(365): Homolog of NCBI NO: 21740743 NR Description: OSJNBa0072K14.8 [Oryza sativa (japonica
  misc_feature (114)..(364): Homolog of NCBI NO: 22967670 NR Description: hypothetical protein [Rhodospirillum rubrum]
  misc_feature (1)..(118): Homolog of NCBI NO: 22967670 NR Description: hypothetical protein [Rhodospirillum rubrum]

SEQ ID NO: 92776 - protein, 225 aa, Arabidopsis thaliana; identical to SEQ ID NO: 89020
  peptide (1)..(225): Ceres Seq. ID no. 12714757
  misc_feature (1)..(223): Pfam Name: 2-oxoacid dehydrogenases acyltransferase Pfam Description: 2-oxoacid dehydrogenases acyltransferase
  misc_feature (1)..(225): Homolog of NCBI NO: 18416889 NR Description: putative dihydrolipoamide succinyltransferase; id: At4g26910.1, supported by cDNA: 101175. [Arabidopsis
  misc_feature (1)..(225): Homolog of NCBI NO: 30687405 NR Description: dihydrolipoamide succinyltransferase -related thaliana] >gi|24030315|gb|AAN41326.1| putative dihydrolipoamide
  misc_feature (1)..(225): Homolog of NCBI NO: 21618217 NR Description: putative dihydrolipoamide succinyltransferase
  misc_feature (1)..(225): Homolog of NCBI NO: 30687411 NR Description: dihydrolipoamide succinyltransferase -related
  misc_feature (1)..(225): Homolog of NCBI NO: 4210332 NR Description: 2-oxoglutarate dehydrogenase E2 subunit
  misc_feature (1)..(225): Homolog of NCBI NO: 7484908 NR Description: dihydrolipoamide S-succinyltransferase homolog - Arabidopsis thaliana >gi|4455214|emb|CAB36537.1| putative succinyltransferase [Arabidopsis thaliana]
  misc_feature (1)..(225): Homolog of NCBI NO: 15240454 NR Description: 2-oxoglutarate dehydrogenase E2 subunit; protein At5g55070.1, supported by cDNA: gi_14596218 [Arabidopsis
  misc_feature (1)..(225): Homolog of NCBI NO: 21740743 NR Description: OSJNBa0072K14.8 [Oryza sativa (japonica
  misc_feature (1)..(224): Homolog of NCBI NO: 22967670 NR Description: hypothetical protein [Rhodospirillum rubrum]
  misc_feature (1)..(225): Homolog of NCBI NO: 3914210 NR Description: Dihydrolipoamide succinyltransferase component of oxoglutarate dehydrogenase complex, mitochondrial precursor (E2)

SEQ ID NO: 92777 - DNA, 983 bp, Arabidopsis thaliana; identical to SEQ ID NO: 89021
  misc_feature (1)..(983): Ceres Seq. ID no. 12714758
  misc_feature: MA Experiment ID: 20000173 Result: Down-regulated in Transcription
  misc_feature: MA Experiment 20000173 PARAMETER Experiment Name: At_42deg_Heat_P Parameter: Age (day) Value: 14
  misc_feature: MA Experiment 20000173 PARAMETER Experiment Name: At_42deg_Heat_P Parameter: Organism Value: A. thaliana
  misc_feature: MA Experiment 20000173 PARAMETER Experiment Name: At_42deg_Heat_P Parameter: Plant Line Value: WS
  misc_feature: MA Experiment 20000173 PARAMETER Experiment Name: At_42deg_Heat_P Parameter: Temperature (deg C) Value: 42 vs. 22
  misc_feature: MA Experiment 20000173 PARAMETER Experiment Name: At_42deg_Heat_P Parameter: Timepoint (hr) Value: 6
  misc_feature: MA Experiment 20000173 PARAMETER Experiment Name: At_42deg_Heat_P Parameter: Tissue Value: Aerial

SEQ ID NO: 92778 - protein, 208 aa, Arabidopsis thaliana; identical to SEQ ID NO: 89022
  peptide (1)..(208): Ceres Seq. ID no. 12714759
  misc_feature (25)..(208): Homolog of NCBI NO: 30687433 NR Description: NADH:ubiquinone oxidoreductase family thaliana] >gi|19347747|gb|AAL86298.1| unknown protein thaliana] >gi|22136740|gb|AAM91689.1| unknown protein

SEQ ID NO: 92779 - protein, 184 aa, Arabidopsis thaliana; identical to SEQ ID NO: 89023
  peptide (1)..(184): Ceres Seq. ID no. 12714760
  misc_feature (1)..(184): Homolog of NCBI NO: 30687433 NR Description: NADH:ubiquinone oxidoreductase family thaliana] >gi|19347747|gb|AAL86298.1| unknown protein thaliana] >gi|22136740|gb|AAM91689.1| unknown protein

SEQ ID NO: 92780 - protein, 154 aa, Arabidopsis thaliana; identical to SEQ ID NO: 89024
  peptide (1)..(154): Ceres Seq. ID no. 12714761
  misc_feature (1)..(154): Homolog of NCBI NO: 30687433 NR Description: NADH:ubiquinone oxidoreductase family thaliana] >gi|19347747|gb|AAL86298.1| unknown protein thaliana] >gi|22136740|gb|AAM91689.1| unknown protein

SEQ ID NO: 92781 - DNA, 1096 bp, Arabidopsis thaliana; identical to SEQ ID NO: 89025
  misc_feature (1)..(1096): Ceres Seq. ID no. 12714770
  misc_feature: MA Experiment ID: 20000438 Result: Down-regulated in Transcription
  misc_feature: MA Experiment 20000438 PARAMETER Experiment Name: At_Shoots__P Parameter: Age (day) Value: 14
  misc_feature: MA Experiment 20000438 PARAMETER Experiment Name: At_Shoots__P Parameter: Tissue Value: Shoots vs. Whole Plant

SEQ ID NO: 92782 - protein, 354 aa, Arabidopsis thaliana; identical to SEQ ID NO: 89026
  peptide (1)..(354): Ceres Seq. ID no. 12714771
  misc_feature (15)..(142): Pfam Name: NAD dependent epimerase/dehydratase family Pfam Description: NAD dependent epimerase/dehydratase family
  misc_feature (1)..(354): Homolog of NCBI NO: 30687527 NR Description: dihydroflavonol 4-reductase (dihydrokaempferol family [Arabidopsis thaliana] >gi|23296465|gb|AAN13064.1| unknown
  misc_feature (41)..(354): Homolog of NCBI NO: 7486807 NR Description: hypothetical protein M4I22.60 - Arabidopsis >gi|3269286|emb|CAA19719.1| putative protein [Arabidopsis >gi|7269578|emb|CAB79580.1| putative protein [Arabidopsis
  misc_feature (1)..(44): Homolog of NCBI NO: 7486807 NR Description: hypothetical protein M4I22.60 - Arabidopsis >gi|3269286|emb|CAA19719.1| putative protein [Arabidopsis >gi|7269578|emb|CAB79580.1| putative protein [Arabidopsis

SEQ ID NO: 92783 - protein, 265 aa, Arabidopsis thaliana; identical to SEQ ID NO: 89027
  peptide (1)..(265): Ceres Seq. ID no. 12714772
  misc_feature (1)..(53): Pfam Name: NAD dependent epimerase/dehydratase family Pfam Description: NAD dependent epimerase/dehydratase family
  misc_feature (1)..(265): Homolog of NCBI NO: 30687527 NR Description: dihydroflavonol 4-reductase (dihydrokaempferol family [Arabidopsis thaliana] >gi|23296465|gb|AAN13064.1| unknown
  misc_feature (1)..(265): Homolog of NCBI NO: 7486807 NR Description: hypothetical protein M4I22.60 - Arabidopsis >gi|3269286|emb|CAA19719.1| putative protein [Arabidopsis >gi|7269578|emb|CAB79580.1| putative protein [Arabidopsis

SEQ ID NO: 92784 - protein, 204 aa, Arabidopsis thaliana; identical to SEQ ID NO: 89028
  peptide (1)..(204): Ceres Seq. ID no. 12714773
  misc_feature (1)..(204): Homolog of NCBI NO: 30687527 NR Description: dihydroflavonol 4-reductase (dihydrokaempferol family [Arabidopsis thaliana] >gi|23296465|gb|AAN13064.1| unknown
  misc_feature (1)..(204): Homolog of NCBI NO: 7486807 NR Description: hypothetical protein M4I22.60 - Arabidopsis >gi|3269286|emb|CAA19719.1| putative protein [Arabidopsis >gi|7269578|emb|CAB79580.1| putative protein [Arabidopsis

SEQ ID NO: 92785 - DNA, 1168 bp, Arabidopsis thaliana; identical to SEQ ID NO: 89029
  misc_feature (1)..(1168): Ceres Seq. ID no. 12714782
  misc_feature: MA Experiment ID: 108434 Result: Down-regulated in Transcription
  misc_feature: MA Experiment 108434 PARAMETER Experiment Name: At_Root_Tips_cDNA_P Parameter: Tissue Value: Root Tips
  misc_feature: MA Experiment ID: 108572 Result: Up-regulated in Transcription
  misc_feature: MA Experiment 108572 PARAMETER Experiment Name: At_Drought_cDNA_P Parameter: Timepoint (hr) Value: 1
  misc_feature: MA Experiment 108572 PARAMETER Experiment Name: At_Drought_cDNA_P Parameter: Tissue Value: Aerial
  misc_feature: MA Experiment 108572 PARAMETER Experiment Name: At_Drought_cDNA_P Parameter: Treatment Value: Drought vs. No Drought
  misc_feature: MA Experiment ID: 108574 Result: Up-regulated in Transcription
  misc_feature: MA Experiment 108574 PARAMETER Experiment Name: At_Wounding__cDNA_P Parameter: Timepoint (hr) Value: 1
  misc_feature: MA Experiment 108574 PARAMETER Experiment Name: At_Wounding__cDNA_P Parameter: Tissue Value: Aerial
  misc_feature: MA Experiment 108574 PARAMETER Experiment Name: At_Wounding__cDNA_P Parameter: Treatment Value: Wounding vs. No Wounding
  misc_feature: MA Experiment ID: 108577 Result: Up-regulated in Transcription
  misc_feature: MA Experiment 108577 PARAMETER Experiment Name: At_42deg_Heat_cDNA_P Parameter: Temperature (deg C) Value: 42 vs. 22
  misc_feature: MA Experiment 108577 PARAMETER Experiment Name: At_42deg_Heat_cDNA_P Parameter: Timepoint (hr) Value: 6
  misc_feature: MA Experiment 108577 PARAMETER Experiment Name: At_42deg_Heat_cDNA_P Parameter: Tissue Value: Aerial
  misc_feature: MA Experiment ID: 108585 Result: Up-regulated in Transcription
  misc_feature: MA Experiment 108585 PARAMETER Experiment Name: At_5mM_NaNP_cDNA_P Parameter: Timepoint (hr) Value: 6
  misc_feature: MA Experiment 108585 PARAMETER Experiment Name: At_5mM_NaNP_cDNA_P Parameter: Tissue Value: Aerial
  misc_feature: MA Experiment 108585 PARAMETER Experiment Name: At_5mM_NaNP_cDNA_P Parameter: Treatment Value: null
  misc_feature: MA Experiment ID: 108595 Result: Up-regulated in Transcription
  misc_feature: MA Experiment 108595 PARAMETER Experiment Name: At_Ler-pi_Ovule_cDNA_P Parameter: Plant Line Value: null
  misc_feature: MA Experiment ID: 108668 Result: Up-regulated in Transcription
  misc_feature: MA Experiment 108668 PARAMETER Experiment Name: At_2mM_SA_cDNA_P Parameter: Plant Line Value: WS
  misc_feature: MA Experiment 108668 PARAMETER Experiment Name: At_2mM_SA_cDNA_P Parameter: Timepoint (hr) Value: 6
  misc_feature: MA Experiment 108668 PARAMETER Experiment Name: At_2mM_SA_cDNA_P Parameter: Treatment Value: 2mM SA vs. No Treatment
  misc_feature: MA Experiment ID: 20000112 Result: Up-regulated in Transcription
  misc_feature: MA Experiment 20000112 PARAMETER Experiment Name: At_42deg_Heat_cDNA_P Parameter: Temperature (deg C) Value: 42 vs. 22
  misc_feature: MA Experiment 20000112 PARAMETER Experiment Name: At_42deg_Heat_cDNA_P Parameter: Timepoint (hr) Value: 2
  misc_feature: MA Experiment 20000112 PARAMETER Experiment Name: At_42deg_Heat_cDNA_P Parameter: Tissue Value: Aerial
  misc_feature: MA Experiment ID: 20000113 Result: Up-regulated in Transcription
  misc_feature: MA Experiment 20000113 PARAMETER Experiment Name: At_42deg_Heat_cDNA_P Parameter: Temperature (deg C) Value: 42 vs. 22
  misc_feature: MA Experiment 20000113 PARAMETER Experiment Name: At_42deg_Heat_cDNA_P Parameter: Timepoint (hr) Value: 8
  misc_feature: MA Experiment 20000113 PARAMETER Experiment Name: At_42deg_Heat_cDNA_P Parameter: Tissue Value: Aerial
  misc_feature: MA Experiment ID: 20000144 Result: Up-regulated in Transcription
  misc_feature: MA Experiment 20000144 PARAMETER Experiment Name: At_42deg_Heat_cDNA_P Parameter: Temperature (deg C) Value: 42 vs. 22
  misc_feature: MA Experiment 20000144 PARAMETER Experiment Name: At_42deg_Heat_cDNA_P Parameter: Timepoint (hr) Value: 1
  misc_feature: MA Experiment 20000144 PARAMETER Experiment Name: At_42deg_Heat_cDNA_P Parameter: Tissue Value: Aerial
  misc_feature: MA Experiment ID: 20000171 Result: Up-regulated in Transcription
  misc_feature: MA Experiment 20000171 PARAMETER Experiment Name: At_42deg_Heat_P Parameter: Age (day) Value: 14
  misc_feature: MA Experiment 20000171 PARAMETER Experiment Name: At_42deg_Heat_P Parameter: Organism Value: A. thaliana
  misc_feature: MA Experiment 20000171 PARAMETER Experiment Name: At_42deg_Heat_P Parameter: Plant Line Value: WS
  misc_feature: MA Experiment 20000171 PARAMETER Experiment Name: At_42deg_Heat_P Parameter: Temperature (deg C) Value: 42 vs. 22
  misc_feature: MA Experiment 20000171 PARAMETER Experiment Name: At_42deg_Heat_P Parameter: Timepoint (hr) Value: 1
  misc_feature: MA Experiment 20000171 PARAMETER Experiment Name: At_42deg_Heat_P Parameter: Tissue Value: Aerial
  misc_feature: MA Experiment ID: 20000173 Result: Up-regulated in Transcription
  misc_feature: MA Experiment 20000173 PARAMETER Experiment Name: At_42deg_Heat_P Parameter: Age (day) Value: 14
  misc_feature: MA Experiment 20000173 PARAMETER Experiment Name: At_42deg_Heat_P Parameter: Organism Value: A. thaliana
  misc_feature: MA Experiment 20000173 PARAMETER Experiment Name: At_42deg_Heat_P Parameter: Plant Line Value: WS
  misc_feature: MA Experiment 20000173 PARAMETER Experiment Name: At_42deg_Heat_P Parameter: Temperature (deg C) Value: 42 vs. 22
  misc_feature: MA Experiment 20000173 PARAMETER Experiment Name: At_42deg_Heat_P Parameter: Timepoint (hr) Value: 6
  misc_feature: MA Experiment 20000173 PARAMETER Experiment Name: At_42deg_Heat_P Parameter: Tissue Value: Aerial
  misc_feature: MA Experiment ID: 20001247 Result: Up-regulated in Transcription
  misc_feature: MA Experiment 20001247 PARAMETER Experiment Name: At_Far-red-induction_P Parameter: Age (day) Value: 7
  misc_feature: MA Experiment 20001247 PARAMETER Experiment Name: At_Far-red-induction_P Parameter: Light Value: Far-red vs. White
  misc_feature: MA Experiment 20001247 PARAMETER Experiment Name: At_Far-red-induction_P Parameter: Organism Value: A. thaliana
  misc_feature: MA Experiment 20001247 PARAMETER Experiment Name: At_Far-red-induction_P Parameter: Plant Line Value: Columbia
  misc_feature: MA Experiment 20001247 PARAMETER Experiment Name: At_Far-red-induction_P Parameter: Timepoint (hr) Value: 1
  misc_feature: MA Experiment 20001247 PARAMETER Experiment Name: At_Far-red-induction_P Parameter: Tissue Value: Whole Plant

SEQ ID NO: 92786 - protein, 278 aa, Arabidopsis thaliana; identical to SEQ ID NO: 23190
  peptide (1)..(278): Ceres Seq. ID no. 12714783
  misc_feature (1)..(278): Homolog of NCBI NO: 15234089 NR Description: putative protein; protein id: At4g27350.1, by cDNA: 35749., supported by cDNA: gi_12597468, supported by gi_13265462, supported by cDNA: gi_21281146 [Arabidopsis
  misc_feature (1)..(278): Homolog of NCBI NO: 21593063 NR Description: unknown [Arabidopsis thaliana]
  misc_feature (1)..(278): Homolog of NCBI NO: 13265463 NR Description: AT4g27350 [Arabidopsis thaliana]
  misc_feature (1)..(278): Homolog of NCBI NO: 15239579 NR Description: putative protein; protein id: At5g54240.1 thaliana] >gi|9759497|dbj|BAB10747.1|
  misc_feature (1)..(278): Homolog of NCBI NO: 34394018 NR Description: membrane lipoprotein lipid attachment
  misc_feature (206)..(278): Homolog of NCBI NO: 28393652 NR Description: unknown protein [Arabidopsis thaliana]
  misc_feature (38)..(224): Homolog of NCBI NO: 23014426 NR Description: hypothetical protein [Magnetospirillum
  misc_feature (30)..(263): Homolog of NCBI NO: 22962198 NR Description: hypothetical protein [Rhodopseudomonas palustris]
  misc_feature (27)..(224): Homolog of NCBI NO: 13473812 NR Description: hypothetical protein [Mesorhizobium loti]
  misc_feature (2)..(213): Homolog of NCBI NO: 13473665 NR Description: hypothetical protein, - Arabidopsis thaliana loti] >gi|14024415|dbj|BAB51019.1| hypothetical protein

SEQ ID NO: 92787 - protein, 222 aa, Arabidopsis thaliana; identical to SEQ ID NO: 23191
  peptide (1)..(222): Ceres Seq. ID no. 12714784
  misc_feature (1)..(222): Homolog of NCBI NO: 15234089 NR Description: putative protein; protein id: At4g27350.1, by cDNA: 35749., supported by cDNA: gi_12597468, supported by gi_13265462, supported by cDNA: gi_21281146 [Arabidopsis
  misc_feature (1)..(222): Homolog of NCBI NO: 21593063 NR Description: unknown [Arabidopsis thaliana]
  misc_feature (1)..(222): Homolog of NCBI NO: 13265463 NR Description: AT4g27350 [Arabidopsis thaliana]
  misc_feature (1)..(222): Homolog of NCBI NO: 15239579 NR Description: putative protein; protein id: At5g54240.1 thaliana] >gi|9759497|dbj|BAB10747.1|
  misc_feature (1)..(222): Homolog of NCBI NO: 34394018 NR Description: membrane lipoprotein lipid attachment
  misc_feature (150)..(222): Homolog of NCBI NO: 28393652 NR Description: unknown protein [Arabidopsis thaliana]
  misc_feature (1)..(168): Homolog of NCBI NO: 23014426 NR Description: hypothetical protein [Magnetospirillum
  misc_feature (1)..(207): Homolog of NCBI NO: 22962198 NR Description: hypothetical protein [Rhodopseudomonas palustris]
  misc_feature (1)..(168): Homolog of NCBI NO: 13473812 NR Description: hypothetical protein [Mesorhizobium loti]
  misc_feature (1)..(157): Homolog of NCBI NO: 13473665 NR Description: hypothetical protein, - Arabidopsis thaliana loti] >gi|14024415|dbj|BAB51019.1| hypothetical protein

SEQ ID NO: 92788 - protein, 220 aa, Arabidopsis thaliana; identical to SEQ ID NO: 23192
  peptide (1)..(220): Ceres Seq. ID no. 12714785
  misc_feature (1)..(220): Homolog of NCBI NO: 15234089 NR Description: putative protein; protein id: At4g27350.1, by cDNA: 35749., supported by cDNA: gi_12597468, supported by gi_13265462, supported by cDNA: gi_21281146 [Arabidopsis
  misc_feature (1)..(220): Homolog of NCBI NO: 21593063 NR Description: unknown [Arabidopsis thaliana]
  misc_feature (1)..(220): Homolog of NCBI NO: 13265463 NR Description: AT4g27350 [Arabidopsis thaliana]
  misc_feature (1)..(220): Homolog of NCBI NO: 15239579 NR Description: putative protein; protein id: At5g54240.1 thaliana] >gi|9759497|dbj|BAB10747.1|
  misc_feature (1)..(220): Homolog of NCBI NO: 34394018 NR Description: membrane lipoprotein lipid attachment
  misc_feature (148)..(220): Homolog of NCBI NO: 28393652 NR Description: unknown protein [Arabidopsis thaliana]
  misc_feature (1)..(166): Homolog of NCBI NO: 23014426 NR Description: hypothetical protein [Magnetospirillum
  misc_feature (1)..(205): Homolog of NCBI NO: 22962198 NR Description: hypothetical protein [Rhodopseudomonas palustris]
  misc_feature (1)..(166): Homolog of NCBI NO: 13473812 NR Description: hypothetical protein [Mesorhizobium loti]
  misc_feature (1)..(155): Homolog of NCBI NO: 13473665 NR Description: hypothetical protein, - Arabidopsis thaliana loti] >gi|14024415|dbj|BAB51019.1| hypothetical protein

SEQ ID NO: 92789 - DNA, 1487 bp, Arabidopsis thaliana; identical to SEQ ID NO: 89033
  misc_feature (1)..(1487): Ceres Seq. ID no. 12714790
  misc_feature: MA Experiment ID: 108462 Result: Down-regulated in Transcription
  misc_feature: MA Experiment 108462 PARAMETER Experiment Name: At_Germinating_Seeds_cDNA_P Parameter: Age (day) Value: 2 vs. 0
  misc_feature: MA Experiment 108462 PARAMETER Experiment Name: At_Germinating_Seeds_cDNA_P Parameter: Tissue Value: Germinating Seeds
  misc_feature: MA Experiment ID: 108463 Result: Down-regulated in Transcription
  misc_feature: MA Experiment 108463 PARAMETER Experiment Name: At_Germinating_Seeds_cDNA_P Parameter: Age (day) Value: 3 vs. 0
  misc_feature: MA Experiment 108463 PARAMETER Experiment Name: At_Germinating_Seeds_cDNA_P Parameter: Tissue Value: Germinating Seeds
  misc_feature: MA Experiment ID: 108464 Result: Down-regulated in Transcription
  misc_feature: MA Experiment 108464 PARAMETER Experiment Name: At_Germinating_Seeds_cDNA_P Parameter: Age (day) Value: 4 vs. 0
  misc_feature: MA Experiment 108464 PARAMETER Experiment Name: At_Germinating_Seeds_cDNA_P Parameter: Tissue Value: Germinating Seeds
  misc_feature: MA Experiment ID: 108579 Result: Up-regulated in Transcription
  misc_feature: MA Experiment 108579 PARAMETER Experiment Name: At_4deg_Cold_cDNA_P Parameter: Temperature (deg C) Value: 4 vs. 22
  misc_feature: MA Experiment 108579 PARAMETER Experiment Name: At_4deg_Cold_cDNA_P Parameter: Timepoint (hr) Value: 6
  misc_feature: MA Experiment 108579 PARAMETER Experiment Name: At_4deg_Cold_cDNA_P Parameter: Tissue Value: Aerial
  misc_feature: MA Experiment ID: 108585 Result: Up-regulated in Transcription
  misc_feature: MA Experiment 108585 PARAMETER Experiment Name: At_5mM_NaNP_cDNA_P Parameter: Timepoint (hr) Value: 6
  misc_feature: MA Experiment 108585 PARAMETER Experiment Name: At_5mM_NaNP_cDNA_P Parameter: Tissue Value: Aerial
  misc_feature: MA Experiment 108585 PARAMETER Experiment Name: At_5mM_NaNP_cDNA_P Parameter: Treatment Value: null
  misc_feature: MA Experiment ID: 108595 Result: Down-regulated in Transcription
  misc_feature: MA Experiment 108595 PARAMETER Experiment Name: At_Ler-pi_Ovule_cDNA_P Parameter: Plant Line Value: null
  misc_feature: MA Experiment ID: 20000069 Result: Up-regulated in Transcription
  misc_feature: MA Experiment 20000069 PARAMETER Experiment Name: At_100uM_ABA_Mutants_cDNA_P Parameter: Plant Line Value: CS23
  misc_feature: MA Experiment 20000069 PARAMETER Experiment Name: At_100uM_ABA_Mutants_cDNA_P Parameter: Timepoint (hr) Value: 6
  misc_feature: MA Experiment 20000069 PARAMETER Experiment Name: At_100uM_ABA_Mutants_cDNA_P Parameter: Tissue Value: Aerial
  misc_feature: MA Experiment 20000069 PARAMETER Experiment Name: At_100uM_ABA_Mutants_cDNA_P Parameter: Treatment Value: 100uM ABA vs. No Treatment
  misc_feature: MA Experiment ID: 20000070 Result: Up-regulated in Transcription
  misc_feature: MA Experiment 20000070 PARAMETER Experiment Name: At_100uM_ABA_Mutants_cDNA_P Parameter: Plant Line Value: CS24
  misc_feature: MA Experiment 20000070 PARAMETER Experiment Name: At_100uM_ABA_Mutants_cDNA_P Parameter: Timepoint (hr) Value: 6
  misc_feature: MA Experiment 20000070 PARAMETER Experiment Name: At_100uM_ABA_Mutants_cDNA_P Parameter: Tissue Value: Aerial
  misc_feature: MA Experiment 20000070 PARAMETER Experiment Name: At_100uM_ABA_Mutants_cDNA_P Parameter: Treatment Value: 100uM ABA vs. No Treatment
  misc_feature: MA Experiment ID: 20000086 Result: Up-regulated in Transcription
  misc_feature: MA Experiment 20000086 PARAMETER Experiment Name: At_100uM_ABA_Mutants_cDNA_P Parameter: Plant Line Value: CS22
  misc_feature: MA Experiment 20000086 PARAMETER Experiment Name: At_100uM_ABA_Mutants_cDNA_P Parameter: Timepoint (hr) Value: 6
  misc_feature: MA Experiment 20000086 PARAMETER Experiment Name: At_100uM_ABA_Mutants_cDNA_P Parameter: Tissue Value: Aerial
  misc_feature: MA Experiment 20000086 PARAMETER Experiment Name: At_100uM_ABA_Mutants_cDNA_P Parameter: Treatment Value: 100uM ABA vs. No Treatment
  misc_feature: MA Experiment ID: 20000227 Result: Up-regulated in Transcription
  misc_feature: MA Experiment 20000227 PARAMETER Experiment Name: At_Root-Tips-vs-Tops_P Parameter: Tissue Value: Root Tips vs. Root Tops
  misc_feature: MA Experiment ID: 20000234 Result: Up-regulated in Transcription
  misc_feature: MA Experiment 20000234 PARAMETER Experiment Name: At_Siliques_P Parameter: Age (day) Value: 21
  misc_feature: MA Experiment 20000234 PARAMETER Experiment Name: At_Siliques_P Parameter: Organism Value: A. thaliana
  misc_feature: MA Experiment 20000234 PARAMETER Experiment Name: At_Siliques_P Parameter: Plant Line Value: WS
  misc_feature: MA Experiment 20000234 PARAMETER Experiment Name: At_Siliques_P Parameter: Tissue Value: Less Than 5mm Siliques vs. Whole Plant
  misc_feature: MA Experiment ID: 20001451 Result: Down-regulated in Transcription
  misc_feature: MA Experiment 20001451 PARAMETER Experiment Name: At_Far-red-induction_P Parameter: Age (day) Value: 7
  misc_feature: MA Experiment 20001451 PARAMETER Experiment Name: At_Far-red-induction_P Parameter: Light Value: Far-red vs. White
  misc_feature: MA Experiment 20001451 PARAMETER Experiment Name: At_Far-red-induction_P Parameter: Organism Value: A. thaliana
  misc_feature: MA Experiment 20001451 PARAMETER Experiment Name: At_Far-red-induction_P Parameter: Plant Line Value: Columbia
  misc_feature: MA Experiment 20001451 PARAMETER Experiment Name: At_Far-red-induction_P Parameter: Timepoint (hr) Value: 24
  misc_feature: MA Experiment 20001451 PARAMETER Experiment Name: At_Far-red-induction_P Parameter: Tissue Value: Whole Plant
  misc_feature: MA Experiment ID: 20001557 Result: Up-regulated in Transcription
  misc_feature: MA Experiment 20001557 PARAMETER Experiment Name: At_Drought_Soil_Dry_P Parameter: Age (day) Value: 27
  misc_feature: MA Experiment 20001557 PARAMETER Experiment Name: At_Drought_Soil_Dry_P Parameter: Organism Value: A. thaliana
  misc_feature: MA Experiment 20001557 PARAMETER Experiment Name: At_Drought_Soil_Dry_P Parameter: Plant Line Value: WS
  misc_feature: MA Experiment 20001557 PARAMETER Experiment Name: At_Drought_Soil_Dry_P Parameter: Post Timepoint (hr) Value: 3
  misc_feature: MA Experiment 20001557 PARAMETER Experiment Name: At_Drought_Soil_Dry_P Parameter: Post-Treatment Value: Re-Water vs. No Drought
  misc_feature: MA Experiment 20001557 PARAMETER Experiment Name: At_Drought_Soil_Dry_P Parameter: Timepoint (day) Value: 13
  misc_feature: MA Experiment 20001557 PARAMETER Experiment Name: At_Drought_Soil_Dry_P Parameter: Treatment Value: Drought vs. No Drought
  misc_feature: MA Experiment ID: 20001558 Result: Up-regulated in Transcription
  misc_feature: MA Experiment 20001558 PARAMETER Experiment Name: At_Drought_Soil_Dry_P Parameter: Age (day) Value: 27
  misc_feature: MA Experiment 20001558 PARAMETER Experiment Name: At_Drought_Soil_Dry_P Parameter: Organism Value: A. thaliana
  misc_feature: MA Experiment 20001558 PARAMETER Experiment Name: At_Drought_Soil_Dry_P Parameter: Plant Line Value: WS
  misc_feature: MA Experiment 20001558 PARAMETER Experiment Name: At_Drought_Soil_Dry_P Parameter: Post Timepoint (hr) Value: 6
  misc_feature: MA Experiment 20001558 PARAMETER Experiment Name: At_Drought_Soil_Dry_P Parameter: Post-Treatment Value: Re-Water vs. No Drought
  misc_feature: MA Experiment 20001558 PARAMETER Experiment Name: At_Drought_Soil_Dry_P Parameter: Timepoint (day) Value: 13
  misc_feature: MA Experiment 20001558 PARAMETER Experiment Name: At_Drought_Soil_Dry_P Parameter: Treatment Value: Drought vs. No Drought
  misc_feature: Pfam Name: Band_7 Pfam Description: SPFH domain / Band 7 family

SEQ ID NO: 92790 - protein, 421 aa, Arabidopsis thaliana; identical to SEQ ID NO: 89034
  peptide (1)..(421): Ceres Seq. ID no. 12714791
  misc_feature: Pfam Name: Band_7 Pfam Description: SPFH domain / Band 7 family
  misc_feature (11)..(421): Homolog of NCBI NO: 18417021 NR Description: putative protein; protein id: At4g27585.1, by cDNA: 20829., supported by cDNA: gi_14334465, supported by
  misc_feature (11)..(403): Homolog of NCBI NO: 7487517 NR Description: hypothetical protein T29A15.70 - Arabidopsis >gi|4469009|emb|CAB38270.1| putative protein [Arabidopsis >gi|7269612|emb|CAB81408.1| putative protein [Arabidopsis
  misc_feature (3)..(360): Homolog of NCBI NO: 15239547 NR Description: putative protein; protein id: At5g54100.1, by cDNA: 205622. [Arabidopsis thaliana] contains similarity to stomatin like protein~gene_id:MJP23.8
  misc_feature (3)..(360): Homolog of NCBI NO: 21554125 NR Description: stomatin-like protein [Arabidopsis thaliana]
  misc_feature (29)..(382): Homolog of NCBI NO: 7716464 NR Description: stomatin-like protein [Zea mays]
  misc_feature (51)..(354): Homolog of NCBI NO: 23394406 NR Description: unknown [Phytophthora infestans]
  misc_feature (73)..(361): Homolog of NCBI NO: 15604196 NR Description: unknown [Rickettsia prowazekii]
  misc_feature (73)..(354): Homolog of NCBI NO: 15892375 NR Description: unknown [Rickettsia conorii]
  misc_feature (68)..(383): Homolog of NCBI NO: 32766629 NR Description: Unknown (protein for MGC:63505) [Danio rerio]
  misc_feature (68)..(386): Homolog of NCBI NO: 12963591 NR Description: stomatin-like protein 2 [Mus musculus]

SEQ ID NO: 92791 - protein, 411 aa, Arabidopsis thaliana; identical to SEQ ID NO: 34823
  peptide (1)..(411): Ceres Seq. ID no. 12714792
  misc_feature: Pfam Name: Band_7 Pfam Description: SPFH domain / Band 7 family
  misc_feature (1)..(411): Homolog of NCBI NO: 18417021 NR Description: putative protein; protein id: At4g27585.1, by cDNA: 20829., supported by cDNA: gi_14334465, supported by
  misc_feature (1)..(393): Homolog of NCBI NO: 7487517 NR Description: hypothetical protein T29A15.70 - Arabidopsis >gi|4469009|emb|CAB38270.1| putative protein [Arabidopsis >gi|7269612|emb|CAB81408.1| putative protein [Arabidopsis
  misc_feature (1)..(350): Homolog of NCBI NO: 15239547 NR Description: putative protein; protein id: At5g54100.1, by cDNA: 205622. [Arabidopsis thaliana] contains similarity to stomatin like protein~gene_id:MJP23.8
  misc_feature (1)..(350): Homolog of NCBI NO: 21554125 NR Description: stomatin-like protein [Arabidopsis thaliana]
  misc_feature (19)..(372): Homolog of NCBI NO: 7716464 NR Description: stomatin-like protein [Zea mays]
  misc_feature (41)..(344): Homolog of NCBI NO: 23394406 NR Description: unknown [Phytophthora infestans]
  misc_feature (63)..(351): Homolog of NCBI NO: 15604196 NR Description: unknown [Rickettsia prowazekii]
  misc_feature (63)..(344): Homolog of NCBI NO: 15892375 NR Description: unknown [Rickettsia conorii]
  misc_feature (58)..(373): Homolog of NCBI NO: 32766629 NR Description: Unknown (protein for MGC:63505) [Danio rerio]
  misc_feature (58)..(376): Homolog of NCBI NO: 12963591 NR Description: stomatin-like protein 2 [Mus musculus]

SEQ ID NO: 92792 - protein, 253 aa, Arabidopsis thaliana; identical to SEQ ID NO: 34824
  peptide (1)..(253): Ceres Seq. ID no. 12714793
  misc_feature: Pfam Name: Band_7 Pfam Description: SPFH domain / Band 7 family
  misc_feature (1)..(253): Homolog of NCBI NO: 18417021 NR Description: putative protein; protein id: At4g27585.1, by cDNA: 20829., supported by cDNA: gi_14334465, supported by
  misc_feature (1)..(235): Homolog of NCBI NO: 7487517 NR Description: hypothetical protein T29A15.70 - Arabidopsis >gi|4469009|emb|CAB38270.1| putative protein [Arabidopsis >gi|7269612|emb|CAB81408.1| putative protein [Arabidopsis
  misc_feature (1)..(192): Homolog of NCBI NO: 15239547 NR Description: putative protein; protein id: At5g54100.1, by cDNA: 205622. [Arabidopsis thaliana] contains similarity to stomatin like protein~gene_id:MJP23.8
  misc_feature (1)..(192): Homolog of NCBI NO: 21554125 NR Description: stomatin-like protein [Arabidopsis thaliana]
  misc_feature (1)..(214): Homolog of NCBI NO: 7716464 NR Description: stomatin-like protein [Zea mays]
  misc_feature (1)..(186): Homolog of NCBI NO: 23394406 NR Description: unknown [Phytophthora infestans]
  misc_feature (1)..(193): Homolog of NCBI NO: 15604196 NR Description: unknown [Rickettsia prowazekii]
  misc_feature (1)..(186): Homolog of NCBI NO: 15892375 NR Description: unknown [Rickettsia conorii]
  misc_feature (1)..(215): Homolog of NCBI NO: 32766629 NR Description: Unknown (protein for MGC:63505) [Danio rerio]
  misc_feature (1)..(218): Homolog of NCBI NO: 12963591 NR Description: stomatin-like protein 2 [Mus musculus]

SEQ ID NO: 92793 - DNA, 1500 bp, Arabidopsis thaliana; identical to SEQ ID NO: 89037
  misc_feature (1)..(1500): Ceres Seq. ID no. 12714802
  misc_feature: MA Experiment ID: 108461 Result: Down-regulated in Transcription
  misc_feature: MA Experiment 108461 PARAMETER Experiment Name: At_Germinating_Seeds_cDNA_P Parameter: Age (day) Value: 1 vs. 0
  misc_feature: MA Experiment 108461 PARAMETER Experiment Name: At_Germinating_Seeds_cDNA_P Parameter: Tissue Value: Germinating Seeds
  misc_feature: MA Experiment ID: 108462 Result: Down-regulated in Transcription
  misc_feature: MA Experiment 108462 PARAMETER Experiment Name: At_Germinating_Seeds_cDNA_P Parameter: Age (day) Value: 2 vs. 0
  misc_feature: MA Experiment 108462 PARAMETER Experiment Name: At_Germinating_Seeds_cDNA_P Parameter: Tissue Value: Germinating Seeds
  misc_feature: MA Experiment ID: 108573 Result: Up-regulated in Transcription
  misc_feature: MA Experiment 108573 PARAMETER Experiment Name: At_Drought_cDNA_P Parameter: Timepoint (hr) Value: 6
  misc_feature: MA Experiment 108573 PARAMETER Experiment Name: At_Drought_cDNA_P Parameter: Tissue Value: Aerial
  misc_feature: MA Experiment 108573 PARAMETER Experiment Name: At_Drought_cDNA_P Parameter: Treatment Value: Drought vs. No Drought
  misc_feature: MA Experiment ID: 108576 Result: Up-regulated in Transcription
  misc_feature: MA Experiment 108576 PARAMETER Experiment Name: At_42deg_Heat_cDNA_P Parameter: Temperature (deg C) Value: 42 vs. 22
  misc_feature: MA Experiment 108576 PARAMETER Experiment Name: At_42deg_Heat_cDNA_P Parameter: Timepoint (hr) Value: 1
  misc_feature: MA Experiment 108576 PARAMETER Experiment Name: At_42deg_Heat_cDNA_P Parameter: Tissue Value: Aerial
  misc_feature: MA Experiment ID: 108577 Result: Up-regulated in Transcription
  misc_feature: MA Experiment 108577 PARAMETER Experiment Name: At_42deg_Heat_cDNA_P Parameter: Temperature (deg C) Value: 42 vs. 22
  misc_feature: MA Experiment 108577 PARAMETER Experiment Name: At_42deg_Heat_cDNA_P Parameter: Timepoint (hr) Value: 6
  misc_feature: MA Experiment 108577 PARAMETER Experiment Name: At_42deg_Heat_cDNA_P Parameter: Tissue Value: Aerial
  misc_feature: MA Experiment ID: 108585 Result: Up-regulated in Transcription
  misc_feature: MA Experiment 108585 PARAMETER Experiment Name: At_5mM_NaNP_cDNA_P Parameter: Timepoint (hr) Value: 6
  misc_feature: MA Experiment 108585 PARAMETER Experiment Name: At_5mM_NaNP_cDNA_P Parameter: Tissue Value: Aerial
  misc_feature: MA Experiment 108585 PARAMETER Experiment Name: At_5mM_NaNP_cDNA_P Parameter: Treatment Value: null
  misc_feature: MA Experiment ID: 108595 Result: Down-regulated in Transcription
  misc_feature: MA Experiment 108595 PARAMETER Experiment Name: At_Ler-pi_Ovule_cDNA_P Parameter: Plant Line Value: null
  misc_feature: MA Experiment ID: 108668 Result: Up-regulated in Transcription
  misc_feature: MA Experiment 108668 PARAMETER Experiment Name: At_2mM_SA_cDNA_P Parameter: Plant Line Value: WS
  misc_feature: MA Experiment 108668 PARAMETER Experiment Name: At_2mM_SA_cDNA_P Parameter: Timepoint (hr) Value: 6
  misc_feature: MA Experiment 108668 PARAMETER Experiment Name: At_2mM_SA_cDNA_P Parameter: Treatment Value: 2mM SA vs. No Treatment
  misc_feature: MA Experiment ID: 20000093 Result: Up-regulated in Transcription
  misc_feature: MA Experiment 20000093 PARAMETER Experiment Name: At_42deg_Heat_cDNA_P Parameter: Temperature (deg C) Value: 42 vs. 22
  misc_feature: MA Experiment 20000093 PARAMETER Experiment Name: At_42deg_Heat_cDNA_P Parameter: Timepoint (hr) Value: 0.5
  misc_feature: MA Experiment 20000093 PARAMETER Experiment Name: At_42deg_Heat_cDNA_P Parameter: Tissue Value: Aerial
  misc_feature: MA Experiment ID: 20000111 Result: Up-regulated in Transcription
  misc_feature: MA Experiment 20000111 PARAMETER Experiment Name: At_42deg_Heat_cDNA_P Parameter: Temperature (deg C) Value: 42 vs. 22
  misc_feature: MA Experiment 20000111 PARAMETER Experiment Name: At_42deg_Heat_cDNA_P Parameter: Timepoint (hr) Value: 6
  misc_feature: MA Experiment 20000111 PARAMETER Experiment Name: At_42deg_Heat_cDNA_P Parameter: Tissue Value: Aerial
  misc_feature: MA Experiment ID: 20000144 Result: Up-regulated in Transcription
  misc_feature: MA Experiment 20000144 PARAMETER Experiment Name: At_42deg_Heat_cDNA_P Parameter: Temperature (deg C) Value: 42 vs. 22
  misc_feature: MA Experiment 20000144 PARAMETER Experiment Name: At_42deg_Heat_cDNA_P Parameter: Timepoint (hr) Value: 1
  misc_feature: MA Experiment 20000144 PARAMETER Experiment Name: At_42deg_Heat_cDNA_P Parameter: Tissue Value: Aerial

SEQ ID NO: 92794 - protein, 398 aa, Arabidopsis thaliana; identical to SEQ ID NO: 42203
  peptide (1)..(398): Ceres Seq. ID no. 12714803
  misc_feature (121)..(305): Pfam Name: ATPase family associated with various cellular Pfam Description: ATPase family associated with various cellular
  misc_feature (1)..(398): Homolog of NCBI NO: 15234242 NR Description: putative protein; protein id: At4g27680.1, by cDNA: 142160., supported by cDNA: gi_20260327 [Arabidopsis
  misc_feature (3)..(397): Homolog of NCBI NO: 15238774 NR Description: 26S proteasome regulatory particle chain protein; protein id: At5g53540.1, supported by cDNA: 38213., by cDNA: gi_16604477 [Arabidopsis thaliana]
  misc_feature (49)..(352): Homolog of NCBI NO: 7487016 NR Description: hypothetical protein T14P8.7 - Arabidopsis >gi|3193292|gb|AAC19276.1| similar to ATPases associated with
  misc_feature (49)..(352): Homolog of NCBI NO: 20259341 NR Description: unknown protein [Arabidopsis thaliana]
  misc_feature (49)..(352): Homolog of NCBI NO: 30679158 NR Description: expressed protein [Arabidopsis thaliana]
  misc_feature (45)..(313): Homolog of NCBI NO: 30678418 NR Description: expressed protein [Arabidopsis thaliana]
  misc_feature (48)..(313): Homolog of NCBI NO: 33146850 NR Description: putative MSP1(mitochondrial sorting of proteins)
  misc_feature (55)..(313): Homolog of NCBI NO: 25518408 NR Description: hypothetical protein F22D16.11 - Arabidopsis >gi|6056413|gb|AAF02877.1|AC009525_11 Unknown protein
  misc_feature (57)..(313): Homolog of NCBI NO: 15234019 NR Description: putative protein; protein id: At4g24850.1
  misc_feature (34)..(342): Homolog of NCBI NO: 39794661 NR Description: Unknown (protein for IMAGE:4386512) [Homo sapiens]

SEQ ID NO: 92795 - protein, 265 aa, Arabidopsis thaliana; identical to SEQ ID NO: 42204
  peptide (1)..(265): Ceres Seq. ID no. 12714804
  misc_feature (1)..(172): Pfam Name: ATPase family associated with various cellular Pfam Description: ATPase family associated with various cellular
  misc_feature (1)..(265): Homolog of NCBI NO: 15234242 NR Description: putative protein; protein id: At4g27680.1, by cDNA: 142160., supported by cDNA: gi_20260327 [Arabidopsis
  misc_feature (1)..(264): Homolog of NCBI NO: 15238774 NR Description: 26S proteasome regulatory particle chain protein; protein id: At5g53540.1, supported by cDNA: 38213., by cDNA: gi_16604477 [Arabidopsis thaliana]
  misc_feature (1)..(219): Homolog of NCBI NO: 7487016 NR Description: hypothetical protein T14P8.7 - Arabidopsis >gi|3193292|gb|AAC19276.1| similar to ATPases associated with
  misc_feature (1)..(219): Homolog of NCBI NO: 20259341 NR Description: unknown protein [Arabidopsis thaliana]
  misc_feature (1)..(219): Homolog of NCBI NO: 30679158 NR Description: expressed protein [Arabidopsis thaliana]
  misc_feature (1)..(180): Homolog of NCBI NO: 30678418 NR Description: expressed protein [Arabidopsis thaliana]
  misc_feature (1)..(180): Homolog of NCBI NO: 33146850 NR Description: putative MSP1(mitochondrial sorting of proteins)
  misc_feature (1)..(180): Homolog of NCBI NO: 25518408 NR Description: hypothetical protein F22D16.11 - Arabidopsis >gi|6056413|gb|AAF02877.1|AC009525_11 Unknown protein
  misc_feature (1)..(180): Homolog of NCBI NO: 15234019 NR Description: putative protein; protein id: At4g24850.1
  misc_feature (1)..(209): Homolog of NCBI NO: 39794661 NR Description: Unknown (protein for IMAGE:4386512) [Homo sapiens]

SEQ ID NO: 92796 - protein, 243 aa, Arabidopsis thaliana; identical to SEQ ID NO: 42205
  peptide (1)..(243): Ceres Seq. ID no. 12714805
  misc_feature (1)..(150): Pfam Name: ATPase family associated with various cellular Pfam Description: ATPase family associated with various cellular
  misc_feature (1)..(243): Homolog of NCBI NO: 15234242 NR Description: putative protein; protein id: At4g27680.1, by cDNA: 142160., supported by cDNA: gi_20260327 [Arabidopsis
  misc_feature (1)..(242): Homolog of NCBI NO: 15238774 NR Description: 26S proteasome regulatory particle chain protein; protein id: At5g53540.1, supported by cDNA: 38213., by cDNA: gi_16604477 [Arabidopsis thaliana]
  misc_feature (1)..(197): Homolog of NCBI NO: 7487016 NR Description: hypothetical protein T14P8.7 - Arabidopsis >gi|3193292|gb|AAC19276.1| similar to ATPases associated with
  misc_feature (1)..(197): Homolog of NCBI NO: 20259341 NR Description: unknown protein [Arabidopsis thaliana]
  misc_feature (1)..(197): Homolog of NCBI NO: 30679158 NR Description: expressed protein [Arabidopsis thaliana]
  misc_feature (1)..(158): Homolog of NCBI NO: 30678418 NR Description: expressed protein [Arabidopsis thaliana]
  misc_feature (1)..(158): Homolog of NCBI NO: 33146850 NR Description: putative MSP1(mitochondrial sorting of proteins)
  misc_feature (1)..(158): Homolog of NCBI NO: 25518408 NR Description: hypothetical protein F22D16.11 - Arabidopsis >gi|6056413|gb|AAF02877.1|AC009525_11 Unknown protein
  misc_feature (1)..(158): Homolog of NCBI NO: 15234019 NR Description: putative protein; protein id: At4g24850.1
  misc_feature (1)..(187): Homolog of NCBI NO: 39794661 NR Description: Unknown (protein for IMAGE:4386512) [Homo sapiens]

SEQ ID NO: 92797 - DNA, 1616 bp, Arabidopsis thaliana; identical to SEQ ID NO: 89041
  misc_feature (1)..(1616): Ceres Seq. ID no. 12714839
  misc_feature: MA Experiment ID: 20000227 Result: Up-regulated in Transcription
  misc_feature: MA Experiment 20000227 PARAMETER Experiment Name: At_Root-Tips-vs-Tops_P Parameter: Tissue Value: Root Tips vs. Root Tops
  misc_feature: MA Experiment ID: 20000234 Result: Up-regulated in Transcription
  misc_feature: MA Experiment 20000234 PARAMETER Experiment Name: At_Siliques_P Parameter: Age (day) Value: 21
  misc_feature: MA Experiment 20000234 PARAMETER Experiment Name: At_Siliques_P Parameter: Organism Value: A. thaliana
  misc_feature: MA Experiment 20000234 PARAMETER Experiment Name: At_Siliques_P Parameter: Plant Line Value: WS
  misc_feature: MA Experiment 20000234 PARAMETER Experiment Name: At_Siliques_P Parameter: Tissue Value: Less Than 5mm Siliques vs. Whole Plant
  misc_feature: MA Experiment ID: 20000235 Result: Up-regulated in Transcription
  misc_feature: MA Experiment 20000235 PARAMETER Experiment Name: At_Siliques_P Parameter: Age (day) Value: 21
  misc_feature: MA Experiment 20000235 PARAMETER Experiment Name: At_Siliques_P Parameter: Organism Value: A. thaliana
  misc_feature: MA Experiment 20000235 PARAMETER Experiment Name: At_Siliques_P Parameter: Plant Line Value: WS
  misc_feature: MA Experiment 20000235 PARAMETER Experiment Name: At_Siliques_P Parameter: Tissue Value: 5-10mm Siliques vs. Whole Plant
  misc_feature: MA Experiment ID: 20000264 Result: Up-regulated in Transcription
  misc_feature: MA Experiment 20000264 PARAMETER Experiment Name: At_Open_Flower_P Parameter: Age (day) Value: 21
  misc_feature: MA Experiment 20000264 PARAMETER Experiment Name: At_Open_Flower_P Parameter: Plant Line Value: WS
  misc_feature: MA Experiment 20000264 PARAMETER Experiment Name: At_Open_Flower_P Parameter: Tissue Value: Open Flower vs. Whole Plant
  misc_feature: MA Experiment ID: 20000265 Result: Up-regulated in Transcription
  misc_feature: MA Experiment 20000265 PARAMETER Experiment Name: At_Open_Flower_P Parameter: Age (day) Value: 21
  misc_feature: MA Experiment 20000265 PARAMETER Experiment Name: At_Open_Flower_P Parameter: Plant Line Value: WS
  misc_feature: MA Experiment 20000265 PARAMETER Experiment Name: At_Open_Flower_P Parameter: Tissue Value: Closed Flower vs. Whole Plant
  misc_feature: MA Experiment ID: 20000286 Result: Up-regulated in Transcription
  misc_feature: MA Experiment 20000286 PARAMETER Experiment Name: At_Open_Flower_P Parameter: Age (day) Value: 21
  misc_feature: MA Experiment 20000286 PARAMETER Experiment Name: At_Open_Flower_P Parameter: Plant Line Value: WS
  misc_feature: MA Experiment 20000286 PARAMETER Experiment Name: At_Open_Flower_P Parameter: Tissue Value: Half Open vs. Whole Plant
  misc_feature: MA Experiment ID: 20000438 Result: Up-regulated in Transcription
  misc_feature: MA Experiment 20000438 PARAMETER Experiment Name: At_Shoots__P Parameter: Age (day) Value: 14
  misc_feature: MA Experiment 20000438 PARAMETER Experiment Name: At_Shoots__P Parameter: Tissue Value: Shoots vs. Whole Plant
  misc_feature: Pfam Name: Pkinase Pfam Description: Protein kinase domain

SEQ ID NO: 92798 - protein, 465 aa, Arabidopsis thaliana; identical to SEQ ID NO: 89042
  peptide (1)..(465): Ceres Seq. ID no. 12714840
  misc_feature: Pfam Name: Pkinase Pfam Description: Protein kinase domain
  misc_feature (1)..(465): Homolog of NCBI NO: 22329101 NR Description: putative protein kinase; protein id: At4g32710.1
  misc_feature (79)..(461): Homolog of NCBI NO: 13877617 NR Description: protein kinase-like protein [Arabidopsis thaliana]
  misc_feature (79)..(461): Homolog of NCBI NO: 15230130 NR Description: protein kinase, putative; protein id: supported by cDNA: 17909., supported by cDNA: gi_13877616,
  misc_feature (79)..(461): Homolog of NCBI NO: 13447449 NR Description: receptor protein kinase PERK1 [Brassica napus]
  misc_feature (111)..(462): Homolog of NCBI NO: 29367569 NR Description: putative receptor protein kinase [Oryza sativa
  misc_feature (1)..(465): Homolog of NCBI NO: 15230108 NR Description: protein kinase, putative; protein id: At3g24400.1
  misc_feature (7)..(465): Homolog of NCBI NO: 30690042 NR Description: serine threonine protein kinase -related thaliana] >gi|26452004|dbj|BAC43092.1| putative serine/threonine kinase [Arabidopsis thaliana] >gi|29029022|gb|AAO64890.1|
  misc_feature (89)..(437): Homolog of NCBI NO: 34904234 NR Description: putative receptor protein kinase PERK1 [Oryza
  misc_feature (100)..(465): Homolog of NCBI NO: 11994703 NR Description: somatic embryogenesis receptor kinase-like
  misc_feature (99)..(463): Homolog of NCBI NO: 15222081 NR Description: hypothetical protein; protein id: At1g49270.1

SEQ ID NO: 92799 - protein, 388 aa, Arabidopsis thaliana; identical to SEQ ID NO: 80299
  peptide (1)..(388): Ceres Seq. ID no. 12714841
  misc_feature: Pfam Name: Pkinase Pfam Description: Protein kinase domain
  misc_feature (1)..(388): Homolog of NCBI NO: 22329101 NR Description: putative protein kinase; protein id: At4g32710.1
  misc_feature (2)..(384): Homolog of NCBI NO: 13877617 NR Description: protein kinase-like protein [Arabidopsis thaliana]
  misc_feature (2)..(384): Homolog of NCBI NO: 15230130 NR Description: protein kinase, putative; protein id: supported by cDNA: 17909., supported by cDNA: gi_13877616,
  misc_feature (2)..(384): Homolog of NCBI NO: 13447449 NR Description: receptor protein kinase PERK1 [Brassica napus]
  misc_feature (34)..(385): Homolog of NCBI NO: 29367569 NR Description: putative receptor protein kinase [Oryza sativa
  misc_feature (1)..(388): Homolog of NCBI NO: 15230108 NR Description: protein kinase, putative; protein id: At3g24400.1
  misc_feature (1)..(388): Homolog of NCBI NO: 30690042 NR Description: serine threonine protein kinase -related thaliana] >gi|26452004|dbj|BAC43092.1| putative serine/threonine kinase [Arabidopsis thaliana] >gi|29029022|gb|AAO64890.1|
  misc_feature (12)..(360): Homolog of NCBI NO: 34904234 NR Description: putative receptor protein kinase PERK1 [Oryza
  misc_feature (23)..(388): Homolog of NCBI NO: 11994703 NR Description: somatic embryogenesis receptor kinase-like
  misc_feature (22)..(386): Homolog of NCBI NO: 15222081 NR Description: hypothetical protein; protein id: At1g49270.1

SEQ ID NO: 92800 - protein, 360 aa, Arabidopsis thaliana; identical to SEQ ID NO: 89044
  peptide (1)..(360): Ceres Seq. ID no. 12714842
  misc_feature: Pfam Name: Pkinase Pfam Description: Protein kinase domain
  misc_feature (1)..(360): Homolog of NCBI NO: 22329101 NR Description: putative protein kinase; protein id: At4g32710.1
  misc_feature (1)..(356): Homolog of NCBI NO: 13877617 NR Description: protein kinase-like protein [Arabidopsis thaliana]
  misc_feature (1)..(356): Homolog of NCBI NO: 15230130 NR Description: protein kinase, putative; protein id: supported by cDNA: 17909., supported by cDNA: gi_13877616,
  misc_feature (1)..(356): Homolog of NCBI NO: 13447449 NR Description: receptor protein kinase PERK1 [Brassica napus]
  misc_feature (6)..(357): Homolog of NCBI NO: 29367569 NR Description: putative receptor protein kinase [Oryza sativa
  misc_feature (1)..(360): Homolog of NCBI NO: 15230108 NR Description: protein kinase, putative; protein id: At3g24400.1
  misc_feature (1)..(360): Homolog of NCBI NO: 30690042 NR Description: serine threonine protein kinase -related thaliana] >gi|26452004|dbj|BAC43092.1| putative serine/threonine kinase [Arabidopsis thaliana] >gi|29029022|gb|AAO64890.1|
  misc_feature (1)..(332): Homolog of NCBI NO: 34904234 NR Description: putative receptor protein kinase PERK1 [Oryza
  misc_feature (1)..(360): Homolog of NCBI NO: 11994703 NR Description: somatic embryogenesis receptor kinase-like
  misc_feature (1)..(358): Homolog of NCBI NO: 15222081 NR Description: hypothetical protein; protein id: At1g49270.1

SEQ ID NO: 92801 - DNA, 1029 bp, Arabidopsis thaliana; identical to SEQ ID NO: 89045
  misc_feature (1)..(1029): Ceres Seq. ID no. 12714859
  misc_feature: MA Experiment ID: 20001451 Result: Up-regulated in Transcription
  misc_feature: MA Experiment 20001451 PARAMETER Experiment Name: At_Far-red-induction_P Parameter: Age (day) Value: 7
  misc_feature: MA Experiment 20001451 PARAMETER Experiment Name: At_Far-red-induction_P Parameter: Light Value: Far-red vs. White
  misc_feature: MA Experiment 20001451 PARAMETER Experiment Name: At_Far-red-induction_P Parameter: Organism Value: A. thaliana
  misc_feature: MA Experiment 20001451 PARAMETER Experiment Name: At_Far-red-induction_P Parameter: Plant Line Value: Columbia
  misc_feature: MA Experiment 20001451 PARAMETER Experiment Name: At_Far-red-induction_P Parameter: Timepoint (hr) Value: 24
  misc_feature: MA Experiment 20001451 PARAMETER Experiment Name: At_Far-red-induction_P Parameter: Tissue Value: Whole Plant

SEQ ID NO: 92802 - protein, 342 aa, Arabidopsis thaliana; identical to SEQ ID NO: 89046
  peptide (1)..(342): Ceres Seq. ID no. 12714860
  misc_feature (1)..(321): Homolog of NCBI NO: 22329107 NR Description: G-protein beta family; protein id: At4g32990.1
  misc_feature (1)..(342): Homolog of NCBI NO: 18401018 NR Description: G-protein beta family; protein id: At2g26060.1, by cDNA: 142426., supported by cDNA: gi_20260509 [Arabidopsis >gi|20197268|gb|AAC31230.2| expressed protein [Arabidopsis
  misc_feature (4)..(269): Homolog of NCBI NO: 7446121 NR Description: hypothetical protein At2g26060 [imported] -
  misc_feature (268)..(342): Homolog of NCBI NO: 7446121 NR Description: hypothetical protein At2g26060 [imported] -
  misc_feature (10)..(338): Homolog of NCBI NO: 34394959 NR Description: putative WD40 protein Ciao1 [Oryza sativa
  misc_feature (16)..(338): Homolog of NCBI NO: 19922278 NR Description: CG12797-PA [Drosophila melanogaster]
  misc_feature (15)..(337): Homolog of NCBI NO: 4757988 NR Description: WD40 protein Ciao1 [Homo sapiens]
  misc_feature (10)..(340): Homolog of NCBI NO: 28279952 NR Description: Similar to WD40 protein Ciao1 [Danio rerio]
  misc_feature (20)..(338): Homolog of NCBI NO: 32698449 NR Description: Hypothetical protein Y18D10A.9 [Caenorhabditis
  misc_feature (10)..(336): Homolog of NCBI NO: 19113764 NR Description: WD domian, G-beta repeat protein

SEQ ID NO: 92803 - protein, 339 aa, Arabidopsis thaliana; identical to SEQ ID NO: 89047
  peptide (1)..(339): Ceres Seq. ID no. 12714861
  misc_feature (1)..(318): Homolog of NCBI NO: 22329107 NR Description: G-protein beta family; protein id: At4g32990.1
  misc_feature (1)..(339): Homolog of NCBI NO: 18401018 NR Description: G-protein beta family; protein id: At2g26060.1, by cDNA: 142426., supported by cDNA: gi_20260509 [Arabidopsis >gi|20197268|gb|AAC31230.2| expressed protein [Arabidopsis
  misc_feature (1)..(266): Homolog of NCBI NO: 7446121 NR Description: hypothetical protein At2g26060 [imported] -
  misc_feature (265)..(339): Homolog of NCBI NO: 7446121 NR Description: hypothetical protein At2g26060 [imported] -
  misc_feature (7)..(335): Homolog of NCBI NO: 34394959 NR Description: putative WD40 protein Ciao1 [Oryza sativa
  misc_feature (13)..(335): Homolog of NCBI NO: 19922278 NR Description: CG12797-PA [Drosophila melanogaster]
  misc_feature (12)..(334): Homolog of NCBI NO: 4757988 NR Description: WD40 protein Ciao1 [Homo sapiens]
  misc_feature (7)..(337): Homolog of NCBI NO: 28279952 NR Description: Similar to WD40 protein Ciao1 [Danio rerio]
  misc_feature (17)..(335): Homolog of NCBI NO: 32698449 NR Description: Hypothetical protein Y18D10A.9 [Caenorhabditis
  misc_feature (7)..(333): Homolog of NCBI NO: 19113764 NR Description: WD domian, G-beta repeat protein

SEQ ID NO: 92804 - protein, 185 aa, Arabidopsis thaliana; identical to SEQ ID NO: 89048
  peptide (1)..(185): Ceres Seq. ID no. 12714862
  misc_feature (1)..(164): Homolog of NCBI NO: 22329107 NR Description: G-protein beta family; protein id: At4g32990.1
  misc_feature (1)..(185): Homolog of NCBI NO: 18401018 NR Description: G-protein beta family; protein id: At2g26060.1, by cDNA: 142426., supported by cDNA: gi_20260509 [Arabidopsis >gi|20197268|gb|AAC31230.2| expressed protein [Arabidopsis
  misc_feature (1)..(112): Homolog of NCBI NO: 7446121 NR Description: hypothetical protein At2g26060 [imported] -
  misc_feature (111)..(185): Homolog of NCBI NO: 7446121 NR Description: hypothetical protein At2g26060 [imported] -
  misc_feature (1)..(181): Homolog of NCBI NO: 34394959 NR Description: putative WD40 protein Ciao1 [Oryza sativa
  misc_feature (1)..(181): Homolog of NCBI NO: 19922278 NR Description: CG12797-PA [Drosophila melanogaster]
  misc_feature (1)..(180): Homolog of NCBI NO: 4757988 NR Description: WD40 protein Ciao1 [Homo sapiens]
  misc_feature (1)..(183): Homolog of NCBI NO: 28279952 NR Description: Similar to WD40 protein Ciao1 [Danio rerio]
  misc_feature (1)..(181): Homolog of NCBI NO: 32698449 NR Description: Hypothetical protein Y18D10A.9 [Caenorhabditis
  misc_feature (1)..(179): Homolog of NCBI NO: 19113764 NR Description: WD domian, G-beta repeat protein

SEQ ID NO: 92805 - DNA, 1536 bp, Arabidopsis thaliana; identical to SEQ ID NO: 89049
  misc_feature (1)..(1536): Ceres Seq. ID no. 12714870
  misc_feature: MA Experiment ID: 108569 Result: Up-regulated in Transcription
  misc_feature: MA Experiment 108569 PARAMETER Experiment Name: At_0.001%_MeJA__cDNA_P Parameter: Timepoint (hr) Value: 6
  misc_feature: MA Experiment 108569 PARAMETER Experiment Name: At_0.001%_MeJA__cDNA_P Parameter: Tissue Value: Aerial
  misc_feature: MA Experiment 108569 PARAMETER Experiment Name: At_0.001%_MeJA__cDNA_P Parameter: Treatment Value: 0.001% MeJA vs. No Treatment
  misc_feature: MA Experiment ID: 108573 Result: Up-regulated in Transcription
  misc_feature: MA Experiment 108573 PARAMETER Experiment Name: At_Drought_cDNA_P Parameter: Timepoint (hr) Value: 6
  misc_feature: MA Experiment 108573 PARAMETER Experiment Name: At_Drought_cDNA_P Parameter: Tissue Value: Aerial
  misc_feature: MA Experiment 108573 PARAMETER Experiment Name: At_Drought_cDNA_P Parameter: Treatment Value: Drought vs. No Drought
  misc_feature: MA Experiment ID: 108576 Result: Down-regulated in Transcription
  misc_feature: MA Experiment 108576 PARAMETER Experiment Name: At_42deg_Heat_cDNA_P Parameter: Temperature (deg C) Value: 42 vs. 22
  misc_feature: MA Experiment 108576 PARAMETER Experiment Name: At_42deg_Heat_cDNA_P Parameter: Timepoint (hr) Value: 1
  misc_feature: MA Experiment 108576 PARAMETER Experiment Name: At_42deg_Heat_cDNA_P Parameter: Tissue Value: Aerial
  misc_feature: MA Experiment ID: 108577 Result: Down-regulated in Transcription
  misc_feature: MA Experiment 108577 PARAMETER Experiment Name: At_42deg_Heat_cDNA_P Parameter: Temperature (deg C) Value: 42 vs. 22
  misc_feature: MA Experiment 108577 PARAMETER Experiment Name: At_42deg_Heat_cDNA_P Parameter: Timepoint (hr) Value: 6
  misc_feature: MA Experiment 108577 PARAMETER Experiment Name: At_42deg_Heat_cDNA_P Parameter: Tissue Value: Aerial
  misc_feature: MA Experiment ID: 108595 Result: Down-regulated in Transcription
  misc_feature: MA Experiment 108595 PARAMETER Experiment Name: At_Ler-pi_Ovule_cDNA_P Parameter: Plant Line Value: null
  misc_feature: MA Experiment ID: 20000087 Result: Down-regulated in Transcription
  misc_feature: MA Experiment 20000087 PARAMETER Experiment Name: At_100uM_ABA_Mutants_cDNA_P Parameter: Plant Line Value: WS
  misc_feature: MA Experiment 20000087 PARAMETER Experiment Name: At_100uM_ABA_Mutants_cDNA_P Parameter: Timepoint (hr) Value: 6
  misc_feature: MA Experiment 20000087 PARAMETER Experiment Name: At_100uM_ABA_Mutants_cDNA_P Parameter: Tissue Value: Aerial
  misc_feature: MA Experiment 20000087 PARAMETER Experiment Name: At_100uM_ABA_Mutants_cDNA_P Parameter: Treatment Value: 100uM ABA vs. No Treatment
  misc_feature: MA Experiment ID: 20000093 Result: Down-regulated in Transcription
  misc_feature: MA Experiment 20000093 PARAMETER Experiment Name: At_42deg_Heat_cDNA_P Parameter: Temperature (deg C) Value: 42 vs. 22
  misc_feature: MA Experiment 20000093 PARAMETER Experiment Name: At_42deg_Heat_cDNA_P Parameter: Timepoint (hr) Value: 0.5
  misc_feature: MA Experiment 20000093 PARAMETER Experiment Name: At_42deg_Heat_cDNA_P Parameter: Tissue Value: Aerial
  misc_feature: MA Experiment ID: 20000111 Result: Down-regulated in Transcription
  misc_feature: MA Experiment 20000111 PARAMETER Experiment Name: At_42deg_Heat_cDNA_P Parameter: Temperature (deg C) Value: 42 vs. 22
  misc_feature: MA Experiment 20000111 PARAMETER Experiment Name: At_42deg_Heat_cDNA_P Parameter: Timepoint (hr) Value: 6
  misc_feature: MA Experiment 20000111 PARAMETER Experiment Name: At_42deg_Heat_cDNA_P Parameter: Tissue Value: Aerial
  misc_feature: MA Experiment ID: 20000112 Result: Down-regulated in Transcription
  misc_feature: MA Experiment 20000112 PARAMETER Experiment Name: At_42deg_Heat_cDNA_P Parameter: Temperature (deg C) Value: 42 vs. 22
  misc_feature: MA Experiment 20000112 PARAMETER Experiment Name: At_42deg_Heat_cDNA_P Parameter: Timepoint (hr) Value: 2
  misc_feature: MA Experiment 20000112 PARAMETER Experiment Name: At_42deg_Heat_cDNA_P Parameter: Tissue Value: Aerial
  misc_feature: MA Experiment ID: 20000113 Result: Down-regulated in Transcription
  misc_feature: MA Experiment 20000113 PARAMETER Experiment Name: At_42deg_Heat_cDNA_P Parameter: Temperature (deg C) Value: 42 vs. 22
  misc_feature: MA Experiment 20000113 PARAMETER Experiment Name: At_42deg_Heat_cDNA_P Parameter: Timepoint (hr) Value: 8
  misc_feature: MA Experiment 20000113 PARAMETER Experiment Name: At_42deg_Heat_cDNA_P Parameter: Tissue Value: Aerial
  misc_feature: MA Experiment ID: 20000117 Result: Down-regulated in Transcription
  misc_feature: MA Experiment 20000117 PARAMETER Experiment Name: At_100uM_ABA_Mutants_cDNA_P Parameter: Plant Line Value: Columbia
  misc_feature: MA Experiment 20000117 PARAMETER Experiment Name: At_100uM_ABA_Mutants_cDNA_P Parameter: Timepoint (hr) Value: 6
  misc_feature: MA Experiment 20000117 PARAMETER Experiment Name: At_100uM_ABA_Mutants_cDNA_P Parameter: Tissue Value: Aerial
  misc_feature: MA Experiment 20000117 PARAMETER Experiment Name: At_100uM_ABA_Mutants_cDNA_P Parameter: Treatment Value: 100uM ABA vs. No Treatment
  misc_feature: MA Experiment ID: 20000144 Result: Down-regulated in Transcription
  misc_feature: MA Experiment 20000144 PARAMETER Experiment Name: At_42deg_Heat_cDNA_P Parameter: Temperature (deg C) Value: 42 vs. 22
  misc_feature: MA Experiment 20000144 PARAMETER Experiment Name: At_42deg_Heat_cDNA_P Parameter: Timepoint (hr) Value: 1
  misc_feature: MA Experiment 20000144 PARAMETER Experiment Name: At_42deg_Heat_cDNA_P Parameter: Tissue Value: Aerial

SEQ ID NO: 92806 - protein, 511 aa, Arabidopsis thaliana; identical to SEQ ID NO: 89050
  peptide (1)..(511): Ceres Seq. ID no. 12714871
  misc_feature (198)..(495): Pfam Name: Pectinesterase Pfam Description: Pectinesterase
  misc_feature (1)..(511): Homolog of NCBI NO: 14190429 NR Description: AT4g33220/F4I10_150 [Arabidopsis thaliana]
  misc_feature (42)..(511): Homolog of NCBI NO: 7447375 NR Description: pectinesterase homolog F4I10.150 - Arabidopsis
  misc_feature (108)..(511): Homolog of NCBI NO: 18418172 NR Description: pectinesterase family; protein id: At4g33220.1,
  misc_feature (177)..(506): Homolog of NCBI NO: 6093744 NR Description: Pectinesterase PPE8B precursor (Pectin
  misc_feature (18)..(171): Homolog of NCBI NO: 6093744 NR Description: Pectinesterase PPE8B precursor (Pectin
  misc_feature (17)..(509): Homolog of NCBI NO: 30690925 NR Description: pectinesterase family [Arabidopsis thaliana]
  misc_feature (17)..(511): Homolog of NCBI NO: 15081598 NR Description: pectin methylesterase PME1 [Vitis vinifera]
  misc_feature (169)..(508): Homolog of NCBI NO: 33520429 NR Description: pectinesterase [Fragaria x ananassa]
  misc_feature (17)..(142): Homolog of NCBI NO: 33520429 NR Description: pectinesterase [Fragaria x ananassa]
  misc_feature (50)..(509): Homolog of NCBI NO: 15230020 NR Description: pectinesterase family; protein id: At3g05620.1 thaliana] >gi|6714448|gb|AAF26135.1|AC011620_11 putative

SEQ ID NO: 92807 - protein, 500 aa, Arabidopsis thaliana; identical to SEQ ID NO: 89051
  peptide (1)..(500): Ceres Seq. ID no. 12714872
  misc_feature (187)..(484): Pfam Name: Pectinesterase Pfam Description: Pectinesterase
  misc_feature (1)..(500): Homolog of NCBI NO: 14190429 NR Description: AT4g33220/F4I10_150 [Arabidopsis thaliana]
  misc_feature (31)..(500): Homolog of NCBI NO: 7447375 NR Description: pectinesterase homolog F4I10.150 - Arabidopsis
  misc_feature (97)..(500): Homolog of NCBI NO: 18418172 NR Description: pectinesterase family; protein id: At4g33220.1,
  misc_feature (166)..(495): Homolog of NCBI NO: 6093744 NR Description: Pectinesterase PPE8B precursor (Pectin
  misc_feature (7)..(160): Homolog of NCBI NO: 6093744 NR Description: Pectinesterase PPE8B precursor (Pectin
  misc_feature (6)..(498): Homolog of NCBI NO: 30690925 NR Description: pectinesterase family [Arabidopsis thaliana]
  misc_feature (6)..(500): Homolog of NCBI NO: 15081598 NR Description: pectin methylesterase PME1 [Vitis vinifera]
  misc_feature (158)..(497): Homolog of NCBI NO: 33520429 NR Description: pectinesterase [Fragaria x ananassa]
  misc_feature (6)..(131): Homolog of NCBI NO: 33520429 NR Description: pectinesterase [Fragaria x ananassa]
  misc_feature (39)..(498): Homolog of NCBI NO: 15230020 NR Description: pectinesterase family; protein id: At3g05620.1 thaliana] >gi|6714448|gb|AAF26135.1|AC011620_11 putative

SEQ ID NO: 92808 - protein, 404 aa, Arabidopsis thaliana; identical to SEQ ID NO: 89052
  peptide (1)..(404): Ceres Seq. ID no. 12714873
  misc_feature (91)..(388): Pfam Name: Pectinesterase Pfam Description: Pectinesterase
  misc_feature (1)..(404): Homolog of NCBI NO: 14190429 NR Description: AT4g33220/F4I10_150 [Arabidopsis thaliana]
  misc_feature (1)..(404): Homolog of NCBI NO: 7447375 NR Description: pectinesterase homolog F4I10.150 - Arabidopsis
  misc_feature (1)..(404): Homolog of NCBI NO: 18418172 NR Description: pectinesterase family; protein id: At4g33220.1,
  misc_feature (70)..(399): Homolog of NCBI NO: 6093744 NR Description: Pectinesterase PPE8B precursor (Pectin
  misc_feature (1)..(64): Homolog of NCBI NO: 6093744 NR Description: Pectinesterase PPE8B precursor (Pectin
  misc_feature (1)..(402): Homolog of NCBI NO: 30690925 NR Description: pectinesterase family [Arabidopsis thaliana]
  misc_feature (1)..(404): Homolog of NCBI NO: 15081598 NR Description: pectin methylesterase PME1 [Vitis vinifera]
  misc_feature (62)..(401): Homolog of NCBI NO: 33520429 NR Description: pectinesterase [Fragaria x ananassa]
  misc_feature (1)..(35): Homolog of NCBI NO: 33520429 NR Description: pectinesterase [Fragaria x ananassa]
  misc_feature (1)..(402): Homolog of NCBI NO: 15230020 NR Description: pectinesterase family; protein id: At3g05620.1 thaliana] >gi|6714448|gb|AAF26135.1|AC011620_11 putative

SEQ ID NO: 92809 - DNA, 2451 bp, Arabidopsis thaliana; identical to SEQ ID NO: 89053
  misc_feature (1)..(2451): Ceres Seq. ID no. 12714886
  misc_feature: MA Experiment ID: 20000315 Result: Down-regulated in Transcription
  misc_feature: MA Experiment 20000315 PARAMETER Experiment Name: At_14day_Shoots-Roots_Sub_P Parameter: Age (day) Value: 14
  misc_feature: MA Experiment 20000315 PARAMETER Experiment Name: At_14day_Shoots-Roots_Sub_P Parameter: Organism Value: A. thaliana
  misc_feature: MA Experiment 20000315 PARAMETER Experiment Name: At_14day_Shoots-Roots_Sub_P Parameter: Plant Line Value: WS
  misc_feature: MA Experiment 20000315 PARAMETER Experiment Name: At_14day_Shoots-Roots_Sub_P Parameter: Tissue Value: Shoots vs. Whole Plant
  misc_feature: MA Experiment ID: 20000327 Result: Down-regulated in Transcription
  misc_feature: MA Experiment 20000327 PARAMETER Experiment Name: At_42deg_Heat_Sub_P Parameter: Age (day) Value: 14
  misc_feature: MA Experiment 20000327 PARAMETER Experiment Name: At_42deg_Heat_Sub_P Parameter: Organism Value: A. thaliana
  misc_feature: MA Experiment 20000327 PARAMETER Experiment Name: At_42deg_Heat_Sub_P Parameter: Plant Line Value: WS
  misc_feature: MA Experiment 20000327 PARAMETER Experiment Name: At_42deg_Heat_Sub_P Parameter: Temperature (deg C) Value: 42 vs. 22
  misc_feature: MA Experiment 20000327 PARAMETER Experiment Name: At_42deg_Heat_Sub_P Parameter: Timepoint (hr) Value: 1
  misc_feature: MA Experiment 20000327 PARAMETER Experiment Name: At_42deg_Heat_Sub_P Parameter: Tissue Value: Aerial
  misc_feature: MA Experiment ID: 20000328 Result: Down-regulated in Transcription
  misc_feature: MA Experiment 20000328 PARAMETER Experiment Name: At_42deg_Heat_Sub_P Parameter: Age (day) Value: 14
  misc_feature: MA Experiment 20000328 PARAMETER Experiment Name: At_42deg_Heat_Sub_P Parameter: Organism Value: A. thaliana
  misc_feature: MA Experiment 20000328 PARAMETER Experiment Name: At_42deg_Heat_Sub_P Parameter: Plant Line Value: WS
  misc_feature: MA Experiment 20000328 PARAMETER Experiment Name: At_42deg_Heat_Sub_P Parameter: Temperature (deg C) Value: 42 vs. 22
  misc_feature: MA Experiment 20000328 PARAMETER Experiment Name: At_42deg_Heat_Sub_P Parameter: Timepoint (hr) Value: 6
  misc_feature: MA Experiment 20000328 PARAMETER Experiment Name: At_42deg_Heat_Sub_P Parameter: Tissue Value: Aerial
  misc_feature: MA Experiment ID: 20000347 Result: Up-regulated in Transcription
  misc_feature: MA Experiment 20000347 PARAMETER Experiment Name: At_2mM_SA_Sub_P Parameter: Age (day) Value: 14
  misc_feature: MA Experiment 20000347 PARAMETER Experiment Name: At_2mM_SA_Sub_P Parameter: Organism Value: A. thaliana
  misc_feature: MA Experiment 20000347 PARAMETER Experiment Name: At_2mM_SA_Sub_P Parameter: Plant Line Value: WS
  misc_feature: MA Experiment 20000347 PARAMETER Experiment Name: At_2mM_SA_Sub_P Parameter: Timepoint (hr) Value: 6
  misc_feature: MA Experiment 20000347 PARAMETER Experiment Name: At_2mM_SA_Sub_P Parameter: Tissue Value: Aerial
  misc_feature: MA Experiment 20000347 PARAMETER Experiment Name: At_2mM_SA_Sub_P Parameter: Treatment Value: 2mM SA vs. No Treatment
  misc_feature: MA Experiment ID: 20000355 Result: Down-regulated in Transcription
  misc_feature: MA Experiment 20000355 PARAMETER Experiment Name: At_Siliques_Sub_P Parameter: Age (day) Value: 21
  misc_feature: MA Experiment 20000355 PARAMETER Experiment Name: At_Siliques_Sub_P Parameter: Organism Value: A. thaliana
  misc_feature: MA Experiment 20000355 PARAMETER Experiment Name: At_Siliques_Sub_P Parameter: Plant Line Value: WS
  misc_feature: MA Experiment 20000355 PARAMETER Experiment Name: At_Siliques_Sub_P Parameter: Tissue Value: Less Than 5mm Siliques vs. Whole Plant
  misc_feature: MA Experiment ID: 20000440 Result: Down-regulated in Transcription
  misc_feature: MA Experiment 20000440 PARAMETER Experiment Name: At_Closed-Flower__Sub_P Parameter: Tissue Value: Closed Flower vs. Whole Plant

SEQ ID NO: 92810 - protein, 816 aa, Arabidopsis thaliana; identical to SEQ ID NO: 89054
  peptide (1)..(816): Ceres Seq. ID no. 12714887
  misc_feature (182)..(293): Pfam Name: NB-ARC domain Pfam Description: NB-ARC domain
  misc_feature (3)..(816): Homolog of NCBI NO: 15238281 NR Description: disease resistance protein (CC-NBS-LRR class), protein id: At5g04720.1, supported by cDNA: gi_15292720,
  misc_feature (194)..(816): Homolog of NCBI NO: 15238054 NR Description: disease resistance protein (NBS-LRR class), protein id: At5g47280.1 [Arabidopsis thaliana]
  misc_feature (169)..(816): Homolog of NCBI NO: 30692890 NR Description: disease resistance protein (CC-NBS-LRR class),
  misc_feature (169)..(816): Homolog of NCBI NO: 25403197 NR Description: probable disease resistance protein [imported] - thaliana >gi|10998939|gb|AAG26078.1|AC069299_4 disease resistance putative [Arabidopsis thaliana]
  misc_feature (539)..(816): Homolog of NCBI NO: 7485661 NR Description: hypothetical protein F17M5.60 - Arabidopsis >gi|4490297|emb|CAB38788.1| putative protein [Arabidopsis >gi|7270278|emb|CAB80047.1| putative protein [Arabidopsis
  misc_feature (8)..(806): Homolog of NCBI NO: 15240127 NR Description: disease resistance protein (CC-NBS-LRR class), protein id: At5g66910.1, supported by cDNA: gi_18087525
  misc_feature (348)..(816): Homolog of NCBI NO: 21655203 NR Description: NBS/LRR [Pinus taeda]
  misc_feature (9)..(806): Homolog of NCBI NO: 15240126 NR Description: disease resistance protein (CC-NBS-LRR class), protein id: At5g66900.1 [Arabidopsis thaliana]
  misc_feature (408)..(802): Homolog of NCBI NO: 15240125 NR Description: disease resistance protein (NBS-LRR class), protein id: At5g66890.1 [Arabidopsis thaliana] contains similarity to disease resistance
  misc_feature (176)..(759): Homolog of NCBI NO: 34391519 NR Description: disease resistance protein-like protein MsR1

SEQ ID NO: 92811 - protein, 750 aa, Arabidopsis thaliana; identical to SEQ ID NO: 89055
  peptide (1)..(750): Ceres Seq. ID no. 12714888
  misc_feature (116)..(227): Pfam Name: NB-ARC domain Pfam Description: NB-ARC domain
  misc_feature (1)..(750): Homolog of NCBI NO: 15238281 NR Description: disease resistance protein (CC-NBS-LRR class), protein id: At5g04720.1, supported by cDNA: gi_15292720,
  misc_feature (128)..(750): Homolog of NCBI NO: 15238054 NR Description: disease resistance protein (NBS-LRR class), protein id: At5g47280.1 [Arabidopsis thaliana]
  misc_feature (103)..(750): Homolog of NCBI NO: 30692890 NR Description: disease resistance protein (CC-NBS-LRR class),
  misc_feature (103)..(750): Homolog of NCBI NO: 25403197 NR Description: probable disease resistance protein [imported] - thaliana >gi|10998939|gb|AAG26078.1|AC069299_4 disease resistance putative [Arabidopsis thaliana]
  misc_feature (473)..(750): Homolog of NCBI NO: 7485661 NR Description: hypothetical protein F17M5.60 - Arabidopsis >gi|4490297|emb|CAB38788.1| putative protein [Arabidopsis >gi|7270278|emb|CAB80047.1| putative protein [Arabidopsis
  misc_feature (1)..(740): Homolog of NCBI NO: 15240127 NR Description: disease resistance protein (CC-NBS-LRR class), protein id: At5g66910.1, supported by cDNA: gi_18087525
  misc_feature (282)..(750): Homolog of NCBI NO: 21655203 NR Description: NBS/LRR [Pinus taeda]
  misc_feature (1)..(740): Homolog of NCBI NO: 15240126 NR Description: disease resistance protein (CC-NBS-LRR class), protein id: At5g66900.1 [Arabidopsis thaliana]
  misc_feature (342)..(736): Homolog of NCBI NO: 15240125 NR Description: disease resistance protein (NBS-LRR class), protein id: At5g66890.1 [Arabidopsis thaliana] contains similarity to disease resistance
  misc_feature (110)..(693): Homolog of NCBI NO: 34391519 NR Description: disease resistance protein-like protein MsR1

SEQ ID NO: 92812 - protein, 717 aa, Arabidopsis thaliana; identical to SEQ ID NO: 89056
  peptide (1)..(717): Ceres Seq. ID no. 12714889
  misc_feature (83)..(194): Pfam Name: NB-ARC domain Pfam Description: NB-ARC domain
  misc_feature (1)..(717): Homolog of NCBI NO: 15238281 NR Description: disease resistance protein (CC-NBS-LRR class), protein id: At5g04720.1, supported by cDNA: gi_15292720,
  misc_feature (95)..(717): Homolog of NCBI NO: 15238054 NR Description: disease resistance protein (NBS-LRR class), protein id: At5g47280.1 [Arabidopsis thaliana]
  misc_feature (70)..(717): Homolog of NCBI NO: 30692890 NR Description: disease resistance protein (CC-NBS-LRR class),
  misc_feature (70)..(717): Homolog of NCBI NO: 25403197 NR Description: probable disease resistance protein [imported] - thaliana >gi|10998939|gb|AAG26078.1|AC069299_4 disease resistance putative [Arabidopsis thaliana]
  misc_feature (440)..(717): Homolog of NCBI NO: 7485661 NR Description: hypothetical protein F17M5.60 - Arabidopsis >gi|4490297|emb|CAB38788.1| putative protein [Arabidopsis >gi|7270278|emb|CAB80047.1| putative protein [Arabidopsis
  misc_feature (1)..(707): Homolog of NCBI NO: 15240127 NR Description: disease resistance protein (CC-NBS-LRR class), protein id: At5g66910.1, supported by cDNA: gi_18087525
  misc_feature (249)..(717): Homolog of NCBI NO: 21655203 NR Description: NBS/LRR [Pinus taeda]
  misc_feature (1)..(707): Homolog of NCBI NO: 15240126 NR Description: disease resistance protein (CC-NBS-LRR class), protein id: At5g66900.1 [Arabidopsis thaliana]
  misc_feature (309)..(703): Homolog of NCBI NO: 15240125 NR Description: disease resistance protein (NBS-LRR class), protein id: At5g66890.1 [Arabidopsis thaliana] contains similarity to disease resistance
  misc_feature (77)..(660): Homolog of NCBI NO: 34391519 NR Description: disease resistance protein-like protein MsR1

SEQ ID NO: 92813 - DNA, 945 bp, Arabidopsis thaliana; identical to SEQ ID NO: 89057
  misc_feature (1)..(945): Ceres Seq. ID no. 12714906
  misc_feature: MA Experiment ID: 108434 Result: Down-regulated in Transcription
  misc_feature: MA Experiment 108434 PARAMETER Experiment Name: At_Root_Tips_cDNA_P Parameter: Tissue Value: Root Tips
  misc_feature: MA Experiment ID: 108462 Result: Up-regulated in Transcription
  misc_feature: MA Experiment 108462 PARAMETER Experiment Name: At_Germinating_Seeds_cDNA_P Parameter: Age (day) Value: 2 vs. 0
  misc_feature: MA Experiment 108462 PARAMETER Experiment Name: At_Germinating_Seeds_cDNA_P Parameter: Tissue Value: Germinating Seeds
  misc_feature: MA Experiment ID: 108463 Result: Up-regulated in Transcription
  misc_feature: MA Experiment 108463 PARAMETER Experiment Name: At_Germinating_Seeds_cDNA_P Parameter: Age (day) Value: 3 vs. 0
  misc_feature: MA Experiment 108463 PARAMETER Experiment Name: At_Germinating_Seeds_cDNA_P Parameter: Tissue Value: Germinating Seeds
  misc_feature: MA Experiment ID: 108464 Result: Up-regulated in Transcription
  misc_feature: MA Experiment 108464 PARAMETER Experiment Name: At_Germinating_Seeds_cDNA_P Parameter: Age (day) Value: 4 vs. 0
  misc_feature: MA Experiment 108464 PARAMETER Experiment Name: At_Germinating_Seeds_cDNA_P Parameter: Tissue Value: Germinating Seeds
  misc_feature: MA Experiment ID: 108473 Result: Up-regulated in Transcription
  misc_feature: MA Experiment 108473 PARAMETER Experiment Name: At_Drought_Flowers_cDNA_P Parameter: Timepoint (hr) Value: 7 d
  misc_feature: MA Experiment 108473 PARAMETER Experiment Name: At_Drought_Flowers_cDNA_P Parameter: Tissue Value: Flower
  misc_feature: MA Experiment 108473 PARAMETER Experiment Name: At_Drought_Flowers_cDNA_P Parameter: Treatment Value: Drought vs. No Drought
  misc_feature: MA Experiment ID: 108488 Result: Down-regulated in Transcription
  misc_feature: MA Experiment ID: 108609 Result: Up-regulated in Transcription
  misc_feature: MA Experiment 108609 PARAMETER Experiment Name: At_100uM_ABA_cDNA_P Parameter: Timepoint (hr) Value: 24
  misc_feature: MA Experiment 108609 PARAMETER Experiment Name: At_100uM_ABA_cDNA_P Parameter: Tissue Value: Aerial
  misc_feature: MA Experiment 108609 PARAMETER Experiment Name: At_100uM_ABA_cDNA_P Parameter: Treatment Value: 100uM ABA vs. No Treatment
  misc_feature: MA Experiment ID: 20000144 Result: Up-regulated in Transcription
  misc_feature: MA Experiment 20000144 PARAMETER Experiment Name: At_42deg_Heat_cDNA_P Parameter: Temperature (deg C) Value: 42 vs. 22
  misc_feature: MA Experiment 20000144 PARAMETER Experiment Name: At_42deg_Heat_cDNA_P Parameter: Timepoint (hr) Value: 1
  misc_feature: MA Experiment 20000144 PARAMETER Experiment Name: At_42deg_Heat_cDNA_P Parameter: Tissue Value: Aerial

SEQ ID NO: 92814 - protein, 314 aa, Arabidopsis thaliana; identical to SEQ ID NO: 21993
  peptide (1)..(314): Ceres Seq. ID no. 12714907
  misc_feature (42)..(278): Pfam Name: Peroxidase Pfam Description: Peroxidase
  misc_feature (1)..(314): Homolog of NCBI NO: 18418208 NR Description: peroxidase, putative; protein id: At4g33420.1, by cDNA: 32346., supported by cDNA: gi_17530546 [Arabidopsis
  misc_feature (1)..(314): Homolog of NCBI NO: 26397921 NR Description: Peroxidase 47 precursor (Atperox P47) (ATP32)
  misc_feature (6)..(314): Homolog of NCBI NO: 7484677 NR Description: peroxidase (EC 1.11.1.7) prx11 precursor - spinach
  misc_feature (6)..(314): Homolog of NCBI NO: 15242213 NR Description: peroxidase, putative; protein id: At5g51890.1, by cDNA: gi_18175872 [Arabidopsis thaliana] Peroxidase 66 precursor (Atperox P66) (ATP27a)
  misc_feature (41)..(314): Homolog of NCBI NO: 2956707 NR Description: peroxidase [Spinacia oleracea]
  misc_feature (2)..(313): Homolog of NCBI NO: 15238309 NR Description: peroxidase, putative; protein id: At5g42180.1, by cDNA: gi_17381011, supported by cDNA: gi_20465876 [Arabidopsis >gi|26397658|sp|Q43872|PE64_ARATH Peroxidase 64 precursor
  misc_feature (26)..(314): Homolog of NCBI NO: 34902232 NR Description: Putative peroxidase [Oryza sativa (japonica >gi|21426121|gb|AAM52318.1| Putative peroxidase [Oryza sativa
  misc_feature (24)..(310): Homolog of NCBI NO: 14031049 NR Description: peroxidase [Nicotiana tabacum]

SEQ ID NO: 92815 - protein, 306 aa, Arabidopsis thaliana; identical to SEQ ID NO: 21994
  peptide (1)..(306): Ceres Seq. ID no. 12714908
  misc_feature (34)..(270): Pfam Name: Peroxidase Pfam Description: Peroxidase
  misc_feature (1)..(306): Homolog of NCBI NO: 18418208 NR Description: peroxidase, putative; protein id: At4g33420.1, by cDNA: 32346., supported by cDNA: gi_17530546 [Arabidopsis
  misc_feature (1)..(306): Homolog of NCBI NO: 26397921 NR Description: Peroxidase 47 precursor (Atperox P47) (ATP32)
  misc_feature (1)..(306): Homolog of NCBI NO: 7484677 NR Description: peroxidase (EC 1.11.1.7) prx11 precursor - spinach
  misc_feature (1)..(306): Homolog of NCBI NO: 15242213 NR Description: peroxidase, putative; protein id: At5g51890.1, by cDNA: gi_18175872 [Arabidopsis thaliana] Peroxidase 66 precursor (Atperox P66) (ATP27a)
  misc_feature (33)..(306): Homolog of NCBI NO: 2956707 NR Description: peroxidase [Spinacia oleracea]
  misc_feature (1)..(305): Homolog of NCBI NO: 15238309 NR Description: peroxidase, putative; protein id: At5g42180.1, by cDNA: gi_17381011, supported by cDNA: gi_20465876 [Arabidopsis >gi|26397658|sp|Q43872|PE64_ARATH Peroxidase 64 precursor
  misc_feature (18)..(306): Homolog of NCBI NO: 34902232 NR Description: Putative peroxidase [Oryza sativa (japonica >gi|21426121|gb|AAM52318.1| Putative peroxidase [Oryza sativa
  misc_feature (16)..(302): Homolog of NCBI NO: 14031049 NR Description: peroxidase [Nicotiana tabacum]

SEQ ID NO: 92816 - protein, 302 aa, Arabidopsis thaliana; identical to SEQ ID NO: 21995
  peptide (1)..(302): Ceres Seq. ID no. 12714909
  misc_feature (30)..(266): Pfam Name: Peroxidase Pfam Description: Peroxidase
  misc_feature (1)..(302): Homolog of NCBI NO: 18418208 NR Description: peroxidase, putative; protein id: At4g33420.1, by cDNA: 32346., supported by cDNA: gi_17530546 [Arabidopsis
  misc_feature (1)..(302): Homolog of NCBI NO: 26397921 NR Description: Peroxidase 47 precursor (Atperox P47) (ATP32)
  misc_feature (1)..(302): Homolog of NCBI NO: 7484677 NR Description: peroxidase (EC 1.11.1.7) prx11 precursor - spinach
  misc_feature (1)..(302): Homolog of NCBI NO: 15242213 NR Description: peroxidase, putative; protein id: At5g51890.1, by cDNA: gi_18175872 [Arabidopsis thaliana] Peroxidase 66 precursor (Atperox P66) (ATP27a)
  misc_feature (29)..(302): Homolog of NCBI NO: 2956707 NR Description: peroxidase [Spinacia oleracea]
  misc_feature (1)..(301): Homolog of NCBI NO: 15238309 NR Description: peroxidase, putative; protein id: At5g42180.1, by cDNA: gi_17381011, supported by cDNA: gi_20465876 [Arabidopsis >gi|26397658|sp|Q43872|PE64_ARATH Peroxidase 64 precursor
  misc_feature (14)..(302): Homolog of NCBI NO: 34902232 NR Description: Putative peroxidase [Oryza sativa (japonica >gi|21426121|gb|AAM52318.1| Putative peroxidase [Oryza sativa
  misc_feature (12)..(298): Homolog of NCBI NO: 14031049 NR Description: peroxidase [Nicotiana tabacum]

SEQ ID NO: 92817 - DNA, 1482 bp, Arabidopsis thaliana; identical to SEQ ID NO: 89061
  misc_feature (1)..(1482): Ceres Seq. ID no. 12714914
  misc_feature: MA Experiment ID: 20000173 Result: Down-regulated in Transcription
  misc_feature: MA Experiment 20000173 PARAMETER Experiment Name: At_42deg_Heat_P Parameter: Age (day) Value: 14
  misc_feature: MA Experiment 20000173 PARAMETER Experiment Name: At_42deg_Heat_P Parameter: Organism Value: A. thaliana
  misc_feature: MA Experiment 20000173 PARAMETER Experiment Name: At_42deg_Heat_P Parameter: Plant Line Value: WS
  misc_feature: MA Experiment 20000173 PARAMETER Experiment Name: At_42deg_Heat_P Parameter: Temperature (deg C) Value: 42 vs. 22
  misc_feature: MA Experiment 20000173 PARAMETER Experiment Name: At_42deg_Heat_P Parameter: Timepoint (hr) Value: 6
  misc_feature: MA Experiment 20000173 PARAMETER Experiment Name: At_42deg_Heat_P Parameter: Tissue Value: Aerial
  misc_feature: MA Experiment ID: 20000184 Result: Down-regulated in Transcription
  misc_feature: MA Experiment 20000184 PARAMETER Experiment Name: At_Shoots__P Parameter: Age (day) Value: 7
  misc_feature: MA Experiment 20000184 PARAMETER Experiment Name: At_Shoots__P Parameter: Tissue Value: Shoots vs. Whole Plant
  misc_feature: MA Experiment ID: 20000185 Result: Down-regulated in Transcription
  misc_feature: MA Experiment 20000185 PARAMETER Experiment Name: At_Roots__P Parameter: Age (day) Value: 7 vs. 21
  misc_feature: MA Experiment 20000185 PARAMETER Experiment Name: At_Roots__P Parameter: Organism Value: A. thaliana
  misc_feature: MA Experiment 20000185 PARAMETER Experiment Name: At_Roots__P Parameter: Tissue Value: Roots vs. Whole Plant
  misc_feature: MA Experiment ID: 20000437 Result: Down-regulated in Transcription
  misc_feature: MA Experiment 20000437 PARAMETER Experiment Name: At_Drought_P Parameter: Age (day) Value: 8
  misc_feature: MA Experiment 20000437 PARAMETER Experiment Name: At_Drought_P Parameter: Organism Value: A. thaliana
  misc_feature: MA Experiment 20000437 PARAMETER Experiment Name: At_Drought_P Parameter: Plant Line Value: WS
  misc_feature: MA Experiment 20000437 PARAMETER Experiment Name: At_Drought_P Parameter: Timepoint (hr) Value: 24
  misc_feature: MA Experiment 20000437 PARAMETER Experiment Name: At_Drought_P Parameter: Tissue Value: Whole Plant
  misc_feature: MA Experiment 20000437 PARAMETER Experiment Name: At_Drought_P Parameter: Treatment Value: Drought vs. No Drought
  misc_feature: MA Experiment ID: 20000439 Result: Down-regulated in Transcription
  misc_feature: MA Experiment 20000439 PARAMETER Experiment Name: At_Roots__P Parameter: Age (day) Value: 14 vs. 21
  misc_feature: MA Experiment 20000439 PARAMETER Experiment Name: At_Roots__P Parameter: Organism Value: A. thaliana
  misc_feature: MA Experiment 20000439 PARAMETER Experiment Name: At_Roots__P Parameter: Tissue Value: Roots vs. Whole Plant
  misc_feature: MA Experiment ID: 20001557 Result: Down-regulated in Transcription
  misc_feature: MA Experiment 20001557 PARAMETER Experiment Name: At_Drought_Soil_Dry_P Parameter: Age (day) Value: 27
  misc_feature: MA Experiment 20001557 PARAMETER Experiment Name: At_Drought_Soil_Dry_P Parameter: Organism Value: A. thaliana
  misc_feature: MA Experiment 20001557 PARAMETER Experiment Name: At_Drought_Soil_Dry_P Parameter: Plant Line Value: WS
  misc_feature: MA Experiment 20001557 PARAMETER Experiment Name: At_Drought_Soil_Dry_P Parameter: Post Timepoint (hr) Value: 3
  misc_feature: MA Experiment 20001557 PARAMETER Experiment Name: At_Drought_Soil_Dry_P Parameter: Post-Treatment Value: Re-Water vs. No Drought
  misc_feature: MA Experiment 20001557 PARAMETER Experiment Name: At_Drought_Soil_Dry_P Parameter: Timepoint (day) Value: 13
  misc_feature: MA Experiment 20001557 PARAMETER Experiment Name: At_Drought_Soil_Dry_P Parameter: Treatment Value: Drought vs. No Drought
  misc_feature: MA Experiment ID: 20001905 Result: Down-regulated in Transcription
  misc_feature: MA Experiment 20001905 PARAMETER Experiment Name: At_Drought_Reproduction_P Parameter: Age (day) Value: 40
  misc_feature: MA Experiment 20001905 PARAMETER Experiment Name: At_Drought_Reproduction_P Parameter: Organism Value: A. thaliana
  misc_feature: MA Experiment 20001905 PARAMETER Experiment Name: At_Drought_Reproduction_P Parameter: Plant Line Value: WS
  misc_feature: MA Experiment 20001905 PARAMETER Experiment Name: At_Drought_Reproduction_P Parameter: Timepoint (day) Value: 10
  misc_feature: MA Experiment 20001905 PARAMETER Experiment Name: At_Drought_Reproduction_P Parameter: Tissue Value: Rosettes
  misc_feature: MA Experiment 20001905 PARAMETER Experiment Name: At_Drought_Reproduction_P Parameter: Treatment Value: Drought vs. No Drought

SEQ ID NO: 92818 - protein, 493 aa, Arabidopsis thaliana; identical to SEQ ID NO: 77351
  peptide (1)..(493): Ceres Seq. ID no. 12714915
  misc_feature (257)..(457): Pfam Name: Protein phosphatase 2C Pfam Description: Protein phosphatase 2C
  misc_feature (1)..(493): Homolog of NCBI NO: 18418226 NR Description: putative protein; protein id: At4g33500.1, by cDNA: gi_15293236 [Arabidopsis thaliana] unknown protein [Arabidopsis thaliana]
  misc_feature (45)..(490): Homolog of NCBI NO: 7485658 NR Description: hypothetical protein F17M5.260 - Arabidopsis >gi|4490317|emb|CAB38808.1| putative protein [Arabidopsis >gi|7270298|emb|CAB80067.1| putative protein [Arabidopsis
  misc_feature (1)..(240): Homolog of NCBI NO: 7485658 NR Description: hypothetical protein F17M5.260 - Arabidopsis >gi|4490317|emb|CAB38808.1| putative protein [Arabidopsis >gi|7270298|emb|CAB80067.1| putative protein [Arabidopsis
  misc_feature (116)..(489): Homolog of NCBI NO: 37533570 NR Description: putative protein phosphatase 2C [Oryza sativa
  misc_feature (242)..(488): Homolog of NCBI NO: 25366932 NR Description: hypothetical protein dl4315c [imported] - thaliana >gi|5302796|emb|CAB46038.1| hypothetical protein thaliana] >gi|7268408|emb|CAB78700.1| hypothetical protein
  misc_feature (242)..(488): Homolog of NCBI NO: 30683717 NR Description: expressed protein [Arabidopsis thaliana] unknown protein [Arabidopsis thaliana]
  misc_feature (224)..(488): Homolog of NCBI NO: 15240071 NR Description: putative protein; protein id: At5g66720.1 thaliana] >gi|8843730|dbj|BAA97278.1| contains similarity to protein~emb|CAB46038.1~gene_id:MSN2.11 [Arabidopsis thaliana]
  misc_feature (218)..(493): Homolog of NCBI NO: 18402284 NR Description: expressed protein; protein id: At2g30170.1, by cDNA: gi_13878070, supported by cDNA: gi_17104662 [Arabidopsis >gi|13878071|gb|AAK44113.1|AF370298_1 unknown protein
  misc_feature (216)..(491): Homolog of NCBI NO: 34896100 NR Description: B1189A09.35 [Oryza sativa (japonica
  misc_feature (268)..(488): Homolog of NCBI NO: 28893291 NR Description: RIKEN cDNA 9130017A15 gene [Mus musculus]

SEQ ID NO: 92819 - protein, 472 aa, Arabidopsis thaliana; identical to SEQ ID NO: 77352
  peptide (1)..(472): Ceres Seq. ID no. 12714916
  misc_feature (236)..(436): Pfam Name: Protein phosphatase 2C Pfam Description: Protein phosphatase 2C
  misc_feature (1)..(472): Homolog of NCBI NO: 18418226 NR Description: putative protein; protein id: At4g33500.1, by cDNA: gi_15293236 [Arabidopsis thaliana] unknown protein [Arabidopsis thaliana]
  misc_feature (24)..(469): Homolog of NCBI NO: 7485658 NR Description: hypothetical protein F17M5.260 - Arabidopsis >gi|4490317|emb|CAB38808.1| putative protein [Arabidopsis >gi|7270298|emb|CAB80067.1| putative protein [Arabidopsis
  misc_feature (1)..(219): Homolog of NCBI NO: 7485658 NR Description: hypothetical protein F17M5.260 - Arabidopsis >gi|4490317|emb|CAB38808.1| putative protein [Arabidopsis >gi|7270298|emb|CAB80067.1| putative protein [Arabidopsis
  misc_feature (95)..(468): Homolog of NCBI NO: 37533570 NR Description: putative protein phosphatase 2C [Oryza sativa
  misc_feature (221)..(467): Homolog of NCBI NO: 25366932 NR Description: hypothetical protein dl4315c [imported] - thaliana >gi|5302796|emb|CAB46038.1| hypothetical protein thaliana] >gi|7268408|emb|CAB78700.1| hypothetical protein
  misc_feature (221)..(467): Homolog of NCBI NO: 30683717 NR Description: expressed protein [Arabidopsis thaliana] unknown protein [Arabidopsis thaliana]
  misc_feature (203)..(467): Homolog of NCBI NO: 15240071 NR Description: putative protein; protein id: At5g66720.1 thaliana] >gi|8843730|dbj|BAA97278.1| contains similarity to protein~emb|CAB46038.1~gene_id:MSN2.11 [Arabidopsis thaliana]
  misc_feature (197)..(472): Homolog of NCBI NO: 18402284 NR Description: expressed protein; protein id: At2g30170.1, by cDNA: gi_13878070, supported by cDNA: gi_17104662 [Arabidopsis >gi|13878071|gb|AAK44113.1|AF370298_1 unknown protein
  misc_feature (195)..(470): Homolog of NCBI NO: 34896100 NR Description: B1189A09.35 [Oryza sativa (japonica
  misc_feature (247)..(467): Homolog of NCBI NO: 28893291 NR Description: RIKEN cDNA 9130017A15 gene [Mus musculus]

SEQ ID NO: 92820 - protein, 338 aa, Arabidopsis thaliana; identical to SEQ ID NO: 89064
  peptide (1)..(338): Ceres Seq. ID no. 12714917
  misc_feature (102)..(302): Pfam Name: Protein phosphatase 2C Pfam Description: Protein phosphatase 2C
  misc_feature (1)..(338): Homolog of NCBI NO: 18418226 NR Description: putative protein; protein id: At4g33500.1, by cDNA: gi_15293236 [Arabidopsis thaliana] unknown protein [Arabidopsis thaliana]
  misc_feature (1)..(335): Homolog of NCBI NO: 7485658 NR Description: hypothetical protein F17M5.260 - Arabidopsis >gi|4490317|emb|CAB38808.1| putative protein [Arabidopsis >gi|7270298|emb|CAB80067.1| putative protein [Arabidopsis
  misc_feature (1)..(85): Homolog of NCBI NO: 7485658 NR Description: hypothetical protein F17M5.260 - Arabidopsis >gi|4490317|emb|CAB38808.1| putative protein [Arabidopsis >gi|7270298|emb|CAB80067.1| putative protein [Arabidopsis
  misc_feature (1)..(334): Homolog of NCBI NO: 37533570 NR Description: putative protein phosphatase 2C [Oryza sativa
  misc_feature (87)..(333): Homolog of NCBI NO: 25366932 NR Description: hypothetical protein dl4315c [imported] - thaliana >gi|5302796|emb|CAB46038.1| hypothetical protein thaliana] >gi|7268408|emb|CAB78700.1| hypothetical protein
  misc_feature (87)..(333): Homolog of NCBI NO: 30683717 NR Description: expressed protein [Arabidopsis thaliana] unknown protein [Arabidopsis thaliana]
  misc_feature (69)..(333): Homolog of NCBI NO: 15240071 NR Description: putative protein; protein id: At5g66720.1 thaliana] >gi|8843730|dbj|BAA97278.1| contains similarity to protein~emb|CAB46038.1~gene_id:MSN2.11 [Arabidopsis thaliana]
  misc_feature (63)..(338): Homolog of NCBI NO: 18402284 NR Description: expressed protein; protein id: At2g30170.1, by cDNA: gi_13878070, supported by cDNA: gi_17104662 [Arabidopsis >gi|13878071|gb|AAK44113.1|AF370298_1 unknown protein
  misc_feature (61)..(336): Homolog of NCBI NO: 34896100 NR Description: B1189A09.35 [Oryza sativa (japonica
  misc_feature (113)..(333): Homolog of NCBI NO: 28893291 NR Description: RIKEN cDNA 9130017A15 gene [Mus musculus]

SEQ ID NO: 92821 - DNA, 1736 bp, Arabidopsis thaliana; identical to SEQ ID NO: 89065
  misc_feature (1)..(1736): Ceres Seq. ID no. 12714918
  misc_feature: MA Experiment ID: 108434 Result: Down-regulated in Transcription
  misc_feature: MA Experiment 108434 PARAMETER Experiment Name: At_Root_Tips_cDNA_P Parameter: Tissue Value: Root Tips
  misc_feature: MA Experiment ID: 108435 Result: Down-regulated in Transcription
  misc_feature: MA Experiment 108435 PARAMETER Experiment Name: At_stm_Mutants_cDNA_P Parameter: Plant Line Value: wt Landsburg vs stm
  misc_feature: MA Experiment 108435 PARAMETER Experiment Name: At_stm_Mutants_cDNA_P Parameter: Tissue Value: Shoot Apical Meristem Region
  misc_feature: MA Experiment ID: 108573 Result: Up-regulated in Transcription
  misc_feature: MA Experiment 108573 PARAMETER Experiment Name: At_Drought_cDNA_P Parameter: Timepoint (hr) Value: 6
  misc_feature: MA Experiment 108573 PARAMETER Experiment Name: At_Drought_cDNA_P Parameter: Tissue Value: Aerial
  misc_feature: MA Experiment 108573 PARAMETER Experiment Name: At_Drought_cDNA_P Parameter: Treatment Value: Drought vs. No Drought
  misc_feature: MA Experiment ID: 108595 Result: Down-regulated in Transcription
  misc_feature: MA Experiment 108595 PARAMETER Experiment Name: At_Ler-pi_Ovule_cDNA_P Parameter: Plant Line Value: null
  misc_feature: MA Experiment ID: 20000088 Result: Up-regulated in Transcription
  misc_feature: MA Experiment 20000088 PARAMETER Experiment Name: At_100uM_ABA_Mutants_cDNA_P Parameter: Plant Line Value: Landsberg
  misc_feature: MA Experiment 20000088 PARAMETER Experiment Name: At_100uM_ABA_Mutants_cDNA_P Parameter: Timepoint (hr) Value: 6
  misc_feature: MA Experiment 20000088 PARAMETER Experiment Name: At_100uM_ABA_Mutants_cDNA_P Parameter: Tissue Value: Aerial
  misc_feature: MA Experiment 20000088 PARAMETER Experiment Name: At_100uM_ABA_Mutants_cDNA_P Parameter: Treatment Value: 100uM ABA vs. No Treatment
  misc_feature: MA Experiment ID: 20000090 Result: Up-regulated in Transcription
  misc_feature: MA Experiment ID: 20000227 Result: Down-regulated in Transcription
  misc_feature: MA Experiment 20000227 PARAMETER Experiment Name: At_Root-Tips-vs-Tops_P Parameter: Tissue Value: Root Tips vs. Root Tops
  misc_feature: MA Experiment ID: 20000439 Result: Down-regulated in Transcription
  misc_feature: MA Experiment 20000439 PARAMETER Experiment Name: At_Roots__P Parameter: Age (day) Value: 14 vs. 21
  misc_feature: MA Experiment 20000439 PARAMETER Experiment Name: At_Roots__P Parameter: Organism Value: A. thaliana
  misc_feature: MA Experiment 20000439 PARAMETER Experiment Name: At_Roots__P Parameter: Tissue Value: Roots vs. Whole Plant
  misc_feature: MA Experiment ID: 20000496 Result: Up-regulated in Transcription
  misc_feature: MA Experiment 20000496 PARAMETER Experiment Name: At_Guard_Cells_P Parameter: Harvest Date Value: 7/19/2002
  misc_feature: MA Experiment 20000496 PARAMETER Experiment Name: At_Guard_Cells_P Parameter: Organism Value: Canola
  misc_feature: MA Experiment 20000496 PARAMETER Experiment Name: At_Guard_Cells_P Parameter: Tissue Value: Guard Cells vs. Leaves

SEQ ID NO: 92822 - protein, 523 aa, Arabidopsis thaliana; identical to SEQ ID NO: 24003
  peptide (1)..(523): Ceres Seq. ID no. 12714919
  misc_feature (67)..(504): Pfam Name: Class-II DAHP synthetase family Pfam Description: Class-II DAHP synthetase family
  misc_feature (17)..(523): Homolog of NCBI NO: 15234217 NR Description: 2-dehydro-3-deoxyphosphoheptonate aldolase; id: At4g33510.1, supported by cDNA: 37432., supported by cDNA: supported by cDNA: gi_166689 [Arabidopsis thaliana]
  misc_feature (17)..(523): Homolog of NCBI NO: 166690 NR Description: 3-deoxy-D-arabino-heptulosonate 7-phosphate
  misc_feature (17)..(523): Homolog of NCBI NO: 21593248 NR Description: 2-dehydro-3-deoxyphosphoheptonate aldolase
  misc_feature (21)..(511): Homolog of NCBI NO: 2398681 NR Description: 3-deoxy-D-arabino-heptulosonate 7-phosphate
  misc_feature (3)..(514): Homolog of NCBI NO: 2398679 NR Description: 3-deoxy-D-arabino-heptulosonate 7-phosphate
  misc_feature (40)..(514): Homolog of NCBI NO: 584778 NR Description: Phospho-2-dehydro-3-deoxyheptonate aldolase 2,
  misc_feature (40)..(514): Homolog of NCBI NO: 2546988 NR Description: 2-dehydro-3-deoxyphosphoheptonate aldolase;
  misc_feature (40)..(514): Homolog of NCBI NO: 584777 NR Description: Phospho-2-dehydro-3-deoxyheptonate aldolase 1,
  misc_feature (40)..(514): Homolog of NCBI NO: 24745903 NR Description: 3-deoxy-D-arabino-heptulosonate 7-phosphate
  misc_feature (11)..(519): Homolog of NCBI NO: 7488957 NR Description: probable 2-dehydro-3-deoxy-phosphoheptonate

SEQ ID NO: 92823 - protein, 507 aa, Arabidopsis thaliana; identical to SEQ ID NO: 24004
  peptide (1)..(507): Ceres Seq. ID no. 12714920
  misc_feature (51)..(488): Pfam Name: Class-II DAHP synthetase family Pfam Description: Class-II DAHP synthetase family
  misc_feature (1)..(507): Homolog of NCBI NO: 15234217 NR Description: 2-dehydro-3-deoxyphosphoheptonate aldolase; id: At4g33510.1, supported by cDNA: 37432., supported by cDNA: supported by cDNA: gi_166689 [Arabidopsis thaliana]
  misc_feature (1)..(507): Homolog of NCBI NO: 166690 NR Description: 3-deoxy-D-arabino-heptulosonate 7-phosphate
  misc_feature (1)..(507): Homolog of NCBI NO: 21593248 NR Description: 2-dehydro-3-deoxyphosphoheptonate aldolase
  misc_feature (5)..(495): Homolog of NCBI NO: 2398681 NR Description: 3-deoxy-D-arabino-heptulosonate 7-phosphate
  misc_feature (1)..(498): Homolog of NCBI NO: 2398679 NR Description: 3-deoxy-D-arabino-heptulosonate 7-phosphate
  misc_feature (24)..(498): Homolog of NCBI NO: 584778 NR Description: Phospho-2-dehydro-3-deoxyheptonate aldolase 2,
  misc_feature (24)..(498): Homolog of NCBI NO: 2546988 NR Description: 2-dehydro-3-deoxyphosphoheptonate aldolase;
  misc_feature (24)..(498): Homolog of NCBI NO: 584777 NR Description: Phospho-2-dehydro-3-deoxyheptonate aldolase 1,
  misc_feature (24)..(498): Homolog of NCBI NO: 24745903 NR Description: 3-deoxy-D-arabino-heptulosonate 7-phosphate
  misc_feature (1)..(503): Homolog of NCBI NO: 7488957 NR Description: probable 2-dehydro-3-deoxy-phosphoheptonate

SEQ ID NO: 92824 - protein, 403 aa, Arabidopsis thaliana; identical to SEQ ID NO: 24005
  peptide (1)..(403): Ceres Seq. ID no. 12714921
  misc_feature (1)..(384): Pfam Name: Class-II DAHP synthetase family Pfam Description: Class-II DAHP synthetase family
  misc_feature (1)..(403): Homolog of NCBI NO: 15234217 NR Description: 2-dehydro-3-deoxyphosphoheptonate aldolase; id: At4g33510.1, supported by cDNA: 37432., supported by cDNA: supported by cDNA: gi_166689 [Arabidopsis thaliana]
  misc_feature (1)..(403): Homolog of NCBI NO: 166690 NR Description: 3-deoxy-D-arabino-heptulosonate 7-phosphate
  misc_feature (1)..(403): Homolog of NCBI NO: 21593248 NR Description: 2-dehydro-3-deoxyphosphoheptonate aldolase
  misc_feature (1)..(391): Homolog of NCBI NO: 2398681 NR Description: 3-deoxy-D-arabino-heptulosonate 7-phosphate
  misc_feature (1)..(394): Homolog of NCBI NO: 2398679 NR Description: 3-deoxy-D-arabino-heptulosonate 7-phosphate
  misc_feature (1)..(394): Homolog of NCBI NO: 584778 NR Description: Phospho-2-dehydro-3-deoxyheptonate aldolase 2,
  misc_feature (1)..(394): Homolog of NCBI NO: 2546988 NR Description: 2-dehydro-3-deoxyphosphoheptonate aldolase;
  misc_feature (1)..(394): Homolog of NCBI NO: 584777 NR Description: Phospho-2-dehydro-3-deoxyheptonate aldolase 1,
  misc_feature (1)..(394): Homolog of NCBI NO: 24745903 NR Description: 3-deoxy-D-arabino-heptulosonate 7-phosphate
  misc_feature (1)..(399): Homolog of NCBI NO: 7488957 NR Description: probable 2-dehydro-3-deoxy-phosphoheptonate

SEQ ID NO: 92825 - DNA, 1220 bp, Arabidopsis thaliana; identical to SEQ ID NO: 89069
  misc_feature (1)..(1220): Ceres Seq. ID no. 12714933
  misc_feature: MA Experiment ID: 108434 Result: Up-regulated in Transcription
  misc_feature: MA Experiment 108434 PARAMETER Experiment Name: At_Root_Tips_cDNA_P Parameter: Tissue Value: Root Tips
  misc_feature: MA Experiment ID: 108435 Result: Down-regulated in Transcription
  misc_feature: MA Experiment 108435 PARAMETER Experiment Name: At_stm_Mutants_cDNA_P Parameter: Plant Line Value: wt Landsburg vs stm
  misc_feature: MA Experiment 108435 PARAMETER Experiment Name: At_stm_Mutants_cDNA_P Parameter: Tissue Value: Shoot Apical Meristem Region
  misc_feature: MA Experiment ID: 108579 Result: Down-regulated in Transcription
  misc_feature: MA Experiment 108579 PARAMETER Experiment Name: At_4deg_Cold_cDNA_P Parameter: Temperature (deg C) Value: 4 vs. 22
  misc_feature: MA Experiment 108579 PARAMETER Experiment Name: At_4deg_Cold_cDNA_P Parameter: Timepoint (hr) Value: 6
  misc_feature: MA Experiment 108579 PARAMETER Experiment Name: At_4deg_Cold_cDNA_P Parameter: Tissue Value: Aerial
  misc_feature: MA Experiment ID: 108585 Result: Down-regulated in Transcription
  misc_feature: MA Experiment 108585 PARAMETER Experiment Name: At_5mM_NaNP_cDNA_P Parameter: Timepoint (hr) Value: 6
  misc_feature: MA Experiment 108585 PARAMETER Experiment Name: At_5mM_NaNP_cDNA_P Parameter: Tissue Value: Aerial
  misc_feature: MA Experiment 108585 PARAMETER Experiment Name: At_5mM_NaNP_cDNA_P Parameter: Treatment Value: null
  misc_feature: MA Experiment ID: 108595 Result: Down-regulated in Transcription
  misc_feature: MA Experiment 108595 PARAMETER Experiment Name: At_Ler-pi_Ovule_cDNA_P Parameter: Plant Line Value: null
  misc_feature: MA Experiment ID: 20000071 Result: Up-regulated in Transcription
  misc_feature: MA Experiment 20000071 PARAMETER Experiment Name: At_100uM_ABA_Mutants_cDNA_P Parameter: Plant Line Value: CS8104
  misc_feature: MA Experiment 20000071 PARAMETER Experiment Name: At_100uM_ABA_Mutants_cDNA_P Parameter: Timepoint (hr) Value: 6
  misc_feature: MA Experiment 20000071 PARAMETER Experiment Name: At_100uM_ABA_Mutants_cDNA_P Parameter: Tissue Value: Aerial
  misc_feature: MA Experiment 20000071 PARAMETER Experiment Name: At_100uM_ABA_Mutants_cDNA_P Parameter: Treatment Value: 100uM ABA vs. No Treatment
  misc_feature: MA Experiment ID: 20000072 Result: Up-regulated in Transcription
  misc_feature: MA Experiment 20000072 PARAMETER Experiment Name: At_100uM_ABA_Mutants_cDNA_P Parameter: Plant Line Value: CS8105
  misc_feature: MA Experiment 20000072 PARAMETER Experiment Name: At_100uM_ABA_Mutants_cDNA_P Parameter: Timepoint (hr) Value: 6
  misc_feature: MA Experiment 20000072 PARAMETER Experiment Name: At_100uM_ABA_Mutants_cDNA_P Parameter: Tissue Value: Aerial
  misc_feature: MA Experiment 20000072 PARAMETER Experiment Name: At_100uM_ABA_Mutants_cDNA_P Parameter: Treatment Value: 100uM ABA vs. No Treatment
  misc_feature: MA Experiment ID: 20000185 Result: Down-regulated in Transcription
  misc_feature: MA Experiment 20000185 PARAMETER Experiment Name: At_Roots__P Parameter: Age (day) Value: 7 vs. 21
  misc_feature: MA Experiment 20000185 PARAMETER Experiment Name: At_Roots__P Parameter: Organism Value: A. thaliana
  misc_feature: MA Experiment 20000185 PARAMETER Experiment Name: At_Roots__P Parameter: Tissue Value: Roots vs. Whole Plant
  misc_feature: MA Experiment ID: 20000439 Result: Down-regulated in Transcription
  misc_feature: MA Experiment 20000439 PARAMETER Experiment Name: At_Roots__P Parameter: Age (day) Value: 14 vs. 21
  misc_feature: MA Experiment 20000439 PARAMETER Experiment Name: At_Roots__P Parameter: Organism Value: A. thaliana
  misc_feature: MA Experiment 20000439 PARAMETER Experiment Name: At_Roots__P Parameter: Tissue Value: Roots vs. Whole Plant

SEQ ID NO: 92826 - protein, 319 aa, Arabidopsis thaliana; identical to SEQ ID NO: 21407
  peptide (1)..(319): Ceres Seq. ID no. 12714934
  misc_feature (1)..(319): Homolog of NCBI NO: 15235040 NR Description: putative protein; protein id: At4g33670.1, by cDNA: gi_15215697, supported by cDNA: gi_19699263 [Arabidopsis
  misc_feature (1)..(318): Homolog of NCBI NO: 27728731 NR Description: galactose dehydrogenase [Actinidia deliciosa]
  misc_feature (1)..(319): Homolog of NCBI NO: 30267886 NR Description: L-galactose dehydrogenase [Malus x domestica]
  misc_feature (4)..(312): Homolog of NCBI NO: 29349022 NR Description: putative oxidoreductase [Bacteroides VPI- 5482] >gi|29340929|gb|AAO78719.1| putative oxidoreductase
  misc_feature (3)..(312): Homolog of NCBI NO: 24646155 NR Description: CG18547-PA [Drosophila melanogaster]
  misc_feature (1)..(319): Homolog of NCBI NO: 39594041 NR Description: Hypothetical protein CBG16615 [Caenorhabditis
  misc_feature (3)..(314): Homolog of NCBI NO: 24646159 NR Description: CG3397-PA [Drosophila melanogaster]
  misc_feature (1)..(319): Homolog of NCBI NO: 17553316 NR Description: Aldo keto reductase family [Caenorhabditis
  misc_feature (72)..(297): Homolog of NCBI NO: 24646157 NR Description: CG12224-PA [Drosophila melanogaster]
  misc_feature (42)..(259): Homolog of NCBI NO: 40742617 NR Description: hypothetical protein AN7621.2 [Aspergillus

SEQ ID NO: 92827 - protein, 253 aa, Arabidopsis thaliana; identical to SEQ ID NO: 21408
  peptide (1)..(253): Ceres Seq. ID no. 12714935
  misc_feature (1)..(253): Homolog of NCBI NO: 15235040 NR Description: putative protein; protein id: At4g33670.1, by cDNA: gi_15215697, supported by cDNA: gi_19699263 [Arabidopsis
  misc_feature (1)..(252): Homolog of NCBI NO: 27728731 NR Description: galactose dehydrogenase [Actinidia deliciosa]
  misc_feature (1)..(253): Homolog of NCBI NO: 30267886 NR Description: L-galactose dehydrogenase [Malus x domestica]
  misc_feature (1)..(246): Homolog of NCBI NO: 29349022 NR Description: putative oxidoreductase [Bacteroides VPI- 5482] >gi|29340929|gb|AAO78719.1| putative oxidoreductase
  misc_feature (1)..(246): Homolog of NCBI NO: 24646155 NR Description: CG18547-PA [Drosophila melanogaster]
  misc_feature (1)..(253): Homolog of NCBI NO: 39594041 NR Description: Hypothetical protein CBG16615 [Caenorhabditis
  misc_feature (1)..(248): Homolog of NCBI NO: 24646159 NR Description: CG3397-PA [Drosophila melanogaster]
  misc_feature (1)..(253): Homolog of NCBI NO: 17553316 NR Description: Aldo keto reductase family [Caenorhabditis
  misc_feature (6)..(231): Homolog of NCBI NO: 24646157 NR Description: CG12224-PA [Drosophila melanogaster]
  misc_feature (1)..(193): Homolog of NCBI NO: 40742617 NR Description: hypothetical protein AN7621.2 [Aspergillus

SEQ ID NO: 92828 - DNA, 1482 bp, Arabidopsis thaliana; identical to SEQ ID NO: 89072
  misc_feature (1)..(1482): Ceres Seq. ID no. 12714949
  misc_feature: MA Experiment ID: 108434 Result: Up-regulated in Transcription
  misc_feature: MA Experiment 108434 PARAMETER Experiment Name: At_Root_Tips_cDNA_P Parameter: Tissue Value: Root Tips
  misc_feature: MA Experiment ID: 108573 Result: Down-regulated in Transcription
  misc_feature: MA Experiment 108573 PARAMETER Experiment Name: At_Drought_cDNA_P Parameter: Timepoint (hr) Value: 6
  misc_feature: MA Experiment 108573 PARAMETER Experiment Name: At_Drought_cDNA_P Parameter: Tissue Value: Aerial
  misc_feature: MA Experiment 108573 PARAMETER Experiment Name: At_Drought_cDNA_P Parameter: Treatment Value: Drought vs. No Drought

SEQ ID NO: 92829 - protein, 493 aa, Arabidopsis thaliana; identical to SEQ ID NO: 89073
  peptide (1)..(493): Ceres Seq. ID no. 12714950
  misc_feature (291)..(493): Pfam Name: Male sterility protein Pfam Description: Male sterility protein
  misc_feature (1)..(493): Homolog of NCBI NO: 16323107 NR Description: AT4g33790/T16L1_280 [Arabidopsis thaliana]
  misc_feature (5)..(493): Homolog of NCBI NO: 25354587 NR Description: male sterility 2-like protein [imported] -
  misc_feature (31)..(493): Homolog of NCBI NO: 7487952 NR Description: male sterility protein 2 homolog T16L1.280 -
  misc_feature (114)..(493): Homolog of NCBI NO: 30689818 NR Description: male sterility 2-related protein [Arabidopsis
  misc_feature (6)..(492): Homolog of NCBI NO: 5020215 NR Description: acyl CoA reductase [Simmondsia chinensis]
  misc_feature (11)..(492): Homolog of NCBI NO: 15242260 NR Description: male sterility 2-like protein (emb|CAA68191.1); id: At5g22500.1, supported by cDNA: gi_14334737, supported by
  misc_feature (11)..(492): Homolog of NCBI NO: 11357157 NR Description: acyl CoA reductase-protein - Arabidopsis thaliana
  misc_feature (5)..(492): Homolog of NCBI NO: 35215152 NR Description: putative fatty acyl coA reductase [Oryza sativa
  misc_feature (9)..(373): Homolog of NCBI NO: 15229993 NR Description: acyl CoA reductase -like protein; protein id:
  misc_feature (417)..(492): Homolog of NCBI NO: 15229993 NR Description: acyl CoA reductase -like protein; protein id:

SEQ ID NO: 92830 - protein, 489 aa, Arabidopsis thaliana; identical to SEQ ID NO: 89074
  peptide (1)..(489): Ceres Seq. ID no. 12714951
  misc_feature (287)..(489): Pfam Name: Male sterility protein Pfam Description: Male sterility protein
  misc_feature (1)..(489): Homolog of NCBI NO: 16323107 NR Description: AT4g33790/T16L1_280 [Arabidopsis thaliana]
  misc_feature (1)..(489): Homolog of NCBI NO: 25354587 NR Description: male sterility 2-like protein [imported] -
  misc_feature (27)..(489): Homolog of NCBI NO: 7487952 NR Description: male sterility protein 2 homolog T16L1.280 -
  misc_feature (110)..(489): Homolog of NCBI NO: 30689818 NR Description: male sterility 2-related protein [Arabidopsis
  misc_feature (2)..(488): Homolog of NCBI NO: 5020215 NR Description: acyl CoA reductase [Simmondsia chinensis]
  misc_feature (7)..(488): Homolog of NCBI NO: 15242260 NR Description: male sterility 2-like protein (emb|CAA68191.1); id: At5g22500.1, supported by cDNA: gi_14334737, supported by
  misc_feature (7)..(488): Homolog of NCBI NO: 11357157 NR Description: acyl CoA reductase-protein - Arabidopsis thaliana
  misc_feature (1)..(488): Homolog of NCBI NO: 35215152 NR Description: putative fatty acyl coA reductase [Oryza sativa
  misc_feature (5)..(369): Homolog of NCBI NO: 15229993 NR Description: acyl CoA reductase -like protein; protein id:
  misc_feature (413)..(488): Homolog of NCBI NO: 15229993 NR Description: acyl CoA reductase -like protein; protein id:

SEQ ID NO: 92831 - protein, 380 aa, Arabidopsis thaliana; identical to SEQ ID NO: 27534
  peptide (1)..(380): Ceres Seq. ID no. 12714952
  misc_feature (178)..(380): Pfam Name: Male sterility protein Pfam Description: Male sterility protein
  misc_feature (1)..(380): Homolog of NCBI NO: 16323107 NR Description: AT4g33790/T16L1_280 [Arabidopsis thaliana]
  misc_feature (1)..(380): Homolog of NCBI NO: 25354587 NR Description: male sterility 2-like protein [imported] -
  misc_feature (1)..(380): Homolog of NCBI NO: 7487952 NR Description: male sterility protein 2 homolog T16L1.280 -
  misc_feature (1)..(380): Homolog of NCBI NO: 30689818 NR Description: male sterility 2-related protein [Arabidopsis
  misc_feature (1)..(379): Homolog of NCBI NO: 5020215 NR Description: acyl CoA reductase [Simmondsia chinensis]
  misc_feature (1)..(379): Homolog of NCBI NO: 15242260 NR Description: male sterility 2-like protein (emb|CAA68191.1); id: At5g22500.1, supported by cDNA: gi_14334737, supported by
  misc_feature (1)..(379): Homolog of NCBI NO: 11357157 NR Description: acyl CoA reductase-protein - Arabidopsis thaliana
  misc_feature (1)..(379): Homolog of NCBI NO: 35215152 NR Description: putative fatty acyl coA reductase [Oryza sativa
  misc_feature (1)..(260): Homolog of NCBI NO: 15229993 NR Description: acyl CoA reductase -like protein; protein id:
  misc_feature (304)..(379): Homolog of NCBI NO: 15229993 NR Description: acyl CoA reductase -like protein; protein id:

SEQ ID NO: 92832 - DNA, 1710 bp, Arabidopsis thaliana; identical to SEQ ID NO: 89076
  misc_feature (1)..(1710): Ceres Seq. ID no. 12714956

SEQ ID NO: 92833 - protein, 569 aa, Arabidopsis thaliana; identical to SEQ ID NO: 89077
  peptide (1)..(569): Ceres Seq. ID no. 12714957
  misc_feature (206)..(502): Pfam Name: Glycosyl hydrolase family 10 Pfam Description: Glycosyl hydrolase family 10
  misc_feature (41)..(569): Homolog of NCBI NO: 15235098 NR Description: glycosyl hydrolase family 10; protein id:
  misc_feature (1)..(569): Homolog of NCBI NO: 22329138 NR Description: glycosyl hydrolase family 10; protein id: [Arabidopsis thaliana] >gi|27754330|gb|AAO22618.1| putative
  misc_feature (41)..(569): Homolog of NCBI NO: 25407718 NR Description: hypothetical protein AT4g33820 [imported] - thaliana >gi|7270331|emb|CAB80099.1| putative protein
  misc_feature (41)..(536): Homolog of NCBI NO: 7485608 NR Description: hypothetical protein F17I5.10 - Arabidopsis (fragment) >gi|4455150|emb|CAA19864.1| putative protein
  misc_feature (65)..(569): Homolog of NCBI NO: 34365757 NR Description: At2g14690 [Arabidopsis thaliana]
  misc_feature (142)..(569): Homolog of NCBI NO: 15225988 NR Description: glycosyl hydrolase family 10; protein id:
  misc_feature (9)..(556): Homolog of NCBI NO: 23429644 NR Description: endoxylanase [Carica papaya]
  misc_feature (78)..(556): Homolog of NCBI NO: 7485619 NR Description: hypothetical protein F17I5.30 - Arabidopsis >gi|3297808|emb|CAA19866.1| putative protein [Arabidopsis >gi|7270333|emb|CAB80101.1| putative protein [Arabidopsis
  misc_feature (78)..(556): Homolog of NCBI NO: 30689830 NR Description: glycosyl hydrolase family 10 [Arabidopsis
  misc_feature (78)..(556): Homolog of NCBI NO: 15235131 NR Description: glycosyl hydrolase family 10; protein id:

SEQ ID NO: 92834 - protein, 558 aa, Arabidopsis thaliana; identical to SEQ ID NO: 89078
  peptide (1)..(558): Ceres Seq. ID no. 12714958
  misc_feature (195)..(491): Pfam Name: Glycosyl hydrolase family 10 Pfam Description: Glycosyl hydrolase family 10
  misc_feature (30)..(558): Homolog of NCBI NO: 15235098 NR Description: glycosyl hydrolase family 10; protein id:
  misc_feature (1)..(558): Homolog of NCBI NO: 22329138 NR Description: glycosyl hydrolase family 10; protein id: [Arabidopsis thaliana] >gi|27754330|gb|AAO22618.1| putative
  misc_feature (30)..(558): Homolog of NCBI NO: 25407718 NR Description: hypothetical protein AT4g33820 [imported] - thaliana >gi|7270331|emb|CAB80099.1| putative protein
  misc_feature (30)..(525): Homolog of NCBI NO: 7485608 NR Description: hypothetical protein F17I5.10 - Arabidopsis (fragment) >gi|4455150|emb|CAA19864.1| putative protein
  misc_feature (54)..(558): Homolog of NCBI NO: 34365757 NR Description: At2g14690 [Arabidopsis thaliana]
  misc_feature (131)..(558): Homolog of NCBI NO: 15225988 NR Description: glycosyl hydrolase family 10; protein id:
  misc_feature (1)..(545): Homolog of NCBI NO: 23429644 NR Description: endoxylanase [Carica papaya]
  misc_feature (67)..(545): Homolog of NCBI NO: 7485619 NR Description: hypothetical protein F17I5.30 - Arabidopsis >gi|3297808|emb|CAA19866.1| putative protein [Arabidopsis >gi|7270333|emb|CAB80101.1| putative protein [Arabidopsis
  misc_feature (67)..(545): Homolog of NCBI NO: 30689830 NR Description: glycosyl hydrolase family 10 [Arabidopsis
  misc_feature (67)..(545): Homolog of NCBI NO: 15235131 NR Description: glycosyl hydrolase family 10; protein id:

SEQ ID NO: 92835 - protein, 529 aa, Arabidopsis thaliana; identical to SEQ ID NO: 89079
  peptide (1)..(529): Ceres Seq. ID no. 12714959
  misc_feature (166)..(462): Pfam Name: Glycosyl hydrolase family 10 Pfam Description: Glycosyl hydrolase family 10
  misc_feature (1)..(529): Homolog of NCBI NO: 15235098 NR Description: glycosyl hydrolase family 10; protein id:
  misc_feature (1)..(529): Homolog of NCBI NO: 22329138 NR Description: glycosyl hydrolase family 10; protein id: [Arabidopsis thaliana] >gi|27754330|gb|AAO22618.1| putative
  misc_feature (1)..(529): Homolog of NCBI NO: 25407718 NR Description: hypothetical protein AT4g33820 [imported] - thaliana >gi|7270331|emb|CAB80099.1| putative protein
  misc_feature (1)..(496): Homolog of NCBI NO: 7485608 NR Description: hypothetical protein F17I5.10 - Arabidopsis (fragment) >gi|4455150|emb|CAA19864.1| putative protein
  misc_feature (25)..(529): Homolog of NCBI NO: 34365757 NR Description: At2g14690 [Arabidopsis thaliana]
  misc_feature (102)..(529): Homolog of NCBI NO: 15225988 NR Description: glycosyl hydrolase family 10; protein id:
  misc_feature (1)..(516): Homolog of NCBI NO: 23429644 NR Description: endoxylanase [Carica papaya]
  misc_feature (38)..(516): Homolog of NCBI NO: 7485619 NR Description: hypothetical protein F17I5.30 - Arabidopsis >gi|3297808|emb|CAA19866.1| putative protein [Arabidopsis >gi|7270333|emb|CAB80101.1| putative protein [Arabidopsis
  misc_feature (38)..(516): Homolog of NCBI NO: 30689830 NR Description: glycosyl hydrolase family 10 [Arabidopsis
  misc_feature (38)..(516): Homolog of NCBI NO: 15235131 NR Description: glycosyl hydrolase family 10; protein id:

SEQ ID NO: 92836 - DNA, 2271 bp, Arabidopsis thaliana; identical to SEQ ID NO: 89080
  misc_feature (1)..(2271): Ceres Seq. ID no. 12715026
  misc_feature: MA Experiment ID: 20000314 Result: Up-regulated in Transcription
  misc_feature: MA Experiment 20000314 PARAMETER Experiment Name: At_14day_Shoots-Roots_Sub_P Parameter: Age (day) Value: 14
  misc_feature: MA Experiment 20000314 PARAMETER Experiment Name: At_14day_Shoots-Roots_Sub_P Parameter: Organism Value: A. thaliana
  misc_feature: MA Experiment 20000314 PARAMETER Experiment Name: At_14day_Shoots-Roots_Sub_P Parameter: Plant Line Value: WS
  misc_feature: MA Experiment 20000314 PARAMETER Experiment Name: At_14day_Shoots-Roots_Sub_P Parameter: Tissue Value: Roots vs. Whole Plant

SEQ ID NO: 92837 - protein, 756 aa, Arabidopsis thaliana; identical to SEQ ID NO: 89081
  peptide (1)..(756): Ceres Seq. ID no. 12715027
  misc_feature (1)..(748): Homolog of NCBI NO: 15226084 NR Description: leucine-rich repeat transmembrane protein kinase, protein id: At2g15300.1 [Arabidopsis thaliana]
  misc_feature (9)..(745): Homolog of NCBI NO: 25387059 NR Description: receptor kinase-like protein [imported] -
  misc_feature (9)..(745): Homolog of NCBI NO: 30690913 NR Description: leucine rich repeat protein family [Arabidopsis
  misc_feature (9)..(745): Homolog of NCBI NO: 18086496 NR Description: AT4g37250/C7A10_110 [Arabidopsis thaliana]
  misc_feature (2)..(555): Homolog of NCBI NO: 15227808 NR Description: leucine-rich repeat transmembrane protein kinase, protein id: At2g23300.1 [Arabidopsis thaliana]
  misc_feature (628)..(750): Homolog of NCBI NO: 15227808 NR Description: leucine-rich repeat transmembrane protein kinase, protein id: At2g23300.1 [Arabidopsis thaliana]
  misc_feature (9)..(748): Homolog of NCBI NO: 15240265 NR Description: leucine-rich repeat transmembrane protein kinase, protein id: At5g67280.1, supported by cDNA: 110712., supported by
  misc_feature (448)..(753): Homolog of NCBI NO: 15219755 NR Description: leucine-rich repeat transmembrane protein kinase, protein id: At1g66830.1 [Arabidopsis thaliana]
  misc_feature (8)..(301): Homolog of NCBI NO: 15219755 NR Description: leucine-rich repeat transmembrane protein kinase, protein id: At1g66830.1 [Arabidopsis thaliana]
  misc_feature (13)..(393): Homolog of NCBI NO: 18395641 NR Description: leucine-rich repeat transmembrane protein kinase, protein id: At1g25320.1, supported by cDNA: gi_15912326

SEQ ID NO: 92838 - protein, 679 aa, Arabidopsis thaliana; identical to SEQ ID NO: 89082
  peptide (1)..(679): Ceres Seq. ID no. 12715028
  misc_feature (1)..(671): Homolog of NCBI NO: 15226084 NR Description: leucine-rich repeat transmembrane protein kinase, protein id: At2g15300.1 [Arabidopsis thaliana]
  misc_feature (1)..(668): Homolog of NCBI NO: 25387059 NR Description: receptor kinase-like protein [imported] -
  misc_feature (1)..(668): Homolog of NCBI NO: 30690913 NR Description: leucine rich repeat protein family [Arabidopsis
  misc_feature (1)..(668): Homolog of NCBI NO: 18086496 NR Description: AT4g37250/C7A10_110 [Arabidopsis thaliana]
  misc_feature (1)..(478): Homolog of NCBI NO: 15227808 NR Description: leucine-rich repeat transmembrane protein kinase, protein id: At2g23300.1 [Arabidopsis thaliana]
  misc_feature (551)..(673): Homolog of NCBI NO: 15227808 NR Description: leucine-rich repeat transmembrane protein kinase, protein id: At2g23300.1 [Arabidopsis thaliana]
  misc_feature (1)..(671): Homolog of NCBI NO: 15240265 NR Description: leucine-rich repeat transmembrane protein kinase, protein id: At5g67280.1, supported by cDNA: 110712., supported by
  misc_feature (371)..(676): Homolog of NCBI NO: 15219755 NR Description: leucine-rich repeat transmembrane protein kinase, protein id: At1g66830.1 [Arabidopsis thaliana]
  misc_feature (1)..(224): Homolog of NCBI NO: 15219755 NR Description: leucine-rich repeat transmembrane protein kinase, protein id: At1g66830.1 [Arabidopsis thaliana]
  misc_feature (1)..(316): Homolog of NCBI NO: 18395641 NR Description: leucine-rich repeat transmembrane protein kinase, protein id: At1g25320.1, supported by cDNA: gi_15912326

SEQ ID NO: 92839 - DNA, 1971 bp, Arabidopsis thaliana; identical to SEQ ID NO: 89083
  misc_feature (1)..(1971): Ceres Seq. ID no. 12715074
  misc_feature: MA Experiment ID: 20001910 Result: Up-regulated in Transcription
  misc_feature: MA Experiment 20001910 PARAMETER Experiment Name: At_Drought_Reproduction_P Parameter: Age (day) Value: 37
  misc_feature: MA Experiment 20001910 PARAMETER Experiment Name: At_Drought_Reproduction_P Parameter: Organism Value: A. thaliana
  misc_feature: MA Experiment 20001910 PARAMETER Experiment Name: At_Drought_Reproduction_P Parameter: Plant Line Value: WS
  misc_feature: MA Experiment 20001910 PARAMETER Experiment Name: At_Drought_Reproduction_P Parameter: Timepoint (day) Value: 7
  misc_feature: MA Experiment 20001910 PARAMETER Experiment Name: At_Drought_Reproduction_P Parameter: Tissue Value: Flowers
  misc_feature: MA Experiment 20001910 PARAMETER Experiment Name: At_Drought_Reproduction_P Parameter: Treatment Value: Drought vs. No Drought

SEQ ID NO: 92840 - protein, 656 aa, Arabidopsis thaliana; identical to SEQ ID NO: 89084
  peptide (1)..(656): Ceres Seq. ID no. 12715075
  misc_feature (4)..(656): Homolog of NCBI NO: 7488206 NR Description: probable serine/threonine-specific protein kinase
  misc_feature (8)..(656): Homolog of NCBI NO: 30690042 NR Description: serine threonine protein kinase -related thaliana] >gi|26452004|dbj|BAC43092.1| putative serine/threonine kinase [Arabidopsis thaliana] >gi|29029022|gb|AAO64890.1|
  misc_feature (1)..(403): Homolog of NCBI NO: 7488206 NR Description: probable serine/threonine-specific protein kinase
  misc_feature (204)..(653): Homolog of NCBI NO: 15230209 NR Description: protein kinase, putative; protein id: At3g18810.1
  misc_feature (11)..(179): Homolog of NCBI NO: 15230209 NR Description: protein kinase, putative; protein id: At3g18810.1
  misc_feature (71)..(237): Homolog of NCBI NO: 15230209 NR Description: protein kinase, putative; protein id: At3g18810.1
  misc_feature (204)..(653): Homolog of NCBI NO: 9293906 NR Description: somatic embryogenesis receptor kinase-like
  misc_feature (11)..(179): Homolog of NCBI NO: 9293906 NR Description: somatic embryogenesis receptor kinase-like
  misc_feature (201)..(648): Homolog of NCBI NO: 15222081 NR Description: hypothetical protein; protein id: At1g49270.1
  misc_feature (4)..(269): Homolog of NCBI NO: 15222081 NR Description: hypothetical protein; protein id: At1g49270.1

SEQ ID NO: 92841 - protein, 457 aa, Arabidopsis thaliana; identical to SEQ ID NO: 89085
  peptide (1)..(457): Ceres Seq. ID no. 12715076
  misc_feature (1)..(457): Homolog of NCBI NO: 7488206 NR Description: probable serine/threonine-specific protein kinase
  misc_feature (1)..(457): Homolog of NCBI NO: 30690042 NR Description: serine threonine protein kinase -related thaliana] >gi|26452004|dbj|BAC43092.1| putative serine/threonine kinase [Arabidopsis thaliana] >gi|29029022|gb|AAO64890.1|
  misc_feature (1)..(204): Homolog of NCBI NO: 7488206 NR Description: probable serine/threonine-specific protein kinase
  misc_feature (5)..(454): Homolog of NCBI NO: 15230209 NR Description: protein kinase, putative; protein id: At3g18810.1
  misc_feature (1)..(38): Homolog of NCBI NO: 15230209 NR Description: protein kinase, putative; protein id: At3g18810.1
  misc_feature (5)..(454): Homolog of NCBI NO: 9293906 NR Description: somatic embryogenesis receptor kinase-like
  misc_feature (2)..(449): Homolog of NCBI NO: 15222081 NR Description: hypothetical protein; protein id: At1g49270.1
  misc_feature (1)..(70): Homolog of NCBI NO: 15222081 NR Description: hypothetical protein; protein id: At1g49270.1
  misc_feature (1)..(38): Homolog of NCBI NO: 9293906 NR Description: somatic embryogenesis receptor kinase-like
  misc_feature (1)..(456): Homolog of NCBI NO: 13447449 NR Description: receptor protein kinase PERK1 [Brassica napus]

SEQ ID NO: 92842 - protein, 427 aa, Arabidopsis thaliana; identical to SEQ ID NO: 89086
  peptide (1)..(427): Ceres Seq. ID no. 12715077
  misc_feature (1)..(427): Homolog of NCBI NO: 7488206 NR Description: probable serine/threonine-specific protein kinase
  misc_feature (1)..(427): Homolog of NCBI NO: 30690042 NR Description: serine threonine protein kinase -related thaliana] >gi|26452004|dbj|BAC43092.1| putative serine/threonine kinase [Arabidopsis thaliana] >gi|29029022|gb|AAO64890.1|
  misc_feature (1)..(174): Homolog of NCBI NO: 7488206 NR Description: probable serine/threonine-specific protein kinase
  misc_feature (1)..(424): Homolog of NCBI NO: 15230209 NR Description: protein kinase, putative; protein id: At3g18810.1
  misc_feature (1)..(424): Homolog of NCBI NO: 9293906 NR Description: somatic embryogenesis receptor kinase-like
  misc_feature (1)..(419): Homolog of NCBI NO: 15222081 NR Description: hypothetical protein; protein id: At1g49270.1
  misc_feature (1)..(40): Homolog of NCBI NO: 15222081 NR Description: hypothetical protein; protein id: At1g49270.1
  misc_feature (1)..(426): Homolog of NCBI NO: 13447449 NR Description: receptor protein kinase PERK1 [Brassica napus]
  misc_feature (1)..(402): Homolog of NCBI NO: 15224182 NR Description: putative protein kinase; protein id: At2g18470.1
  misc_feature (1)..(426): Homolog of NCBI NO: 13877617 NR Description: protein kinase-like protein [Arabidopsis thaliana]

SEQ ID NO: 92843 - DNA, 921 bp, Arabidopsis thaliana; identical to SEQ ID NO: 89087
  misc_feature (1)..(921): Ceres Seq. ID no. 12715098
  misc_feature: MA Experiment ID: 20000307 Result: Up-regulated in Transcription
  misc_feature: MA Experiment 20000307 PARAMETER Experiment Name: At_Germinating_Seeds_Sub_P Parameter: Age (hr) Value: 24 vs. 0
  misc_feature: MA Experiment 20000307 PARAMETER Experiment Name: At_Germinating_Seeds_Sub_P Parameter: Organism Value: A. thaliana
  misc_feature: MA Experiment 20000307 PARAMETER Experiment Name: At_Germinating_Seeds_Sub_P Parameter: Plant Line Value: WS
  misc_feature: MA Experiment 20000307 PARAMETER Experiment Name: At_Germinating_Seeds_Sub_P Parameter: Tissue Value: Germinating Seeds
  misc_feature: MA Experiment ID: 20000315 Result: Down-regulated in Transcription
  misc_feature: MA Experiment 20000315 PARAMETER Experiment Name: At_14day_Shoots-Roots_Sub_P Parameter: Age (day) Value: 14
  misc_feature: MA Experiment 20000315 PARAMETER Experiment Name: At_14day_Shoots-Roots_Sub_P Parameter: Organism Value: A. thaliana
  misc_feature: MA Experiment 20000315 PARAMETER Experiment Name: At_14day_Shoots-Roots_Sub_P Parameter: Plant Line Value: WS
  misc_feature: MA Experiment 20000315 PARAMETER Experiment Name: At_14day_Shoots-Roots_Sub_P Parameter: Tissue Value: Shoots vs. Whole Plant

SEQ ID NO: 92844 - protein, 306 aa, Arabidopsis thaliana; identical to SEQ ID NO: 89088
  peptide (1)..(306): Ceres Seq. ID no. 12715099
  misc_feature (5)..(306): Pfam Name: Isoflavone reductase Pfam Description: Isoflavone reductase
  misc_feature (1)..(306): Homolog of NCBI NO: 15236146 NR Description: isoflavone reductase family; protein id:
  misc_feature (6)..(302): Homolog of NCBI NO: 7578895 NR Description: phenylcoumaran benzylic ether reductase homolog
  misc_feature (6)..(302): Homolog of NCBI NO: 18410820 NR Description: isoflavone reductase homolog P3; protein id: supported by cDNA: 11944., supported by cDNA: gi_17529217
  misc_feature (7)..(302): Homolog of NCBI NO: 10764491 NR Description: allergenic isoflavone reductase-like protein Bet
  misc_feature (6)..(302): Homolog of NCBI NO: 25344798 NR Description: probable NADPH oxidoreductase, 14094-12769 - Arabidopsis thaliana >gi|10092264|gb|AAG12677.1|AC025814_1
  misc_feature (7)..(298): Homolog of NCBI NO: 7484603 NR Description: 2'-hydroxyisoflavone reductase (EC 1.3.1.45) -
  misc_feature (8)..(302): Homolog of NCBI NO: 7578909 NR Description: phenylcoumaran benzylic ether reductase homolog
  misc_feature (7)..(298): Homolog of NCBI NO: 4731376 NR Description: isoflavone reductase homolog Bet v 6.0101 [Betula
  misc_feature (6)..(303): Homolog of NCBI NO: 7578897 NR Description: phenylcoumaran benzylic ether reductase homolog
  misc_feature (8)..(302): Homolog of NCBI NO: 7578907 NR Description: phenylcoumaran benzylic ether reductase homolog

SEQ ID NO: 92845 - protein, 170 aa, Arabidopsis thaliana; identical to SEQ ID NO: 89089
  peptide (1)..(170): Ceres Seq. ID no. 12715100
  misc_feature (1)..(170): Pfam Name: Isoflavone reductase Pfam Description: Isoflavone reductase
  misc_feature (1)..(170): Homolog of NCBI NO: 15236146 NR Description: isoflavone reductase family; protein id:
  misc_feature (1)..(166): Homolog of NCBI NO: 7578895 NR Description: phenylcoumaran benzylic ether reductase homolog
  misc_feature (1)..(166): Homolog of NCBI NO: 18410820 NR Description: isoflavone reductase homolog P3; protein id: supported by cDNA: 11944., supported by cDNA: gi_17529217
  misc_feature (1)..(166): Homolog of NCBI NO: 10764491 NR Description: allergenic isoflavone reductase-like protein Bet
  misc_feature (1)..(166): Homolog of NCBI NO: 25344798 NR Description: probable NADPH oxidoreductase, 14094-12769 - Arabidopsis thaliana >gi|10092264|gb|AAG12677.1|AC025814_1
  misc_feature (1)..(162): Homolog of NCBI NO: 7484603 NR Description: 2'-hydroxyisoflavone reductase (EC 1.3.1.45) -
  misc_feature (1)..(166): Homolog of NCBI NO: 7578909 NR Description: phenylcoumaran benzylic ether reductase homolog
  misc_feature (1)..(162): Homolog of NCBI NO: 4731376 NR Description: isoflavone reductase homolog Bet v 6.0101 [Betula
  misc_feature (1)..(167): Homolog of NCBI NO: 7578897 NR Description: phenylcoumaran benzylic ether reductase homolog
  misc_feature (1)..(166): Homolog of NCBI NO: 7578907 NR Description: phenylcoumaran benzylic ether reductase homolog

SEQ ID NO: 92846 - protein, 153 aa, Arabidopsis thaliana; identical to SEQ ID NO: 89090
  peptide (1)..(153): Ceres Seq. ID no. 12715101
  misc_feature (1)..(153): Pfam Name: Isoflavone reductase Pfam Description: Isoflavone reductase
  misc_feature (1)..(153): Homolog of NCBI NO: 15236146 NR Description: isoflavone reductase family; protein id:
  misc_feature (1)..(149): Homolog of NCBI NO: 7578895 NR Description: phenylcoumaran benzylic ether reductase homolog
  misc_feature (1)..(149): Homolog of NCBI NO: 18410820 NR Description: isoflavone reductase homolog P3; protein id: supported by cDNA: 11944., supported by cDNA: gi_17529217
  misc_feature (1)..(149): Homolog of NCBI NO: 10764491 NR Description: allergenic isoflavone reductase-like protein Bet
  misc_feature (1)..(149): Homolog of NCBI NO: 25344798 NR Description: probable NADPH oxidoreductase, 14094-12769 - Arabidopsis thaliana >gi|10092264|gb|AAG12677.1|AC025814_1
  misc_feature (1)..(145): Homolog of NCBI NO: 7484603 NR Description: 2'-hydroxyisoflavone reductase (EC 1.3.1.45) -
  misc_feature (1)..(149): Homolog of NCBI NO: 7578909 NR Description: phenylcoumaran benzylic ether reductase homolog
  misc_feature (1)..(145): Homolog of NCBI NO: 4731376 NR Description: isoflavone reductase homolog Bet v 6.0101 [Betula
  misc_feature (1)..(150): Homolog of NCBI NO: 7578897 NR Description: phenylcoumaran benzylic ether reductase homolog
  misc_feature (1)..(149): Homolog of NCBI NO: 7578907 NR Description: phenylcoumaran benzylic ether reductase homolog

SEQ ID NO: 92847 - DNA, 1710 bp, Arabidopsis thaliana; identical to SEQ ID NO: 89091
  misc_feature (1)..(1710): Ceres Seq. ID no. 12715104
  misc_feature: MA Experiment ID: 20000307 Result: Up-regulated in Transcription
  misc_feature: MA Experiment 20000307 PARAMETER Experiment Name: At_Germinating_Seeds_Sub_P Parameter: Age (hr) Value: 24 vs. 0
  misc_feature: MA Experiment 20000307 PARAMETER Experiment Name: At_Germinating_Seeds_Sub_P Parameter: Organism Value: A. thaliana
  misc_feature: MA Experiment 20000307 PARAMETER Experiment Name: At_Germinating_Seeds_Sub_P Parameter: Plant Line Value: WS
  misc_feature: MA Experiment 20000307 PARAMETER Experiment Name: At_Germinating_Seeds_Sub_P Parameter: Tissue Value: Germinating Seeds
  misc_feature: MA Experiment ID: 20000314 Result: Up-regulated in Transcription
  misc_feature: MA Experiment 20000314 PARAMETER Experiment Name: At_14day_Shoots-Roots_Sub_P Parameter: Age (day) Value: 14
  misc_feature: MA Experiment 20000314 PARAMETER Experiment Name: At_14day_Shoots-Roots_Sub_P Parameter: Organism Value: A. thaliana
  misc_feature: MA Experiment 20000314 PARAMETER Experiment Name: At_14day_Shoots-Roots_Sub_P Parameter: Plant Line Value: WS
  misc_feature: MA Experiment 20000314 PARAMETER Experiment Name: At_14day_Shoots-Roots_Sub_P Parameter: Tissue Value: Roots vs. Whole Plant
  misc_feature: MA Experiment ID: 20000440 Result: Up-regulated in Transcription
  misc_feature: MA Experiment 20000440 PARAMETER Experiment Name: At_Closed-Flower__Sub_P Parameter: Tissue Value: Closed Flower vs. Whole Plant

SEQ ID NO: 92848 - protein, 569 aa, Arabidopsis thaliana; identical to SEQ ID NO: 89092
  peptide (1)..(569): Ceres Seq. ID no. 12715105
  misc_feature (139)..(325): Pfam Name: CRAL/TRIO domain Pfam Description: CRAL/TRIO domain
  misc_feature (1)..(552): Homolog of NCBI NO: 38707281 NR Description: can of worms 1 protein [Arabidopsis thaliana]
  misc_feature (1)..(551): Homolog of NCBI NO: 15236152 NR Description: putative protein; protein id: At4g34580.1
  misc_feature (1)..(552): Homolog of NCBI NO: 18398094 NR Description: putative phosphatidylinositol/phosphatidylcholine protein; protein id: At2g16380.1, supported by cDNA: gi_16612282 thaliana] >gi|16612283|gb|AAL27507.1|AF439836_1
  misc_feature (7)..(563): Homolog of NCBI NO: 25411704 NR Description: hypothetical protein At2g16380 [imported] -
  misc_feature (5)..(553): Homolog of NCBI NO: 18399733 NR Description: putative phosphatidylinositol phophatidylcholine protein; protein id: At2g21540.1, supported by cDNA: gi_16209641 thaliana] >gi|16209642|gb|AAL14382.1| At2g21540/F2G1.19
  misc_feature (19)..(550): Homolog of NCBI NO: 14517816 NR Description: phosphatidylinositol transfer-like protein II
  misc_feature (5)..(525): Homolog of NCBI NO: 15234966 NR Description: SEC14 - like protein; protein id: At4g39180.1
  misc_feature (20)..(566): Homolog of NCBI NO: 15224125 NR Description: putative phosphatidylinositol/phophatidylcholine protein; protein id: At2g18180.1 [Arabidopsis thaliana]
  misc_feature (19)..(550): Homolog of NCBI NO: 18419847 NR Description: expressed protein; protein id: At4g36490.1, by cDNA: gi_15215779 [Arabidopsis thaliana] C7A10_870/C7A10_870 [Arabidopsis thaliana]
  misc_feature (19)..(550): Homolog of NCBI NO: 25407729 NR Description: hypothetical protein AT4g36490 [imported] - thaliana >gi|4006913|emb|CAB16843.1| hypothetical protein thaliana] >gi|7270597|emb|CAB80315.1| hypothetical protein

SEQ ID NO: 92849 - protein, 560 aa, Arabidopsis thaliana; identical to SEQ ID NO: 89093
  peptide (1)..(560): Ceres Seq. ID no. 12715106
  misc_feature (130)..(316): Pfam Name: CRAL/TRIO domain Pfam Description: CRAL/TRIO domain
  misc_feature (1)..(543): Homolog of NCBI NO: 38707281 NR Description: can of worms 1 protein [Arabidopsis thaliana]
  misc_feature (1)..(542): Homolog of NCBI NO: 15236152 NR Description: putative protein; protein id: At4g34580.1
  misc_feature (1)..(543): Homolog of NCBI NO: 18398094 NR Description: putative phosphatidylinositol/phosphatidylcholine protein; protein id: At2g16380.1, supported by cDNA: gi_16612282 thaliana] >gi|16612283|gb|AAL27507.1|AF439836_1
  misc_feature (1)..(554): Homolog of NCBI NO: 25411704 NR Description: hypothetical protein At2g16380 [imported] -
  misc_feature (1)..(544): Homolog of NCBI NO: 18399733 NR Description: putative phosphatidylinositol phophatidylcholine protein; protein id: At2g21540.1, supported by cDNA: gi_16209641 thaliana] >gi|16209642|gb|AAL14382.1| At2g21540/F2G1.19
  misc_feature (10)..(541): Homolog of NCBI NO: 14517816 NR Description: phosphatidylinositol transfer-like protein II
  misc_feature (1)..(516): Homolog of NCBI NO: 15234966 NR Description: SEC14 - like protein; protein id: At4g39180.1
  misc_feature (11)..(557): Homolog of NCBI NO: 15224125 NR Description: putative phosphatidylinositol/phophatidylcholine protein; protein id: At2g18180.1 [Arabidopsis thaliana]
  misc_feature (10)..(541): Homolog of NCBI NO: 18419847 NR Description: expressed protein; protein id: At4g36490.1, by cDNA: gi_15215779 [Arabidopsis thaliana] C7A10_870/C7A10_870 [Arabidopsis thaliana]
  misc_feature (10)..(541): Homolog of NCBI NO: 25407729 NR Description: hypothetical protein AT4g36490 [imported] - thaliana >gi|4006913|emb|CAB16843.1| hypothetical protein thaliana] >gi|7270597|emb|CAB80315.1| hypothetical protein

SEQ ID NO: 92850 - protein, 520 aa, Arabidopsis thaliana; identical to SEQ ID NO: 89094
  peptide (1)..(520): Ceres Seq. ID no. 12715107
  misc_feature (90)..(276): Pfam Name: CRAL/TRIO domain Pfam Description: CRAL/TRIO domain
  misc_feature (1)..(503): Homolog of NCBI NO: 38707281 NR Description: can of worms 1 protein [Arabidopsis thaliana]
  misc_feature (1)..(502): Homolog of NCBI NO: 15236152 NR Description: putative protein; protein id: At4g34580.1
  misc_feature (1)..(503): Homolog of NCBI NO: 18398094 NR Description: putative phosphatidylinositol/phosphatidylcholine protein; protein id: At2g16380.1, supported by cDNA: gi_16612282 thaliana] >gi|16612283|gb|AAL27507.1|AF439836_1
  misc_feature (1)..(514): Homolog of NCBI NO: 25411704 NR Description: hypothetical protein At2g16380 [imported] -
  misc_feature (1)..(504): Homolog of NCBI NO: 18399733 NR Description: putative phosphatidylinositol phophatidylcholine protein; protein id: At2g21540.1, supported by cDNA: gi_16209641 thaliana] >gi|16209642|gb|AAL14382.1| At2g21540/F2G1.19
  misc_feature (1)..(501): Homolog of NCBI NO: 14517816 NR Description: phosphatidylinositol transfer-like protein II
  misc_feature (1)..(476): Homolog of NCBI NO: 15234966 NR Description: SEC14 - like protein; protein id: At4g39180.1
  misc_feature (1)..(517): Homolog of NCBI NO: 15224125 NR Description: putative phosphatidylinositol/phophatidylcholine protein; protein id: At2g18180.1 [Arabidopsis thaliana]
  misc_feature (1)..(501): Homolog of NCBI NO: 18419847 NR Description: expressed protein; protein id: At4g36490.1, by cDNA: gi_15215779 [Arabidopsis thaliana] C7A10_870/C7A10_870 [Arabidopsis thaliana]
  misc_feature (1)..(501): Homolog of NCBI NO: 25407729 NR Description: hypothetical protein AT4g36490 [imported] - thaliana >gi|4006913|emb|CAB16843.1| hypothetical protein thaliana] >gi|7270597|emb|CAB80315.1| hypothetical protein

SEQ ID NO: 92851 - DNA, 1239 bp, Arabidopsis thaliana; identical to SEQ ID NO: 89095
  misc_feature (1)..(1239): Ceres Seq. ID no. 12715115
  misc_feature: MA Experiment ID: 108462 Result: Up-regulated in Transcription
  misc_feature: MA Experiment 108462 PARAMETER Experiment Name: At_Germinating_Seeds_cDNA_P Parameter: Age (day) Value: 2 vs. 0
  misc_feature: MA Experiment 108462 PARAMETER Experiment Name: At_Germinating_Seeds_cDNA_P Parameter: Tissue Value: Germinating Seeds
  misc_feature: MA Experiment ID: 108463 Result: Up-regulated in Transcription
  misc_feature: MA Experiment 108463 PARAMETER Experiment Name: At_Germinating_Seeds_cDNA_P Parameter: Age (day) Value: 3 vs. 0
  misc_feature: MA Experiment 108463 PARAMETER Experiment Name: At_Germinating_Seeds_cDNA_P Parameter: Tissue Value: Germinating Seeds
  misc_feature: MA Experiment ID: 108464 Result: Up-regulated in Transcription
  misc_feature: MA Experiment 108464 PARAMETER Experiment Name: At_Germinating_Seeds_cDNA_P Parameter: Age (day) Value: 4 vs. 0
  misc_feature: MA Experiment 108464 PARAMETER Experiment Name: At_Germinating_Seeds_cDNA_P Parameter: Tissue Value: Germinating Seeds
  misc_feature: MA Experiment ID: 108579 Result: Up-regulated in Transcription
  misc_feature: MA Experiment 108579 PARAMETER Experiment Name: At_4deg_Cold_cDNA_P Parameter: Temperature (deg C) Value: 4 vs. 22
  misc_feature: MA Experiment 108579 PARAMETER Experiment Name: At_4deg_Cold_cDNA_P Parameter: Timepoint (hr) Value: 6
  misc_feature: MA Experiment 108579 PARAMETER Experiment Name: At_4deg_Cold_cDNA_P Parameter: Tissue Value: Aerial
  misc_feature: MA Experiment ID: 20000069 Result: Down-regulated in Transcription
  misc_feature: MA Experiment 20000069 PARAMETER Experiment Name: At_100uM_ABA_Mutants_cDNA_P Parameter: Plant Line Value: CS23
  misc_feature: MA Experiment 20000069 PARAMETER Experiment Name: At_100uM_ABA_Mutants_cDNA_P Parameter: Timepoint (hr) Value: 6
  misc_feature: MA Experiment 20000069 PARAMETER Experiment Name: At_100uM_ABA_Mutants_cDNA_P Parameter: Tissue Value: Aerial
  misc_feature: MA Experiment 20000069 PARAMETER Experiment Name: At_100uM_ABA_Mutants_cDNA_P Parameter: Treatment Value: 100uM ABA vs. No Treatment
  misc_feature: MA Experiment ID: 20000072 Result: Down-regulated in Transcription
  misc_feature: MA Experiment 20000072 PARAMETER Experiment Name: At_100uM_ABA_Mutants_cDNA_P Parameter: Plant Line Value: CS8105
  misc_feature: MA Experiment 20000072 PARAMETER Experiment Name: At_100uM_ABA_Mutants_cDNA_P Parameter: Timepoint (hr) Value: 6
  misc_feature: MA Experiment 20000072 PARAMETER Experiment Name: At_100uM_ABA_Mutants_cDNA_P Parameter: Tissue Value: Aerial
  misc_feature: MA Experiment 20000072 PARAMETER Experiment Name: At_100uM_ABA_Mutants_cDNA_P Parameter: Treatment Value: 100uM ABA vs. No Treatment
  misc_feature: MA Experiment ID: 20000087 Result: Down-regulated in Transcription
  misc_feature: MA Experiment 20000087 PARAMETER Experiment Name: At_100uM_ABA_Mutants_cDNA_P Parameter: Plant Line Value: WS
  misc_feature: MA Experiment 20000087 PARAMETER Experiment Name: At_100uM_ABA_Mutants_cDNA_P Parameter: Timepoint (hr) Value: 6
  misc_feature: MA Experiment 20000087 PARAMETER Experiment Name: At_100uM_ABA_Mutants_cDNA_P Parameter: Tissue Value: Aerial
  misc_feature: MA Experiment 20000087 PARAMETER Experiment Name: At_100uM_ABA_Mutants_cDNA_P Parameter: Treatment Value: 100uM ABA vs. No Treatment

SEQ ID NO: 92852 - protein, 412 aa, Arabidopsis thaliana; identical to SEQ ID NO: 89096
  peptide (1)..(412): Ceres Seq. ID no. 12715116
  misc_feature (44)..(332): Pfam Name: Squalene/phytoene synthase Pfam Description: Squalene/phytoene synthase
  misc_feature (1)..(412): Homolog of NCBI NO: 7434083 NR Description: farnesyl-diphosphate farnesyltransferase (EC
  misc_feature (1)..(412): Homolog of NCBI NO: 25287164 NR Description: probable squalene synthase [imported] - thaliana >gi|5678626|emb|CAA18844.2| putative squalene synthase thaliana] >gi|7270415|emb|CAB80182.1| putative squalene synthase
  misc_feature (1)..(412): Homolog of NCBI NO: 11258828 NR Description: farnesyl-diphosphate farnesyltransferase (EC
  misc_feature (1)..(377): Homolog of NCBI NO: 15236169 NR Description: farnesyl-diphosphate farnesyltransferase
  misc_feature (1)..(409): Homolog of NCBI NO: 15236168 NR Description: farnesyl-diphosphate farnesyltransferase synthase 1) (SQS1); protein id: At4g34640.1, supported by cDNA: supported by cDNA: gi_4098518, supported by cDNA: gi_806324

SEQ ID NO: 92853 - protein, 295 aa, Arabidopsis thaliana; identical to SEQ ID NO: 89097
  peptide (1)..(295): Ceres Seq. ID no. 12715117
  misc_feature (1)..(215): Pfam Name: Squalene/phytoene synthase Pfam Description: Squalene/phytoene synthase
  misc_feature (1)..(295): Homolog of NCBI NO: 7434083 NR Description: farnesyl-diphosphate farnesyltransferase (EC
  misc_feature (1)..(295): Homolog of NCBI NO: 25287164 NR Description: probable squalene synthase [imported] - thaliana >gi|5678626|emb|CAA18844.2| putative squalene synthase thaliana] >gi|7270415|emb|CAB80182.1| putative squalene synthase
  misc_feature (1)..(295): Homolog of NCBI NO: 11258828 NR Description: farnesyl-diphosphate farnesyltransferase (EC
  misc_feature (1)..(260): Homolog of NCBI NO: 15236169 NR Description: farnesyl-diphosphate farnesyltransferase
  misc_feature (1)..(292): Homolog of NCBI NO: 15236168 NR Description: farnesyl-diphosphate farnesyltransferase synthase 1) (SQS1); protein id: At4g34640.1, supported by cDNA: supported by cDNA: gi_4098518, supported by cDNA: gi_806324

SEQ ID NO: 92854 - protein, 267 aa, Arabidopsis thaliana; identical to SEQ ID NO: 89098
  peptide (1)..(267): Ceres Seq. ID no. 12715118
  misc_feature (1)..(187): Pfam Name: Squalene/phytoene synthase Pfam Description: Squalene/phytoene synthase
  misc_feature (1)..(267): Homolog of NCBI NO: 7434083 NR Description: farnesyl-diphosphate farnesyltransferase (EC
  misc_feature (1)..(267): Homolog of NCBI NO: 25287164 NR Description: probable squalene synthase [imported] - thaliana >gi|5678626|emb|CAA18844.2| putative squalene synthase thaliana] >gi|7270415|emb|CAB80182.1| putative squalene synthase
  misc_feature (1)..(267): Homolog of NCBI NO: 11258828 NR Description: farnesyl-diphosphate farnesyltransferase (EC
  misc_feature (1)..(232): Homolog of NCBI NO: 15236169 NR Description: farnesyl-diphosphate farnesyltransferase
  misc_feature (1)..(264): Homolog of NCBI NO: 15236168 NR Description: farnesyl-diphosphate farnesyltransferase synthase 1) (SQS1); protein id: At4g34640.1, supported by cDNA: supported by cDNA: gi_4098518, supported by cDNA: gi_806324

SEQ ID NO: 92855 - DNA, 1866 bp, Arabidopsis thaliana; identical to SEQ ID NO: 89099
  misc_feature (1)..(1866): Ceres Seq. ID no. 12715348
  misc_feature: MA Experiment ID: 20000180 Result: Down-regulated in Transcription
  misc_feature: MA Experiment 20000180 PARAMETER Experiment Name: At_Germinating_Seeds_P Parameter: Age (hr) Value: 24 vs. 0
  misc_feature: MA Experiment 20000180 PARAMETER Experiment Name: At_Germinating_Seeds_P Parameter: Tissue Value: Germinating Seeds

SEQ ID NO: 92856 - protein, 621 aa, Arabidopsis thaliana; identical to SEQ ID NO: 89100
  peptide (1)..(621): Ceres Seq. ID no. 12715349
  misc_feature (109)..(143): Pfam Name: PPR repeat Pfam Description: PPR repeat
  misc_feature (112)..(620): Homolog of NCBI NO: 34897084 NR Description: hypothetical protein [Oryza sativa (japonica group)] >gi|12957718|gb|AAK09236.1| hypothetical protein [Oryza
  misc_feature (9)..(147): Homolog of NCBI NO: 34897084 NR Description: hypothetical protein [Oryza sativa (japonica group)] >gi|12957718|gb|AAK09236.1| hypothetical protein [Oryza
  misc_feature (1)..(139): Homolog of NCBI NO: 34897084 NR Description: hypothetical protein [Oryza sativa (japonica group)] >gi|12957718|gb|AAK09236.1| hypothetical protein [Oryza
  misc_feature (112)..(620): Homolog of NCBI NO: 18394615 NR Description: hypothetical protein; protein id: At1g18485.1
  misc_feature (1)..(138): Homolog of NCBI NO: 18394615 NR Description: hypothetical protein; protein id: At1g18485.1
  misc_feature (112)..(620): Homolog of NCBI NO: 15234095 NR Description: putative protein; protein id: At4g33170.1
  misc_feature (1)..(148): Homolog of NCBI NO: 15234095 NR Description: putative protein; protein id: At4g33170.1
  misc_feature (112)..(620): Homolog of NCBI NO: 15219258 NR Description: hypothetical protein; protein id: At1g16480.1
  misc_feature (1)..(134): Homolog of NCBI NO: 15219258 NR Description: hypothetical protein; protein id: At1g16480.1
  misc_feature (114)..(620): Homolog of NCBI NO: 34906110 NR Description: P0020E09.15 [Oryza sativa (japonica

SEQ ID NO: 92857 - protein, 610 aa, Arabidopsis thaliana; identical to SEQ ID NO: 89101
  peptide (1)..(610): Ceres Seq. ID no. 12715350
  misc_feature (98)..(132): Pfam Name: PPR repeat Pfam Description: PPR repeat
  misc_feature (101)..(609): Homolog of NCBI NO: 34897084 NR Description: hypothetical protein [Oryza sativa (japonica group)] >gi|12957718|gb|AAK09236.1| hypothetical protein [Oryza
  misc_feature (1)..(136): Homolog of NCBI NO: 34897084 NR Description: hypothetical protein [Oryza sativa (japonica group)] >gi|12957718|gb|AAK09236.1| hypothetical protein [Oryza
  misc_feature (1)..(128): Homolog of NCBI NO: 34897084 NR Description: hypothetical protein [Oryza sativa (japonica group)] >gi|12957718|gb|AAK09236.1| hypothetical protein [Oryza
  misc_feature (101)..(609): Homolog of NCBI NO: 18394615 NR Description: hypothetical protein; protein id: At1g18485.1
  misc_feature (1)..(127): Homolog of NCBI NO: 18394615 NR Description: hypothetical protein; protein id: At1g18485.1
  misc_feature (101)..(609): Homolog of NCBI NO: 15234095 NR Description: putative protein; protein id: At4g33170.1
  misc_feature (1)..(137): Homolog of NCBI NO: 15234095 NR Description: putative protein; protein id: At4g33170.1
  misc_feature (101)..(609): Homolog of NCBI NO: 15219258 NR Description: hypothetical protein; protein id: At1g16480.1
  misc_feature (1)..(123): Homolog of NCBI NO: 15219258 NR Description: hypothetical protein; protein id: At1g16480.1
  misc_feature (103)..(609): Homolog of NCBI NO: 34906110 NR Description: P0020E09.15 [Oryza sativa (japonica

SEQ ID NO: 92858 - protein, 590 aa, Arabidopsis thaliana; identical to SEQ ID NO: 89102
  peptide (1)..(590): Ceres Seq. ID no. 12715351
  misc_feature (78)..(112): Pfam Name: PPR repeat Pfam Description: PPR repeat
  misc_feature (81)..(589): Homolog of NCBI NO: 34897084 NR Description: hypothetical protein [Oryza sativa (japonica group)] >gi|12957718|gb|AAK09236.1| hypothetical protein [Oryza
  misc_feature (1)..(116): Homolog of NCBI NO: 34897084 NR Description: hypothetical protein [Oryza sativa (japonica group)] >gi|12957718|gb|AAK09236.1| hypothetical protein [Oryza
  misc_feature (1)..(108): Homolog of NCBI NO: 34897084 NR Description: hypothetical protein [Oryza sativa (japonica group)] >gi|12957718|gb|AAK09236.1| hypothetical protein [Oryza
  misc_feature (81)..(589): Homolog of NCBI NO: 18394615 NR Description: hypothetical protein; protein id: At1g18485.1
  misc_feature (1)..(107): Homolog of NCBI NO: 18394615 NR Description: hypothetical protein; protein id: At1g18485.1
  misc_feature (81)..(589): Homolog of NCBI NO: 15234095 NR Description: putative protein; protein id: At4g33170.1
  misc_feature (1)..(117): Homolog of NCBI NO: 15234095 NR Description: putative protein; protein id: At4g33170.1
  misc_feature (81)..(589): Homolog of NCBI NO: 15219258 NR Description: hypothetical protein; protein id: At1g16480.1
  misc_feature (1)..(103): Homolog of NCBI NO: 15219258 NR Description: hypothetical protein; protein id: At1g16480.1
  misc_feature (83)..(589): Homolog of NCBI NO: 34906110 NR Description: P0020E09.15 [Oryza sativa (japonica

SEQ ID NO: 92859 - DNA, 1122 bp, Arabidopsis thaliana; identical to SEQ ID NO: 89103
  misc_feature (1)..(1122): Ceres Seq. ID no. 12715364
  misc_feature: MA Experiment ID: 20000269 Result: Up-regulated in Transcription
  misc_feature: MA Experiment 20000269 PARAMETER Experiment Name: At_1mM_KNO3_L-vs-H_Roots_P Parameter: Age (day) Value: 7,10,12
  misc_feature: MA Experiment 20000269 PARAMETER Experiment Name: At_1mM_KNO3_L-vs-H_Roots_P Parameter: Organism Value: A. thaliana
  misc_feature: MA Experiment 20000269 PARAMETER Experiment Name: At_1mM_KNO3_L-vs-H_Roots_P Parameter: Plant Line Value: WS
  misc_feature: MA Experiment 20000269 PARAMETER Experiment Name: At_1mM_KNO3_L-vs-H_Roots_P Parameter: Timepoint (day) Value: 7,10,12
  misc_feature: MA Experiment 20000269 PARAMETER Experiment Name: At_1mM_KNO3_L-vs-H_Roots_P Parameter: Tissue Value: Roots
  misc_feature: MA Experiment 20000269 PARAMETER Experiment Name: At_1mM_KNO3_L-vs-H_Roots_P Parameter: Treatment Value: 1mM KNO3 vs. 50mM KNO3
  misc_feature: MA Experiment ID: 20000451 Result: Down-regulated in Transcription
  misc_feature: MA Experiment 20000451 PARAMETER Experiment Name: At_CS6879_Shoots-Roots_P Parameter: Age (day) Value: 14
  misc_feature: MA Experiment 20000451 PARAMETER Experiment Name: At_CS6879_Shoots-Roots_P Parameter: Organism Value: A. thaliana
  misc_feature: MA Experiment 20000451 PARAMETER Experiment Name: At_CS6879_Shoots-Roots_P Parameter: Plant Line Value: CS6879 vs. WS
  misc_feature: MA Experiment 20000451 PARAMETER Experiment Name: At_CS6879_Shoots-Roots_P Parameter: Tissue Value: Roots
  misc_feature: MA Experiment ID: 20000794 Result: Up-regulated in Transcription
  misc_feature: MA Experiment 20000794 PARAMETER Experiment Name: At_Petals_P Parameter: Age (day) Value: 23-25 days
  misc_feature: MA Experiment 20000794 PARAMETER Experiment Name: At_Petals_P Parameter: Plant Line Value: WS
  misc_feature: MA Experiment 20000794 PARAMETER Experiment Name: At_Petals_P Parameter: Tissue Value: Petals vs. Whole plant
  misc_feature: MA Experiment ID: 20001556 Result: Down-regulated in Transcription
  misc_feature: MA Experiment 20001556 PARAMETER Experiment Name: At_Drought_Soil_Dry_P Parameter: Age (day) Value: 26
  misc_feature: MA Experiment 20001556 PARAMETER Experiment Name: At_Drought_Soil_Dry_P Parameter: Organism Value: A. thaliana
  misc_feature: MA Experiment 20001556 PARAMETER Experiment Name: At_Drought_Soil_Dry_P Parameter: Plant Line Value: WS
  misc_feature: MA Experiment 20001556 PARAMETER Experiment Name: At_Drought_Soil_Dry_P Parameter: Post Timepoint (hr) Value: None
  misc_feature: MA Experiment 20001556 PARAMETER Experiment Name: At_Drought_Soil_Dry_P Parameter: Post-Treatment Value: None
  misc_feature: MA Experiment 20001556 PARAMETER Experiment Name: At_Drought_Soil_Dry_P Parameter: Timepoint (day) Value: 12
  misc_feature: MA Experiment 20001556 PARAMETER Experiment Name: At_Drought_Soil_Dry_P Parameter: Treatment Value: Drought vs. No Drought
  misc_feature: MA Experiment ID: 20001557 Result: Down-regulated in Transcription
  misc_feature: MA Experiment 20001557 PARAMETER Experiment Name: At_Drought_Soil_Dry_P Parameter: Age (day) Value: 27
  misc_feature: MA Experiment 20001557 PARAMETER Experiment Name: At_Drought_Soil_Dry_P Parameter: Organism Value: A. thaliana
  misc_feature: MA Experiment 20001557 PARAMETER Experiment Name: At_Drought_Soil_Dry_P Parameter: Plant Line Value: WS
  misc_feature: MA Experiment 20001557 PARAMETER Experiment Name: At_Drought_Soil_Dry_P Parameter: Post Timepoint (hr) Value: 3
  misc_feature: MA Experiment 20001557 PARAMETER Experiment Name: At_Drought_Soil_Dry_P Parameter: Post-Treatment Value: Re-Water vs. No Drought
  misc_feature: MA Experiment 20001557 PARAMETER Experiment Name: At_Drought_Soil_Dry_P Parameter: Timepoint (day) Value: 13
  misc_feature: MA Experiment 20001557 PARAMETER Experiment Name: At_Drought_Soil_Dry_P Parameter: Treatment Value: Drought vs. No Drought
  misc_feature: MA Experiment ID: 20001558 Result: Down-regulated in Transcription
  misc_feature: MA Experiment 20001558 PARAMETER Experiment Name: At_Drought_Soil_Dry_P Parameter: Age (day) Value: 27
  misc_feature: MA Experiment 20001558 PARAMETER Experiment Name: At_Drought_Soil_Dry_P Parameter: Organism Value: A. thaliana
  misc_feature: MA Experiment 20001558 PARAMETER Experiment Name: At_Drought_Soil_Dry_P Parameter: Plant Line Value: WS
  misc_feature: MA Experiment 20001558 PARAMETER Experiment Name: At_Drought_Soil_Dry_P Parameter: Post Timepoint (hr) Value: 6
  misc_feature: MA Experiment 20001558 PARAMETER Experiment Name: At_Drought_Soil_Dry_P Parameter: Post-Treatment Value: Re-Water vs. No Drought
  misc_feature: MA Experiment 20001558 PARAMETER Experiment Name: At_Drought_Soil_Dry_P Parameter: Timepoint (day) Value: 13
  misc_feature: MA Experiment 20001558 PARAMETER Experiment Name: At_Drought_Soil_Dry_P Parameter: Treatment Value: Drought vs. No Drought
  misc_feature: MA Experiment ID: 20001756 Result: Down-regulated in Transcription
  misc_feature: MA Experiment 20001756 PARAMETER Experiment Name: At_50mM_NH4NO3_L-to-H_P Parameter: Timepoint (hr) Value: 4
  misc_feature: MA Experiment 20001756 PARAMETER Experiment Name: At_50mM_NH4NO3_L-to-H_P Parameter: Tissue Value: Leaf
  misc_feature: MA Experiment 20001756 PARAMETER Experiment Name: At_50mM_NH4NO3_L-to-H_P Parameter: Treatment Value: 50mM NH4NO3 vs 100mM Mannitol
  misc_feature: MA Experiment ID: 20001757 Result: Down-regulated in Transcription
  misc_feature: MA Experiment 20001757 PARAMETER Experiment Name: At_50mM_NH4NO3_L-to-H_P Parameter: Timepoint (hr) Value: 6
  misc_feature: MA Experiment 20001757 PARAMETER Experiment Name: At_50mM_NH4NO3_L-to-H_P Parameter: Tissue Value: Leaf
  misc_feature: MA Experiment 20001757 PARAMETER Experiment Name: At_50mM_NH4NO3_L-to-H_P Parameter: Treatment Value: 50mM NH4NO3 vs 100mM Mannitol
  misc_feature: MA Experiment ID: 20001911 Result: Down-regulated in Transcription
  misc_feature: MA Experiment 20001911 PARAMETER Experiment Name: At_Drought_Reproduction_P Parameter: Age (day) Value: 40
  misc_feature: MA Experiment 20001911 PARAMETER Experiment Name: At_Drought_Reproduction_P Parameter: Organism Value: A. thaliana
  misc_feature: MA Experiment 20001911 PARAMETER Experiment Name: At_Drought_Reproduction_P Parameter: Plant Line Value: WS
  misc_feature: MA Experiment 20001911 PARAMETER Experiment Name: At_Drought_Reproduction_P Parameter: Timepoint (day) Value: 10
  misc_feature: MA Experiment 20001911 PARAMETER Experiment Name: At_Drought_Reproduction_P Parameter: Tissue Value: Flowers
  misc_feature: MA Experiment 20001911 PARAMETER Experiment Name: At_Drought_Reproduction_P Parameter: Treatment Value: Drought vs. No Drought

SEQ ID NO: 92860 - protein, 373 aa, Arabidopsis thaliana; identical to SEQ ID NO: 89104
  peptide (1)..(373): Ceres Seq. ID no. 12715365
  misc_feature (20)..(153): Pfam Name: Integral membrane protein DUF6 Pfam Description: Integral membrane protein DUF6
  misc_feature (1)..(373): Homolog of NCBI NO: 30680708 NR Description: nodulin MtN21 family protein [Arabidopsis
  misc_feature (6)..(373): Homolog of NCBI NO: 7486870 NR Description: hypothetical protein T12G13.140 - Arabidopsis
  misc_feature (1)..(371): Homolog of NCBI NO: 15219448 NR Description: nodulin protein, putative; protein id: supported by cDNA: 149985., supported by cDNA: gi_15146329
  misc_feature (6)..(371): Homolog of NCBI NO: 21553533 NR Description: nodulin protein, putative [Arabidopsis thaliana]
  misc_feature (1)..(363): Homolog of NCBI NO: 15219123 NR Description: nodulin-like protein; protein id: At1g21890.1,
  misc_feature (1)..(363): Homolog of NCBI NO: 17529004 NR Description: putative nodulin protein [Arabidopsis thaliana]
  misc_feature (1)..(363): Homolog of NCBI NO: 6552743 NR Description: T26F17.11 [Arabidopsis thaliana]
  misc_feature (3)..(355): Homolog of NCBI NO: 34908998 NR Description: nodulin-like protein [Oryza sativa (japonica
  misc_feature (10)..(348): Homolog of NCBI NO: 15225480 NR Description: nodulin-like protein; protein id: At2g39510.1
  misc_feature (6)..(351): Homolog of NCBI NO: 21593603 NR Description: nodulin-like protein [Arabidopsis thaliana]

SEQ ID NO: 92861 - protein, 368 aa, Arabidopsis thaliana; identical to SEQ ID NO: 82203
  peptide (1)..(368): Ceres Seq. ID no. 12715366
  misc_feature (15)..(148): Pfam Name: Integral membrane protein DUF6 Pfam Description: Integral membrane protein DUF6
  misc_feature (1)..(368): Homolog of NCBI NO: 30680708 NR Description: nodulin MtN21 family protein [Arabidopsis
  misc_feature (1)..(368): Homolog of NCBI NO: 7486870 NR Description: hypothetical protein T12G13.140 - Arabidopsis
  misc_feature (1)..(366): Homolog of NCBI NO: 15219448 NR Description: nodulin protein, putative; protein id: supported by cDNA: 149985., supported by cDNA: gi_15146329
  misc_feature (1)..(366): Homolog of NCBI NO: 21553533 NR Description: nodulin protein, putative [Arabidopsis thaliana]
  misc_feature (1)..(358): Homolog of NCBI NO: 15219123 NR Description: nodulin-like protein; protein id: At1g21890.1,
  misc_feature (1)..(358): Homolog of NCBI NO: 17529004 NR Description: putative nodulin protein [Arabidopsis thaliana]
  misc_feature (1)..(358): Homolog of NCBI NO: 6552743 NR Description: T26F17.11 [Arabidopsis thaliana]
  misc_feature (1)..(350): Homolog of NCBI NO: 34908998 NR Description: nodulin-like protein [Oryza sativa (japonica
  misc_feature (5)..(343): Homolog of NCBI NO: 15225480 NR Description: nodulin-like protein; protein id: At2g39510.1
  misc_feature (1)..(346): Homolog of NCBI NO: 21593603 NR Description: nodulin-like protein [Arabidopsis thaliana]

SEQ ID NO: 92862 - protein, 349 aa, Arabidopsis thaliana; identical to SEQ ID NO: 82204
  peptide (1)..(349): Ceres Seq. ID no. 12715367
  misc_feature (1)..(129): Pfam Name: Integral membrane protein DUF6 Pfam Description: Integral membrane protein DUF6
  misc_feature (1)..(349): Homolog of NCBI NO: 30680708 NR Description: nodulin MtN21 family protein [Arabidopsis
  misc_feature (1)..(349): Homolog of NCBI NO: 7486870 NR Description: hypothetical protein T12G13.140 - Arabidopsis
  misc_feature (1)..(347): Homolog of NCBI NO: 15219448 NR Description: nodulin protein, putative; protein id: supported by cDNA: 149985., supported by cDNA: gi_15146329
  misc_feature (1)..(347): Homolog of NCBI NO: 21553533 NR Description: nodulin protein, putative [Arabidopsis thaliana]
  misc_feature (1)..(339): Homolog of NCBI NO: 15219123 NR Description: nodulin-like protein; protein id: At1g21890.1,
  misc_feature (1)..(339): Homolog of NCBI NO: 17529004 NR Description: putative nodulin protein [Arabidopsis thaliana]
  misc_feature (1)..(339): Homolog of NCBI NO: 6552743 NR Description: T26F17.11 [Arabidopsis thaliana]
  misc_feature (1)..(331): Homolog of NCBI NO: 34908998 NR Description: nodulin-like protein [Oryza sativa (japonica
  misc_feature (1)..(324): Homolog of NCBI NO: 15225480 NR Description: nodulin-like protein; protein id: At2g39510.1
  misc_feature (1)..(327): Homolog of NCBI NO: 21593603 NR Description: nodulin-like protein [Arabidopsis thaliana]

SEQ ID NO: 92863 - DNA, 1441 bp, Arabidopsis thaliana; identical to SEQ ID NO: 89107
  misc_feature (1)..(1441): Ceres Seq. ID no. 12715372
  misc_feature: MA Experiment ID: 108434 Result: Down-regulated in Transcription
  misc_feature: MA Experiment 108434 PARAMETER Experiment Name: At_Root_Tips_cDNA_P Parameter: Tissue Value: Root Tips
  misc_feature: MA Experiment ID: 108462 Result: Down-regulated in Transcription
  misc_feature: MA Experiment 108462 PARAMETER Experiment Name: At_Germinating_Seeds_cDNA_P Parameter: Age (day) Value: 2 vs. 0
  misc_feature: MA Experiment 108462 PARAMETER Experiment Name: At_Germinating_Seeds_cDNA_P Parameter: Tissue Value: Germinating Seeds
  misc_feature: MA Experiment ID: 108464 Result: Down-regulated in Transcription
  misc_feature: MA Experiment 108464 PARAMETER Experiment Name: At_Germinating_Seeds_cDNA_P Parameter: Age (day) Value: 4 vs. 0
  misc_feature: MA Experiment 108464 PARAMETER Experiment Name: At_Germinating_Seeds_cDNA_P Parameter: Tissue Value: Germinating Seeds
  misc_feature: MA Experiment ID: 108474 Result: Down-regulated in Transcription
  misc_feature: MA Experiment 108474 PARAMETER Experiment Name: At_Drought_Flowers_cDNA_P Parameter: Timepoint (hr) Value: null
  misc_feature: MA Experiment 108474 PARAMETER Experiment Name: At_Drought_Flowers_cDNA_P Parameter: Treatment Value: Drought vs. No Drought
  misc_feature: MA Experiment ID: 108488 Result: Down-regulated in Transcription
  misc_feature: MA Experiment ID: 108579 Result: Down-regulated in Transcription
  misc_feature: MA Experiment 108579 PARAMETER Experiment Name: At_4deg_Cold_cDNA_P Parameter: Temperature (deg C) Value: 4 vs. 22
  misc_feature: MA Experiment 108579 PARAMETER Experiment Name: At_4deg_Cold_cDNA_P Parameter: Timepoint (hr) Value: 6
  misc_feature: MA Experiment 108579 PARAMETER Experiment Name: At_4deg_Cold_cDNA_P Parameter: Tissue Value: Aerial
  misc_feature: MA Experiment ID: 108605 Result: Up-regulated in Transcription
  misc_feature: MA Experiment 108605 PARAMETER Experiment Name: At_100uM_ABA_cDNA_P Parameter: Timepoint (hr) Value: 6
  misc_feature: MA Experiment 108605 PARAMETER Experiment Name: At_100uM_ABA_cDNA_P Parameter: Tissue Value: Aerial
  misc_feature: MA Experiment 108605 PARAMETER Experiment Name: At_100uM_ABA_cDNA_P Parameter: Treatment Value: 100uM ABA vs. No Treatment
  misc_feature: MA Experiment ID: 20000071 Result: Up-regulated in Transcription
  misc_feature: MA Experiment 20000071 PARAMETER Experiment Name: At_100uM_ABA_Mutants_cDNA_P Parameter: Plant Line Value: CS8104
  misc_feature: MA Experiment 20000071 PARAMETER Experiment Name: At_100uM_ABA_Mutants_cDNA_P Parameter: Timepoint (hr) Value: 6
  misc_feature: MA Experiment 20000071 PARAMETER Experiment Name: At_100uM_ABA_Mutants_cDNA_P Parameter: Tissue Value: Aerial
  misc_feature: MA Experiment 20000071 PARAMETER Experiment Name: At_100uM_ABA_Mutants_cDNA_P Parameter: Treatment Value: 100uM ABA vs. No Treatment
  misc_feature: MA Experiment ID: 20000072 Result: Up-regulated in Transcription
  misc_feature: MA Experiment 20000072 PARAMETER Experiment Name: At_100uM_ABA_Mutants_cDNA_P Parameter: Plant Line Value: CS8105
  misc_feature: MA Experiment 20000072 PARAMETER Experiment Name: At_100uM_ABA_Mutants_cDNA_P Parameter: Timepoint (hr) Value: 6
  misc_feature: MA Experiment 20000072 PARAMETER Experiment Name: At_100uM_ABA_Mutants_cDNA_P Parameter: Tissue Value: Aerial
  misc_feature: MA Experiment 20000072 PARAMETER Experiment Name: At_100uM_ABA_Mutants_cDNA_P Parameter: Treatment Value: 100uM ABA vs. No Treatment
  misc_feature: MA Experiment ID: 20000089 Result: Down-regulated in Transcription
  misc_feature: MA Experiment ID: 20000117 Result: Up-regulated in Transcription
  misc_feature: MA Experiment 20000117 PARAMETER Experiment Name: At_100uM_ABA_Mutants_cDNA_P Parameter: Plant Line Value: Columbia
  misc_feature: MA Experiment 20000117 PARAMETER Experiment Name: At_100uM_ABA_Mutants_cDNA_P Parameter: Timepoint (hr) Value: 6
  misc_feature: MA Experiment 20000117 PARAMETER Experiment Name: At_100uM_ABA_Mutants_cDNA_P Parameter: Tissue Value: Aerial
  misc_feature: MA Experiment 20000117 PARAMETER Experiment Name: At_100uM_ABA_Mutants_cDNA_P Parameter: Treatment Value: 100uM ABA vs. No Treatment
  misc_feature: MA Experiment ID: 20000169 Result: Up-regulated in Transcription
  misc_feature: MA Experiment 20000169 PARAMETER Experiment Name: At_100uM_ABA_P Parameter: Age (day) Value: 14
  misc_feature: MA Experiment 20000169 PARAMETER Experiment Name: At_100uM_ABA_P Parameter: Organism Value: A. thaliana
  misc_feature: MA Experiment 20000169 PARAMETER Experiment Name: At_100uM_ABA_P Parameter: Plant Line Value: WS
  misc_feature: MA Experiment 20000169 PARAMETER Experiment Name: At_100uM_ABA_P Parameter: Timepoint (hr) Value: 6
  misc_feature: MA Experiment 20000169 PARAMETER Experiment Name: At_100uM_ABA_P Parameter: Tissue Value: Aerial
  misc_feature: MA Experiment 20000169 PARAMETER Experiment Name: At_100uM_ABA_P Parameter: Treatment Value: 100uM ABA vs. No Treatment
  misc_feature: MA Experiment ID: 20000179 Result: Up-regulated in Transcription
  misc_feature: MA Experiment 20000179 PARAMETER Experiment Name: At_Germinating_Seeds_P Parameter: Age (hr) Value: 6 vs. 0
  misc_feature: MA Experiment 20000179 PARAMETER Experiment Name: At_Germinating_Seeds_P Parameter: Tissue Value: Germinating Seeds
  misc_feature: MA Experiment ID: 20000227 Result: Down-regulated in Transcription
  misc_feature: MA Experiment 20000227 PARAMETER Experiment Name: At_Root-Tips-vs-Tops_P Parameter: Tissue Value: Root Tips vs. Root Tops
  misc_feature: MA Experiment ID: 20000234 Result: Down-regulated in Transcription
  misc_feature: MA Experiment 20000234 PARAMETER Experiment Name: At_Siliques_P Parameter: Age (day) Value: 21
  misc_feature: MA Experiment 20000234 PARAMETER Experiment Name: At_Siliques_P Parameter: Organism Value: A. thaliana
  misc_feature: MA Experiment 20000234 PARAMETER Experiment Name: At_Siliques_P Parameter: Plant Line Value: WS
  misc_feature: MA Experiment 20000234 PARAMETER Experiment Name: At_Siliques_P Parameter: Tissue Value: Less Than 5mm Siliques vs. Whole Plant
  misc_feature: MA Experiment ID: 20000264 Result: Up-regulated in Transcription
  misc_feature: MA Experiment 20000264 PARAMETER Experiment Name: At_Open_Flower_P Parameter: Age (day) Value: 21
  misc_feature: MA Experiment 20000264 PARAMETER Experiment Name: At_Open_Flower_P Parameter: Plant Line Value: WS
  misc_feature: MA Experiment 20000264 PARAMETER Experiment Name: At_Open_Flower_P Parameter: Tissue Value: Open Flower vs. Whole Plant
  misc_feature: MA Experiment ID: 20000269 Result: Down-regulated in Transcription
  misc_feature: MA Experiment 20000269 PARAMETER Experiment Name: At_1mM_KNO3_L-vs-H_Roots_P Parameter: Age (day) Value: 7,10,12
  misc_feature: MA Experiment 20000269 PARAMETER Experiment Name: At_1mM_KNO3_L-vs-H_Roots_P Parameter: Organism Value: A. thaliana
  misc_feature: MA Experiment 20000269 PARAMETER Experiment Name: At_1mM_KNO3_L-vs-H_Roots_P Parameter: Plant Line Value: WS
  misc_feature: MA Experiment 20000269 PARAMETER Experiment Name: At_1mM_KNO3_L-vs-H_Roots_P Parameter: Timepoint (day) Value: 7,10,12
  misc_feature: MA Experiment 20000269 PARAMETER Experiment Name: At_1mM_KNO3_L-vs-H_Roots_P Parameter: Tissue Value: Roots
  misc_feature: MA Experiment 20000269 PARAMETER Experiment Name: At_1mM_KNO3_L-vs-H_Roots_P Parameter: Treatment Value: 1mM KNO3 vs. 50mM KNO3
  misc_feature: MA Experiment ID: 20000436 Result: Up-regulated in Transcription
  misc_feature: MA Experiment 20000436 PARAMETER Experiment Name: At_Drought_P Parameter: Age (day) Value: 7
  misc_feature: MA Experiment 20000436 PARAMETER Experiment Name: At_Drought_P Parameter: Organism Value: A. thaliana
  misc_feature: MA Experiment 20000436 PARAMETER Experiment Name: At_Drought_P Parameter: Plant Line Value: WS
  misc_feature: MA Experiment 20000436 PARAMETER Experiment Name: At_Drought_P Parameter: Timepoint (hr) Value: 12
  misc_feature: MA Experiment 20000436 PARAMETER Experiment Name: At_Drought_P Parameter: Tissue Value: Whole Plant
  misc_feature: MA Experiment 20000436 PARAMETER Experiment Name: At_Drought_P Parameter: Treatment Value: Drought vs. No Drought
  misc_feature: MA Experiment ID: 20000451 Result: Down-regulated in Transcription
  misc_feature: MA Experiment 20000451 PARAMETER Experiment Name: At_CS6879_Shoots-Roots_P Parameter: Age (day) Value: 14
  misc_feature: MA Experiment 20000451 PARAMETER Experiment Name: At_CS6879_Shoots-Roots_P Parameter: Organism Value: A. thaliana
  misc_feature: MA Experiment 20000451 PARAMETER Experiment Name: At_CS6879_Shoots-Roots_P Parameter: Plant Line Value: CS6879 vs. WS
  misc_feature: MA Experiment 20000451 PARAMETER Experiment Name: At_CS6879_Shoots-Roots_P Parameter: Tissue Value: Roots
  misc_feature: MA Experiment ID: 20000456 Result: Down-regulated in Transcription
  misc_feature: MA Experiment 20000456 PARAMETER Experiment Name: At_100uM_BA_P Parameter: Age (day) Value: 14
  misc_feature: MA Experiment 20000456 PARAMETER Experiment Name: At_100uM_BA_P Parameter: Organism Value: A. thaliana
  misc_feature: MA Experiment 20000456 PARAMETER Experiment Name: At_100uM_BA_P Parameter: Plant Line Value: WS
  misc_feature: MA Experiment 20000456 PARAMETER Experiment Name: At_100uM_BA_P Parameter: Timepoint (hr) Value: 6
  misc_feature: MA Experiment 20000456 PARAMETER Experiment Name: At_100uM_BA_P Parameter: Tissue Value: Aerial
  misc_feature: MA Experiment 20000456 PARAMETER Experiment Name: At_100uM_BA_P Parameter: Treatment Value: 100uM BA vs. No Treatment
  misc_feature: MA Experiment ID: 20000573 Result: Up-regulated in Transcription
  misc_feature: MA Experiment 20000573 PARAMETER Experiment Name: At_100uM_ABA_Mutants__P Parameter: Organism Value: A. thaliana
  misc_feature: MA Experiment 20000573 PARAMETER Experiment Name: At_100uM_ABA_Mutants__P Parameter: Plant Line Value: CS22 vs. Ler wt
  misc_feature: MA Experiment 20000573 PARAMETER Experiment Name: At_100uM_ABA_Mutants__P Parameter: Timepoint (hr) Value: N/A
  misc_feature: MA Experiment 20000573 PARAMETER Experiment Name: At_100uM_ABA_Mutants__P Parameter: Tissue Value: Whole Plant
  misc_feature: MA Experiment 20000573 PARAMETER Experiment Name: At_100uM_ABA_Mutants__P Parameter: Treatment Value: None
  misc_feature: MA Experiment ID: 20000709 Result: Down-regulated in Transcription
  misc_feature: MA Experiment 20000709 PARAMETER Experiment Name: At_15mM_NH4NO3_L-to-H_P Parameter: Age (hr) Value: 14
  misc_feature: MA Experiment 20000709 PARAMETER Experiment Name: At_15mM_NH4NO3_L-to-H_P Parameter: Organism Value: A. thaliana
  misc_feature: MA Experiment 20000709 PARAMETER Experiment Name: At_15mM_NH4NO3_L-to-H_P Parameter: Plant Line Value: WS
  misc_feature: MA Experiment 20000709 PARAMETER Experiment Name: At_15mM_NH4NO3_L-to-H_P Parameter: Timepoint (hr) Value: 4
  misc_feature: MA Experiment 20000709 PARAMETER Experiment Name: At_15mM_NH4NO3_L-to-H_P Parameter: Tissue Value: Aerial
  misc_feature: MA Experiment 20000709 PARAMETER Experiment Name: At_15mM_NH4NO3_L-to-H_P Parameter: Treatment Value: 15mM NH4NO3 vs. 30mM Mannitol
  misc_feature: MA Experiment ID: 20000794 Result: Up-regulated in Transcription
  misc_feature: MA Experiment 20000794 PARAMETER Experiment Name: At_Petals_P Parameter: Age (day) Value: 23-25 days
  misc_feature: MA Experiment 20000794 PARAMETER Experiment Name: At_Petals_P Parameter: Plant Line Value: WS
  misc_feature: MA Experiment 20000794 PARAMETER Experiment Name: At_Petals_P Parameter: Tissue Value: Petals vs. Whole plant
  misc_feature: MA Experiment ID: 20001247 Result: Up-regulated in Transcription
  misc_feature: MA Experiment 20001247 PARAMETER Experiment Name: At_Far-red-induction_P Parameter: Age (day) Value: 7
  misc_feature: MA Experiment 20001247 PARAMETER Experiment Name: At_Far-red-induction_P Parameter: Light Value: Far-red vs. White
  misc_feature: MA Experiment 20001247 PARAMETER Experiment Name: At_Far-red-induction_P Parameter: Organism Value: A. thaliana
  misc_feature: MA Experiment 20001247 PARAMETER Experiment Name: At_Far-red-induction_P Parameter: Plant Line Value: Columbia
  misc_feature: MA Experiment 20001247 PARAMETER Experiment Name: At_Far-red-induction_P Parameter: Timepoint (hr) Value: 1
  misc_feature: MA Experiment 20001247 PARAMETER Experiment Name: At_Far-red-induction_P Parameter: Tissue Value: Whole Plant
  misc_feature: MA Experiment ID: 20001450 Result: Up-regulated in Transcription
  misc_feature: MA Experiment 20001450 PARAMETER Experiment Name: At_Far-red-induction_P Parameter: Age (day) Value: 7
  misc_feature: MA Experiment 20001450 PARAMETER Experiment Name: At_Far-red-induction_P Parameter: Light Value: Far-red vs. White
  misc_feature: MA Experiment 20001450 PARAMETER Experiment Name: At_Far-red-induction_P Parameter: Organism Value: A. thaliana
  misc_feature: MA Experiment 20001450 PARAMETER Experiment Name: At_Far-red-induction_P Parameter: Plant Line Value: Columbia
  misc_feature: MA Experiment 20001450 PARAMETER Experiment Name: At_Far-red-induction_P Parameter: Timepoint (hr) Value: 8
  misc_feature: MA Experiment 20001450 PARAMETER Experiment Name: At_Far-red-induction_P Parameter: Tissue Value: Whole Plant
  misc_feature: MA Experiment ID: 20001451 Result: Up-regulated in Transcription
  misc_feature: MA Experiment 20001451 PARAMETER Experiment Name: At_Far-red-induction_P Parameter: Age (day) Value: 7
  misc_feature: MA Experiment 20001451 PARAMETER Experiment Name: At_Far-red-induction_P Parameter: Light Value: Far-red vs. White
  misc_feature: MA Experiment 20001451 PARAMETER Experiment Name: At_Far-red-induction_P Parameter: Organism Value: A. thaliana
  misc_feature: MA Experiment 20001451 PARAMETER Experiment Name: At_Far-red-induction_P Parameter: Plant Line Value: Columbia
  misc_feature: MA Experiment 20001451 PARAMETER Experiment Name: At_Far-red-induction_P Parameter: Timepoint (hr) Value: 24
  misc_feature: MA Experiment 20001451 PARAMETER Experiment Name: At_Far-red-induction_P Parameter: Tissue Value: Whole Plant
  misc_feature: MA Experiment ID: 20001557 Result: Down-regulated in Transcription
  misc_feature: MA Experiment 20001557 PARAMETER Experiment Name: At_Drought_Soil_Dry_P Parameter: Age (day) Value: 27
  misc_feature: MA Experiment 20001557 PARAMETER Experiment Name: At_Drought_Soil_Dry_P Parameter: Organism Value: A. thaliana
  misc_feature: MA Experiment 20001557 PARAMETER Experiment Name: At_Drought_Soil_Dry_P Parameter: Plant Line Value: WS
  misc_feature: MA Experiment 20001557 PARAMETER Experiment Name: At_Drought_Soil_Dry_P Parameter: Post Timepoint (hr) Value: 3
  misc_feature: MA Experiment 20001557 PARAMETER Experiment Name: At_Drought_Soil_Dry_P Parameter: Post-Treatment Value: Re-Water vs. No Drought
  misc_feature: MA Experiment 20001557 PARAMETER Experiment Name: At_Drought_Soil_Dry_P Parameter: Timepoint (day) Value: 13
  misc_feature: MA Experiment 20001557 PARAMETER Experiment Name: At_Drought_Soil_Dry_P Parameter: Treatment Value: Drought vs. No Drought
  misc_feature: MA Experiment ID: 20001558 Result: Down-regulated in Transcription
  misc_feature: MA Experiment 20001558 PARAMETER Experiment Name: At_Drought_Soil_Dry_P Parameter: Age (day) Value: 27
  misc_feature: MA Experiment 20001558 PARAMETER Experiment Name: At_Drought_Soil_Dry_P Parameter: Organism Value: A. thaliana
  misc_feature: MA Experiment 20001558 PARAMETER Experiment Name: At_Drought_Soil_Dry_P Parameter: Plant Line Value: WS
  misc_feature: MA Experiment 20001558 PARAMETER Experiment Name: At_Drought_Soil_Dry_P Parameter: Post Timepoint (hr) Value: 6
  misc_feature: MA Experiment 20001558 PARAMETER Experiment Name: At_Drought_Soil_Dry_P Parameter: Post-Treatment Value: Re-Water vs. No Drought
  misc_feature: MA Experiment 20001558 PARAMETER Experiment Name: At_Drought_Soil_Dry_P Parameter: Timepoint (day) Value: 13
  misc_feature: MA Experiment 20001558 PARAMETER Experiment Name: At_Drought_Soil_Dry_P Parameter: Treatment Value: Drought vs. No Drought
  misc_feature: MA Experiment ID: 20001757 Result: Down-regulated in Transcription
  misc_feature: MA Experiment 20001757 PARAMETER Experiment Name: At_50mM_NH4NO3_L-to-H_P Parameter: Timepoint (hr) Value: 6
  misc_feature: MA Experiment 20001757 PARAMETER Experiment Name: At_50mM_NH4NO3_L-to-H_P Parameter: Tissue Value: Leaf
  misc_feature: MA Experiment 20001757 PARAMETER Experiment Name: At_50mM_NH4NO3_L-to-H_P Parameter: Treatment Value: 50mM NH4NO3 vs 100mM Mannitol
  misc_feature: MA Experiment ID: 20001905 Result: Up-regulated in Transcription
  misc_feature: MA Experiment 20001905 PARAMETER Experiment Name: At_Drought_Reproduction_P Parameter: Age (day) Value: 40
  misc_feature: MA Experiment 20001905 PARAMETER Experiment Name: At_Drought_Reproduction_P Parameter: Organism Value: A. thaliana
  misc_feature: MA Experiment 20001905 PARAMETER Experiment Name: At_Drought_Reproduction_P Parameter: Plant Line Value: WS
  misc_feature: MA Experiment 20001905 PARAMETER Experiment Name: At_Drought_Reproduction_P Parameter: Timepoint (day) Value: 10
  misc_feature: MA Experiment 20001905 PARAMETER Experiment Name: At_Drought_Reproduction_P Parameter: Tissue Value: Rosettes
  misc_feature: MA Experiment 20001905 PARAMETER Experiment Name: At_Drought_Reproduction_P Parameter: Treatment Value: Drought vs. No Drought
  misc_feature: MA Experiment ID: 20001906 Result: Up-regulated in Transcription
  misc_feature: MA Experiment 20001906 PARAMETER Experiment Name: At_Drought_Reproduction_P Parameter: Age (day) Value: 35
  misc_feature: MA Experiment 20001906 PARAMETER Experiment Name: At_Drought_Reproduction_P Parameter: Organism Value: A. thaliana
  misc_feature: MA Experiment 20001906 PARAMETER Experiment Name: At_Drought_Reproduction_P Parameter: Plant Line Value: WS
  misc_feature: MA Experiment 20001906 PARAMETER Experiment Name: At_Drought_Reproduction_P Parameter: Timepoint (day) Value: 5
  misc_feature: MA Experiment 20001906 PARAMETER Experiment Name: At_Drought_Reproduction_P Parameter: Tissue Value: Siliques
  misc_feature: MA Experiment 20001906 PARAMETER Experiment Name: At_Drought_Reproduction_P Parameter: Treatment Value: Drought vs. No Drought

SEQ ID NO: 92864 - protein, 384 aa, Arabidopsis thaliana; identical to SEQ ID NO: 89108
  peptide (1)..(384): Ceres Seq. ID no. 12715373
  misc_feature (198)..(327): Pfam Name: Integral membrane protein DUF6 Pfam Description: Integral membrane protein DUF6
  misc_feature (1)..(384): Homolog of NCBI NO: 15236455 NR Description: nodulin-like protein; protein id: At4g08290.1, by cDNA: 40485. [Arabidopsis thaliana] >gi|7486869|pir||T10556
  misc_feature (1)..(384): Homolog of NCBI NO: 26452235 NR Description: putative nodulin [Arabidopsis thaliana]
  misc_feature (8)..(384): Homolog of NCBI NO: 21593603 NR Description: nodulin-like protein [Arabidopsis thaliana]
  misc_feature (12)..(353): Homolog of NCBI NO: 15225480 NR Description: nodulin-like protein; protein id: At2g39510.1
  misc_feature (8)..(363): Homolog of NCBI NO: 15224291 NR Description: nodulin-like protein; protein id: At2g37460.1, by cDNA: 16393., supported by cDNA: gi_14334857, supported by
  misc_feature (8)..(359): Homolog of NCBI NO: 21553533 NR Description: nodulin protein, putative [Arabidopsis thaliana]
  misc_feature (74)..(358): Homolog of NCBI NO: 37532392 NR Description: putative nodulin-like protein [Oryza sativa
  misc_feature (15)..(67): Homolog of NCBI NO: 37532392 NR Description: putative nodulin-like protein [Oryza sativa
  misc_feature (1)..(372): Homolog of NCBI NO: 15219448 NR Description: nodulin protein, putative; protein id: supported by cDNA: 149985., supported by cDNA: gi_15146329
  misc_feature (17)..(363): Homolog of NCBI NO: 21553757 NR Description: nodulin-like protein [Arabidopsis thaliana]

SEQ ID NO: 92865 - protein, 377 aa, Arabidopsis thaliana; identical to SEQ ID NO: 89109
  peptide (1)..(377): Ceres Seq. ID no. 12715374
  misc_feature (191)..(320): Pfam Name: Integral membrane protein DUF6 Pfam Description: Integral membrane protein DUF6
  misc_feature (1)..(377): Homolog of NCBI NO: 15236455 NR Description: nodulin-like protein; protein id: At4g08290.1, by cDNA: 40485. [Arabidopsis thaliana] >gi|7486869|pir||T10556
  misc_feature (1)..(377): Homolog of NCBI NO: 26452235 NR Description: putative nodulin [Arabidopsis thaliana]
  misc_feature (1)..(377): Homolog of NCBI NO: 21593603 NR Description: nodulin-like protein [Arabidopsis thaliana]
  misc_feature (5)..(346): Homolog of NCBI NO: 15225480 NR Description: nodulin-like protein; protein id: At2g39510.1
  misc_feature (1)..(356): Homolog of NCBI NO: 15224291 NR Description: nodulin-like protein; protein id: At2g37460.1, by cDNA: 16393., supported by cDNA: gi_14334857, supported by
  misc_feature (1)..(352): Homolog of NCBI NO: 21553533 NR Description: nodulin protein, putative [Arabidopsis thaliana]
  misc_feature (67)..(351): Homolog of NCBI NO: 37532392 NR Description: putative nodulin-like protein [Oryza sativa
  misc_feature (8)..(60): Homolog of NCBI NO: 37532392 NR Description: putative nodulin-like protein [Oryza sativa
  misc_feature (1)..(365): Homolog of NCBI NO: 15219448 NR Description: nodulin protein, putative; protein id: supported by cDNA: 149985., supported by cDNA: gi_15146329
  misc_feature (10)..(356): Homolog of NCBI NO: 21553757 NR Description: nodulin-like protein [Arabidopsis thaliana]

SEQ ID NO: 92866 - protein, 368 aa, Arabidopsis thaliana; identical to SEQ ID NO: 89110
  peptide (1)..(368): Ceres Seq. ID no. 12715375
  misc_feature (182)..(311): Pfam Name: Integral membrane protein DUF6 Pfam Description: Integral membrane protein DUF6
  misc_feature (1)..(368): Homolog of NCBI NO: 15236455 NR Description: nodulin-like protein; protein id: At4g08290.1, by cDNA: 40485. [Arabidopsis thaliana] >gi|7486869|pir||T10556
  misc_feature (1)..(368): Homolog of NCBI NO: 26452235 NR Description: putative nodulin [Arabidopsis thaliana]
  misc_feature (1)..(368): Homolog of NCBI NO: 21593603 NR Description: nodulin-like protein [Arabidopsis thaliana]
  misc_feature (1)..(337): Homolog of NCBI NO: 15225480 NR Description: nodulin-like protein; protein id: At2g39510.1
  misc_feature (1)..(347): Homolog of NCBI NO: 15224291 NR Description: nodulin-like protein; protein id: At2g37460.1, by cDNA: 16393., supported by cDNA: gi_14334857, supported by
  misc_feature (1)..(343): Homolog of NCBI NO: 21553533 NR Description: nodulin protein, putative [Arabidopsis thaliana]
  misc_feature (58)..(342): Homolog of NCBI NO: 37532392 NR Description: putative nodulin-like protein [Oryza sativa
  misc_feature (1)..(51): Homolog of NCBI NO: 37532392 NR Description: putative nodulin-like protein [Oryza sativa
  misc_feature (1)..(356): Homolog of NCBI NO: 15219448 NR Description: nodulin protein, putative; protein id: supported by cDNA: 149985., supported by cDNA: gi_15146329
  misc_feature (1)..(347): Homolog of NCBI NO: 21553757 NR Description: nodulin-like protein [Arabidopsis thaliana]

SEQ ID NO: 92867 - DNA, 1515 bp, Arabidopsis thaliana; identical to SEQ ID NO: 89111
  misc_feature (1)..(1515): Ceres Seq. ID no. 12715401
  misc_feature: MA Experiment ID: 20000307 Result: Up-regulated in Transcription
  misc_feature: MA Experiment 20000307 PARAMETER Experiment Name: At_Germinating_Seeds_Sub_P Parameter: Age (hr) Value: 24 vs. 0
  misc_feature: MA Experiment 20000307 PARAMETER Experiment Name: At_Germinating_Seeds_Sub_P Parameter: Organism Value: A. thaliana
  misc_feature: MA Experiment 20000307 PARAMETER Experiment Name: At_Germinating_Seeds_Sub_P Parameter: Plant Line Value: WS
  misc_feature: MA Experiment 20000307 PARAMETER Experiment Name: At_Germinating_Seeds_Sub_P Parameter: Tissue Value: Germinating Seeds
  misc_feature: MA Experiment ID: 20000314 Result: Up-regulated in Transcription
  misc_feature: MA Experiment 20000314 PARAMETER Experiment Name: At_14day_Shoots-Roots_Sub_P Parameter: Age (day) Value: 14
  misc_feature: MA Experiment 20000314 PARAMETER Experiment Name: At_14day_Shoots-Roots_Sub_P Parameter: Organism Value: A. thaliana
  misc_feature: MA Experiment 20000314 PARAMETER Experiment Name: At_14day_Shoots-Roots_Sub_P Parameter: Plant Line Value: WS
  misc_feature: MA Experiment 20000314 PARAMETER Experiment Name: At_14day_Shoots-Roots_Sub_P Parameter: Tissue Value: Roots vs. Whole Plant

SEQ ID NO: 92868 - protein, 504 aa, Arabidopsis thaliana; identical to SEQ ID NO: 69894
  peptide (1)..(504): Ceres Seq. ID no. 12715402
  misc_feature (133)..(435): Pfam Name: Formin Homology 2 Domain Pfam Description: Formin Homology 2 Domain
  misc_feature (1)..(504): Homolog of NCBI NO: 15236486 NR Description: extensin-like protein; protein id: At4g08400.1
  misc_feature (1)..(504): Homolog of NCBI NO: 15236488 NR Description: extensin-like protein; protein id: At4g08410.1
  misc_feature (1)..(504): Homolog of NCBI NO: 15239790 NR Description: putative protein; protein id: At5g49080.1 thaliana] >gi|10176941|dbj|BAB10090.1|
  misc_feature (1)..(504): Homolog of NCBI NO: 15240117 NR Description: putative protein; protein id: At5g06640.1 thaliana] >gi|10178120|dbj|BAB11413.1|
  misc_feature (1)..(504): Homolog of NCBI NO: 15224658 NR Description: unknown protein; protein id: At2g24980.1
  misc_feature (23)..(504): Homolog of NCBI NO: 15239790 NR Description: putative protein; protein id: At5g49080.1 thaliana] >gi|10176941|dbj|BAB10090.1|
  misc_feature (23)..(504): Homolog of NCBI NO: 15239790 NR Description: putative protein; protein id: At5g49080.1 thaliana] >gi|10176941|dbj|BAB10090.1|
  misc_feature (23)..(504): Homolog of NCBI NO: 15239790 NR Description: putative protein; protein id: At5g49080.1 thaliana] >gi|10176941|dbj|BAB10090.1|
  misc_feature (23)..(504): Homolog of NCBI NO: 15239790 NR Description: putative protein; protein id: At5g49080.1 thaliana] >gi|10176941|dbj|BAB10090.1|
  misc_feature (23)..(504): Homolog of NCBI NO: 15236488 NR Description: extensin-like protein; protein id: At4g08410.1

SEQ ID NO: 92869 - protein, 498 aa, Arabidopsis thaliana; identical to SEQ ID NO: 69895
  peptide (1)..(498): Ceres Seq. ID no. 12715403
  misc_feature (127)..(429): Pfam Name: Formin Homology 2 Domain Pfam Description: Formin Homology 2 Domain
  misc_feature (1)..(498): Homolog of NCBI NO: 15236486 NR Description: extensin-like protein; protein id: At4g08400.1
  misc_feature (1)..(498): Homolog of NCBI NO: 15236488 NR Description: extensin-like protein; protein id: At4g08410.1
  misc_feature (1)..(498): Homolog of NCBI NO: 15239790 NR Description: putative protein; protein id: At5g49080.1 thaliana] >gi|10176941|dbj|BAB10090.1|
  misc_feature (1)..(498): Homolog of NCBI NO: 15240117 NR Description: putative protein; protein id: At5g06640.1 thaliana] >gi|10178120|dbj|BAB11413.1|
  misc_feature (1)..(498): Homolog of NCBI NO: 15224658 NR Description: unknown protein; protein id: At2g24980.1
  misc_feature (17)..(498): Homolog of NCBI NO: 15239790 NR Description: putative protein; protein id: At5g49080.1 thaliana] >gi|10176941|dbj|BAB10090.1|
  misc_feature (17)..(498): Homolog of NCBI NO: 15239790 NR Description: putative protein; protein id: At5g49080.1 thaliana] >gi|10176941|dbj|BAB10090.1|
  misc_feature (17)..(498): Homolog of NCBI NO: 15239790 NR Description: putative protein; protein id: At5g49080.1 thaliana] >gi|10176941|dbj|BAB10090.1|
  misc_feature (17)..(498): Homolog of NCBI NO: 15239790 NR Description: putative protein; protein id: At5g49080.1 thaliana] >gi|10176941|dbj|BAB10090.1|
  misc_feature (17)..(498): Homolog of NCBI NO: 15236488 NR Description: extensin-like protein; protein id: At4g08410.1

SEQ ID NO: 92870 - protein, 380 aa, Arabidopsis thaliana; identical to SEQ ID NO: 69896
  peptide (1)..(380): Ceres Seq. ID no. 12715404
  misc_feature (52)..(273): Pfam Name: Plasmodium histidine-rich protein (HRPII/III) Pfam Description: Plasmodium histidine-rich protein (HRPII/III)
  misc_feature (194)..(259): Homolog of NCBI NO: 30699212 NR Description: extensin family protein [Arabidopsis thaliana]
  misc_feature (184)..(244): Homolog of NCBI NO: 30699212 NR Description: extensin family protein [Arabidopsis thaliana]
  misc_feature (73)..(351): Homolog of NCBI NO: 1076557 NR Description: extensin-like protein - cowpea (fragment)
  misc_feature (186)..(380): Homolog of NCBI NO: 1076557 NR Description: extensin-like protein - cowpea (fragment)
  misc_feature (9)..(273): Homolog of NCBI NO: 1076557 NR Description: extensin-like protein - cowpea (fragment)
  misc_feature (1)..(239): Homolog of NCBI NO: 1076557 NR Description: extensin-like protein - cowpea (fragment)
  misc_feature (1)..(222): Homolog of NCBI NO: 1076557 NR Description: extensin-like protein - cowpea (fragment)
  misc_feature (1)..(184): Homolog of NCBI NO: 1076557 NR Description: extensin-like protein - cowpea (fragment)

SEQ ID NO: 92871 - DNA, 2043 bp, Arabidopsis thaliana; identical to SEQ ID NO: 89115
  misc_feature (1)..(2043): Ceres Seq. ID no. 12715412
  misc_feature: MA Experiment ID: 20000307 Result: Up-regulated in Transcription
  misc_feature: MA Experiment 20000307 PARAMETER Experiment Name: At_Germinating_Seeds_Sub_P Parameter: Age (hr) Value: 24 vs. 0
  misc_feature: MA Experiment 20000307 PARAMETER Experiment Name: At_Germinating_Seeds_Sub_P Parameter: Organism Value: A. thaliana
  misc_feature: MA Experiment 20000307 PARAMETER Experiment Name: At_Germinating_Seeds_Sub_P Parameter: Plant Line Value: WS
  misc_feature: MA Experiment 20000307 PARAMETER Experiment Name: At_Germinating_Seeds_Sub_P Parameter: Tissue Value: Germinating Seeds
  misc_feature: MA Experiment ID: 20000314 Result: Up-regulated in Transcription
  misc_feature: MA Experiment 20000314 PARAMETER Experiment Name: At_14day_Shoots-Roots_Sub_P Parameter: Age (day) Value: 14
  misc_feature: MA Experiment 20000314 PARAMETER Experiment Name: At_14day_Shoots-Roots_Sub_P Parameter: Organism Value: A. thaliana
  misc_feature: MA Experiment 20000314 PARAMETER Experiment Name: At_14day_Shoots-Roots_Sub_P Parameter: Plant Line Value: WS
  misc_feature: MA Experiment 20000314 PARAMETER Experiment Name: At_14day_Shoots-Roots_Sub_P Parameter: Tissue Value: Roots vs. Whole Plant

SEQ ID NO: 92872 - protein, 680 aa, Arabidopsis thaliana; identical to SEQ ID NO: 89116
  peptide (1)..(680): Ceres Seq. ID no. 12715413
  misc_feature (99)..(402): Pfam Name: Formin Homology 2 Domain Pfam Description: Formin Homology 2 Domain
  misc_feature (1)..(563): Homolog of NCBI NO: 15224658 NR Description: unknown protein; protein id: At2g24980.1
  misc_feature (1)..(505): Homolog of NCBI NO: 15236486 NR Description: extensin-like protein; protein id: At4g08400.1
  misc_feature (77)..(613): Homolog of NCBI NO: 15224658 NR Description: unknown protein; protein id: At2g24980.1
  misc_feature (103)..(638): Homolog of NCBI NO: 15224658 NR Description: unknown protein; protein id: At2g24980.1
  misc_feature (128)..(663): Homolog of NCBI NO: 15224658 NR Description: unknown protein; protein id: At2g24980.1
  misc_feature (54)..(588): Homolog of NCBI NO: 15224658 NR Description: unknown protein; protein id: At2g24980.1
  misc_feature (153)..(680): Homolog of NCBI NO: 15224658 NR Description: unknown protein; protein id: At2g24980.1
  misc_feature (177)..(680): Homolog of NCBI NO: 15232552 NR Description: extensin precursor -like protein; protein id:
  misc_feature (128)..(605): Homolog of NCBI NO: 15236486 NR Description: extensin-like protein; protein id: At4g08400.1
  misc_feature (203)..(680): Homolog of NCBI NO: 15236486 NR Description: extensin-like protein; protein id: At4g08400.1

SEQ ID NO: 92873 - protein, 674 aa, Arabidopsis thaliana; identical to SEQ ID NO: 89117
  peptide (1)..(674): Ceres Seq. ID no. 12715414
  misc_feature (93)..(396): Pfam Name: Formin Homology 2 Domain Pfam Description: Formin Homology 2 Domain
  misc_feature (1)..(557): Homolog of NCBI NO: 15224658 NR Description: unknown protein; protein id: At2g24980.1
  misc_feature (1)..(499): Homolog of NCBI NO: 15236486 NR Description: extensin-like protein; protein id: At4g08400.1
  misc_feature (71)..(607): Homolog of NCBI NO: 15224658 NR Description: unknown protein; protein id: At2g24980.1
  misc_feature (97)..(632): Homolog of NCBI NO: 15224658 NR Description: unknown protein; protein id: At2g24980.1
  misc_feature (122)..(657): Homolog of NCBI NO: 15224658 NR Description: unknown protein; protein id: At2g24980.1
  misc_feature (48)..(582): Homolog of NCBI NO: 15224658 NR Description: unknown protein; protein id: At2g24980.1
  misc_feature (147)..(674): Homolog of NCBI NO: 15224658 NR Description: unknown protein; protein id: At2g24980.1
  misc_feature (171)..(674): Homolog of NCBI NO: 15232552 NR Description: extensin precursor -like protein; protein id:
  misc_feature (122)..(599): Homolog of NCBI NO: 15236486 NR Description: extensin-like protein; protein id: At4g08400.1
  misc_feature (197)..(674): Homolog of NCBI NO: 15236486 NR Description: extensin-like protein; protein id: At4g08400.1

SEQ ID NO: 92874 - protein, 643 aa, Arabidopsis thaliana; identical to SEQ ID NO: 69877
  peptide (1)..(643): Ceres Seq. ID no. 12715415
  misc_feature (186)..(457): Pfam Name: Syndecan domain Pfam Description: Syndecan domain
  misc_feature (235)..(323): Homolog of NCBI NO: 18411288 NR Description: expressed protein; protein id: At1g76930.1,
  misc_feature (385)..(488): Homolog of NCBI NO: 18411288 NR Description: expressed protein; protein id: At1g76930.1,
  misc_feature (493)..(582): Homolog of NCBI NO: 18411288 NR Description: expressed protein; protein id: At1g76930.1,
  misc_feature (194)..(282): Homolog of NCBI NO: 18411288 NR Description: expressed protein; protein id: At1g76930.1,
  misc_feature (285)..(382): Homolog of NCBI NO: 18411288 NR Description: expressed protein; protein id: At1g76930.1,
  misc_feature (335)..(432): Homolog of NCBI NO: 18411288 NR Description: expressed protein; protein id: At1g76930.1,
  misc_feature (544)..(642): Homolog of NCBI NO: 18411288 NR Description: expressed protein; protein id: At1g76930.1,
  misc_feature (409)..(507): Homolog of NCBI NO: 18411288 NR Description: expressed protein; protein id: At1g76930.1,
  misc_feature (134)..(232): Homolog of NCBI NO: 18411288 NR Description: expressed protein; protein id: At1g76930.1,
  misc_feature (60)..(157): Homolog of NCBI NO: 18411288 NR Description: expressed protein; protein id: At1g76930.1,

SEQ ID NO: 92875 - DNA, 2286 bp, Arabidopsis thaliana; identical to SEQ ID NO: 89119
  misc_feature (1)..(2286): Ceres Seq. ID no. 12715433
  misc_feature: MA Experiment ID: 20000327 Result: Up-regulated in Transcription
  misc_feature: MA Experiment 20000327 PARAMETER Experiment Name: At_42deg_Heat_Sub_P Parameter: Age (day) Value: 14
  misc_feature: MA Experiment 20000327 PARAMETER Experiment Name: At_42deg_Heat_Sub_P Parameter: Organism Value: A. thaliana
  misc_feature: MA Experiment 20000327 PARAMETER Experiment Name: At_42deg_Heat_Sub_P Parameter: Plant Line Value: WS
  misc_feature: MA Experiment 20000327 PARAMETER Experiment Name: At_42deg_Heat_Sub_P Parameter: Temperature (deg C) Value: 42 vs. 22
  misc_feature: MA Experiment 20000327 PARAMETER Experiment Name: At_42deg_Heat_Sub_P Parameter: Timepoint (hr) Value: 1
  misc_feature: MA Experiment 20000327 PARAMETER Experiment Name: At_42deg_Heat_Sub_P Parameter: Tissue Value: Aerial
  misc_feature: MA Experiment ID: 20000355 Result: Down-regulated in Transcription
  misc_feature: MA Experiment 20000355 PARAMETER Experiment Name: At_Siliques_Sub_P Parameter: Age (day) Value: 21
  misc_feature: MA Experiment 20000355 PARAMETER Experiment Name: At_Siliques_Sub_P Parameter: Organism Value: A. thaliana
  misc_feature: MA Experiment 20000355 PARAMETER Experiment Name: At_Siliques_Sub_P Parameter: Plant Line Value: WS
  misc_feature: MA Experiment 20000355 PARAMETER Experiment Name: At_Siliques_Sub_P Parameter: Tissue Value: Less Than 5mm Siliques vs. Whole Plant

SEQ ID NO: 92876 - protein, 761 aa, Arabidopsis thaliana; identical to SEQ ID NO: 89120
  peptide (1)..(761): Ceres Seq. ID no. 12715434
  misc_feature (489)..(743): Pfam Name: Protein kinase domain Pfam Description: Protein kinase domain
  misc_feature (274)..(761): Homolog of NCBI NO: 1255448 NR Description: mitogen-activated protein kinase [Arabidopsis
  misc_feature (274)..(761): Homolog of NCBI NO: 15236515 NR Description: MEKK1/MAP kinase kinase kinase; protein id: supported by cDNA: gi_1255447, supported by cDNA: gi_17064765
  misc_feature (274)..(761): Homolog of NCBI NO: 17064766 NR Description: Unknown protein [Arabidopsis thaliana]
  misc_feature (330)..(761): Homolog of NCBI NO: 3688209 NR Description: MAP3K beta 1 protein kinase [Brassica napus]
  misc_feature (270)..(761): Homolog of NCBI NO: 871812 NR Description: ARA.KIN gene product
  misc_feature (487)..(743): Homolog of NCBI NO: 15236509 NR Description: putative mitogen-activated protein kinase;
  misc_feature (487)..(743): Homolog of NCBI NO: 28393793 NR Description: putative mitogen-activated protein kinase
  misc_feature (377)..(508): Homolog of NCBI NO: 15236509 NR Description: putative mitogen-activated protein kinase;
  misc_feature (377)..(508): Homolog of NCBI NO: 28393793 NR Description: putative mitogen-activated protein kinase
  misc_feature (487)..(743): Homolog of NCBI NO: 11358511 NR Description: mitogen-activated protein kinase MAP3K beta - Arabidopsis thaliana (fragment) >gi|3688195|emb|CAA08996.1|

SEQ ID NO: 92877 - protein, 718 aa, Arabidopsis thaliana; identical to SEQ ID NO: 89121
  peptide (1)..(718): Ceres Seq. ID no. 12715435
  misc_feature (446)..(700): Pfam Name: Protein kinase domain Pfam Description: Protein kinase domain
  misc_feature (231)..(718): Homolog of NCBI NO: 1255448 NR Description: mitogen-activated protein kinase [Arabidopsis
  misc_feature (231)..(718): Homolog of NCBI NO: 15236515 NR Description: MEKK1/MAP kinase kinase kinase; protein id: supported by cDNA: gi_1255447, supported by cDNA: gi_17064765
  misc_feature (231)..(718): Homolog of NCBI NO: 17064766 NR Description: Unknown protein [Arabidopsis thaliana]
  misc_feature (287)..(718): Homolog of NCBI NO: 3688209 NR Description: MAP3K beta 1 protein kinase [Brassica napus]
  misc_feature (227)..(718): Homolog of NCBI NO: 871812 NR Description: ARA.KIN gene product
  misc_feature (444)..(700): Homolog of NCBI NO: 15236509 NR Description: putative mitogen-activated protein kinase;
  misc_feature (444)..(700): Homolog of NCBI NO: 28393793 NR Description: putative mitogen-activated protein kinase
  misc_feature (334)..(465): Homolog of NCBI NO: 15236509 NR Description: putative mitogen-activated protein kinase;
  misc_feature (334)..(465): Homolog of NCBI NO: 28393793 NR Description: putative mitogen-activated protein kinase
  misc_feature (444)..(700): Homolog of NCBI NO: 11358511 NR Description: mitogen-activated protein kinase MAP3K beta - Arabidopsis thaliana (fragment) >gi|3688195|emb|CAA08996.1|

SEQ ID NO: 92878 - protein, 655 aa, Arabidopsis thaliana; identical to SEQ ID NO: 89122
  peptide (1)..(655): Ceres Seq. ID no. 12715436
  misc_feature (383)..(637): Pfam Name: Protein kinase domain Pfam Description: Protein kinase domain
  misc_feature (168)..(655): Homolog of NCBI NO: 1255448 NR Description: mitogen-activated protein kinase [Arabidopsis
  misc_feature (168)..(655): Homolog of NCBI NO: 15236515 NR Description: MEKK1/MAP kinase kinase kinase; protein id: supported by cDNA: gi_1255447, supported by cDNA: gi_17064765
  misc_feature (168)..(655): Homolog of NCBI NO: 17064766 NR Description: Unknown protein [Arabidopsis thaliana]
  misc_feature (224)..(655): Homolog of NCBI NO: 3688209 NR Description: MAP3K beta 1 protein kinase [Brassica napus]
  misc_feature (164)..(655): Homolog of NCBI NO: 871812 NR Description: ARA.KIN gene product
  misc_feature (381)..(637): Homolog of NCBI NO: 15236509 NR Description: putative mitogen-activated protein kinase;
  misc_feature (381)..(637): Homolog of NCBI NO: 28393793 NR Description: putative mitogen-activated protein kinase
  misc_feature (271)..(402): Homolog of NCBI NO: 15236509 NR Description: putative mitogen-activated protein kinase;
  misc_feature (271)..(402): Homolog of NCBI NO: 28393793 NR Description: putative mitogen-activated protein kinase
  misc_feature (381)..(637): Homolog of NCBI NO: 11358511 NR Description: mitogen-activated protein kinase MAP3K beta - Arabidopsis thaliana (fragment) >gi|3688195|emb|CAA08996.1|

SEQ ID NO: 92879 - DNA, 1446 bp, Arabidopsis thaliana; identical to SEQ ID NO: 89123
  misc_feature (1)..(1446): Ceres Seq. ID no. 12715518
  misc_feature: MA Experiment ID: 20001905 Result: Down-regulated in Transcription
  misc_feature: MA Experiment 20001905 PARAMETER Experiment Name: At_Drought_Reproduction_P Parameter: Age (day) Value: 40
  misc_feature: MA Experiment 20001905 PARAMETER Experiment Name: At_Drought_Reproduction_P Parameter: Organism Value: A. thaliana
  misc_feature: MA Experiment 20001905 PARAMETER Experiment Name: At_Drought_Reproduction_P Parameter: Plant Line Value: WS
  misc_feature: MA Experiment 20001905 PARAMETER Experiment Name: At_Drought_Reproduction_P Parameter: Timepoint (day) Value: 10
  misc_feature: MA Experiment 20001905 PARAMETER Experiment Name: At_Drought_Reproduction_P Parameter: Tissue Value: Rosettes
  misc_feature: MA Experiment 20001905 PARAMETER Experiment Name: At_Drought_Reproduction_P Parameter: Treatment Value: Drought vs. No Drought

SEQ ID NO: 92880 - protein, 481 aa, Arabidopsis thaliana; identical to SEQ ID NO: 89124
  peptide (1)..(481): Ceres Seq. ID no. 12715519
  misc_feature (11)..(481): Homolog of NCBI NO: 15222125 NR Description: cytochrome P450, putative; protein id: [Arabidopsis thaliana] >gi|25406415|pir||D96781 cytochrome P450,
  misc_feature (4)..(481): Homolog of NCBI NO: 15225777 NR Description: cytochrome P450, putative; protein id: [Arabidopsis thaliana] >gi|25407842|pir||H84663 probable
  misc_feature (66)..(481): Homolog of NCBI NO: 34896248 NR Description: OSJNBb0008D07.14 [Oryza sativa (japonica
  misc_feature (11)..(66): Homolog of NCBI NO: 34896248 NR Description: OSJNBb0008D07.14 [Oryza sativa (japonica
  misc_feature (4)..(480): Homolog of NCBI NO: 21805645 NR Description: cytochrome P450 monooxygenase CYP72A5 [Zea mays
  misc_feature (12)..(479): Homolog of NCBI NO: 21842133 NR Description: cytochrome P450 monooxygenase CYP72A16 [Zea mays
  misc_feature (9)..(359): Homolog of NCBI NO: 34912892 NR Description: putative cytochrome P450 [Oryza sativa (japonica group)] >gi|11761098|dbj|BAB19088.1| putative cytochrome P450
  misc_feature (340)..(479): Homolog of NCBI NO: 34912892 NR Description: putative cytochrome P450 [Oryza sativa (japonica group)] >gi|11761098|dbj|BAB19088.1| putative cytochrome P450
  misc_feature (9)..(479): Homolog of NCBI NO: 13661770 NR Description: putative cytochrome P450 [Lolium rigidum]
  misc_feature (9)..(479): Homolog of NCBI NO: 13661768 NR Description: putative cytochrome P450 [Lolium rigidum]

SEQ ID NO: 92881 - protein, 347 aa, Arabidopsis thaliana; identical to SEQ ID NO: 50028
  peptide (1)..(347): Ceres Seq. ID no. 12715520
  misc_feature (1)..(347): Homolog of NCBI NO: 15222125 NR Description: cytochrome P450, putative; protein id: [Arabidopsis thaliana] >gi|25406415|pir||D96781 cytochrome P450,
  misc_feature (1)..(347): Homolog of NCBI NO: 15225777 NR Description: cytochrome P450, putative; protein id: [Arabidopsis thaliana] >gi|25407842|pir||H84663 probable
  misc_feature (1)..(347): Homolog of NCBI NO: 34896248 NR Description: OSJNBb0008D07.14 [Oryza sativa (japonica
  misc_feature (1)..(346): Homolog of NCBI NO: 21805645 NR Description: cytochrome P450 monooxygenase CYP72A5 [Zea mays
  misc_feature (1)..(345): Homolog of NCBI NO: 21842133 NR Description: cytochrome P450 monooxygenase CYP72A16 [Zea mays
  misc_feature (1)..(225): Homolog of NCBI NO: 34912892 NR Description: putative cytochrome P450 [Oryza sativa (japonica group)] >gi|11761098|dbj|BAB19088.1| putative cytochrome P450
  misc_feature (206)..(345): Homolog of NCBI NO: 34912892 NR Description: putative cytochrome P450 [Oryza sativa (japonica group)] >gi|11761098|dbj|BAB19088.1| putative cytochrome P450
  misc_feature (1)..(345): Homolog of NCBI NO: 13661770 NR Description: putative cytochrome P450 [Lolium rigidum]
  misc_feature (1)..(345): Homolog of NCBI NO: 13661768 NR Description: putative cytochrome P450 [Lolium rigidum]
  misc_feature (1)..(341): Homolog of NCBI NO: 34913346 NR Description: putative cytochrome P450 [Oryza sativa (japonica group)] >gi|22093840|dbj|BAC07127.1| putative cytochrome P450

SEQ ID NO: 92882 - protein, 337 aa, Arabidopsis thaliana; identical to SEQ ID NO: 89126
  peptide (1)..(337): Ceres Seq. ID no. 12715521
  misc_feature (1)..(337): Homolog of NCBI NO: 15222125 NR Description: cytochrome P450, putative; protein id: [Arabidopsis thaliana] >gi|25406415|pir||D96781 cytochrome P450,
  misc_feature (1)..(337): Homolog of NCBI NO: 15225777 NR Description: cytochrome P450, putative; protein id: [Arabidopsis thaliana] >gi|25407842|pir||H84663 probable
  misc_feature (1)..(337): Homolog of NCBI NO: 34896248 NR Description: OSJNBb0008D07.14 [Oryza sativa (japonica
  misc_feature (1)..(336): Homolog of NCBI NO: 21805645 NR Description: cytochrome P450 monooxygenase CYP72A5 [Zea mays
  misc_feature (1)..(335): Homolog of NCBI NO: 21842133 NR Description: cytochrome P450 monooxygenase CYP72A16 [Zea mays
  misc_feature (1)..(215): Homolog of NCBI NO: 34912892 NR Description: putative cytochrome P450 [Oryza sativa (japonica group)] >gi|11761098|dbj|BAB19088.1| putative cytochrome P450
  misc_feature (196)..(335): Homolog of NCBI NO: 34912892 NR Description: putative cytochrome P450 [Oryza sativa (japonica group)] >gi|11761098|dbj|BAB19088.1| putative cytochrome P450
  misc_feature (1)..(335): Homolog of NCBI NO: 13661770 NR Description: putative cytochrome P450 [Lolium rigidum]
  misc_feature (1)..(335): Homolog of NCBI NO: 13661768 NR Description: putative cytochrome P450 [Lolium rigidum]
  misc_feature (1)..(331): Homolog of NCBI NO: 34913346 NR Description: putative cytochrome P450 [Oryza sativa (japonica group)] >gi|22093840|dbj|BAC07127.1| putative cytochrome P450

SEQ ID NO: 92883 - DNA, 836 bp, Arabidopsis thaliana; identical to SEQ ID NO: 89127
  misc_feature (1)..(836): Ceres Seq. ID no. 12715584
  misc_feature: MA Experiment ID: 108462 Result: Down-regulated in Transcription
  misc_feature: MA Experiment 108462 PARAMETER Experiment Name: At_Germinating_Seeds_cDNA_P Parameter: Age (day) Value: 2 vs. 0
  misc_feature: MA Experiment 108462 PARAMETER Experiment Name: At_Germinating_Seeds_cDNA_P Parameter: Tissue Value: Germinating Seeds
  misc_feature: MA Experiment ID: 108463 Result: Down-regulated in Transcription
  misc_feature: MA Experiment 108463 PARAMETER Experiment Name: At_Germinating_Seeds_cDNA_P Parameter: Age (day) Value: 3 vs. 0
  misc_feature: MA Experiment 108463 PARAMETER Experiment Name: At_Germinating_Seeds_cDNA_P Parameter: Tissue Value: Germinating Seeds
  misc_feature: MA Experiment ID: 108668 Result: Up-regulated in Transcription
  misc_feature: MA Experiment 108668 PARAMETER Experiment Name: At_2mM_SA_cDNA_P Parameter: Plant Line Value: WS
  misc_feature: MA Experiment 108668 PARAMETER Experiment Name: At_2mM_SA_cDNA_P Parameter: Timepoint (hr) Value: 6
  misc_feature: MA Experiment 108668 PARAMETER Experiment Name: At_2mM_SA_cDNA_P Parameter: Treatment Value: 2mM SA vs. No Treatment
  misc_feature: MA Experiment ID: 20000090 Result: Up-regulated in Transcription
  misc_feature: MA Experiment ID: 20000173 Result: Down-regulated in Transcription
  misc_feature: MA Experiment 20000173 PARAMETER Experiment Name: At_42deg_Heat_P Parameter: Age (day) Value: 14
  misc_feature: MA Experiment 20000173 PARAMETER Experiment Name: At_42deg_Heat_P Parameter: Organism Value: A. thaliana
  misc_feature: MA Experiment 20000173 PARAMETER Experiment Name: At_42deg_Heat_P Parameter: Plant Line Value: WS
  misc_feature: MA Experiment 20000173 PARAMETER Experiment Name: At_42deg_Heat_P Parameter: Temperature (deg C) Value: 42 vs. 22
  misc_feature: MA Experiment 20000173 PARAMETER Experiment Name: At_42deg_Heat_P Parameter: Timepoint (hr) Value: 6
  misc_feature: MA Experiment 20000173 PARAMETER Experiment Name: At_42deg_Heat_P Parameter: Tissue Value: Aerial
  misc_feature: MA Experiment ID: 20000182 Result: Up-regulated in Transcription
  misc_feature: MA Experiment 20000182 PARAMETER Experiment Name: At_2mM_SA_P Parameter: Age (day) Value: 14
  misc_feature: MA Experiment 20000182 PARAMETER Experiment Name: At_2mM_SA_P Parameter: Organism Value: A. thaliana
  misc_feature: MA Experiment 20000182 PARAMETER Experiment Name: At_2mM_SA_P Parameter: Plant Line Value: WS
  misc_feature: MA Experiment 20000182 PARAMETER Experiment Name: At_2mM_SA_P Parameter: Timepoint (hr) Value: 6
  misc_feature: MA Experiment 20000182 PARAMETER Experiment Name: At_2mM_SA_P Parameter: Tissue Value: Aerial
  misc_feature: MA Experiment 20000182 PARAMETER Experiment Name: At_2mM_SA_P Parameter: Treatment Value: 2mM SA vs. No Treatment
  misc_feature: MA Experiment ID: 20000184 Result: Down-regulated in Transcription
  misc_feature: MA Experiment 20000184 PARAMETER Experiment Name: At_Shoots__P Parameter: Age (day) Value: 7
  misc_feature: MA Experiment 20000184 PARAMETER Experiment Name: At_Shoots__P Parameter: Tissue Value: Shoots vs. Whole Plant
  misc_feature: MA Experiment ID: 20000224 Result: Up-regulated in Transcription

SEQ ID NO: 92884 - protein, 261 aa, Arabidopsis thaliana; identical to SEQ ID NO: 35607
  peptide (1)..(261): Ceres Seq. ID no. 12715585
  misc_feature (4)..(260): Pfam Name: Transcription initiation factor IIF, beta subunit Pfam Description: Transcription initiation factor IIF, beta
  misc_feature (1)..(261): Homolog of NCBI NO: 15222264 NR Description: transcription initiation factor, putative; id: At1g75510.1, supported by cDNA: gi_12642907, supported by gi_13265438 [Arabidopsis thaliana]
  misc_feature (2)..(256): Homolog of NCBI NO: 34909946 NR Description: putative transcription initiation factor [Oryza
  misc_feature (66)..(256): Homolog of NCBI NO: 15231173 NR Description: transcription initiation factor IIF, beta
  misc_feature (103)..(256): Homolog of NCBI NO: 11285686 NR Description: hypothetical protein T25B15.40 - Arabidopsis >gi|10045560|emb|CAC07918.1| putative protein [Arabidopsis
  misc_feature (66)..(99): Homolog of NCBI NO: 11285686 NR Description: hypothetical protein T25B15.40 - Arabidopsis >gi|10045560|emb|CAC07918.1| putative protein [Arabidopsis
  misc_feature (2)..(251): Homolog of NCBI NO: 19111874 NR Description: transcription initiation factor iif, beta subunit
  misc_feature (6)..(251): Homolog of NCBI NO: 24645751 NR Description: Transcription factor TFIIFbeta CG6538-PA
  misc_feature (6)..(257): Homolog of NCBI NO: 38174399 NR Description: Unknown (protein for MGC:75790) [Silurana
  misc_feature (105)..(252): Homolog of NCBI NO: 19073998 NR Description: TRANSCRIPTION INITIATION FACTOR TFIIF BETA [Encephalitozoon cuniculi] >gi|19068640|emb|CAD25108.1|
  misc_feature (106)..(257): Homolog of NCBI NO: 464520 NR Description: TRANSCRIPTION INITIATION FACTOR IIF, BETA SUBUNIT BETA) (TRANSCRIPTION INITIATION FACTOR RAP30)

SEQ ID NO: 92885 - protein, 243 aa, Arabidopsis thaliana; identical to SEQ ID NO: 35608
  peptide (1)..(243): Ceres Seq. ID no. 12715586
  misc_feature (1)..(242): Pfam Name: Transcription initiation factor IIF, beta subunit Pfam Description: Transcription initiation factor IIF, beta
  misc_feature (1)..(243): Homolog of NCBI NO: 15222264 NR Description: transcription initiation factor, putative; id: At1g75510.1, supported by cDNA: gi_12642907, supported by gi_13265438 [Arabidopsis thaliana]
  misc_feature (1)..(238): Homolog of NCBI NO: 34909946 NR Description: putative transcription initiation factor [Oryza
  misc_feature (48)..(238): Homolog of NCBI NO: 15231173 NR Description: transcription initiation factor IIF, beta
  misc_feature (85)..(238): Homolog of NCBI NO: 11285686 NR Description: hypothetical protein T25B15.40 - Arabidopsis >gi|10045560|emb|CAC07918.1| putative protein [Arabidopsis
  misc_feature (48)..(81): Homolog of NCBI NO: 11285686 NR Description: hypothetical protein T25B15.40 - Arabidopsis >gi|10045560|emb|CAC07918.1| putative protein [Arabidopsis
  misc_feature (1)..(233): Homolog of NCBI NO: 19111874 NR Description: transcription initiation factor iif, beta subunit
  misc_feature (1)..(233): Homolog of NCBI NO: 24645751 NR Description: Transcription factor TFIIFbeta CG6538-PA
  misc_feature (1)..(239): Homolog of NCBI NO: 38174399 NR Description: Unknown (protein for MGC:75790) [Silurana
  misc_feature (87)..(234): Homolog of NCBI NO: 19073998 NR Description: TRANSCRIPTION INITIATION FACTOR TFIIF BETA [Encephalitozoon cuniculi] >gi|19068640|emb|CAD25108.1|
  misc_feature (88)..(239): Homolog of NCBI NO: 464520 NR Description: TRANSCRIPTION INITIATION FACTOR IIF, BETA SUBUNIT BETA) (TRANSCRIPTION INITIATION FACTOR RAP30)

SEQ ID NO: 92886 - protein, 213 aa, Arabidopsis thaliana; identical to SEQ ID NO: 77698
  peptide (1)..(213): Ceres Seq. ID no. 12715587
  misc_feature (1)..(212): Pfam Name: Transcription initiation factor IIF, beta subunit Pfam Description: Transcription initiation factor IIF, beta
  misc_feature (1)..(213): Homolog of NCBI NO: 15222264 NR Description: transcription initiation factor, putative; id: At1g75510.1, supported by cDNA: gi_12642907, supported by gi_13265438 [Arabidopsis thaliana]
  misc_feature (1)..(208): Homolog of NCBI NO: 34909946 NR Description: putative transcription initiation factor [Oryza
  misc_feature (18)..(208): Homolog of NCBI NO: 15231173 NR Description: transcription initiation factor IIF, beta
  misc_feature (55)..(208): Homolog of NCBI NO: 11285686 NR Description: hypothetical protein T25B15.40 - Arabidopsis >gi|10045560|emb|CAC07918.1| putative protein [Arabidopsis
  misc_feature (18)..(51): Homolog of NCBI NO: 11285686 NR Description: hypothetical protein T25B15.40 - Arabidopsis >gi|10045560|emb|CAC07918.1| putative protein [Arabidopsis
  misc_feature (1)..(203): Homolog of NCBI NO: 19111874 NR Description: transcription initiation factor iif, beta subunit
  misc_feature (1)..(203): Homolog of NCBI NO: 24645751 NR Description: Transcription factor TFIIFbeta CG6538-PA
  misc_feature (1)..(209): Homolog of NCBI NO: 38174399 NR Description: Unknown (protein for MGC:75790) [Silurana
  misc_feature (57)..(204): Homolog of NCBI NO: 19073998 NR Description: TRANSCRIPTION INITIATION FACTOR TFIIF BETA [Encephalitozoon cuniculi] >gi|19068640|emb|CAD25108.1|
  misc_feature (58)..(209): Homolog of NCBI NO: 464520 NR Description: TRANSCRIPTION INITIATION FACTOR IIF, BETA SUBUNIT BETA) (TRANSCRIPTION INITIATION FACTOR RAP30)

SEQ ID NO: 92887 - DNA, 1405 bp, Arabidopsis thaliana; identical to SEQ ID NO: 89131
  misc_feature (1)..(1405): Ceres Seq. ID no. 12715596
  misc_feature: MA Experiment ID: 108573 Result: Up-regulated in Transcription
  misc_feature: MA Experiment 108573 PARAMETER Experiment Name: At_Drought_cDNA_P Parameter: Timepoint (hr) Value: 6
  misc_feature: MA Experiment 108573 PARAMETER Experiment Name: At_Drought_cDNA_P Parameter: Tissue Value: Aerial
  misc_feature: MA Experiment 108573 PARAMETER Experiment Name: At_Drought_cDNA_P Parameter: Treatment Value: Drought vs. No Drought
  misc_feature: MA Experiment ID: 108595 Result: Down-regulated in Transcription
  misc_feature: MA Experiment 108595 PARAMETER Experiment Name: At_Ler-pi_Ovule_cDNA_P Parameter: Plant Line Value: null
  misc_feature: MA Experiment ID: 20000112 Result: Up-regulated in Transcription
  misc_feature: MA Experiment 20000112 PARAMETER Experiment Name: At_42deg_Heat_cDNA_P Parameter: Temperature (deg C) Value: 42 vs. 22
  misc_feature: MA Experiment 20000112 PARAMETER Experiment Name: At_42deg_Heat_cDNA_P Parameter: Timepoint (hr) Value: 2
  misc_feature: MA Experiment 20000112 PARAMETER Experiment Name: At_42deg_Heat_cDNA_P Parameter: Tissue Value: Aerial
  misc_feature: MA Experiment ID: 20000113 Result: Up-regulated in Transcription
  misc_feature: MA Experiment 20000113 PARAMETER Experiment Name: At_42deg_Heat_cDNA_P Parameter: Temperature (deg C) Value: 42 vs. 22
  misc_feature: MA Experiment 20000113 PARAMETER Experiment Name: At_42deg_Heat_cDNA_P Parameter: Timepoint (hr) Value: 8
  misc_feature: MA Experiment 20000113 PARAMETER Experiment Name: At_42deg_Heat_cDNA_P Parameter: Tissue Value: Aerial
  misc_feature: MA Experiment ID: 20000173 Result: Up-regulated in Transcription
  misc_feature: MA Experiment 20000173 PARAMETER Experiment Name: At_42deg_Heat_P Parameter: Age (day) Value: 14
  misc_feature: MA Experiment 20000173 PARAMETER Experiment Name: At_42deg_Heat_P Parameter: Organism Value: A. thaliana
  misc_feature: MA Experiment 20000173 PARAMETER Experiment Name: At_42deg_Heat_P Parameter: Plant Line Value: WS
  misc_feature: MA Experiment 20000173 PARAMETER Experiment Name: At_42deg_Heat_P Parameter: Temperature (deg C) Value: 42 vs. 22
  misc_feature: MA Experiment 20000173 PARAMETER Experiment Name: At_42deg_Heat_P Parameter: Timepoint (hr) Value: 6
  misc_feature: MA Experiment 20000173 PARAMETER Experiment Name: At_42deg_Heat_P Parameter: Tissue Value: Aerial
  misc_feature: MA Experiment ID: 20000224 Result: Down-regulated in Transcription

SEQ ID NO: 92888 - protein, 257 aa, Arabidopsis thaliana; identical to SEQ ID NO: 39512
  peptide (1)..(257): Ceres Seq. ID no. 12715597
  misc_feature (229)..(246): Pfam Name: Zinc knuckle Pfam Description: Zinc knuckle
  misc_feature (1)..(257): Homolog of NCBI NO: 18410883 NR Description: DNA-binding protein; protein id: At1g75560.1,
  misc_feature (4)..(257): Homolog of NCBI NO: 21537255 NR Description: DNA-binding protein [Arabidopsis thaliana]
  misc_feature (23)..(257): Homolog of NCBI NO: 25404984 NR Description: protein F10A5.22 [imported] - Arabidopsis >gi|9369368|gb|AAF87117.1|AC006434_13 F10A5.22 [Arabidopsis
  misc_feature (20)..(252): Homolog of NCBI NO: 37536582 NR Description: putative zinc finger protein [Oryza sativa
  misc_feature (1)..(172): Homolog of NCBI NO: 25404984 NR Description: protein F10A5.22 [imported] - Arabidopsis >gi|9369368|gb|AAF87117.1|AC006434_13 F10A5.22 [Arabidopsis
  misc_feature (57)..(193): Homolog of NCBI NO: 6324074 NR Description: GIG3 suppressor; Gis2p [Saccharomyces cerevisiae]
  misc_feature (56)..(172): Homolog of NCBI NO: 6324074 NR Description: GIG3 suppressor; Gis2p [Saccharomyces cerevisiae]
  misc_feature (75)..(191): Homolog of NCBI NO: 26347241 NR Description: unnamed protein product [Mus musculus]
  misc_feature (45)..(255): Homolog of NCBI NO: 729704 NR Description: DNA-binding protein HEXBP (Hexamer-binding
  misc_feature (71)..(191): Homolog of NCBI NO: 16549164 NR Description: unnamed protein product [Homo sapiens]

SEQ ID NO: 92889 - protein, 254 aa, Arabidopsis thaliana; identical to SEQ ID NO: 39513
  peptide (1)..(254): Ceres Seq. ID no. 12715598
  misc_feature (226)..(243): Pfam Name: Zinc knuckle Pfam Description: Zinc knuckle
  misc_feature (1)..(254): Homolog of NCBI NO: 18410883 NR Description: DNA-binding protein; protein id: At1g75560.1,
  misc_feature (1)..(254): Homolog of NCBI NO: 21537255 NR Description: DNA-binding protein [Arabidopsis thaliana]
  misc_feature (20)..(254): Homolog of NCBI NO: 25404984 NR Description: protein F10A5.22 [imported] - Arabidopsis >gi|9369368|gb|AAF87117.1|AC006434_13 F10A5.22 [Arabidopsis
  misc_feature (17)..(249): Homolog of NCBI NO: 37536582 NR Description: putative zinc finger protein [Oryza sativa
  misc_feature (1)..(169): Homolog of NCBI NO: 25404984 NR Description: protein F10A5.22 [imported] - Arabidopsis >gi|9369368|gb|AAF87117.1|AC006434_13 F10A5.22 [Arabidopsis
  misc_feature (54)..(190): Homolog of NCBI NO: 6324074 NR Description: GIG3 suppressor; Gis2p [Saccharomyces cerevisiae]
  misc_feature (53)..(169): Homolog of NCBI NO: 6324074 NR Description: GIG3 suppressor; Gis2p [Saccharomyces cerevisiae]
  misc_feature (72)..(188): Homolog of NCBI NO: 26347241 NR Description: unnamed protein product [Mus musculus]
  misc_feature (42)..(252): Homolog of NCBI NO: 729704 NR Description: DNA-binding protein HEXBP (Hexamer-binding
  misc_feature (68)..(188): Homolog of NCBI NO: 16549164 NR Description: unnamed protein product [Homo sapiens]

SEQ ID NO: 92890 - protein, 229 aa, Arabidopsis thaliana; identical to SEQ ID NO: 39514
  peptide (1)..(229): Ceres Seq. ID no. 12715599
  misc_feature (201)..(218): Pfam Name: Zinc knuckle Pfam Description: Zinc knuckle
  misc_feature (1)..(229): Homolog of NCBI NO: 18410883 NR Description: DNA-binding protein; protein id: At1g75560.1,
  misc_feature (1)..(229): Homolog of NCBI NO: 21537255 NR Description: DNA-binding protein [Arabidopsis thaliana]
  misc_feature (1)..(229): Homolog of NCBI NO: 25404984 NR Description: protein F10A5.22 [imported] - Arabidopsis >gi|9369368|gb|AAF87117.1|AC006434_13 F10A5.22 [Arabidopsis
  misc_feature (1)..(224): Homolog of NCBI NO: 37536582 NR Description: putative zinc finger protein [Oryza sativa
  misc_feature (1)..(144): Homolog of NCBI NO: 25404984 NR Description: protein F10A5.22 [imported] - Arabidopsis >gi|9369368|gb|AAF87117.1|AC006434_13 F10A5.22 [Arabidopsis
  misc_feature (29)..(165): Homolog of NCBI NO: 6324074 NR Description: GIG3 suppressor; Gis2p [Saccharomyces cerevisiae]
  misc_feature (28)..(144): Homolog of NCBI NO: 6324074 NR Description: GIG3 suppressor; Gis2p [Saccharomyces cerevisiae]
  misc_feature (47)..(163): Homolog of NCBI NO: 26347241 NR Description: unnamed protein product [Mus musculus]
  misc_feature (17)..(227): Homolog of NCBI NO: 729704 NR Description: DNA-binding protein HEXBP (Hexamer-binding
  misc_feature (43)..(163): Homolog of NCBI NO: 16549164 NR Description: unnamed protein product [Homo sapiens]

SEQ ID NO: 92891 - DNA, 411 bp, Arabidopsis thaliana; identical to SEQ ID NO: 89135
  misc_feature (1)..(411): Ceres Seq. ID no. 12715604
  misc_feature: MA Experiment ID: 20000328 Result: Down-regulated in Transcription
  misc_feature: MA Experiment 20000328 PARAMETER Experiment Name: At_42deg_Heat_Sub_P Parameter: Age (day) Value: 14
  misc_feature: MA Experiment 20000328 PARAMETER Experiment Name: At_42deg_Heat_Sub_P Parameter: Organism Value: A. thaliana
  misc_feature: MA Experiment 20000328 PARAMETER Experiment Name: At_42deg_Heat_Sub_P Parameter: Plant Line Value: WS
  misc_feature: MA Experiment 20000328 PARAMETER Experiment Name: At_42deg_Heat_Sub_P Parameter: Temperature (deg C) Value: 42 vs. 22
  misc_feature: MA Experiment 20000328 PARAMETER Experiment Name: At_42deg_Heat_Sub_P Parameter: Timepoint (hr) Value: 6
  misc_feature: MA Experiment 20000328 PARAMETER Experiment Name: At_42deg_Heat_Sub_P Parameter: Tissue Value: Aerial
  misc_feature: MA Experiment ID: 20000355 Result: Up-regulated in Transcription
  misc_feature: MA Experiment 20000355 PARAMETER Experiment Name: At_Siliques_Sub_P Parameter: Age (day) Value: 21
  misc_feature: MA Experiment 20000355 PARAMETER Experiment Name: At_Siliques_Sub_P Parameter: Organism Value: A. thaliana
  misc_feature: MA Experiment 20000355 PARAMETER Experiment Name: At_Siliques_Sub_P Parameter: Plant Line Value: WS
  misc_feature: MA Experiment 20000355 PARAMETER Experiment Name: At_Siliques_Sub_P Parameter: Tissue Value: Less Than 5mm Siliques vs. Whole Plant
  misc_feature: MA Experiment ID: 20000440 Result: Up-regulated in Transcription
  misc_feature: MA Experiment 20000440 PARAMETER Experiment Name: At_Closed-Flower__Sub_P Parameter: Tissue Value: Closed Flower vs. Whole Plant

SEQ ID NO: 92892 - protein, 136 aa, Arabidopsis thaliana; identical to SEQ ID NO: 89136
  peptide (1)..(136): Ceres Seq. ID no. 12715605
  misc_feature (17)..(135): Pfam Name: Core histone H2A/H2B/H3/H4 Pfam Description: Core histone H2A/H2B/H3/H4
  misc_feature (1)..(136): Homolog of NCBI NO: 15222297 NR Description: histone H3, putative; protein id: At1g75600.1
  misc_feature (1)..(136): Homolog of NCBI NO: 15236103 NR Description: histone H3.3; protein id: At4g40030.1, supported cDNA: gi_14326561 [Arabidopsis thaliana] Histon H3; protein id: At4g40040.1, supported by cDNA: 2670.
  misc_feature (1)..(136): Homolog of NCBI NO: 18698662 NR Description: disease-resistent-related protein [Oryza sativa]
  misc_feature (1)..(136): Homolog of NCBI NO: 21555021 NR Description: histone H3 protein, putative [Arabidopsis
  misc_feature (1)..(136): Homolog of NCBI NO: 15222272 NR Description: histone H3 protein, putative; protein id: supported by cDNA: 268982. [Arabidopsis thaliana]
  misc_feature (1)..(136): Homolog of NCBI NO: 13919643 NR Description: histone H3 [Trichinella spiralis]
  misc_feature (1)..(136): Homolog of NCBI NO: 2119013 NR Description: histone H3.2 protein - shrew mouse
  misc_feature (1)..(136): Homolog of NCBI NO: 7305139 NR Description: histone 1, H3f; histone gene complex 1 [Mus
  misc_feature (1)..(136): Homolog of NCBI NO: 30061401 NR Description: histone 2, H3ca1 [Mus musculus]
  misc_feature (1)..(136): Homolog of NCBI NO: 37546835 NR Description: similar to histone protein Hist2h3c1 [Homo

SEQ ID NO: 92893 - DNA, 1199 bp, Arabidopsis thaliana; identical to SEQ ID NO: 89137
  misc_feature (1)..(1199): Ceres Seq. ID no. 12715636
  misc_feature: MA Experiment ID: 20000265 Result: Up-regulated in Transcription
  misc_feature: MA Experiment 20000265 PARAMETER Experiment Name: At_Open_Flower_P Parameter: Age (day) Value: 21
  misc_feature: MA Experiment 20000265 PARAMETER Experiment Name: At_Open_Flower_P Parameter: Plant Line Value: WS
  misc_feature: MA Experiment 20000265 PARAMETER Experiment Name: At_Open_Flower_P Parameter: Tissue Value: Closed Flower vs. Whole Plant
  misc_feature: MA Experiment ID: 20000286 Result: Up-regulated in Transcription
  misc_feature: MA Experiment 20000286 PARAMETER Experiment Name: At_Open_Flower_P Parameter: Age (day) Value: 21
  misc_feature: MA Experiment 20000286 PARAMETER Experiment Name: At_Open_Flower_P Parameter: Plant Line Value: WS
  misc_feature: MA Experiment 20000286 PARAMETER Experiment Name: At_Open_Flower_P Parameter: Tissue Value: Half Open vs. Whole Plant
  misc_feature: MA Experiment ID: 20001910 Result: Down-regulated in Transcription
  misc_feature: MA Experiment 20001910 PARAMETER Experiment Name: At_Drought_Reproduction_P Parameter: Age (day) Value: 37
  misc_feature: MA Experiment 20001910 PARAMETER Experiment Name: At_Drought_Reproduction_P Parameter: Organism Value: A. thaliana
  misc_feature: MA Experiment 20001910 PARAMETER Experiment Name: At_Drought_Reproduction_P Parameter: Plant Line Value: WS
  misc_feature: MA Experiment 20001910 PARAMETER Experiment Name: At_Drought_Reproduction_P Parameter: Timepoint (day) Value: 7
  misc_feature: MA Experiment 20001910 PARAMETER Experiment Name: At_Drought_Reproduction_P Parameter: Tissue Value: Flowers
  misc_feature: MA Experiment 20001910 PARAMETER Experiment Name: At_Drought_Reproduction_P Parameter: Treatment Value: Drought vs. No Drought

SEQ ID NO: 92894 - protein, 343 aa, Arabidopsis thaliana; identical to SEQ ID NO: 89138
  peptide (1)..(343): Ceres Seq. ID no. 12715637
  misc_feature (30)..(334): Pfam Name: GDSL-like Lipase/Acylhydrolase Pfam Description: GDSL-like Lipase/Acylhydrolase
  misc_feature (1)..(343): Homolog of NCBI NO: 8778809 NR Description: T4O12.14 [Arabidopsis thaliana]
  misc_feature (6)..(343): Homolog of NCBI NO: 18410967 NR Description: family II extracellular lipase 5 (EXL5); protein At1g75920.1, supported by cDNA: gi_15054391 [Arabidopsis >gi|15054392|gb|AAK30020.1| family II lipase EXL5 [Arabidopsis
  misc_feature (1)..(343): Homolog of NCBI NO: 15222902 NR Description: family II extracellular lipase 4 (EXL4); protein At1g75910.1, supported by cDNA: gi_15054387 [Arabidopsis
  misc_feature (1)..(343): Homolog of NCBI NO: 15054388 NR Description: family II lipase EXL4 [Arabidopsis thaliana]
  misc_feature (24)..(343): Homolog of NCBI NO: 25404994 NR Description: protein T4O12.13 [imported] - Arabidopsis >gi|8778808|gb|AAF79815.1|AC007396_8 T4O12.13 [Arabidopsis
  misc_feature (1)..(343): Homolog of NCBI NO: 15222904 NR Description: family II extracellular lipase 6 (EXL6); protein At1g75930.1, supported by cDNA: gi_15054389 [Arabidopsis >gi|15054390|gb|AAK30021.1| family II lipase EXL6 [Arabidopsis
  misc_feature (1)..(328): Homolog of NCBI NO: 25404995 NR Description: protein T4O12.15 [imported] - Arabidopsis >gi|8778810|gb|AAF26759.2|AC007396_8 T4O12.15 [Arabidopsis
  misc_feature (1)..(343): Homolog of NCBI NO: 15219505 NR Description: putative lipase/acylhydrolase; protein id: [Arabidopsis thaliana] >gi|25336263|pir||A96763 protein
  misc_feature (9)..(343): Homolog of NCBI NO: 15242657 NR Description: lipase/acylhydrolase-like protein; protein id:
  misc_feature (1)..(343): Homolog of NCBI NO: 15220775 NR Description: hypothetical protein; protein id: At1g23500.1

SEQ ID NO: 92895 - protein, 338 aa, Arabidopsis thaliana; identical to SEQ ID NO: 89139
  peptide (1)..(338): Ceres Seq. ID no. 12715638
  misc_feature (25)..(329): Pfam Name: GDSL-like Lipase/Acylhydrolase Pfam Description: GDSL-like Lipase/Acylhydrolase
  misc_feature (1)..(338): Homolog of NCBI NO: 8778809 NR Description: T4O12.14 [Arabidopsis thaliana]
  misc_feature (1)..(338): Homolog of NCBI NO: 18410967 NR Description: family II extracellular lipase 5 (EXL5); protein At1g75920.1, supported by cDNA: gi_15054391 [Arabidopsis >gi|15054392|gb|AAK30020.1| family II lipase EXL5 [Arabidopsis
  misc_feature (1)..(338): Homolog of NCBI NO: 15222902 NR Description: family II extracellular lipase 4 (EXL4); protein At1g75910.1, supported by cDNA: gi_15054387 [Arabidopsis
  misc_feature (1)..(338): Homolog of NCBI NO: 15054388 NR Description: family II lipase EXL4 [Arabidopsis thaliana]
  misc_feature (19)..(338): Homolog of NCBI NO: 25404994 NR Description: protein T4O12.13 [imported] - Arabidopsis >gi|8778808|gb|AAF79815.1|AC007396_8 T4O12.13 [Arabidopsis
  misc_feature (1)..(338): Homolog of NCBI NO: 15222904 NR Description: family II extracellular lipase 6 (EXL6); protein At1g75930.1, supported by cDNA: gi_15054389 [Arabidopsis >gi|15054390|gb|AAK30021.1| family II lipase EXL6 [Arabidopsis
  misc_feature (1)..(323): Homolog of NCBI NO: 25404995 NR Description: protein T4O12.15 [imported] - Arabidopsis >gi|8778810|gb|AAF26759.2|AC007396_8 T4O12.15 [Arabidopsis
  misc_feature (1)..(338): Homolog of NCBI NO: 15219505 NR Description: putative lipase/acylhydrolase; protein id: [Arabidopsis thaliana] >gi|25336263|pir||A96763 protein
  misc_feature (4)..(338): Homolog of NCBI NO: 15242657 NR Description: lipase/acylhydrolase-like protein; protein id:
  misc_feature (1)..(338): Homolog of NCBI NO: 15220775 NR Description: hypothetical protein; protein id: At1g23500.1

SEQ ID NO: 92896 - protein, 307 aa, Arabidopsis thaliana; identical to SEQ ID NO: 89140
  peptide (1)..(307): Ceres Seq. ID no. 12715639
  misc_feature (1)..(298): Pfam Name: GDSL-like Lipase/Acylhydrolase Pfam Description: GDSL-like Lipase/Acylhydrolase
  misc_feature (1)..(307): Homolog of NCBI NO: 8778809 NR Description: T4O12.14 [Arabidopsis thaliana]
  misc_feature (1)..(307): Homolog of NCBI NO: 18410967 NR Description: family II extracellular lipase 5 (EXL5); protein At1g75920.1, supported by cDNA: gi_15054391 [Arabidopsis >gi|15054392|gb|AAK30020.1| family II lipase EXL5 [Arabidopsis
  misc_feature (1)..(307): Homolog of NCBI NO: 15222902 NR Description: family II extracellular lipase 4 (EXL4); protein At1g75910.1, supported by cDNA: gi_15054387 [Arabidopsis
  misc_feature (1)..(307): Homolog of NCBI NO: 15054388 NR Description: family II lipase EXL4 [Arabidopsis thaliana]
  misc_feature (1)..(307): Homolog of NCBI NO: 25404994 NR Description: protein T4O12.13 [imported] - Arabidopsis >gi|8778808|gb|AAF79815.1|AC007396_8 T4O12.13 [Arabidopsis
  misc_feature (1)..(307): Homolog of NCBI NO: 15222904 NR Description: family II extracellular lipase 6 (EXL6); protein At1g75930.1, supported by cDNA: gi_15054389 [Arabidopsis >gi|15054390|gb|AAK30021.1| family II lipase EXL6 [Arabidopsis
  misc_feature (1)..(292): Homolog of NCBI NO: 25404995 NR Description: protein T4O12.15 [imported] - Arabidopsis >gi|8778810|gb|AAF26759.2|AC007396_8 T4O12.15 [Arabidopsis
  misc_feature (1)..(307): Homolog of NCBI NO: 15219505 NR Description: putative lipase/acylhydrolase; protein id: [Arabidopsis thaliana] >gi|25336263|pir||A96763 protein
  misc_feature (1)..(307): Homolog of NCBI NO: 15242657 NR Description: lipase/acylhydrolase-like protein; protein id:
  misc_feature (1)..(307): Homolog of NCBI NO: 15220775 NR Description: hypothetical protein; protein id: At1g23500.1

SEQ ID NO: 92897 - DNA, 2604 bp, Arabidopsis thaliana; identical to SEQ ID NO: 89141
  misc_feature (1)..(2604): Ceres Seq. ID no. 12715643
  misc_feature: MA Experiment ID: 108473 Result: Down-regulated in Transcription
  misc_feature: MA Experiment 108473 PARAMETER Experiment Name: At_Drought_Flowers_cDNA_P Parameter: Timepoint (hr) Value: 7 d
  misc_feature: MA Experiment 108473 PARAMETER Experiment Name: At_Drought_Flowers_cDNA_P Parameter: Tissue Value: Flower
  misc_feature: MA Experiment 108473 PARAMETER Experiment Name: At_Drought_Flowers_cDNA_P Parameter: Treatment Value: Drought vs. No Drought
  misc_feature: MA Experiment ID: 108501 Result: Down-regulated in Transcription
  misc_feature: MA Experiment 108501 PARAMETER Experiment Name: At_ap2_floral_buds_cDNA_P Parameter: Plant Line Value: ap2 (Ler.)
  misc_feature: MA Experiment 108501 PARAMETER Experiment Name: At_ap2_floral_buds_cDNA_P Parameter: Tissue Value: Closed Flower

SEQ ID NO: 92898 - protein, 867 aa, Arabidopsis thaliana; identical to SEQ ID NO: 89142
  peptide (1)..(867): Ceres Seq. ID no. 12715644
  misc_feature (30)..(334): Pfam Name: GDSL-like Lipase/Acylhydrolase Pfam Description: GDSL-like Lipase/Acylhydrolase
  misc_feature (348)..(867): Homolog of NCBI NO: 15222905 NR Description: glycosyl hydrolase family 1, protein id: At1g75940.1, supported by cDNA: gi_2746340
  misc_feature (348)..(867): Homolog of NCBI NO: 25289457 NR Description: probable beta-glucosidase (EC 3.2.1.21) ATA27 - Arabidopsis thaliana >gi|2746341|gb|AAC39504.1| ATA27
  misc_feature (382)..(867): Homolog of NCBI NO: 18377977 NR Description: putative beta-glucosidase [Arabidopsis thaliana]
  misc_feature (353)..(854): Homolog of NCBI NO: 22331243 NR Description: glycosyl hydrolase family 1; protein id: supported by cDNA: gi_16604492, supported by cDNA: gi_17381179,
  misc_feature (353)..(854): Homolog of NCBI NO: 16604493 NR Description: AT3g21370/MHC9_5 [Arabidopsis thaliana]
  misc_feature (516)..(861): Homolog of NCBI NO: 15241841 NR Description: glycosyl hydrolase family 1; protein id:
  misc_feature (353)..(562): Homolog of NCBI NO: 15241841 NR Description: glycosyl hydrolase family 1; protein id:
  misc_feature (348)..(849): Homolog of NCBI NO: 12043529 NR Description: beta-glucosidase 1 [Arabidopsis thaliana]
  misc_feature (348)..(849): Homolog of NCBI NO: 15218992 NR Description: glycosyl hydrolase family 1, beta-glucosidase protein id: At1g52400.1, supported by cDNA: gi_14532461,
  misc_feature (348)..(849): Homolog of NCBI NO: 12229686 NR Description: Beta-glucosidase homolog precursor

SEQ ID NO: 92899 - protein, 675 aa, Arabidopsis thaliana; identical to SEQ ID NO: 89143
  peptide (1)..(675): Ceres Seq. ID no. 12715645
  misc_feature (1)..(142): Pfam Name: GDSL-like Lipase/Acylhydrolase Pfam Description: GDSL-like Lipase/Acylhydrolase
  misc_feature (156)..(675): Homolog of NCBI NO: 15222905 NR Description: glycosyl hydrolase family 1, protein id: At1g75940.1, supported by cDNA: gi_2746340
  misc_feature (156)..(675): Homolog of NCBI NO: 25289457 NR Description: probable beta-glucosidase (EC 3.2.1.21) ATA27 - Arabidopsis thaliana >gi|2746341|gb|AAC39504.1| ATA27
  misc_feature (190)..(675): Homolog of NCBI NO: 18377977 NR Description: putative beta-glucosidase [Arabidopsis thaliana]
  misc_feature (161)..(662): Homolog of NCBI NO: 22331243 NR Description: glycosyl hydrolase family 1; protein id: supported by cDNA: gi_16604492, supported by cDNA: gi_17381179,
  misc_feature (161)..(662): Homolog of NCBI NO: 16604493 NR Description: AT3g21370/MHC9_5 [Arabidopsis thaliana]
  misc_feature (324)..(669): Homolog of NCBI NO: 15241841 NR Description: glycosyl hydrolase family 1; protein id:
  misc_feature (161)..(370): Homolog of NCBI NO: 15241841 NR Description: glycosyl hydrolase family 1; protein id:
  misc_feature (156)..(657): Homolog of NCBI NO: 12043529 NR Description: beta-glucosidase 1 [Arabidopsis thaliana]
  misc_feature (156)..(657): Homolog of NCBI NO: 15218992 NR Description: glycosyl hydrolase family 1, beta-glucosidase protein id: At1g52400.1, supported by cDNA: gi_14532461,
  misc_feature (156)..(657): Homolog of NCBI NO: 12229686 NR Description: Beta-glucosidase homolog precursor

SEQ ID NO: 92900 - protein, 653 aa, Arabidopsis thaliana; identical to SEQ ID NO: 89144
  peptide (1)..(653): Ceres Seq. ID no. 12715646
  misc_feature (1)..(120): Pfam Name: GDSL-like Lipase/Acylhydrolase Pfam Description: GDSL-like Lipase/Acylhydrolase
  misc_feature (134)..(653): Homolog of NCBI NO: 15222905 NR Description: glycosyl hydrolase family 1, protein id: At1g75940.1, supported by cDNA: gi_2746340
  misc_feature (134)..(653): Homolog of NCBI NO: 25289457 NR Description: probable beta-glucosidase (EC 3.2.1.21) ATA27 - Arabidopsis thaliana >gi|2746341|gb|AAC39504.1| ATA27
  misc_feature (168)..(653): Homolog of NCBI NO: 18377977 NR Description: putative beta-glucosidase [Arabidopsis thaliana]
  misc_feature (139)..(640): Homolog of NCBI NO: 22331243 NR Description: glycosyl hydrolase family 1; protein id: supported by cDNA: gi_16604492, supported by cDNA: gi_17381179,
  misc_feature (139)..(640): Homolog of NCBI NO: 16604493 NR Description: AT3g21370/MHC9_5 [Arabidopsis thaliana]
  misc_feature (302)..(647): Homolog of NCBI NO: 15241841 NR Description: glycosyl hydrolase family 1; protein id:
  misc_feature (139)..(348): Homolog of NCBI NO: 15241841 NR Description: glycosyl hydrolase family 1; protein id:
  misc_feature (134)..(635): Homolog of NCBI NO: 12043529 NR Description: beta-glucosidase 1 [Arabidopsis thaliana]
  misc_feature (134)..(635): Homolog of NCBI NO: 15218992 NR Description: glycosyl hydrolase family 1, beta-glucosidase protein id: At1g52400.1, supported by cDNA: gi_14532461,
  misc_feature (134)..(635): Homolog of NCBI NO: 12229686 NR Description: Beta-glucosidase homolog precursor

SEQ ID NO: 92901 - DNA, 561 bp, Arabidopsis thaliana; identical to SEQ ID NO: 89145
  misc_feature (1)..(561): Ceres Seq. ID no. 12715779
  misc_feature: MA Experiment ID: 20000166 Result: Up-regulated in Transcription
  misc_feature: MA Experiment 20000166 PARAMETER Experiment Name: At_100uM_ABA_P Parameter: Age (day) Value: 14
  misc_feature: MA Experiment 20000166 PARAMETER Experiment Name: At_100uM_ABA_P Parameter: Organism Value: A. thaliana
  misc_feature: MA Experiment 20000166 PARAMETER Experiment Name: At_100uM_ABA_P Parameter: Plant Line Value: WS
  misc_feature: MA Experiment 20000166 PARAMETER Experiment Name: At_100uM_ABA_P Parameter: Timepoint (hr) Value: 1
  misc_feature: MA Experiment 20000166 PARAMETER Experiment Name: At_100uM_ABA_P Parameter: Tissue Value: Aerial
  misc_feature: MA Experiment 20000166 PARAMETER Experiment Name: At_100uM_ABA_P Parameter: Treatment Value: 100uM ABA vs. No Treatment
  misc_feature: MA Experiment ID: 20000171 Result: Up-regulated in Transcription
  misc_feature: MA Experiment 20000171 PARAMETER Experiment Name: At_42deg_Heat_P Parameter: Age (day) Value: 14
  misc_feature: MA Experiment 20000171 PARAMETER Experiment Name: At_42deg_Heat_P Parameter: Organism Value: A. thaliana
  misc_feature: MA Experiment 20000171 PARAMETER Experiment Name: At_42deg_Heat_P Parameter: Plant Line Value: WS
  misc_feature: MA Experiment 20000171 PARAMETER Experiment Name: At_42deg_Heat_P Parameter: Temperature (deg C) Value: 42 vs. 22
  misc_feature: MA Experiment 20000171 PARAMETER Experiment Name: At_42deg_Heat_P Parameter: Timepoint (hr) Value: 1
  misc_feature: MA Experiment 20000171 PARAMETER Experiment Name: At_42deg_Heat_P Parameter: Tissue Value: Aerial
  misc_feature: MA Experiment ID: 20000173 Result: Up-regulated in Transcription
  misc_feature: MA Experiment 20000173 PARAMETER Experiment Name: At_42deg_Heat_P Parameter: Age (day) Value: 14
  misc_feature: MA Experiment 20000173 PARAMETER Experiment Name: At_42deg_Heat_P Parameter: Organism Value: A. thaliana
  misc_feature: MA Experiment 20000173 PARAMETER Experiment Name: At_42deg_Heat_P Parameter: Plant Line Value: WS
  misc_feature: MA Experiment 20000173 PARAMETER Experiment Name: At_42deg_Heat_P Parameter: Temperature (deg C) Value: 42 vs. 22
  misc_feature: MA Experiment 20000173 PARAMETER Experiment Name: At_42deg_Heat_P Parameter: Timepoint (hr) Value: 6
  misc_feature: MA Experiment 20000173 PARAMETER Experiment Name: At_42deg_Heat_P Parameter: Tissue Value: Aerial
  misc_feature: MA Experiment ID: 20000179 Result: Down-regulated in Transcription
  misc_feature: MA Experiment 20000179 PARAMETER Experiment Name: At_Germinating_Seeds_P Parameter: Age (hr) Value: 6 vs. 0
  misc_feature: MA Experiment 20000179 PARAMETER Experiment Name: At_Germinating_Seeds_P Parameter: Tissue Value: Germinating Seeds
  misc_feature: MA Experiment ID: 20000180 Result: Down-regulated in Transcription
  misc_feature: MA Experiment 20000180 PARAMETER Experiment Name: At_Germinating_Seeds_P Parameter: Age (hr) Value: 24 vs. 0
  misc_feature: MA Experiment 20000180 PARAMETER Experiment Name: At_Germinating_Seeds_P Parameter: Tissue Value: Germinating Seeds
  misc_feature: MA Experiment ID: 20000182 Result: Up-regulated in Transcription
  misc_feature: MA Experiment 20000182 PARAMETER Experiment Name: At_2mM_SA_P Parameter: Age (day) Value: 14
  misc_feature: MA Experiment 20000182 PARAMETER Experiment Name: At_2mM_SA_P Parameter: Organism Value: A. thaliana
  misc_feature: MA Experiment 20000182 PARAMETER Experiment Name: At_2mM_SA_P Parameter: Plant Line Value: WS
  misc_feature: MA Experiment 20000182 PARAMETER Experiment Name: At_2mM_SA_P Parameter: Timepoint (hr) Value: 6
  misc_feature: MA Experiment 20000182 PARAMETER Experiment Name: At_2mM_SA_P Parameter: Tissue Value: Aerial
  misc_feature: MA Experiment 20000182 PARAMETER Experiment Name: At_2mM_SA_P Parameter: Treatment Value: 2mM SA vs. No Treatment
  misc_feature: MA Experiment ID: 20000184 Result: Down-regulated in Transcription
  misc_feature: MA Experiment 20000184 PARAMETER Experiment Name: At_Shoots__P Parameter: Age (day) Value: 7
  misc_feature: MA Experiment 20000184 PARAMETER Experiment Name: At_Shoots__P Parameter: Tissue Value: Shoots vs. Whole Plant
  misc_feature: MA Experiment ID: 20000234 Result: Down-regulated in Transcription
  misc_feature: MA Experiment 20000234 PARAMETER Experiment Name: At_Siliques_P Parameter: Age (day) Value: 21
  misc_feature: MA Experiment 20000234 PARAMETER Experiment Name: At_Siliques_P Parameter: Organism Value: A. thaliana
  misc_feature: MA Experiment 20000234 PARAMETER Experiment Name: At_Siliques_P Parameter: Plant Line Value: WS
  misc_feature: MA Experiment 20000234 PARAMETER Experiment Name: At_Siliques_P Parameter: Tissue Value: Less Than 5mm Siliques vs. Whole Plant
  misc_feature: MA Experiment ID: 20000235 Result: Down-regulated in Transcription
  misc_feature: MA Experiment 20000235 PARAMETER Experiment Name: At_Siliques_P Parameter: Age (day) Value: 21
  misc_feature: MA Experiment 20000235 PARAMETER Experiment Name: At_Siliques_P Parameter: Organism Value: A. thaliana
  misc_feature: MA Experiment 20000235 PARAMETER Experiment Name: At_Siliques_P Parameter: Plant Line Value: WS
  misc_feature: MA Experiment 20000235 PARAMETER Experiment Name: At_Siliques_P Parameter: Tissue Value: 5-10mm Siliques vs. Whole Plant
  misc_feature: MA Experiment ID: 20000264 Result: Down-regulated in Transcription
  misc_feature: MA Experiment 20000264 PARAMETER Experiment Name: At_Open_Flower_P Parameter: Age (day) Value: 21
  misc_feature: MA Experiment 20000264 PARAMETER Experiment Name: At_Open_Flower_P Parameter: Plant Line Value: WS
  misc_feature: MA Experiment 20000264 PARAMETER Experiment Name: At_Open_Flower_P Parameter: Tissue Value: Open Flower vs. Whole Plant
  misc_feature: MA Experiment ID: 20000265 Result: Down-regulated in Transcription
  misc_feature: MA Experiment 20000265 PARAMETER Experiment Name: At_Open_Flower_P Parameter: Age (day) Value: 21
  misc_feature: MA Experiment 20000265 PARAMETER Experiment Name: At_Open_Flower_P Parameter: Plant Line Value: WS
  misc_feature: MA Experiment 20000265 PARAMETER Experiment Name: At_Open_Flower_P Parameter: Tissue Value: Closed Flower vs. Whole Plant
  misc_feature: MA Experiment ID: 20000286 Result: Down-regulated in Transcription
  misc_feature: MA Experiment 20000286 PARAMETER Experiment Name: At_Open_Flower_P Parameter: Age (day) Value: 21
  misc_feature: MA Experiment 20000286 PARAMETER Experiment Name: At_Open_Flower_P Parameter: Plant Line Value: WS
  misc_feature: MA Experiment 20000286 PARAMETER Experiment Name: At_Open_Flower_P Parameter: Tissue Value: Half Open vs. Whole Plant
  misc_feature: MA Experiment ID: 20000437 Result: Up-regulated in Transcription
  misc_feature: MA Experiment 20000437 PARAMETER Experiment Name: At_Drought_P Parameter: Age (day) Value: 8
  misc_feature: MA Experiment 20000437 PARAMETER Experiment Name: At_Drought_P Parameter: Organism Value: A. thaliana
  misc_feature: MA Experiment 20000437 PARAMETER Experiment Name: At_Drought_P Parameter: Plant Line Value: WS
  misc_feature: MA Experiment 20000437 PARAMETER Experiment Name: At_Drought_P Parameter: Timepoint (hr) Value: 24
  misc_feature: MA Experiment 20000437 PARAMETER Experiment Name: At_Drought_P Parameter: Tissue Value: Whole Plant
  misc_feature: MA Experiment 20000437 PARAMETER Experiment Name: At_Drought_P Parameter: Treatment Value: Drought vs. No Drought
  misc_feature: MA Experiment ID: 20000438 Result: Down-regulated in Transcription
  misc_feature: MA Experiment 20000438 PARAMETER Experiment Name: At_Shoots__P Parameter: Age (day) Value: 14
  misc_feature: MA Experiment 20000438 PARAMETER Experiment Name: At_Shoots__P Parameter: Tissue Value: Shoots vs. Whole Plant
  misc_feature: MA Experiment ID: 20000453 Result: Up-regulated in Transcription
  misc_feature: MA Experiment 20000453 PARAMETER Experiment Name: At_100uM_ABA_P Parameter: Age (day) Value: 15
  misc_feature: MA Experiment 20000453 PARAMETER Experiment Name: At_100uM_ABA_P Parameter: Organism Value: A. thaliana
  misc_feature: MA Experiment 20000453 PARAMETER Experiment Name: At_100uM_ABA_P Parameter: Plant Line Value: WS
  misc_feature: MA Experiment 20000453 PARAMETER Experiment Name: At_100uM_ABA_P Parameter: Timepoint (hr) Value: 24
  misc_feature: MA Experiment 20000453 PARAMETER Experiment Name: At_100uM_ABA_P Parameter: Tissue Value: Aerial
  misc_feature: MA Experiment 20000453 PARAMETER Experiment Name: At_100uM_ABA_P Parameter: Treatment Value: 100uM ABA vs. No Treatment
  misc_feature: MA Experiment ID: 20000456 Result: Up-regulated in Transcription
  misc_feature: MA Experiment 20000456 PARAMETER Experiment Name: At_100uM_BA_P Parameter: Age (day) Value: 14
  misc_feature: MA Experiment 20000456 PARAMETER Experiment Name: At_100uM_BA_P Parameter: Organism Value: A. thaliana
  misc_feature: MA Experiment 20000456 PARAMETER Experiment Name: At_100uM_BA_P Parameter: Plant Line Value: WS
  misc_feature: MA Experiment 20000456 PARAMETER Experiment Name: At_100uM_BA_P Parameter: Timepoint (hr) Value: 6
  misc_feature: MA Experiment 20000456 PARAMETER Experiment Name: At_100uM_BA_P Parameter: Tissue Value: Aerial
  misc_feature: MA Experiment 20000456 PARAMETER Experiment Name: At_100uM_BA_P Parameter: Treatment Value: 100uM BA vs. No Treatment
  misc_feature: MA Experiment ID: 20000460 Result: Up-regulated in Transcription
  misc_feature: MA Experiment 20000460 PARAMETER Experiment Name: At_10percent_PEG_P Parameter: Age (day) Value: 12
  misc_feature: MA Experiment 20000460 PARAMETER Experiment Name: At_10percent_PEG_P Parameter: Organism Value: A. thaliana
  misc_feature: MA Experiment 20000460 PARAMETER Experiment Name: At_10percent_PEG_P Parameter: Plant Line Value: WS
  misc_feature: MA Experiment 20000460 PARAMETER Experiment Name: At_10percent_PEG_P Parameter: Timepoint (day) Value: 12
  misc_feature: MA Experiment 20000460 PARAMETER Experiment Name: At_10percent_PEG_P Parameter: Tissue Value: Whole Plant
  misc_feature: MA Experiment 20000460 PARAMETER Experiment Name: At_10percent_PEG_P Parameter: Treatment Value: 10percent PEG vs. No Treatment
  misc_feature: MA Experiment ID: 20000506 Result: Up-regulated in Transcription
  misc_feature: MA Experiment 20000506 PARAMETER Experiment Name: At_Wounding_P Parameter: Organism Value: A. thaliana
  misc_feature: MA Experiment 20000506 PARAMETER Experiment Name: At_Wounding_P Parameter: Plant Line Value: WS
  misc_feature: MA Experiment 20000506 PARAMETER Experiment Name: At_Wounding_P Parameter: Timepoint (hr) Value: 6
  misc_feature: MA Experiment 20000506 PARAMETER Experiment Name: At_Wounding_P Parameter: Tissue Value: Aerial
  misc_feature: MA Experiment 20000506 PARAMETER Experiment Name: At_Wounding_P Parameter: Treatment Value: Wounding vs. No Wounding
  misc_feature: MA Experiment ID: 20000527 Result: Down-regulated in Transcription
  misc_feature: MA Experiment 20000527 PARAMETER Experiment Name: At_10percent_PEG_P Parameter: Age (day) Value: 20
  misc_feature: MA Experiment 20000527 PARAMETER Experiment Name: At_10percent_PEG_P Parameter: Organism Value: A. thaliana
  misc_feature: MA Experiment 20000527 PARAMETER Experiment Name: At_10percent_PEG_P Parameter: Plant Line Value: WS
  misc_feature: MA Experiment 20000527 PARAMETER Experiment Name: At_10percent_PEG_P Parameter: Timepoint (day) Value: 20
  misc_feature: MA Experiment 20000527 PARAMETER Experiment Name: At_10percent_PEG_P Parameter: Tissue Value: Whole Plant
  misc_feature: MA Experiment 20000527 PARAMETER Experiment Name: At_10percent_PEG_P Parameter: Treatment Value: 10percent PEG vs. No Treatment
  misc_feature: MA Experiment ID: 20000574 Result: Up-regulated in Transcription
  misc_feature: MA Experiment 20000574 PARAMETER Experiment Name: At_100uM_ABA_Mutants__P Parameter: Organism Value: A. thaliana
  misc_feature: MA Experiment 20000574 PARAMETER Experiment Name: At_100uM_ABA_Mutants__P Parameter: Plant Line Value: CS23 vs. Ler wt
  misc_feature: MA Experiment 20000574 PARAMETER Experiment Name: At_100uM_ABA_Mutants__P Parameter: Timepoint (hr) Value: N/A
  misc_feature: MA Experiment 20000574 PARAMETER Experiment Name: At_100uM_ABA_Mutants__P Parameter: Tissue Value: Whole Plant
  misc_feature: MA Experiment 20000574 PARAMETER Experiment Name: At_100uM_ABA_Mutants__P Parameter: Treatment Value: None
  misc_feature: MA Experiment ID: 20000576 Result: Down-regulated in Transcription
  misc_feature: MA Experiment 20000576 PARAMETER Experiment Name: At_100uM_ABA_Mutants__P Parameter: Organism Value: A. thaliana
  misc_feature: MA Experiment 20000576 PARAMETER Experiment Name: At_100uM_ABA_Mutants__P Parameter: Plant Line Value: CS23
  misc_feature: MA Experiment 20000576 PARAMETER Experiment Name: At_100uM_ABA_Mutants__P Parameter: Timepoint (hr) Value: 6
  misc_feature: MA Experiment 20000576 PARAMETER Experiment Name: At_100uM_ABA_Mutants__P Parameter: Tissue Value: Whole Plant
  misc_feature: MA Experiment 20000576 PARAMETER Experiment Name: At_100uM_ABA_Mutants__P Parameter: Treatment Value: 1uM ABA vs. No Treatment
  misc_feature: MA Experiment ID: 20000709 Result: Up-regulated in Transcription
  misc_feature: MA Experiment 20000709 PARAMETER Experiment Name: At_15mM_NH4NO3_L-to-H_P Parameter: Age (hr) Value: 14
  misc_feature: MA Experiment 20000709 PARAMETER Experiment Name: At_15mM_NH4NO3_L-to-H_P Parameter: Organism Value: A. thaliana
  misc_feature: MA Experiment 20000709 PARAMETER Experiment Name: At_15mM_NH4NO3_L-to-H_P Parameter: Plant Line Value: WS
  misc_feature: MA Experiment 20000709 PARAMETER Experiment Name: At_15mM_NH4NO3_L-to-H_P Parameter: Timepoint (hr) Value: 4
  misc_feature: MA Experiment 20000709 PARAMETER Experiment Name: At_15mM_NH4NO3_L-to-H_P Parameter: Tissue Value: Aerial
  misc_feature: MA Experiment 20000709 PARAMETER Experiment Name: At_15mM_NH4NO3_L-to-H_P Parameter: Treatment Value: 15mM NH4NO3 vs. 30mM Mannitol
  misc_feature: MA Experiment ID: 20000794 Result: Down-regulated in Transcription
  misc_feature: MA Experiment 20000794 PARAMETER Experiment Name: At_Petals_P Parameter: Age (day) Value: 23-25 days
  misc_feature: MA Experiment 20000794 PARAMETER Experiment Name: At_Petals_P Parameter: Plant Line Value: WS
  misc_feature: MA Experiment 20000794 PARAMETER Experiment Name: At_Petals_P Parameter: Tissue Value: Petals vs. Whole plant
  misc_feature: MA Experiment ID: 20001247 Result: Up-regulated in Transcription
  misc_feature: MA Experiment 20001247 PARAMETER Experiment Name: At_Far-red-induction_P Parameter: Age (day) Value: 7
  misc_feature: MA Experiment 20001247 PARAMETER Experiment Name: At_Far-red-induction_P Parameter: Light Value: Far-red vs. White
  misc_feature: MA Experiment 20001247 PARAMETER Experiment Name: At_Far-red-induction_P Parameter: Organism Value: A. thaliana
  misc_feature: MA Experiment 20001247 PARAMETER Experiment Name: At_Far-red-induction_P Parameter: Plant Line Value: Columbia
  misc_feature: MA Experiment 20001247 PARAMETER Experiment Name: At_Far-red-induction_P Parameter: Timepoint (hr) Value: 1
  misc_feature: MA Experiment 20001247 PARAMETER Experiment Name: At_Far-red-induction_P Parameter: Tissue Value: Whole Plant
  misc_feature: MA Experiment ID: 20001557 Result: Up-regulated in Transcription
  misc_feature: MA Experiment 20001557 PARAMETER Experiment Name: At_Drought_Soil_Dry_P Parameter: Age (day) Value: 27
  misc_feature: MA Experiment 20001557 PARAMETER Experiment Name: At_Drought_Soil_Dry_P Parameter: Organism Value: A. thaliana
  misc_feature: MA Experiment 20001557 PARAMETER Experiment Name: At_Drought_Soil_Dry_P Parameter: Plant Line Value: WS
  misc_feature: MA Experiment 20001557 PARAMETER Experiment Name: At_Drought_Soil_Dry_P Parameter: Post Timepoint (hr) Value: 3
  misc_feature: MA Experiment 20001557 PARAMETER Experiment Name: At_Drought_Soil_Dry_P Parameter: Post-Treatment Value: Re-Water vs. No Drought
  misc_feature: MA Experiment 20001557 PARAMETER Experiment Name: At_Drought_Soil_Dry_P Parameter: Timepoint (day) Value: 13
  misc_feature: MA Experiment 20001557 PARAMETER Experiment Name: At_Drought_Soil_Dry_P Parameter: Treatment Value: Drought vs. No Drought
  misc_feature: MA Experiment ID: 20001558 Result: Up-regulated in Transcription
  misc_feature: MA Experiment 20001558 PARAMETER Experiment Name: At_Drought_Soil_Dry_P Parameter: Age (day) Value: 27
  misc_feature: MA Experiment 20001558 PARAMETER Experiment Name: At_Drought_Soil_Dry_P Parameter: Organism Value: A. thaliana
  misc_feature: MA Experiment 20001558 PARAMETER Experiment Name: At_Drought_Soil_Dry_P Parameter: Plant Line Value: WS
  misc_feature: MA Experiment 20001558 PARAMETER Experiment Name: At_Drought_Soil_Dry_P Parameter: Post Timepoint (hr) Value: 6
  misc_feature: MA Experiment 20001558 PARAMETER Experiment Name: At_Drought_Soil_Dry_P Parameter: Post-Treatment Value: Re-Water vs. No Drought
  misc_feature: MA Experiment 20001558 PARAMETER Experiment Name: At_Drought_Soil_Dry_P Parameter: Timepoint (day) Value: 13
  misc_feature: MA Experiment 20001558 PARAMETER Experiment Name: At_Drought_Soil_Dry_P Parameter: Treatment Value: Drought vs. No Drought
  misc_feature: MA Experiment ID: 20001560 Result: Up-regulated in Transcription
  misc_feature: MA Experiment 20001560 PARAMETER Experiment Name: At_Drought_Soil_Dry_P Parameter: Age (day) Value: 28
  misc_feature: MA Experiment 20001560 PARAMETER Experiment Name: At_Drought_Soil_Dry_P Parameter: Organism Value: A. thaliana
  misc_feature: MA Experiment 20001560 PARAMETER Experiment Name: At_Drought_Soil_Dry_P Parameter: Plant Line Value: WS
  misc_feature: MA Experiment 20001560 PARAMETER Experiment Name: At_Drought_Soil_Dry_P Parameter: Post Timepoint (hr) Value: None
  misc_feature: MA Experiment 20001560 PARAMETER Experiment Name: At_Drought_Soil_Dry_P Parameter: Post-Treatment Value: None
  misc_feature: MA Experiment 20001560 PARAMETER Experiment Name: At_Drought_Soil_Dry_P Parameter: Timepoint (day) Value: 14
  misc_feature: MA Experiment 20001560 PARAMETER Experiment Name: At_Drought_Soil_Dry_P Parameter: Treatment Value: Drought vs. No Drought
  misc_feature: MA Experiment ID: 20001772 Result: Down-regulated in Transcription
  misc_feature: MA Experiment 20001772 PARAMETER Experiment Name: At_Far-red-enriched-adult_P Parameter: Age (day) Value: 29
  misc_feature: MA Experiment 20001772 PARAMETER Experiment Name: At_Far-red-enriched-adult_P Parameter: Light Value: Far-red enriched vs. White
  misc_feature: MA Experiment 20001772 PARAMETER Experiment Name: At_Far-red-enriched-adult_P Parameter: Organism Value: A. thaliana
  misc_feature: MA Experiment 20001772 PARAMETER Experiment Name: At_Far-red-enriched-adult_P Parameter: Plant Line Value: Columbia
  misc_feature: MA Experiment 20001772 PARAMETER Experiment Name: At_Far-red-enriched-adult_P Parameter: Timepoint (hr) Value: 24
  misc_feature: MA Experiment 20001772 PARAMETER Experiment Name: At_Far-red-enriched-adult_P Parameter: Tissue Value: Aerial
  misc_feature: MA Experiment ID: 20001773 Result: Down-regulated in Transcription
  misc_feature: MA Experiment 20001773 PARAMETER Experiment Name: At_Far-red-enriched-adult_P Parameter: Age (day) Value: 30
  misc_feature: MA Experiment 20001773 PARAMETER Experiment Name: At_Far-red-enriched-adult_P Parameter: Light Value: Far-red enriched vs. White
  misc_feature: MA Experiment 20001773 PARAMETER Experiment Name: At_Far-red-enriched-adult_P Parameter: Organism Value: A. thaliana
  misc_feature: MA Experiment 20001773 PARAMETER Experiment Name: At_Far-red-enriched-adult_P Parameter: Plant Line Value: Columbia
  misc_feature: MA Experiment 20001773 PARAMETER Experiment Name: At_Far-red-enriched-adult_P Parameter: Timepoint (hr) Value: 48
  misc_feature: MA Experiment 20001773 PARAMETER Experiment Name: At_Far-red-enriched-adult_P Parameter: Tissue Value: Aerial
  misc_feature: MA Experiment ID: 20001904 Result: Up-regulated in Transcription
  misc_feature: MA Experiment 20001904 PARAMETER Experiment Name: At_Drought_Reproduction_P Parameter: Age (day) Value: 37
  misc_feature: MA Experiment 20001904 PARAMETER Experiment Name: At_Drought_Reproduction_P Parameter: Organism Value: A. thaliana
  misc_feature: MA Experiment 20001904 PARAMETER Experiment Name: At_Drought_Reproduction_P Parameter: Plant Line Value: WS
  misc_feature: MA Experiment 20001904 PARAMETER Experiment Name: At_Drought_Reproduction_P Parameter: Timepoint (day) Value: 7
  misc_feature: MA Experiment 20001904 PARAMETER Experiment Name: At_Drought_Reproduction_P Parameter: Tissue Value: Rosettes
  misc_feature: MA Experiment 20001904 PARAMETER Experiment Name: At_Drought_Reproduction_P Parameter: Treatment Value: Drought vs. No Drought
  misc_feature: MA Experiment ID: 20001911 Result: Up-regulated in Transcription
  misc_feature: MA Experiment 20001911 PARAMETER Experiment Name: At_Drought_Reproduction_P Parameter: Age (day) Value: 40
  misc_feature: MA Experiment 20001911 PARAMETER Experiment Name: At_Drought_Reproduction_P Parameter: Organism Value: A. thaliana
  misc_feature: MA Experiment 20001911 PARAMETER Experiment Name: At_Drought_Reproduction_P Parameter: Plant Line Value: WS
  misc_feature: MA Experiment 20001911 PARAMETER Experiment Name: At_Drought_Reproduction_P Parameter: Timepoint (day) Value: 10
  misc_feature: MA Experiment 20001911 PARAMETER Experiment Name: At_Drought_Reproduction_P Parameter: Tissue Value: Flowers
  misc_feature: MA Experiment 20001911 PARAMETER Experiment Name: At_Drought_Reproduction_P Parameter: Treatment Value: Drought vs. No Drought

SEQ ID NO: 92902 - protein, 186 aa, Arabidopsis thaliana; identical to SEQ ID NO: 77756
  peptide (1)..(186): Ceres Seq. ID no. 12715780
  misc_feature (103)..(148): Pfam Name: AN1-like Zinc finger Pfam Description: AN1-like Zinc finger
  misc_feature (1)..(186): Homolog of NCBI NO: 15232930 NR Description: zinc finger protein (PMZ), putative; protein id:
  misc_feature (5)..(179): Homolog of NCBI NO: 30688811 NR Description: zinc finger protein (PMZ) -related [Arabidopsis >gi|17529076|gb|AAL38748.1| unknown protein [Arabidopsis >gi|20465575|gb|AAM20270.1| unknown protein [Arabidopsis
  misc_feature (5)..(180): Homolog of NCBI NO: 15230311 NR Description: putative protein; protein id: At3g57480.1
  misc_feature (5)..(139): Homolog of NCBI NO: 33146779 NR Description: putative arsenite inducible RNA associated
  misc_feature (9)..(174): Homolog of NCBI NO: 33416395 NR Description: Unknown (protein for MGC:66295) [Danio rerio]
  misc_feature (9)..(183): Homolog of NCBI NO: 21312112 NR Description: RIKEN cDNA 1110060O18 [Mus musculus]
  misc_feature (9)..(182): Homolog of NCBI NO: 15079311 NR Description: RIKEN cDNA 1110060O18 gene [Mus musculus]
  misc_feature (9)..(140): Homolog of NCBI NO: 34876869 NR Description: similar to RIKEN cDNA 1110060O18 [Rattus
  misc_feature (9)..(139): Homolog of NCBI NO: 34871288 NR Description: similar to arsenite inducible RNA associated
  misc_feature (9)..(140): Homolog of NCBI NO: 20270357 NR Description: hypothetical protein BC018415 [Homo sapiens]

SEQ ID NO: 92903 - DNA, 1808 bp, Arabidopsis thaliana; identical to SEQ ID NO: 89147
  misc_feature (1)..(1808): Ceres Seq. ID no. 12715867
  misc_feature: MA Experiment ID: 108569 Result: Up-regulated in Transcription
  misc_feature: MA Experiment 108569 PARAMETER Experiment Name: At_0.001%_MeJA__cDNA_P Parameter: Timepoint (hr) Value: 6
  misc_feature: MA Experiment 108569 PARAMETER Experiment Name: At_0.001%_MeJA__cDNA_P Parameter: Tissue Value: Aerial
  misc_feature: MA Experiment 108569 PARAMETER Experiment Name: At_0.001%_MeJA__cDNA_P Parameter: Treatment Value: 0.001% MeJA vs. No Treatment
  misc_feature: MA Experiment ID: 108573 Result: Up-regulated in Transcription
  misc_feature: MA Experiment 108573 PARAMETER Experiment Name: At_Drought_cDNA_P Parameter: Timepoint (hr) Value: 6
  misc_feature: MA Experiment 108573 PARAMETER Experiment Name: At_Drought_cDNA_P Parameter: Tissue Value: Aerial
  misc_feature: MA Experiment 108573 PARAMETER Experiment Name: At_Drought_cDNA_P Parameter: Treatment Value: Drought vs. No Drought
  misc_feature: MA Experiment ID: 108576 Result: Down-regulated in Transcription
  misc_feature: MA Experiment 108576 PARAMETER Experiment Name: At_42deg_Heat_cDNA_P Parameter: Temperature (deg C) Value: 42 vs. 22
  misc_feature: MA Experiment 108576 PARAMETER Experiment Name: At_42deg_Heat_cDNA_P Parameter: Timepoint (hr) Value: 1
  misc_feature: MA Experiment 108576 PARAMETER Experiment Name: At_42deg_Heat_cDNA_P Parameter: Tissue Value: Aerial
  misc_feature: MA Experiment ID: 108577 Result: Down-regulated in Transcription
  misc_feature: MA Experiment 108577 PARAMETER Experiment Name: At_42deg_Heat_cDNA_P Parameter: Temperature (deg C) Value: 42 vs. 22
  misc_feature: MA Experiment 108577 PARAMETER Experiment Name: At_42deg_Heat_cDNA_P Parameter: Timepoint (hr) Value: 6
  misc_feature: MA Experiment 108577 PARAMETER Experiment Name: At_42deg_Heat_cDNA_P Parameter: Tissue Value: Aerial
  misc_feature: MA Experiment ID: 108595 Result: Down-regulated in Transcription
  misc_feature: MA Experiment 108595 PARAMETER Experiment Name: At_Ler-pi_Ovule_cDNA_P Parameter: Plant Line Value: null
  misc_feature: MA Experiment ID: 20000087 Result: Down-regulated in Transcription
  misc_feature: MA Experiment 20000087 PARAMETER Experiment Name: At_100uM_ABA_Mutants_cDNA_P Parameter: Plant Line Value: WS
  misc_feature: MA Experiment 20000087 PARAMETER Experiment Name: At_100uM_ABA_Mutants_cDNA_P Parameter: Timepoint (hr) Value: 6
  misc_feature: MA Experiment 20000087 PARAMETER Experiment Name: At_100uM_ABA_Mutants_cDNA_P Parameter: Tissue Value: Aerial
  misc_feature: MA Experiment 20000087 PARAMETER Experiment Name: At_100uM_ABA_Mutants_cDNA_P Parameter: Treatment Value: 100uM ABA vs. No Treatment
  misc_feature: MA Experiment ID: 20000093 Result: Down-regulated in Transcription
  misc_feature: MA Experiment 20000093 PARAMETER Experiment Name: At_42deg_Heat_cDNA_P Parameter: Temperature (deg C) Value: 42 vs. 22
  misc_feature: MA Experiment 20000093 PARAMETER Experiment Name: At_42deg_Heat_cDNA_P Parameter: Timepoint (hr) Value: 0.5
  misc_feature: MA Experiment 20000093 PARAMETER Experiment Name: At_42deg_Heat_cDNA_P Parameter: Tissue Value: Aerial
  misc_feature: MA Experiment ID: 20000111 Result: Down-regulated in Transcription
  misc_feature: MA Experiment 20000111 PARAMETER Experiment Name: At_42deg_Heat_cDNA_P Parameter: Temperature (deg C) Value: 42 vs. 22
  misc_feature: MA Experiment 20000111 PARAMETER Experiment Name: At_42deg_Heat_cDNA_P Parameter: Timepoint (hr) Value: 6
  misc_feature: MA Experiment 20000111 PARAMETER Experiment Name: At_42deg_Heat_cDNA_P Parameter: Tissue Value: Aerial
  misc_feature: MA Experiment ID: 20000112 Result: Down-regulated in Transcription
  misc_feature: MA Experiment 20000112 PARAMETER Experiment Name: At_42deg_Heat_cDNA_P Parameter: Temperature (deg C) Value: 42 vs. 22
  misc_feature: MA Experiment 20000112 PARAMETER Experiment Name: At_42deg_Heat_cDNA_P Parameter: Timepoint (hr) Value: 2
  misc_feature: MA Experiment 20000112 PARAMETER Experiment Name: At_42deg_Heat_cDNA_P Parameter: Tissue Value: Aerial
  misc_feature: MA Experiment ID: 20000113 Result: Down-regulated in Transcription
  misc_feature: MA Experiment 20000113 PARAMETER Experiment Name: At_42deg_Heat_cDNA_P Parameter: Temperature (deg C) Value: 42 vs. 22
  misc_feature: MA Experiment 20000113 PARAMETER Experiment Name: At_42deg_Heat_cDNA_P Parameter: Timepoint (hr) Value: 8
  misc_feature: MA Experiment 20000113 PARAMETER Experiment Name: At_42deg_Heat_cDNA_P Parameter: Tissue Value: Aerial
  misc_feature: MA Experiment ID: 20000117 Result: Down-regulated in Transcription
  misc_feature: MA Experiment 20000117 PARAMETER Experiment Name: At_100uM_ABA_Mutants_cDNA_P Parameter: Plant Line Value: Columbia
  misc_feature: MA Experiment 20000117 PARAMETER Experiment Name: At_100uM_ABA_Mutants_cDNA_P Parameter: Timepoint (hr) Value: 6
  misc_feature: MA Experiment 20000117 PARAMETER Experiment Name: At_100uM_ABA_Mutants_cDNA_P Parameter: Tissue Value: Aerial
  misc_feature: MA Experiment 20000117 PARAMETER Experiment Name: At_100uM_ABA_Mutants_cDNA_P Parameter: Treatment Value: 100uM ABA vs. No Treatment
  misc_feature: MA Experiment ID: 20000144 Result: Down-regulated in Transcription
  misc_feature: MA Experiment 20000144 PARAMETER Experiment Name: At_42deg_Heat_cDNA_P Parameter: Temperature (deg C) Value: 42 vs. 22
  misc_feature: MA Experiment 20000144 PARAMETER Experiment Name: At_42deg_Heat_cDNA_P Parameter: Timepoint (hr) Value: 1
  misc_feature: MA Experiment 20000144 PARAMETER Experiment Name: At_42deg_Heat_cDNA_P Parameter: Tissue Value: Aerial
  misc_feature: MA Experiment ID: 20000180 Result: Up-regulated in Transcription
  misc_feature: MA Experiment 20000180 PARAMETER Experiment Name: At_Germinating_Seeds_P Parameter: Age (hr) Value: 24 vs. 0
  misc_feature: MA Experiment 20000180 PARAMETER Experiment Name: At_Germinating_Seeds_P Parameter: Tissue Value: Germinating Seeds
  misc_feature: MA Experiment ID: 20000185 Result: Down-regulated in Transcription
  misc_feature: MA Experiment 20000185 PARAMETER Experiment Name: At_Roots__P Parameter: Age (day) Value: 7 vs. 21
  misc_feature: MA Experiment 20000185 PARAMETER Experiment Name: At_Roots__P Parameter: Organism Value: A. thaliana
  misc_feature: MA Experiment 20000185 PARAMETER Experiment Name: At_Roots__P Parameter: Tissue Value: Roots vs. Whole Plant
  misc_feature: MA Experiment ID: 20000439 Result: Down-regulated in Transcription
  misc_feature: MA Experiment 20000439 PARAMETER Experiment Name: At_Roots__P Parameter: Age (day) Value: 14 vs. 21
  misc_feature: MA Experiment 20000439 PARAMETER Experiment Name: At_Roots__P Parameter: Organism Value: A. thaliana
  misc_feature: MA Experiment 20000439 PARAMETER Experiment Name: At_Roots__P Parameter: Tissue Value: Roots vs. Whole Plant
  misc_feature: MA Experiment ID: 20001248 Result: Down-regulated in Transcription
  misc_feature: MA Experiment 20001248 PARAMETER Experiment Name: At_Far-red-induction_P Parameter: Age (day) Value: 7
  misc_feature: MA Experiment 20001248 PARAMETER Experiment Name: At_Far-red-induction_P Parameter: Light Value: Far-red vs. White
  misc_feature: MA Experiment 20001248 PARAMETER Experiment Name: At_Far-red-induction_P Parameter: Organism Value: A. thaliana
  misc_feature: MA Experiment 20001248 PARAMETER Experiment Name: At_Far-red-induction_P Parameter: Plant Line Value: Columbia
  misc_feature: MA Experiment 20001248 PARAMETER Experiment Name: At_Far-red-induction_P Parameter: Timepoint (hr) Value: 4
  misc_feature: MA Experiment 20001248 PARAMETER Experiment Name: At_Far-red-induction_P Parameter: Tissue Value: Whole Plant
  misc_feature: MA Experiment ID: 20001555 Result: Down-regulated in Transcription
  misc_feature: MA Experiment 20001555 PARAMETER Experiment Name: At_Drought_Soil_Dry_P Parameter: Age (day) Value: 24
  misc_feature: MA Experiment 20001555 PARAMETER Experiment Name: At_Drought_Soil_Dry_P Parameter: Organism Value: A. thaliana
  misc_feature: MA Experiment 20001555 PARAMETER Experiment Name: At_Drought_Soil_Dry_P Parameter: Plant Line Value: WS
  misc_feature: MA Experiment 20001555 PARAMETER Experiment Name: At_Drought_Soil_Dry_P Parameter: Post Timepoint (hr) Value: None
  misc_feature: MA Experiment 20001555 PARAMETER Experiment Name: At_Drought_Soil_Dry_P Parameter: Post-Treatment Value: None
  misc_feature: MA Experiment 20001555 PARAMETER Experiment Name: At_Drought_Soil_Dry_P Parameter: Timepoint (day) Value: 10
  misc_feature: MA Experiment 20001555 PARAMETER Experiment Name: At_Drought_Soil_Dry_P Parameter: Treatment Value: Drought vs. No Drought
  misc_feature: MA Experiment ID: 20001757 Result: Up-regulated in Transcription
  misc_feature: MA Experiment 20001757 PARAMETER Experiment Name: At_50mM_NH4NO3_L-to-H_P Parameter: Timepoint (hr) Value: 6
  misc_feature: MA Experiment 20001757 PARAMETER Experiment Name: At_50mM_NH4NO3_L-to-H_P Parameter: Tissue Value: Leaf
  misc_feature: MA Experiment 20001757 PARAMETER Experiment Name: At_50mM_NH4NO3_L-to-H_P Parameter: Treatment Value: 50mM NH4NO3 vs 100mM Mannitol
  misc_feature: MA Experiment ID: 20001904 Result: Down-regulated in Transcription
  misc_feature: MA Experiment 20001904 PARAMETER Experiment Name: At_Drought_Reproduction_P Parameter: Age (day) Value: 37
  misc_feature: MA Experiment 20001904 PARAMETER Experiment Name: At_Drought_Reproduction_P Parameter: Organism Value: A. thaliana
  misc_feature: MA Experiment 20001904 PARAMETER Experiment Name: At_Drought_Reproduction_P Parameter: Plant Line Value: WS
  misc_feature: MA Experiment 20001904 PARAMETER Experiment Name: At_Drought_Reproduction_P Parameter: Timepoint (day) Value: 7
  misc_feature: MA Experiment 20001904 PARAMETER Experiment Name: At_Drought_Reproduction_P Parameter: Tissue Value: Rosettes
  misc_feature: MA Experiment 20001904 PARAMETER Experiment Name: At_Drought_Reproduction_P Parameter: Treatment Value: Drought vs. No Drought
  misc_feature: MA Experiment ID: 20001905 Result: Down-regulated in Transcription
  misc_feature: MA Experiment 20001905 PARAMETER Experiment Name: At_Drought_Reproduction_P Parameter: Age (day) Value: 40
  misc_feature: MA Experiment 20001905 PARAMETER Experiment Name: At_Drought_Reproduction_P Parameter: Organism Value: A. thaliana
  misc_feature: MA Experiment 20001905 PARAMETER Experiment Name: At_Drought_Reproduction_P Parameter: Plant Line Value: WS
  misc_feature: MA Experiment 20001905 PARAMETER Experiment Name: At_Drought_Reproduction_P Parameter: Timepoint (day) Value: 10
  misc_feature: MA Experiment 20001905 PARAMETER Experiment Name: At_Drought_Reproduction_P Parameter: Tissue Value: Rosettes
  misc_feature: MA Experiment 20001905 PARAMETER Experiment Name: At_Drought_Reproduction_P Parameter: Treatment Value: Drought vs. No Drought
  misc_feature: MA Experiment ID: 20001908 Result: Down-regulated in Transcription
  misc_feature: MA Experiment 20001908 PARAMETER Experiment Name: At_Drought_Reproduction_P Parameter: Age (day) Value: 40
  misc_feature: MA Experiment 20001908 PARAMETER Experiment Name: At_Drought_Reproduction_P Parameter: Organism Value: A. thaliana
  misc_feature: MA Experiment 20001908 PARAMETER Experiment Name: At_Drought_Reproduction_P Parameter: Plant Line Value: WS
  misc_feature: MA Experiment 20001908 PARAMETER Experiment Name: At_Drought_Reproduction_P Parameter: Timepoint (day) Value: 10
  misc_feature: MA Experiment 20001908 PARAMETER Experiment Name: At_Drought_Reproduction_P Parameter: Tissue Value: Siliques
  misc_feature: MA Experiment 20001908 PARAMETER Experiment Name: At_Drought_Reproduction_P Parameter: Treatment Value: Drought vs. No Drought
  misc_feature: MA Experiment ID: 20001911 Result: Down-regulated in Transcription
  misc_feature: MA Experiment 20001911 PARAMETER Experiment Name: At_Drought_Reproduction_P Parameter: Age (day) Value: 40
  misc_feature: MA Experiment 20001911 PARAMETER Experiment Name: At_Drought_Reproduction_P Parameter: Organism Value: A. thaliana
  misc_feature: MA Experiment 20001911 PARAMETER Experiment Name: At_Drought_Reproduction_P Parameter: Plant Line Value: WS
  misc_feature: MA Experiment 20001911 PARAMETER Experiment Name: At_Drought_Reproduction_P Parameter: Timepoint (day) Value: 10
  misc_feature: MA Experiment 20001911 PARAMETER Experiment Name: At_Drought_Reproduction_P Parameter: Tissue Value: Flowers
  misc_feature: MA Experiment 20001911 PARAMETER Experiment Name: At_Drought_Reproduction_P Parameter: Treatment Value: Drought vs. No Drought

SEQ ID NO: 92904 - protein, 404 aa, Arabidopsis thaliana; identical to SEQ ID NO: 89052
  peptide (1)..(404): Ceres Seq. ID no. 12715868
  misc_feature (91)..(388): Pfam Name: Pectinesterase Pfam Description: Pectinesterase
  misc_feature (1)..(404): Homolog of NCBI NO: 14190429 NR Description: AT4g33220/F4I10_150 [Arabidopsis thaliana]
  misc_feature (1)..(404): Homolog of NCBI NO: 7447375 NR Description: pectinesterase homolog F4I10.150 - Arabidopsis
  misc_feature (1)..(404): Homolog of NCBI NO: 18418172 NR Description: pectinesterase family; protein id: At4g33220.1,
  misc_feature (70)..(399): Homolog of NCBI NO: 6093744 NR Description: Pectinesterase PPE8B precursor (Pectin
  misc_feature (1)..(64): Homolog of NCBI NO: 6093744 NR Description: Pectinesterase PPE8B precursor (Pectin
  misc_feature (1)..(402): Homolog of NCBI NO: 30690925 NR Description: pectinesterase family [Arabidopsis thaliana]
  misc_feature (1)..(404): Homolog of NCBI NO: 15081598 NR Description: pectin methylesterase PME1 [Vitis vinifera]
  misc_feature (62)..(401): Homolog of NCBI NO: 33520429 NR Description: pectinesterase [Fragaria x ananassa]
  misc_feature (1)..(35): Homolog of NCBI NO: 33520429 NR Description: pectinesterase [Fragaria x ananassa]
  misc_feature (1)..(402): Homolog of NCBI NO: 15230020 NR Description: pectinesterase family; protein id: At3g05620.1 thaliana] >gi|6714448|gb|AAF26135.1|AC011620_11 putative

SEQ ID NO: 92905 - protein, 380 aa, Arabidopsis thaliana; identical to SEQ ID NO: 89149
  peptide (1)..(380): Ceres Seq. ID no. 12715869
  misc_feature (67)..(364): Pfam Name: Pectinesterase Pfam Description: Pectinesterase
  misc_feature (1)..(380): Homolog of NCBI NO: 14190429 NR Description: AT4g33220/F4I10_150 [Arabidopsis thaliana]
  misc_feature (1)..(380): Homolog of NCBI NO: 7447375 NR Description: pectinesterase homolog F4I10.150 - Arabidopsis
  misc_feature (1)..(380): Homolog of NCBI NO: 18418172 NR Description: pectinesterase family; protein id: At4g33220.1,
  misc_feature (46)..(375): Homolog of NCBI NO: 6093744 NR Description: Pectinesterase PPE8B precursor (Pectin
  misc_feature (1)..(40): Homolog of NCBI NO: 6093744 NR Description: Pectinesterase PPE8B precursor (Pectin
  misc_feature (1)..(378): Homolog of NCBI NO: 30690925 NR Description: pectinesterase family [Arabidopsis thaliana]
  misc_feature (1)..(380): Homolog of NCBI NO: 15081598 NR Description: pectin methylesterase PME1 [Vitis vinifera]
  misc_feature (38)..(377): Homolog of NCBI NO: 33520429 NR Description: pectinesterase [Fragaria x ananassa]
  misc_feature (1)..(11): Homolog of NCBI NO: 33520429 NR Description: pectinesterase [Fragaria x ananassa]
  misc_feature (1)..(378): Homolog of NCBI NO: 15230020 NR Description: pectinesterase family; protein id: At3g05620.1 thaliana] >gi|6714448|gb|AAF26135.1|AC011620_11 putative

SEQ ID NO: 92906 - protein, 299 aa, Arabidopsis thaliana; identical to SEQ ID NO: 89150
  peptide (1)..(299): Ceres Seq. ID no. 12715870
  misc_feature (1)..(283): Pfam Name: Pectinesterase Pfam Description: Pectinesterase
  misc_feature (1)..(299): Homolog of NCBI NO: 14190429 NR Description: AT4g33220/F4I10_150 [Arabidopsis thaliana]
  misc_feature (1)..(299): Homolog of NCBI NO: 7447375 NR Description: pectinesterase homolog F4I10.150 - Arabidopsis
  misc_feature (1)..(299): Homolog of NCBI NO: 18418172 NR Description: pectinesterase family; protein id: At4g33220.1,
  misc_feature (1)..(294): Homolog of NCBI NO: 6093744 NR Description: Pectinesterase PPE8B precursor (Pectin
  misc_feature (1)..(297): Homolog of NCBI NO: 30690925 NR Description: pectinesterase family [Arabidopsis thaliana]
  misc_feature (1)..(299): Homolog of NCBI NO: 15081598 NR Description: pectin methylesterase PME1 [Vitis vinifera]
  misc_feature (1)..(296): Homolog of NCBI NO: 33520429 NR Description: pectinesterase [Fragaria x ananassa]
  misc_feature (1)..(297): Homolog of NCBI NO: 15230020 NR Description: pectinesterase family; protein id: At3g05620.1 thaliana] >gi|6714448|gb|AAF26135.1|AC011620_11 putative
  misc_feature (1)..(297): Homolog of NCBI NO: 15238729 NR Description: pectinesterase; protein id: At5g53370.1, by cDNA: gi_13507548, supported by cDNA: gi_15293286 [Arabidopsis >gi|9759184|dbj|BAB09799.1| pectinesterase [Arabidopsis thaliana]
  misc_feature (1)..(297): Homolog of NCBI NO: 34393863 NR Description: putative pectinesterase [Oryza sativa (japonica

SEQ ID NO: 92907 - DNA, 2821 bp, Arabidopsis thaliana; identical to SEQ ID NO: 89151
  misc_feature (1)..(2821): Ceres Seq. ID no. 12715871
  misc_feature: MA Experiment ID: 108433 Result: Down-regulated in Transcription
  misc_feature: MA Experiment 108433 PARAMETER Experiment Name: At_rhl_Mutant2_cDNA_P Parameter: Age (day) Value: 7
  misc_feature: MA Experiment 108433 PARAMETER Experiment Name: At_rhl_Mutant2_cDNA_P Parameter: Organism Value: A. thaliana
  misc_feature: MA Experiment 108433 PARAMETER Experiment Name: At_rhl_Mutant2_cDNA_P Parameter: Plant Line Value: rhl Mutant vs. wt landsburg
  misc_feature: MA Experiment 108433 PARAMETER Experiment Name: At_rhl_Mutant2_cDNA_P Parameter: Tissue Value: Roots
  misc_feature: MA Experiment ID: 108462 Result: Down-regulated in Transcription
  misc_feature: MA Experiment 108462 PARAMETER Experiment Name: At_Germinating_Seeds_cDNA_P Parameter: Age (day) Value: 2 vs. 0
  misc_feature: MA Experiment 108462 PARAMETER Experiment Name: At_Germinating_Seeds_cDNA_P Parameter: Tissue Value: Germinating Seeds

SEQ ID NO: 92908 - protein, 519 aa, Arabidopsis thaliana; identical to SEQ ID NO: 89152
  peptide (1)..(519): Ceres Seq. ID no. 12715872
  misc_feature (291)..(513): Pfam Name: Dynamin central region Pfam Description: Dynamin central region
  misc_feature (40)..(519): Homolog of NCBI NO: 14334428 NR Description: putative dynamin protein ADL2 [Arabidopsis >gi|17104743|gb|AAL34260.1| putative dynamin protein ADL2
  misc_feature (56)..(412): Homolog of NCBI NO: 19386736 NR Description: putative dynamin-like protein ADL2 [Oryza sativa
  misc_feature (449)..(513): Homolog of NCBI NO: 19386736 NR Description: putative dynamin-like protein ADL2 [Oryza sativa
  misc_feature (60)..(513): Homolog of NCBI NO: 38346632 NR Description: OSJNBa0072D21.2 [Oryza sativa (japonica
  misc_feature (76)..(512): Homolog of NCBI NO: 2689219 NR Description: dynamin like protein [Dictyostelium discoideum]
  misc_feature (51)..(510): Homolog of NCBI NO: 30048092 NR Description: DNM1 protein [Homo sapiens]
  misc_feature (76)..(510): Homolog of NCBI NO: 6978771 NR Description: dynamin 2 [Rattus norvegicus]
  misc_feature (76)..(510): Homolog of NCBI NO: 12836637 NR Description: unnamed protein product [Mus musculus]
  misc_feature (76)..(510): Homolog of NCBI NO: 22002044 NR Description: Dynamin 2 (Dynamin UDNM)
  misc_feature (76)..(512): Homolog of NCBI NO: 1083647 NR Description: dynamin II isoform ba - rat

SEQ ID NO: 92909 - protein, 480 aa, Arabidopsis thaliana; identical to SEQ ID NO: 89153
  peptide (1)..(480): Ceres Seq. ID no. 12715873
  misc_feature (252)..(474): Pfam Name: Dynamin central region Pfam Description: Dynamin central region
  misc_feature (1)..(480): Homolog of NCBI NO: 14334428 NR Description: putative dynamin protein ADL2 [Arabidopsis >gi|17104743|gb|AAL34260.1| putative dynamin protein ADL2
  misc_feature (17)..(373): Homolog of NCBI NO: 19386736 NR Description: putative dynamin-like protein ADL2 [Oryza sativa
  misc_feature (410)..(474): Homolog of NCBI NO: 19386736 NR Description: putative dynamin-like protein ADL2 [Oryza sativa
  misc_feature (21)..(474): Homolog of NCBI NO: 38346632 NR Description: OSJNBa0072D21.2 [Oryza sativa (japonica
  misc_feature (37)..(473): Homolog of NCBI NO: 2689219 NR Description: dynamin like protein [Dictyostelium discoideum]
  misc_feature (12)..(471): Homolog of NCBI NO: 30048092 NR Description: DNM1 protein [Homo sapiens]
  misc_feature (37)..(471): Homolog of NCBI NO: 6978771 NR Description: dynamin 2 [Rattus norvegicus]
  misc_feature (37)..(471): Homolog of NCBI NO: 22002044 NR Description: Dynamin 2 (Dynamin UDNM)
  misc_feature (37)..(471): Homolog of NCBI NO: 12836637 NR Description: unnamed protein product [Mus musculus]
  misc_feature (37)..(473): Homolog of NCBI NO: 1083647 NR Description: dynamin II isoform ba - rat

SEQ ID NO: 92910 - protein, 332 aa, Arabidopsis thaliana; identical to SEQ ID NO: 89154
  peptide (1)..(332): Ceres Seq. ID no. 12715874
  misc_feature (1)..(68): Pfam Name: Dynamin central region Pfam Description: Dynamin central region
  misc_feature (94)..(332): Homolog of NCBI NO: 19386736 NR Description: putative dynamin-like protein ADL2 [Oryza sativa
  misc_feature (1)..(99): Homolog of NCBI NO: 19386736 NR Description: putative dynamin-like protein ADL2 [Oryza sativa
  misc_feature (1)..(326): Homolog of NCBI NO: 38346632 NR Description: OSJNBa0072D21.2 [Oryza sativa (japonica
  misc_feature (173)..(280): Homolog of NCBI NO: 2689219 NR Description: dynamin like protein [Dictyostelium discoideum]
  misc_feature (4)..(61): Homolog of NCBI NO: 2689219 NR Description: dynamin like protein [Dictyostelium discoideum]
  misc_feature (186)..(319): Homolog of NCBI NO: 30048092 NR Description: DNM1 protein [Homo sapiens]
  misc_feature (4)..(69): Homolog of NCBI NO: 30048092 NR Description: DNM1 protein [Homo sapiens]
  misc_feature (193)..(280): Homolog of NCBI NO: 6978771 NR Description: dynamin 2 [Rattus norvegicus]
  misc_feature (193)..(280): Homolog of NCBI NO: 22002044 NR Description: Dynamin 2 (Dynamin UDNM)
  misc_feature (193)..(280): Homolog of NCBI NO: 12836637 NR Description: unnamed protein product [Mus musculus]

SEQ ID NO: 92911 - DNA, 1586 bp, Arabidopsis thaliana; identical to SEQ ID NO: 89155
  misc_feature (1)..(1586): Ceres Seq. ID no. 12715879
  misc_feature: MA Experiment ID: 108434 Result: Up-regulated in Transcription
  misc_feature: MA Experiment 108434 PARAMETER Experiment Name: At_Root_Tips_cDNA_P Parameter: Tissue Value: Root Tips
  misc_feature: MA Experiment ID: 108462 Result: Down-regulated in Transcription
  misc_feature: MA Experiment 108462 PARAMETER Experiment Name: At_Germinating_Seeds_cDNA_P Parameter: Age (day) Value: 2 vs. 0
  misc_feature: MA Experiment 108462 PARAMETER Experiment Name: At_Germinating_Seeds_cDNA_P Parameter: Tissue Value: Germinating Seeds
  misc_feature: MA Experiment ID: 108463 Result: Down-regulated in Transcription
  misc_feature: MA Experiment 108463 PARAMETER Experiment Name: At_Germinating_Seeds_cDNA_P Parameter: Age (day) Value: 3 vs. 0
  misc_feature: MA Experiment 108463 PARAMETER Experiment Name: At_Germinating_Seeds_cDNA_P Parameter: Tissue Value: Germinating Seeds
  misc_feature: MA Experiment ID: 108464 Result: Down-regulated in Transcription
  misc_feature: MA Experiment 108464 PARAMETER Experiment Name: At_Germinating_Seeds_cDNA_P Parameter: Age (day) Value: 4 vs. 0
  misc_feature: MA Experiment 108464 PARAMETER Experiment Name: At_Germinating_Seeds_cDNA_P Parameter: Tissue Value: Germinating Seeds
  misc_feature: MA Experiment ID: 108595 Result: Down-regulated in Transcription
  misc_feature: MA Experiment 108595 PARAMETER Experiment Name: At_Ler-pi_Ovule_cDNA_P Parameter: Plant Line Value: null
  misc_feature: MA Experiment ID: 20000087 Result: Down-regulated in Transcription
  misc_feature: MA Experiment 20000087 PARAMETER Experiment Name: At_100uM_ABA_Mutants_cDNA_P Parameter: Plant Line Value: WS
  misc_feature: MA Experiment 20000087 PARAMETER Experiment Name: At_100uM_ABA_Mutants_cDNA_P Parameter: Timepoint (hr) Value: 6
  misc_feature: MA Experiment 20000087 PARAMETER Experiment Name: At_100uM_ABA_Mutants_cDNA_P Parameter: Tissue Value: Aerial
  misc_feature: MA Experiment 20000087 PARAMETER Experiment Name: At_100uM_ABA_Mutants_cDNA_P Parameter: Treatment Value: 100uM ABA vs. No Treatment
  misc_feature: MA Experiment ID: 20000227 Result: Up-regulated in Transcription
  misc_feature: MA Experiment 20000227 PARAMETER Experiment Name: At_Root-Tips-vs-Tops_P Parameter: Tissue Value: Root Tips vs. Root Tops
  misc_feature: MA Experiment ID: 20000234 Result: Up-regulated in Transcription
  misc_feature: MA Experiment 20000234 PARAMETER Experiment Name: At_Siliques_P Parameter: Age (day) Value: 21
  misc_feature: MA Experiment 20000234 PARAMETER Experiment Name: At_Siliques_P Parameter: Organism Value: A. thaliana
  misc_feature: MA Experiment 20000234 PARAMETER Experiment Name: At_Siliques_P Parameter: Plant Line Value: WS
  misc_feature: MA Experiment 20000234 PARAMETER Experiment Name: At_Siliques_P Parameter: Tissue Value: Less Than 5mm Siliques vs. Whole Plant
  misc_feature: MA Experiment ID: 20000437 Result: Down-regulated in Transcription
  misc_feature: MA Experiment 20000437 PARAMETER Experiment Name: At_Drought_P Parameter: Age (day) Value: 8
  misc_feature: MA Experiment 20000437 PARAMETER Experiment Name: At_Drought_P Parameter: Organism Value: A. thaliana
  misc_feature: MA Experiment 20000437 PARAMETER Experiment Name: At_Drought_P Parameter: Plant Line Value: WS
  misc_feature: MA Experiment 20000437 PARAMETER Experiment Name: At_Drought_P Parameter: Timepoint (hr) Value: 24
  misc_feature: MA Experiment 20000437 PARAMETER Experiment Name: At_Drought_P Parameter: Tissue Value: Whole Plant
  misc_feature: MA Experiment 20000437 PARAMETER Experiment Name: At_Drought_P Parameter: Treatment Value: Drought vs. No Drought

SEQ ID NO: 92912 - protein, 477 aa, Arabidopsis thaliana; identical to SEQ ID NO: 89156
  peptide (1)..(477): Ceres Seq. ID no. 12715880
  misc_feature (164)..(476): Pfam Name: Aminotransferase class I and II Pfam Description: Aminotransferase class I and II
  misc_feature (17)..(477): Homolog of NCBI NO: 18418270 NR Description: putative protein; protein id: At4g33680.1, by cDNA: gi_15912290, supported by cDNA: gi_17529043 [Arabidopsis >gi|15912291|gb|AAL08279.1| AT4g33680/T16L1_170 [Arabidopsis
  misc_feature (52)..(477): Homolog of NCBI NO: 7447845 NR Description: probable transaminase (EC 2.6.1.-) T16L1.170 - Arabidopsis thaliana >gi|3549670|emb|CAA20581.1| putative [Arabidopsis thaliana] >gi|7270317|emb|CAB80085.1| putative
  misc_feature (29)..(477): Homolog of NCBI NO: 37703720 NR Description: putative aminotransferase AGD2 [Oryza sativa
  misc_feature (72)..(473): Homolog of NCBI NO: 37703722 NR Description: putative aminotransferase ALD1 [Oryza sativa
  misc_feature (72)..(473): Homolog of NCBI NO: 24414269 NR Description: Putative transaminase [Oryza sativa (japonica
  misc_feature (67)..(477): Homolog of NCBI NO: 18397344 NR Description: putative aspartate aminotransferase; protein id: supported by cDNA: gi_15982837 [Arabidopsis thaliana] At2g13810/F13J11.16 [Arabidopsis thaliana]
  misc_feature (73)..(477): Homolog of NCBI NO: 25315768 NR Description: probable aspartate aminotransferase [imported] -
  misc_feature (78)..(475): Homolog of NCBI NO: 24213476 NR Description: aminotransferase [Leptospira interrogans serovar str. 56601] >gi|24194250|gb|AAN47975.1|AE011264_3
  misc_feature (78)..(477): Homolog of NCBI NO: 23124300 NR Description: hypothetical protein [Nostoc punctiforme]
  misc_feature (78)..(477): Homolog of NCBI NO: 17232595 NR Description: aminotransferase [Nostoc sp. PCC 7120]

SEQ ID NO: 92913 - protein, 461 aa, Arabidopsis thaliana [sequence omitted]

SEQ ID NO: 92914 - protein, 451 aa, Arabidopsis thaliana; identical to SEQ ID NO: 76835
  peptide (1)..(451): Ceres Seq. ID no. 12715882
  misc_feature (138)..(450): Pfam Name: Aminotransferase class I and II Pfam Description: Aminotransferase class I and II
  misc_feature (1)..(451): Homolog of NCBI NO: 18418270 NR Description: putative protein; protein id: At4g33680.1, by cDNA: gi_15912290, supported by cDNA: gi_17529043 [Arabidopsis >gi|15912291|gb|AAL08279.1| AT4g33680/T16L1_170 [Arabidopsis
  misc_feature (26)..(451): Homolog of NCBI NO: 7447845 NR Description: probable transaminase (EC 2.6.1.-) T16L1.170 - Arabidopsis thaliana >gi|3549670|emb|CAA20581.1| putative [Arabidopsis thaliana] >gi|7270317|emb|CAB80085.1| putative
  misc_feature (3)..(451): Homolog of NCBI NO: 37703720 NR Description: putative aminotransferase AGD2 [Oryza sativa
  misc_feature (46)..(447): Homolog of NCBI NO: 37703722 NR Description: putative aminotransferase ALD1 [Oryza sativa
  misc_feature (46)..(447): Homolog of NCBI NO: 24414269 NR Description: Putative transaminase [Oryza sativa (japonica
  misc_feature (41)..(451): Homolog of NCBI NO: 18397344 NR Description: putative aspartate aminotransferase; protein id: supported by cDNA: gi_15982837 [Arabidopsis thaliana] At2g13810/F13J11.16 [Arabidopsis thaliana]
  misc_feature (47)..(451): Homolog of NCBI NO: 25315768 NR Description: probable aspartate aminotransferase [imported] -
  misc_feature (52)..(449): Homolog of NCBI NO: 24213476 NR Description: aminotransferase [Leptospira interrogans serovar str. 56601] >gi|24194250|gb|AAN47975.1|AE011264_3
  misc_feature (52)..(451): Homolog of NCBI NO: 23124300 NR Description: hypothetical protein [Nostoc punctiforme]
  misc_feature (52)..(451): Homolog of NCBI NO: 17232595 NR Description: aminotransferase [Nostoc sp. PCC 7120]

SEQ ID NO: 92915 - DNA, 737 bp, Arabidopsis thaliana; identical to SEQ ID NO: 89159
  misc_feature (1)..(737): Ceres Seq. ID no. 12715887
  misc_feature: MA Experiment ID: 108434 Result: Up-regulated in Transcription
  misc_feature: MA Experiment 108434 PARAMETER Experiment Name: At_Root_Tips_cDNA_P Parameter: Tissue Value: Root Tips
  misc_feature: MA Experiment ID: 108463 Result: Down-regulated in Transcription
  misc_feature: MA Experiment 108463 PARAMETER Experiment Name: At_Germinating_Seeds_cDNA_P Parameter: Age (day) Value: 3 vs. 0
  misc_feature: MA Experiment 108463 PARAMETER Experiment Name: At_Germinating_Seeds_cDNA_P Parameter: Tissue Value: Germinating Seeds
  misc_feature: MA Experiment ID: 20000794 Result: Down-regulated in Transcription
  misc_feature: MA Experiment 20000794 PARAMETER Experiment Name: At_Petals_P Parameter: Age (day) Value: 23-25 days
  misc_feature: MA Experiment 20000794 PARAMETER Experiment Name: At_Petals_P Parameter: Plant Line Value: WS
  misc_feature: MA Experiment 20000794 PARAMETER Experiment Name: At_Petals_P Parameter: Tissue Value: Petals vs. Whole plant

SEQ ID NO: 92916 - protein, 194 aa, Arabidopsis thaliana; identical to SEQ ID NO: 89160
  peptide (1)..(194): Ceres Seq. ID no. 12715888
  misc_feature (27)..(113): Pfam Name: Eukaryotic translation initiation factor 3 Pfam Description: Eukaryotic translation initiation factor 3
  misc_feature (98)..(194): Homolog of NCBI NO: 15234123 NR Description: putative protein; protein id: At4g33250.1, by cDNA: gi_12407752, supported by cDNA: gi_14335023, supported cDNA: gi_15292988, supported by cDNA: gi_20147104, supported by
  misc_feature (23)..(113): Homolog of NCBI NO: 15234123 NR Description: putative protein; protein id: At4g33250.1, by cDNA: gi_12407752, supported by cDNA: gi_14335023, supported cDNA: gi_15292988, supported by cDNA: gi_20147104, supported by
  misc_feature (104)..(193): Homolog of NCBI NO: 23396617 NR Description: Eukaryotic translation initiation factor 3
  misc_feature (29)..(113): Homolog of NCBI NO: 23396617 NR Description: Eukaryotic translation initiation factor 3
  misc_feature (134)..(194): Homolog of NCBI NO: 20453126 NR Description: AT4g33250/F17M5_10 [Arabidopsis thaliana]
  misc_feature (32)..(113): Homolog of NCBI NO: 5114051 NR Description: HSPC029 [Homo sapiens]
  misc_feature (32)..(113): Homolog of NCBI NO: 10801345 NR Description: muscle specific gene [Homo sapiens]
  misc_feature (32)..(113): Homolog of NCBI NO: 21312044 NR Description: RIKEN cDNA 1200009C21 [Mus musculus]
  misc_feature (32)..(113): Homolog of NCBI NO: 27730981 NR Description: similar to RIKEN cDNA 1200009C21 [Mus musculus]
  misc_feature (33)..(112): Homolog of NCBI NO: 38047673 NR Description: similar to Drosophila melanogaster CG10306

SEQ ID NO: 92917 - protein, 172 aa, Arabidopsis thaliana; identical to SEQ ID NO: 89161
  peptide (1)..(172): Ceres Seq. ID no. 12715889
  misc_feature (5)..(91): Pfam Name: Eukaryotic translation initiation factor 3 Pfam Description: Eukaryotic translation initiation factor 3
  misc_feature (76)..(172): Homolog of NCBI NO: 15234123 NR Description: putative protein; protein id: At4g33250.1, by cDNA: gi_12407752, supported by cDNA: gi_14335023, supported cDNA: gi_15292988, supported by cDNA: gi_20147104, supported by
  misc_feature (1)..(91): Homolog of NCBI NO: 15234123 NR Description: putative protein; protein id: At4g33250.1, by cDNA: gi_12407752, supported by cDNA: gi_14335023, supported cDNA: gi_15292988, supported by cDNA: gi_20147104, supported by
  misc_feature (82)..(171): Homolog of NCBI NO: 23396617 NR Description: Eukaryotic translation initiation factor 3
  misc_feature (7)..(91): Homolog of NCBI NO: 23396617 NR Description: Eukaryotic translation initiation factor 3
  misc_feature (112)..(172): Homolog of NCBI NO: 20453126 NR Description: AT4g33250/F17M5_10 [Arabidopsis thaliana]
  misc_feature (10)..(91): Homolog of NCBI NO: 5114051 NR Description: HSPC029 [Homo sapiens]
  misc_feature (10)..(91): Homolog of NCBI NO: 10801345 NR Description: muscle specific gene [Homo sapiens]
  misc_feature (10)..(91): Homolog of NCBI NO: 27730981 NR Description: similar to RIKEN cDNA 1200009C21 [Mus musculus]
  misc_feature (10)..(91): Homolog of NCBI NO: 21312044 NR Description: RIKEN cDNA 1200009C21 [Mus musculus]
  misc_feature (11)..(90): Homolog of NCBI NO: 38047673 NR Description: similar to Drosophila melanogaster CG10306

SEQ ID NO: 92918 - protein, 110 aa, Arabidopsis thaliana; identical to SEQ ID NO: 89162
  peptide (1)..(110): Ceres Seq. ID no. 12715890
  misc_feature (14)..(110): Pfam Name: Eukaryotic translation initiation factor 3 Pfam Description: Eukaryotic translation initiation factor 3
  misc_feature (14)..(110): Homolog of NCBI NO: 15234123 NR Description: putative protein; protein id: At4g33250.1, by cDNA: gi_12407752, supported by cDNA: gi_14335023, supported cDNA: gi_15292988, supported by cDNA: gi_20147104, supported by
  misc_feature (1)..(29): Homolog of NCBI NO: 15234123 NR Description: putative protein; protein id: At4g33250.1, by cDNA: gi_12407752, supported by cDNA: gi_14335023, supported cDNA: gi_15292988, supported by cDNA: gi_20147104, supported by
  misc_feature (20)..(109): Homolog of NCBI NO: 23396617 NR Description: Eukaryotic translation initiation factor 3
  misc_feature (1)..(29): Homolog of NCBI NO: 23396617 NR Description: Eukaryotic translation initiation factor 3
  misc_feature (50)..(110): Homolog of NCBI NO: 20453126 NR Description: AT4g33250/F17M5_10 [Arabidopsis thaliana]
  misc_feature (1)..(29): Homolog of NCBI NO: 5114051 NR Description: HSPC029 [Homo sapiens]
  misc_feature (1)..(29): Homolog of NCBI NO: 10801345 NR Description: muscle specific gene [Homo sapiens]
  misc_feature (1)..(29): Homolog of NCBI NO: 27730981 NR Description: similar to RIKEN cDNA 1200009C21 [Mus musculus]
  misc_feature (1)..(29): Homolog of NCBI NO: 21312044 NR Description: RIKEN cDNA 1200009C21 [Mus musculus]
  misc_feature (1)..(28): Homolog of NCBI NO: 38047673 NR Description: similar to Drosophila melanogaster CG10306

SEQ ID NO: 92919 - DNA, 1501 bp, Arabidopsis thaliana; identical to SEQ ID NO: 89163
  misc_feature (1)..(1501): Ceres Seq. ID no. 12715895
  misc_feature: MA Experiment ID: 108585 Result: Down-regulated in Transcription
  misc_feature: MA Experiment 108585 PARAMETER Experiment Name: At_5mM_NaNP_cDNA_P Parameter: Timepoint (hr) Value: 6
  misc_feature: MA Experiment 108585 PARAMETER Experiment Name: At_5mM_NaNP_cDNA_P Parameter: Tissue Value: Aerial
  misc_feature: MA Experiment 108585 PARAMETER Experiment Name: At_5mM_NaNP_cDNA_P Parameter: Treatment Value: null
  misc_feature: MA Experiment ID: 20000227 Result: Up-regulated in Transcription
  misc_feature: MA Experiment 20000227 PARAMETER Experiment Name: At_Root-Tips-vs-Tops_P Parameter: Tissue Value: Root Tips vs. Root Tops
  misc_feature: MA Experiment ID: 20000234 Result: Up-regulated in Transcription
  misc_feature: MA Experiment 20000234 PARAMETER Experiment Name: At_Siliques_P Parameter: Age (day) Value: 21
  misc_feature: MA Experiment 20000234 PARAMETER Experiment Name: At_Siliques_P Parameter: Organism Value: A. thaliana
  misc_feature: MA Experiment 20000234 PARAMETER Experiment Name: At_Siliques_P Parameter: Plant Line Value: WS
  misc_feature: MA Experiment 20000234 PARAMETER Experiment Name: At_Siliques_P Parameter: Tissue Value: Less Than 5mm Siliques vs. Whole Plant
  misc_feature: MA Experiment ID: 20000437 Result: Down-regulated in Transcription
  misc_feature: MA Experiment 20000437 PARAMETER Experiment Name: At_Drought_P Parameter: Age (day) Value: 8
  misc_feature: MA Experiment 20000437 PARAMETER Experiment Name: At_Drought_P Parameter: Organism Value: A. thaliana
  misc_feature: MA Experiment 20000437 PARAMETER Experiment Name: At_Drought_P Parameter: Plant Line Value: WS
  misc_feature: MA Experiment 20000437 PARAMETER Experiment Name: At_Drought_P Parameter: Timepoint (hr) Value: 24
  misc_feature: MA Experiment 20000437 PARAMETER Experiment Name: At_Drought_P Parameter: Tissue Value: Whole Plant
  misc_feature: MA Experiment 20000437 PARAMETER Experiment Name: At_Drought_P Parameter: Treatment Value: Drought vs. No Drought

SEQ ID NO: 92920 - protein, 454 aa, Arabidopsis thaliana; identical to SEQ ID NO: 89164
  peptide (1)..(454): Ceres Seq. ID no. 12715896
  misc_feature (141)..(453): Pfam Name: Aminotransferase class I and II Pfam Description: Aminotransferase class I and II
  misc_feature (52)..(454): Homolog of NCBI NO: 18418270 NR Description: putative protein; protein id: At4g33680.1, by cDNA: gi_15912290, supported by cDNA: gi_17529043 [Arabidopsis >gi|15912291|gb|AAL08279.1| AT4g33680/T16L1_170 [Arabidopsis
  misc_feature (17)..(60): Homolog of NCBI NO: 18418270 NR Description: putative protein; protein id: At4g33680.1, by cDNA: gi_15912290, supported by cDNA: gi_17529043 [Arabidopsis >gi|15912291|gb|AAL08279.1| AT4g33680/T16L1_170 [Arabidopsis
  misc_feature (52)..(454): Homolog of NCBI NO: 7447845 NR Description: probable transaminase (EC 2.6.1.-) T16L1.170 - Arabidopsis thaliana >gi|3549670|emb|CAA20581.1| putative [Arabidopsis thaliana] >gi|7270317|emb|CAB80085.1| putative
  misc_feature (54)..(454): Homolog of NCBI NO: 37703720 NR Description: putative aminotransferase AGD2 [Oryza sativa
  misc_feature (57)..(450): Homolog of NCBI NO: 37703722 NR Description: putative aminotransferase ALD1 [Oryza sativa
  misc_feature (57)..(450): Homolog of NCBI NO: 24414269 NR Description: Putative transaminase [Oryza sativa (japonica
  misc_feature (25)..(454): Homolog of NCBI NO: 18397344 NR Description: putative aspartate aminotransferase; protein id: supported by cDNA: gi_15982837 [Arabidopsis thaliana] At2g13810/F13J11.16 [Arabidopsis thaliana]
  misc_feature (52)..(454): Homolog of NCBI NO: 25315768 NR Description: probable aspartate aminotransferase [imported] -
  misc_feature (57)..(452): Homolog of NCBI NO: 24213476 NR Description: aminotransferase [Leptospira interrogans serovar str. 56601] >gi|24194250|gb|AAN47975.1|AE011264_3
  misc_feature (57)..(454): Homolog of NCBI NO: 23124300 NR Description: hypothetical protein [Nostoc punctiforme]

SEQ ID NO: 92921 - protein, 438 aa, Arabidopsis thaliana; identical to SEQ ID NO: 89165
  peptide (1)..(438): Ceres Seq. ID no. 12715897
  misc_feature (125)..(437): Pfam Name: Aminotransferase class I and II Pfam Description: Aminotransferase class I and II
  misc_feature (36)..(438): Homolog of NCBI NO: 18418270 NR Description: putative protein; protein id: At4g33680.1, by cDNA: gi_15912290, supported by cDNA: gi_17529043 [Arabidopsis >gi|15912291|gb|AAL08279.1| AT4g33680/T16L1_170 [Arabidopsis
  misc_feature (1)..(44): Homolog of NCBI NO: 18418270 NR Description: putative protein; protein id: At4g33680.1, by cDNA: gi_15912290, supported by cDNA: gi_17529043 [Arabidopsis >gi|15912291|gb|AAL08279.1| AT4g33680/T16L1_170 [Arabidopsis
  misc_feature (36)..(438): Homolog of NCBI NO: 7447845 NR Description: probable transaminase (EC 2.6.1.-) T16L1.170 - Arabidopsis thaliana >gi|3549670|emb|CAA20581.1| putative [Arabidopsis thaliana] >gi|7270317|emb|CAB80085.1| putative
  misc_feature (38)..(438): Homolog of NCBI NO: 37703720 NR Description: putative aminotransferase AGD2 [Oryza sativa
  misc_feature (41)..(434): Homolog of NCBI NO: 37703722 NR Description: putative aminotransferase ALD1 [Oryza sativa
  misc_feature (41)..(434): Homolog of NCBI NO: 24414269 NR Description: Putative transaminase [Oryza sativa (japonica
  misc_feature (9)..(438): Homolog of NCBI NO: 18397344 NR Description: putative aspartate aminotransferase; protein id: supported by cDNA: gi_15982837 [Arabidopsis thaliana] At2g13810/F13J11.16 [Arabidopsis thaliana]
  misc_feature (36)..(438): Homolog of NCBI NO: 25315768 NR Description: probable aspartate aminotransferase [imported] -
  misc_feature (41)..(436): Homolog of NCBI NO: 24213476 NR Description: aminotransferase [Leptospira interrogans serovar str. 56601] >gi|24194250|gb|AAN47975.1|AE011264_3
  misc_feature (41)..(438): Homolog of NCBI NO: 23124300 NR Description: hypothetical protein [Nostoc punctiforme]

SEQ ID NO: 92922 - protein, 428 aa, Arabidopsis thaliana; identical to SEQ ID NO: 89166
  peptide (1)..(428): Ceres Seq. ID no. 12715898
  misc_feature (115)..(427): Pfam Name: Aminotransferase class I and II Pfam Description: Aminotransferase class I and II
  misc_feature (26)..(428): Homolog of NCBI NO: 18418270 NR Description: putative protein; protein id: At4g33680.1, by cDNA: gi_15912290, supported by cDNA: gi_17529043 [Arabidopsis >gi|15912291|gb|AAL08279.1| AT4g33680/T16L1_170 [Arabidopsis
  misc_feature (1)..(34): Homolog of NCBI NO: 18418270 NR Description: putative protein; protein id: At4g33680.1, by cDNA: gi_15912290, supported by cDNA: gi_17529043 [Arabidopsis >gi|15912291|gb|AAL08279.1| AT4g33680/T16L1_170 [Arabidopsis
  misc_feature (26)..(428): Homolog of NCBI NO: 7447845 NR Description: probable transaminase (EC 2.6.1.-) T16L1.170 - Arabidopsis thaliana >gi|3549670|emb|CAA20581.1| putative [Arabidopsis thaliana] >gi|7270317|emb|CAB80085.1| putative
  misc_feature (28)..(428): Homolog of NCBI NO: 37703720 NR Description: putative aminotransferase AGD2 [Oryza sativa
  misc_feature (31)..(424): Homolog of NCBI NO: 37703722 NR Description: putative aminotransferase ALD1 [Oryza sativa
  misc_feature (31)..(424): Homolog of NCBI NO: 24414269 NR Description: Putative transaminase [Oryza sativa (japonica
  misc_feature (1)..(428): Homolog of NCBI NO: 18397344 NR Description: putative aspartate aminotransferase; protein id: supported by cDNA: gi_15982837 [Arabidopsis thaliana] At2g13810/F13J11.16 [Arabidopsis thaliana]
  misc_feature (26)..(428): Homolog of NCBI NO: 25315768 NR Description: probable aspartate aminotransferase [imported] -
  misc_feature (31)..(426): Homolog of NCBI NO: 24213476 NR Description: aminotransferase [Leptospira interrogans serovar str. 56601] >gi|24194250|gb|AAN47975.1|AE011264_3
  misc_feature (31)..(428): Homolog of NCBI NO: 23124300 NR Description: hypothetical protein [Nostoc punctiforme]

SEQ ID NO: 92923 - DNA, 1645 bp, Arabidopsis thaliana; identical to SEQ ID NO: 89167
  misc_feature (1)..(1645): Ceres Seq. ID no. 12715909
  misc_feature: MA Experiment ID: 108434 Result: Up-regulated in Transcription
  misc_feature: MA Experiment 108434 PARAMETER Experiment Name: At_Root_Tips_cDNA_P Parameter: Tissue Value: Root Tips
  misc_feature: MA Experiment ID: 108573 Result: Down-regulated in Transcription
  misc_feature: MA Experiment 108573 PARAMETER Experiment Name: At_Drought_cDNA_P Parameter: Timepoint (hr) Value: 6
  misc_feature: MA Experiment 108573 PARAMETER Experiment Name: At_Drought_cDNA_P Parameter: Tissue Value: Aerial
  misc_feature: MA Experiment 108573 PARAMETER Experiment Name: At_Drought_cDNA_P Parameter: Treatment Value: Drought vs. No Drought
  misc_feature: MA Experiment ID: 20000182 Result: Down-regulated in Transcription
  misc_feature: MA Experiment 20000182 PARAMETER Experiment Name: At_2mM_SA_P Parameter: Age (day) Value: 14
  misc_feature: MA Experiment 20000182 PARAMETER Experiment Name: At_2mM_SA_P Parameter: Organism Value: A. thaliana
  misc_feature: MA Experiment 20000182 PARAMETER Experiment Name: At_2mM_SA_P Parameter: Plant Line Value: WS
  misc_feature: MA Experiment 20000182 PARAMETER Experiment Name: At_2mM_SA_P Parameter: Timepoint (hr) Value: 6
  misc_feature: MA Experiment 20000182 PARAMETER Experiment Name: At_2mM_SA_P Parameter: Tissue Value: Aerial
  misc_feature: MA Experiment 20000182 PARAMETER Experiment Name: At_2mM_SA_P Parameter: Treatment Value: 2mM SA vs. No Treatment
  misc_feature: MA Experiment ID: 20000184 Result: Down-regulated in Transcription
  misc_feature: MA Experiment 20000184 PARAMETER Experiment Name: At_Shoots__P Parameter: Age (day) Value: 7
  misc_feature: MA Experiment 20000184 PARAMETER Experiment Name: At_Shoots__P Parameter: Tissue Value: Shoots vs. Whole Plant
  misc_feature: MA Experiment ID: 20000227 Result: Up-regulated in Transcription
  misc_feature: MA Experiment 20000227 PARAMETER Experiment Name: At_Root-Tips-vs-Tops_P Parameter: Tissue Value: Root Tips vs. Root Tops
  misc_feature: MA Experiment ID: 20000234 Result: Up-regulated in Transcription
  misc_feature: MA Experiment 20000234 PARAMETER Experiment Name: At_Siliques_P Parameter: Age (day) Value: 21
  misc_feature: MA Experiment 20000234 PARAMETER Experiment Name: At_Siliques_P Parameter: Organism Value: A. thaliana
  misc_feature: MA Experiment 20000234 PARAMETER Experiment Name: At_Siliques_P Parameter: Plant Line Value: WS
  misc_feature: MA Experiment 20000234 PARAMETER Experiment Name: At_Siliques_P Parameter: Tissue Value: Less Than 5mm Siliques vs. Whole Plant
  misc_feature: MA Experiment ID: 20000235 Result: Up-regulated in Transcription
  misc_feature: MA Experiment 20000235 PARAMETER Experiment Name: At_Siliques_P Parameter: Age (day) Value: 21
  misc_feature: MA Experiment 20000235 PARAMETER Experiment Name: At_Siliques_P Parameter: Organism Value: A. thaliana
  misc_feature: MA Experiment 20000235 PARAMETER Experiment Name: At_Siliques_P Parameter: Plant Line Value: WS
  misc_feature: MA Experiment 20000235 PARAMETER Experiment Name: At_Siliques_P Parameter: Tissue Value: 5-10mm Siliques vs. Whole Plant
  misc_feature: MA Experiment ID: 20000264 Result: Up-regulated in Transcription
  misc_feature: MA Experiment 20000264 PARAMETER Experiment Name: At_Open_Flower_P Parameter: Age (day) Value: 21
  misc_feature: MA Experiment 20000264 PARAMETER Experiment Name: At_Open_Flower_P Parameter: Plant Line Value: WS
  misc_feature: MA Experiment 20000264 PARAMETER Experiment Name: At_Open_Flower_P Parameter: Tissue Value: Open Flower vs. Whole Plant
  misc_feature: MA Experiment ID: 20000286 Result: Up-regulated in Transcription
  misc_feature: MA Experiment 20000286 PARAMETER Experiment Name: At_Open_Flower_P Parameter: Age (day) Value: 21
  misc_feature: MA Experiment 20000286 PARAMETER Experiment Name: At_Open_Flower_P Parameter: Plant Line Value: WS
  misc_feature: MA Experiment 20000286 PARAMETER Experiment Name: At_Open_Flower_P Parameter: Tissue Value: Half Open vs. Whole Plant
  misc_feature: MA Experiment ID: 20000438 Result: Down-regulated in Transcription
  misc_feature: MA Experiment 20000438 PARAMETER Experiment Name: At_Shoots__P Parameter: Age (day) Value: 14
  misc_feature: MA Experiment 20000438 PARAMETER Experiment Name: At_Shoots__P Parameter: Tissue Value: Shoots vs. Whole Plant
  misc_feature: MA Experiment ID: 20000439 Result: Down-regulated in Transcription
  misc_feature: MA Experiment 20000439 PARAMETER Experiment Name: At_Roots__P Parameter: Age (day) Value: 14 vs. 21
  misc_feature: MA Experiment 20000439 PARAMETER Experiment Name: At_Roots__P Parameter: Organism Value: A. thaliana
  misc_feature: MA Experiment 20000439 PARAMETER Experiment Name: At_Roots__P Parameter: Tissue Value: Roots vs. Whole Plant
  misc_feature: MA Experiment ID: 20000441 Result: Down-regulated in Transcription
  misc_feature: MA Experiment 20000441 PARAMETER Experiment Name: At_1uM_BR-BRZ__P Parameter: Tissue Value: Shoot Apices
  misc_feature: MA Experiment 20000441 PARAMETER Experiment Name: At_1uM_BR-BRZ__P Parameter: Treatment Value: 1uM BR vs. No Treatment
  misc_feature: MA Experiment ID: 20000443 Result: Down-regulated in Transcription
  misc_feature: MA Experiment 20000443 PARAMETER Experiment Name: At_1uM_BR-BRZ__P Parameter: Tissue Value: Shoot Apices
  misc_feature: MA Experiment 20000443 PARAMETER Experiment Name: At_1uM_BR-BRZ__P Parameter: Treatment Value: 1uM BRZ vs. No Treatment
  misc_feature: MA Experiment ID: 20000451 Result: Down-regulated in Transcription
  misc_feature: MA Experiment 20000451 PARAMETER Experiment Name: At_CS6879_Shoots-Roots_P Parameter: Age (day) Value: 14
  misc_feature: MA Experiment 20000451 PARAMETER Experiment Name: At_CS6879_Shoots-Roots_P Parameter: Organism Value: A. thaliana
  misc_feature: MA Experiment 20000451 PARAMETER Experiment Name: At_CS6879_Shoots-Roots_P Parameter: Plant Line Value: CS6879 vs. WS
  misc_feature: MA Experiment 20000451 PARAMETER Experiment Name: At_CS6879_Shoots-Roots_P Parameter: Tissue Value: Roots
  misc_feature: MA Experiment ID: 20000527 Result: Down-regulated in Transcription
  misc_feature: MA Experiment 20000527 PARAMETER Experiment Name: At_10percent_PEG_P Parameter: Age (day) Value: 20
  misc_feature: MA Experiment 20000527 PARAMETER Experiment Name: At_10percent_PEG_P Parameter: Organism Value: A. thaliana
  misc_feature: MA Experiment 20000527 PARAMETER Experiment Name: At_10percent_PEG_P Parameter: Plant Line Value: WS
  misc_feature: MA Experiment 20000527 PARAMETER Experiment Name: At_10percent_PEG_P Parameter: Timepoint (day) Value: 20
  misc_feature: MA Experiment 20000527 PARAMETER Experiment Name: At_10percent_PEG_P Parameter: Tissue Value: Whole Plant
  misc_feature: MA Experiment 20000527 PARAMETER Experiment Name: At_10percent_PEG_P Parameter: Treatment Value: 10percent PEG vs. No Treatment
  misc_feature: MA Experiment ID: 20001558 Result: Up-regulated in Transcription
  misc_feature: MA Experiment 20001558 PARAMETER Experiment Name: At_Drought_Soil_Dry_P Parameter: Age (day) Value: 27
  misc_feature: MA Experiment 20001558 PARAMETER Experiment Name: At_Drought_Soil_Dry_P Parameter: Organism Value: A. thaliana
  misc_feature: MA Experiment 20001558 PARAMETER Experiment Name: At_Drought_Soil_Dry_P Parameter: Plant Line Value: WS
  misc_feature: MA Experiment 20001558 PARAMETER Experiment Name: At_Drought_Soil_Dry_P Parameter: Post Timepoint (hr) Value: 6
  misc_feature: MA Experiment 20001558 PARAMETER Experiment Name: At_Drought_Soil_Dry_P Parameter: Post-Treatment Value: Re-Water vs. No Drought
  misc_feature: MA Experiment 20001558 PARAMETER Experiment Name: At_Drought_Soil_Dry_P Parameter: Timepoint (day) Value: 13
  misc_feature: MA Experiment 20001558 PARAMETER Experiment Name: At_Drought_Soil_Dry_P Parameter: Treatment Value: Drought vs. No Drought
  misc_feature: MA Experiment ID: 20001560 Result: Up-regulated in Transcription
  misc_feature: MA Experiment 20001560 PARAMETER Experiment Name: At_Drought_Soil_Dry_P Parameter: Age (day) Value: 28
  misc_feature: MA Experiment 20001560 PARAMETER Experiment Name: At_Drought_Soil_Dry_P Parameter: Organism Value: A. thaliana
  misc_feature: MA Experiment 20001560 PARAMETER Experiment Name: At_Drought_Soil_Dry_P Parameter: Plant Line Value: WS
  misc_feature: MA Experiment 20001560 PARAMETER Experiment Name: At_Drought_Soil_Dry_P Parameter: Post Timepoint (hr) Value: None
  misc_feature: MA Experiment 20001560 PARAMETER Experiment Name: At_Drought_Soil_Dry_P Parameter: Post-Treatment Value: None
  misc_feature: MA Experiment 20001560 PARAMETER Experiment Name: At_Drought_Soil_Dry_P Parameter: Timepoint (day) Value: 14
  misc_feature: MA Experiment 20001560 PARAMETER Experiment Name: At_Drought_Soil_Dry_P Parameter: Treatment Value: Drought vs. No Drought
  misc_feature: MA Experiment ID: 20001768 Result: Up-regulated in Transcription
  misc_feature: MA Experiment 20001768 PARAMETER Experiment Name: At_Far-red-enriched-adult_P Parameter: Age (day) Value: 28
  misc_feature: MA Experiment 20001768 PARAMETER Experiment Name: At_Far-red-enriched-adult_P Parameter: Light Value: Far-red enriched vs. White
  misc_feature: MA Experiment 20001768 PARAMETER Experiment Name: At_Far-red-enriched-adult_P Parameter: Organism Value: A. thaliana
  misc_feature: MA Experiment 20001768 PARAMETER Experiment Name: At_Far-red-enriched-adult_P Parameter: Plant Line Value: Columbia
  misc_feature: MA Experiment 20001768 PARAMETER Experiment Name: At_Far-red-enriched-adult_P Parameter: Timepoint (hr) Value: 1
  misc_feature: MA Experiment 20001768 PARAMETER Experiment Name: At_Far-red-enriched-adult_P Parameter: Tissue Value: Aerial
  misc_feature: MA Experiment ID: 20001771 Result: Up-regulated in Transcription
  misc_feature: MA Experiment 20001771 PARAMETER Experiment Name: At_Far-red-enriched-adult_P Parameter: Age (day) Value: 28
  misc_feature: MA Experiment 20001771 PARAMETER Experiment Name: At_Far-red-enriched-adult_P Parameter: Light Value: Far-red enriched vs. White
  misc_feature: MA Experiment 20001771 PARAMETER Experiment Name: At_Far-red-enriched-adult_P Parameter: Organism Value: A. thaliana
  misc_feature: MA Experiment 20001771 PARAMETER Experiment Name: At_Far-red-enriched-adult_P Parameter: Plant Line Value: Columbia
  misc_feature: MA Experiment 20001771 PARAMETER Experiment Name: At_Far-red-enriched-adult_P Parameter: Timepoint (hr) Value: 16
  misc_feature: MA Experiment 20001771 PARAMETER Experiment Name: At_Far-red-enriched-adult_P Parameter: Tissue Value: Aerial
  misc_feature: MA Experiment ID: 20001773 Result: Up-regulated in Transcription
  misc_feature: MA Experiment 20001773 PARAMETER Experiment Name: At_Far-red-enriched-adult_P Parameter: Age (day) Value: 30
  misc_feature: MA Experiment 20001773 PARAMETER Experiment Name: At_Far-red-enriched-adult_P Parameter: Light Value: Far-red enriched vs. White
  misc_feature: MA Experiment 20001773 PARAMETER Experiment Name: At_Far-red-enriched-adult_P Parameter: Organism Value: A. thaliana
  misc_feature: MA Experiment 20001773 PARAMETER Experiment Name: At_Far-red-enriched-adult_P Parameter: Plant Line Value: Columbia
  misc_feature: MA Experiment 20001773 PARAMETER Experiment Name: At_Far-red-enriched-adult_P Parameter: Timepoint (hr) Value: 48
  misc_feature: MA Experiment 20001773 PARAMETER Experiment Name: At_Far-red-enriched-adult_P Parameter: Tissue Value: Aerial
  misc_feature: MA Experiment ID: 20001906 Result: Down-regulated in Transcription
  misc_feature: MA Experiment 20001906 PARAMETER Experiment Name: At_Drought_Reproduction_P Parameter: Age (day) Value: 35
  misc_feature: MA Experiment 20001906 PARAMETER Experiment Name: At_Drought_Reproduction_P Parameter: Organism Value: A. thaliana
  misc_feature: MA Experiment 20001906 PARAMETER Experiment Name: At_Drought_Reproduction_P Parameter: Plant Line Value: WS
  misc_feature: MA Experiment 20001906 PARAMETER Experiment Name: At_Drought_Reproduction_P Parameter: Timepoint (day) Value: 5
  misc_feature: MA Experiment 20001906 PARAMETER Experiment Name: At_Drought_Reproduction_P Parameter: Tissue Value: Siliques
  misc_feature: MA Experiment 20001906 PARAMETER Experiment Name: At_Drought_Reproduction_P Parameter: Treatment Value: Drought vs. No Drought
  misc_feature: MA Experiment ID: 20001908 Result: Down-regulated in Transcription
  misc_feature: MA Experiment 20001908 PARAMETER Experiment Name: At_Drought_Reproduction_P Parameter: Age (day) Value: 40
  misc_feature: MA Experiment 20001908 PARAMETER Experiment Name: At_Drought_Reproduction_P Parameter: Organism Value: A. thaliana
  misc_feature: MA Experiment 20001908 PARAMETER Experiment Name: At_Drought_Reproduction_P Parameter: Plant Line Value: WS
  misc_feature: MA Experiment 20001908 PARAMETER Experiment Name: At_Drought_Reproduction_P Parameter: Timepoint (day) Value: 10
  misc_feature: MA Experiment 20001908 PARAMETER Experiment Name: At_Drought_Reproduction_P Parameter: Tissue Value: Siliques
  misc_feature: MA Experiment 20001908 PARAMETER Experiment Name: At_Drought_Reproduction_P Parameter: Treatment Value: Drought vs. No Drought
  misc_feature: MA Experiment ID: 20001911 Result: Down-regulated in Transcription
  misc_feature: MA Experiment 20001911 PARAMETER Experiment Name: At_Drought_Reproduction_P Parameter: Age (day) Value: 40
  misc_feature: MA Experiment 20001911 PARAMETER Experiment Name: At_Drought_Reproduction_P Parameter: Organism Value: A. thaliana
  misc_feature: MA Experiment 20001911 PARAMETER Experiment Name: At_Drought_Reproduction_P Parameter: Plant Line Value: WS
  misc_feature: MA Experiment 20001911 PARAMETER Experiment Name: At_Drought_Reproduction_P Parameter: Timepoint (day) Value: 10
  misc_feature: MA Experiment 20001911 PARAMETER Experiment Name: At_Drought_Reproduction_P Parameter: Tissue Value: Flowers
  misc_feature: MA Experiment 20001911 PARAMETER Experiment Name: At_Drought_Reproduction_P Parameter: Treatment Value: Drought vs. No Drought

SEQ ID NO: 92924 - protein, 510 aa, Arabidopsis thaliana; identical to SEQ ID NO: 89168
  peptide (1)..(510): Ceres Seq. ID no. 12715910
  misc_feature (308)..(510): Pfam Name: Male sterility protein Pfam Description: Male sterility protein
  misc_feature (41)..(510): Homolog of NCBI NO: 16323107 NR Description: AT4g33790/T16L1_280 [Arabidopsis thaliana]
  misc_feature (53)..(510): Homolog of NCBI NO: 25354587 NR Description: male sterility 2-like protein [imported] -
  misc_feature (48)..(510): Homolog of NCBI NO: 7487952 NR Description: male sterility protein 2 homolog T16L1.280 -
  misc_feature (131)..(510): Homolog of NCBI NO: 30689818 NR Description: male sterility 2-related protein [Arabidopsis
  misc_feature (41)..(509): Homolog of NCBI NO: 5020215 NR Description: acyl CoA reductase [Simmondsia chinensis]
  misc_feature (41)..(509): Homolog of NCBI NO: 15242260 NR Description: male sterility 2-like protein (emb|CAA68191.1); id: At5g22500.1, supported by cDNA: gi_14334737, supported by
  misc_feature (43)..(509): Homolog of NCBI NO: 11357157 NR Description: acyl CoA reductase-protein - Arabidopsis thaliana
  misc_feature (41)..(509): Homolog of NCBI NO: 35215152 NR Description: putative fatty acyl coA reductase [Oryza sativa
  misc_feature (41)..(390): Homolog of NCBI NO: 15229993 NR Description: acyl CoA reductase -like protein; protein id:
  misc_feature (434)..(509): Homolog of NCBI NO: 15229993 NR Description: acyl CoA reductase -like protein; protein id:

SEQ ID NO: 92925 - protein, 380 aa, Arabidopsis thaliana; identical to SEQ ID NO: 27534
  peptide (1)..(380): Ceres Seq. ID no. 12715911
  misc_feature (178)..(380): Pfam Name: Male sterility protein Pfam Description: Male sterility protein
  misc_feature (1)..(380): Homolog of NCBI NO: 16323107 NR Description: AT4g33790/T16L1_280 [Arabidopsis thaliana]
  misc_feature (1)..(380): Homolog of NCBI NO: 25354587 NR Description: male sterility 2-like protein [imported] -
  misc_feature (1)..(380): Homolog of NCBI NO: 7487952 NR Description: male sterility protein 2 homolog T16L1.280 -
  misc_feature (1)..(380): Homolog of NCBI NO: 30689818 NR Description: male sterility 2-related protein [Arabidopsis
  misc_feature (1)..(379): Homolog of NCBI NO: 5020215 NR Description: acyl CoA reductase [Simmondsia chinensis]
  misc_feature (1)..(379): Homolog of NCBI NO: 15242260 NR Description: male sterility 2-like protein (emb|CAA68191.1); id: At5g22500.1, supported by cDNA: gi_14334737, supported by
  misc_feature (1)..(379): Homolog of NCBI NO: 11357157 NR Description: acyl CoA reductase-protein - Arabidopsis thaliana
  misc_feature (1)..(379): Homolog of NCBI NO: 35215152 NR Description: putative fatty acyl coA reductase [Oryza sativa
  misc_feature (1)..(260): Homolog of NCBI NO: 15229993 NR Description: acyl CoA reductase -like protein; protein id:
  misc_feature (304)..(379): Homolog of NCBI NO: 15229993 NR Description: acyl CoA reductase -like protein; protein id:

SEQ ID NO: 92926 - protein, 316 aa, Arabidopsis thaliana; identical to SEQ ID NO: 89170
  peptide (1)..(316): Ceres Seq. ID no. 12715912
  misc_feature (114)..(316): Pfam Name: Male sterility protein Pfam Description: Male sterility protein
  misc_feature (1)..(316): Homolog of NCBI NO: 16323107 NR Description: AT4g33790/T16L1_280 [Arabidopsis thaliana]
  misc_feature (1)..(316): Homolog of NCBI NO: 25354587 NR Description: male sterility 2-like protein [imported] -
  misc_feature (1)..(316): Homolog of NCBI NO: 7487952 NR Description: male sterility protein 2 homolog T16L1.280 -
  misc_feature (1)..(316): Homolog of NCBI NO: 30689818 NR Description: male sterility 2-related protein [Arabidopsis
  misc_feature (1)..(315): Homolog of NCBI NO: 5020215 NR Description: acyl CoA reductase [Simmondsia chinensis]
  misc_feature (1)..(315): Homolog of NCBI NO: 15242260 NR Description: male sterility 2-like protein (emb|CAA68191.1); id: At5g22500.1, supported by cDNA: gi_14334737, supported by
  misc_feature (1)..(315): Homolog of NCBI NO: 11357157 NR Description: acyl CoA reductase-protein - Arabidopsis thaliana
  misc_feature (1)..(315): Homolog of NCBI NO: 35215152 NR Description: putative fatty acyl coA reductase [Oryza sativa
  misc_feature (1)..(196): Homolog of NCBI NO: 15229993 NR Description: acyl CoA reductase -like protein; protein id:
  misc_feature (240)..(315): Homolog of NCBI NO: 15229993 NR Description: acyl CoA reductase -like protein; protein id:

SEQ ID NO: 92927 - DNA, 1055 bp, Arabidopsis thaliana; identical to SEQ ID NO: 89171
  misc_feature (1)..(1055): Ceres Seq. ID no. 12715924
  misc_feature: MA Experiment ID: 108434 Result: Down-regulated in Transcription
  misc_feature: MA Experiment 108434 PARAMETER Experiment Name: At_Root_Tips_cDNA_P Parameter: Tissue Value: Root Tips
  misc_feature: MA Experiment ID: 108488 Result: Down-regulated in Transcription
  misc_feature: MA Experiment ID: 108573 Result: Up-regulated in Transcription
  misc_feature: MA Experiment 108573 PARAMETER Experiment Name: At_Drought_cDNA_P Parameter: Timepoint (hr) Value: 6
  misc_feature: MA Experiment 108573 PARAMETER Experiment Name: At_Drought_cDNA_P Parameter: Tissue Value: Aerial
  misc_feature: MA Experiment 108573 PARAMETER Experiment Name: At_Drought_cDNA_P Parameter: Treatment Value: Drought vs. No Drought
  misc_feature: MA Experiment ID: 108668 Result: Up-regulated in Transcription
  misc_feature: MA Experiment 108668 PARAMETER Experiment Name: At_2mM_SA_cDNA_P Parameter: Plant Line Value: WS
  misc_feature: MA Experiment 108668 PARAMETER Experiment Name: At_2mM_SA_cDNA_P Parameter: Timepoint (hr) Value: 6
  misc_feature: MA Experiment 108668 PARAMETER Experiment Name: At_2mM_SA_cDNA_P Parameter: Treatment Value: 2mM SA vs. No Treatment
  misc_feature: MA Experiment ID: 20000069 Result: Up-regulated in Transcription
  misc_feature: MA Experiment 20000069 PARAMETER Experiment Name: At_100uM_ABA_Mutants_cDNA_P Parameter: Plant Line Value: CS23
  misc_feature: MA Experiment 20000069 PARAMETER Experiment Name: At_100uM_ABA_Mutants_cDNA_P Parameter: Timepoint (hr) Value: 6
  misc_feature: MA Experiment 20000069 PARAMETER Experiment Name: At_100uM_ABA_Mutants_cDNA_P Parameter: Tissue Value: Aerial
  misc_feature: MA Experiment 20000069 PARAMETER Experiment Name: At_100uM_ABA_Mutants_cDNA_P Parameter: Treatment Value: 100uM ABA vs. No Treatment
  misc_feature: MA Experiment ID: 20000070 Result: Up-regulated in Transcription
  misc_feature: MA Experiment 20000070 PARAMETER Experiment Name: At_100uM_ABA_Mutants_cDNA_P Parameter: Plant Line Value: CS24
  misc_feature: MA Experiment 20000070 PARAMETER Experiment Name: At_100uM_ABA_Mutants_cDNA_P Parameter: Timepoint (hr) Value: 6
  misc_feature: MA Experiment 20000070 PARAMETER Experiment Name: At_100uM_ABA_Mutants_cDNA_P Parameter: Tissue Value: Aerial
  misc_feature: MA Experiment 20000070 PARAMETER Experiment Name: At_100uM_ABA_Mutants_cDNA_P Parameter: Treatment Value: 100uM ABA vs. No Treatment
  misc_feature: MA Experiment ID: 20000072 Result: Up-regulated in Transcription
  misc_feature: MA Experiment 20000072 PARAMETER Experiment Name: At_100uM_ABA_Mutants_cDNA_P Parameter: Plant Line Value: CS8105
  misc_feature: MA Experiment 20000072 PARAMETER Experiment Name: At_100uM_ABA_Mutants_cDNA_P Parameter: Timepoint (hr) Value: 6
  misc_feature: MA Experiment 20000072 PARAMETER Experiment Name: At_100uM_ABA_Mutants_cDNA_P Parameter: Tissue Value: Aerial
  misc_feature: MA Experiment 20000072 PARAMETER Experiment Name: At_100uM_ABA_Mutants_cDNA_P Parameter: Treatment Value: 100uM ABA vs. No Treatment
  misc_feature: MA Experiment ID: 20000086 Result: Up-regulated in Transcription
  misc_feature: MA Experiment 20000086 PARAMETER Experiment Name: At_100uM_ABA_Mutants_cDNA_P Parameter: Plant Line Value: CS22
  misc_feature: MA Experiment 20000086 PARAMETER Experiment Name: At_100uM_ABA_Mutants_cDNA_P Parameter: Timepoint (hr) Value: 6
  misc_feature: MA Experiment 20000086 PARAMETER Experiment Name: At_100uM_ABA_Mutants_cDNA_P Parameter: Tissue Value: Aerial
  misc_feature: MA Experiment 20000086 PARAMETER Experiment Name: At_100uM_ABA_Mutants_cDNA_P Parameter: Treatment Value: 100uM ABA vs. No Treatment
  misc_feature: MA Experiment ID: 20000087 Result: Up-regulated in Transcription
  misc_feature: MA Experiment 20000087 PARAMETER Experiment Name: At_100uM_ABA_Mutants_cDNA_P Parameter: Plant Line Value: WS
  misc_feature: MA Experiment 20000087 PARAMETER Experiment Name: At_100uM_ABA_Mutants_cDNA_P Parameter: Timepoint (hr) Value: 6
  misc_feature: MA Experiment 20000087 PARAMETER Experiment Name: At_100uM_ABA_Mutants_cDNA_P Parameter: Tissue Value: Aerial
  misc_feature: MA Experiment 20000087 PARAMETER Experiment Name: At_100uM_ABA_Mutants_cDNA_P Parameter: Treatment Value: 100uM ABA vs. No Treatment
  misc_feature: MA Experiment ID: 20000090 Result: Up-regulated in Transcription
  misc_feature: MA Experiment ID: 20000117 Result: Up-regulated in Transcription
  misc_feature: MA Experiment 20000117 PARAMETER Experiment Name: At_100uM_ABA_Mutants_cDNA_P Parameter: Plant Line Value: Columbia
  misc_feature: MA Experiment 20000117 PARAMETER Experiment Name: At_100uM_ABA_Mutants_cDNA_P Parameter: Timepoint (hr) Value: 6
  misc_feature: MA Experiment 20000117 PARAMETER Experiment Name: At_100uM_ABA_Mutants_cDNA_P Parameter: Tissue Value: Aerial
  misc_feature: MA Experiment 20000117 PARAMETER Experiment Name: At_100uM_ABA_Mutants_cDNA_P Parameter: Treatment Value: 100uM ABA vs. No Treatment
  misc_feature: MA Experiment ID: 20000182 Result: Up-regulated in Transcription
  misc_feature: MA Experiment 20000182 PARAMETER Experiment Name: At_2mM_SA_P Parameter: Age (day) Value: 14
  misc_feature: MA Experiment 20000182 PARAMETER Experiment Name: At_2mM_SA_P Parameter: Organism Value: A. thaliana
  misc_feature: MA Experiment 20000182 PARAMETER Experiment Name: At_2mM_SA_P Parameter: Plant Line Value: WS
  misc_feature: MA Experiment 20000182 PARAMETER Experiment Name: At_2mM_SA_P Parameter: Timepoint (hr) Value: 6
  misc_feature: MA Experiment 20000182 PARAMETER Experiment Name: At_2mM_SA_P Parameter: Tissue Value: Aerial
  misc_feature: MA Experiment 20000182 PARAMETER Experiment Name: At_2mM_SA_P Parameter: Treatment Value: 2mM SA vs. No Treatment
  misc_feature: MA Experiment ID: 20000227 Result: Down-regulated in Transcription
  misc_feature: MA Experiment 20000227 PARAMETER Experiment Name: At_Root-Tips-vs-Tops_P Parameter: Tissue Value: Root Tips vs. Root Tops
  misc_feature: MA Experiment ID: 20000234 Result: Down-regulated in Transcription
  misc_feature: MA Experiment 20000234 PARAMETER Experiment Name: At_Siliques_P Parameter: Age (day) Value: 21
  misc_feature: MA Experiment 20000234 PARAMETER Experiment Name: At_Siliques_P Parameter: Organism Value: A. thaliana
  misc_feature: MA Experiment 20000234 PARAMETER Experiment Name: At_Siliques_P Parameter: Plant Line Value: WS
  misc_feature: MA Experiment 20000234 PARAMETER Experiment Name: At_Siliques_P Parameter: Tissue Value: Less Than 5mm Siliques vs. Whole Plant
  misc_feature: MA Experiment ID: 20000235 Result: Down-regulated in Transcription
  misc_feature: MA Experiment 20000235 PARAMETER Experiment Name: At_Siliques_P Parameter: Age (day) Value: 21
  misc_feature: MA Experiment 20000235 PARAMETER Experiment Name: At_Siliques_P Parameter: Organism Value: A. thaliana
  misc_feature: MA Experiment 20000235 PARAMETER Experiment Name: At_Siliques_P Parameter: Plant Line Value: WS
  misc_feature: MA Experiment 20000235 PARAMETER Experiment Name: At_Siliques_P Parameter: Tissue Value: 5-10mm Siliques vs. Whole Plant
  misc_feature: MA Experiment ID: 20000265 Result: Down-regulated in Transcription
  misc_feature: MA Experiment 20000265 PARAMETER Experiment Name: At_Open_Flower_P Parameter: Age (day) Value: 21
  misc_feature: MA Experiment 20000265 PARAMETER Experiment Name: At_Open_Flower_P Parameter: Plant Line Value: WS
  misc_feature: MA Experiment 20000265 PARAMETER Experiment Name: At_Open_Flower_P Parameter: Tissue Value: Closed Flower vs. Whole Plant
  misc_feature: MA Experiment ID: 20000438 Result: Down-regulated in Transcription
  misc_feature: MA Experiment 20000438 PARAMETER Experiment Name: At_Shoots__P Parameter: Age (day) Value: 14
  misc_feature: MA Experiment 20000438 PARAMETER Experiment Name: At_Shoots__P Parameter: Tissue Value: Shoots vs. Whole Plant
  misc_feature: MA Experiment ID: 20000794 Result: Up-regulated in Transcription
  misc_feature: MA Experiment 20000794 PARAMETER Experiment Name: At_Petals_P Parameter: Age (day) Value: 23-25 days
  misc_feature: MA Experiment 20000794 PARAMETER Experiment Name: At_Petals_P Parameter: Plant Line Value: WS
  misc_feature: MA Experiment 20000794 PARAMETER Experiment Name: At_Petals_P Parameter: Tissue Value: Petals vs. Whole plant
  misc_feature: MA Experiment ID: 20001911 Result: Up-regulated in Transcription
  misc_feature: MA Experiment 20001911 PARAMETER Experiment Name: At_Drought_Reproduction_P Parameter: Age (day) Value: 40
  misc_feature: MA Experiment 20001911 PARAMETER Experiment Name: At_Drought_Reproduction_P Parameter: Organism Value: A. thaliana
  misc_feature: MA Experiment 20001911 PARAMETER Experiment Name: At_Drought_Reproduction_P Parameter: Plant Line Value: WS
  misc_feature: MA Experiment 20001911 PARAMETER Experiment Name: At_Drought_Reproduction_P Parameter: Timepoint (day) Value: 10
  misc_feature: MA Experiment 20001911 PARAMETER Experiment Name: At_Drought_Reproduction_P Parameter: Tissue Value: Flowers
  misc_feature: MA Experiment 20001911 PARAMETER Experiment Name: At_Drought_Reproduction_P Parameter: Treatment Value: Drought vs. No Drought

SEQ ID NO: 92928 - protein, 255 aa, Arabidopsis thaliana; identical to SEQ ID NO: 28120
  peptide (1)..(255): Ceres Seq. ID no. 12715925
  misc_feature (40)..(241): Pfam Name: Putative cyclase Pfam Description: Putative cyclase
  misc_feature (1)..(255): Homolog of NCBI NO: 18418393 NR Description: putative protein; protein id: At4g34180.1, by cDNA: 8686., supported by cDNA: gi_14335097, supported by gi_16226602 [Arabidopsis thaliana] >gi|14335098|gb|AAK59828.1|
  misc_feature (1)..(214): Homolog of NCBI NO: 7486287 NR Description: hypothetical protein F28A23.60 - Arabidopsis >gi|2911044|emb|CAA17554.1| putative protein [Arabidopsis >gi|7270368|emb|CAB80135.1| putative protein [Arabidopsis
  misc_feature (26)..(255): Homolog of NCBI NO: 15219416 NR Description: hypothetical protein; protein id: At1g44542.1 thaliana] >gi|13876507|gb|AAK43483.1|AC084807_8 hypothetical
  misc_feature (25)..(254): Homolog of NCBI NO: 18418598 NR Description: putative protein; protein id: At4g35220.1, by cDNA: 1368., supported by cDNA: gi_13937203, supported by gi_18491126 [Arabidopsis thaliana]
  misc_feature (21)..(255): Homolog of NCBI NO: 35215089 NR Description: hypothetical protein [Oryza sativa (japonica
  misc_feature (25)..(133): Homolog of NCBI NO: 7486023 NR Description: hypothetical protein F23E12.220 - Arabidopsis >gi|3080428|emb|CAA18747.1| putative protein [Arabidopsis >gi|7270474|emb|CAB80239.1| putative protein [Arabidopsis
  misc_feature (41)..(255): Homolog of NCBI NO: 23016903 NR Description: hypothetical protein [Magnetospirillum
  misc_feature (40)..(253): Homolog of NCBI NO: 16330650 NR Description: hypothetical protein [Synechocystis sp. PCC 6803]
  misc_feature (40)..(253): Homolog of NCBI NO: 23056289 NR Description: hypothetical protein [Geobacter metallireducens]
  misc_feature (39)..(253): Homolog of NCBI NO: 39998438 NR Description: cyclase, putative [Geobacter sulfurreducens PCA]

SEQ ID NO: 92929 - protein, 185 aa, Arabidopsis thaliana; identical to SEQ ID NO: 28121
  peptide (1)..(185): Ceres Seq. ID no. 12715926
  misc_feature (1)..(171): Pfam Name: Putative cyclase Pfam Description: Putative cyclase
  misc_feature (1)..(185): Homolog of NCBI NO: 18418393 NR Description: putative protein; protein id: At4g34180.1, by cDNA: 8686., supported by cDNA: gi_14335097, supported by gi_16226602 [Arabidopsis thaliana] >gi|14335098|gb|AAK59828.1|
  misc_feature (1)..(144): Homolog of NCBI NO: 7486287 NR Description: hypothetical protein F28A23.60 - Arabidopsis >gi|2911044|emb|CAA17554.1| putative protein [Arabidopsis >gi|7270368|emb|CAB80135.1| putative protein [Arabidopsis
  misc_feature (1)..(185): Homolog of NCBI NO: 15219416 NR Description: hypothetical protein; protein id: At1g44542.1 thaliana] >gi|13876507|gb|AAK43483.1|AC084807_8 hypothetical
  misc_feature (1)..(184): Homolog of NCBI NO: 18418598 NR Description: putative protein; protein id: At4g35220.1, by cDNA: 1368., supported by cDNA: gi_13937203, supported by gi_18491126 [Arabidopsis thaliana]
  misc_feature (1)..(185): Homolog of NCBI NO: 35215089 NR Description: hypothetical protein [Oryza sativa (japonica
  misc_feature (1)..(63): Homolog of NCBI NO: 7486023 NR Description: hypothetical protein F23E12.220 - Arabidopsis >gi|3080428|emb|CAA18747.1| putative protein [Arabidopsis >gi|7270474|emb|CAB80239.1| putative protein [Arabidopsis
  misc_feature (1)..(185): Homolog of NCBI NO: 23016903 NR Description: hypothetical protein [Magnetospirillum
  misc_feature (1)..(183): Homolog of NCBI NO: 16330650 NR Description: hypothetical protein [Synechocystis sp. PCC 6803]
  misc_feature (1)..(183): Homolog of NCBI NO: 23056289 NR Description: hypothetical protein [Geobacter metallireducens]
  misc_feature (1)..(183): Homolog of NCBI NO: 39998438 NR Description: cyclase, putative [Geobacter sulfurreducens PCA]

SEQ ID NO: 92930 - protein, 174 aa, Arabidopsis thaliana; identical to SEQ ID NO: 28122
  peptide (1)..(174): Ceres Seq. ID no. 12715927
  misc_feature (1)..(160): Pfam Name: Putative cyclase Pfam Description: Putative cyclase
  misc_feature (1)..(174): Homolog of NCBI NO: 18418393 NR Description: putative protein; protein id: At4g34180.1, by cDNA: 8686., supported by cDNA: gi_14335097, supported by gi_16226602 [Arabidopsis thaliana] >gi|14335098|gb|AAK59828.1|
  misc_feature (1)..(133): Homolog of NCBI NO: 7486287 NR Description: hypothetical protein F28A23.60 - Arabidopsis >gi|2911044|emb|CAA17554.1| putative protein [Arabidopsis >gi|7270368|emb|CAB80135.1| putative protein [Arabidopsis
  misc_feature (1)..(174): Homolog of NCBI NO: 15219416 NR Description: hypothetical protein; protein id: At1g44542.1 thaliana] >gi|13876507|gb|AAK43483.1|AC084807_8 hypothetical
  misc_feature (1)..(173): Homolog of NCBI NO: 18418598 NR Description: putative protein; protein id: At4g35220.1, by cDNA: 1368., supported by cDNA: gi_13937203, supported by gi_18491126 [Arabidopsis thaliana]
  misc_feature (1)..(174): Homolog of NCBI NO: 35215089 NR Description: hypothetical protein [Oryza sativa (japonica
  misc_feature (1)..(52): Homolog of NCBI NO: 7486023 NR Description: hypothetical protein F23E12.220 - Arabidopsis >gi|3080428|emb|CAA18747.1| putative protein [Arabidopsis >gi|7270474|emb|CAB80239.1| putative protein [Arabidopsis
  misc_feature (1)..(174): Homolog of NCBI NO: 23016903 NR Description: hypothetical protein [Magnetospirillum
  misc_feature (1)..(172): Homolog of NCBI NO: 16330650 NR Description: hypothetical protein [Synechocystis sp. PCC 6803]
  misc_feature (1)..(172): Homolog of NCBI NO: 23056289 NR Description: hypothetical protein [Geobacter metallireducens]
  misc_feature (1)..(172): Homolog of NCBI NO: 39998438 NR Description: cyclase, putative [Geobacter sulfurreducens PCA]

SEQ ID NO: 92931 - DNA, 1075 bp, Arabidopsis thaliana; identical to SEQ ID NO: 89175
  misc_feature (1)..(1075): Ceres Seq. ID no. 12715936
  misc_feature: MA Experiment ID: 20000224 Result: Up-regulated in Transcription

SEQ ID NO: 92932 - protein, 290 aa, Arabidopsis thaliana; identical to SEQ ID NO: 80566
  peptide (1)..(290): Ceres Seq. ID no. 12715937
  misc_feature (60)..(254): Pfam Name: TIP41-like family Pfam Description: TIP41-like family
  misc_feature (1)..(290): Homolog of NCBI NO: 22329154 NR Description: putative protein; protein id: At4g34270.1, by cDNA: gi_18377790, supported by cDNA: gi_20259224 [Arabidopsis >gi|18377791|gb|AAL67045.1| unknown protein [Arabidopsis
  misc_feature (60)..(290): Homolog of NCBI NO: 7485322 NR Description: hypothetical protein F10M10.40 - Arabidopsis >gi|4455172|emb|CAB36704.1| putative protein [Arabidopsis >gi|7270377|emb|CAB80144.1| putative protein [Arabidopsis
  misc_feature (10)..(288): Homolog of NCBI NO: 14488361 NR Description: unknown protein [Oryza sativa (japonica
  misc_feature (30)..(290): Homolog of NCBI NO: 23097250 NR Description: similar to CG9578 gene product; yeast YPR037W and
  misc_feature (30)..(290): Homolog of NCBI NO: 21704010 NR Description: similar to CG9578 gene product [Mus musculus] similar to CG9578 gene product [Mus musculus]
  misc_feature (30)..(290): Homolog of NCBI NO: 34880821 NR Description: similar to CG9578-like [Rattus norvegicus]
  misc_feature (30)..(287): Homolog of NCBI NO: 34784442 NR Description: Unknown (protein for MGC:66327) [Danio rerio]
  misc_feature (133)..(284): Homolog of NCBI NO: 40739133 NR Description: hypothetical protein AN5814.2 [Aspergillus
  misc_feature (15)..(117): Homolog of NCBI NO: 40739133 NR Description: hypothetical protein AN5814.2 [Aspergillus
  misc_feature (9)..(278): Homolog of NCBI NO: 6325297 NR Description: SDF1 the first obserwed null phenotype was DeFiciency; Tip41p [Saccharomyces cerevisiae]

SEQ ID NO: 92933 - protein, 231 aa, Arabidopsis thaliana; identical to SEQ ID NO: 80567
  peptide (1)..(231): Ceres Seq. ID no. 12715938
  misc_feature (1)..(195): Pfam Name: TIP41-like family Pfam Description: TIP41-like family
  misc_feature (1)..(231): Homolog of NCBI NO: 22329154 NR Description: putative protein; protein id: At4g34270.1, by cDNA: gi_18377790, supported by cDNA: gi_20259224 [Arabidopsis >gi|18377791|gb|AAL67045.1| unknown protein [Arabidopsis
  misc_feature (1)..(231): Homolog of NCBI NO: 7485322 NR Description: hypothetical protein F10M10.40 - Arabidopsis >gi|4455172|emb|CAB36704.1| putative protein [Arabidopsis >gi|7270377|emb|CAB80144.1| putative protein [Arabidopsis
  misc_feature (1)..(229): Homolog of NCBI NO: 14488361 NR Description: unknown protein [Oryza sativa (japonica
  misc_feature (1)..(231): Homolog of NCBI NO: 23097250 NR Description: similar to CG9578 gene product; yeast YPR037W and
  misc_feature (1)..(231): Homolog of NCBI NO: 21704010 NR Description: similar to CG9578 gene product [Mus musculus] similar to CG9578 gene product [Mus musculus]
  misc_feature (1)..(231): Homolog of NCBI NO: 34880821 NR Description: similar to CG9578-like [Rattus norvegicus]
  misc_feature (1)..(228): Homolog of NCBI NO: 34784442 NR Description: Unknown (protein for MGC:66327) [Danio rerio]
  misc_feature (74)..(225): Homolog of NCBI NO: 40739133 NR Description: hypothetical protein AN5814.2 [Aspergillus
  misc_feature (1)..(58): Homolog of NCBI NO: 40739133 NR Description: hypothetical protein AN5814.2 [Aspergillus
  misc_feature (1)..(219): Homolog of NCBI NO: 6325297 NR Description: SDF1 the first obserwed null phenotype was DeFiciency; Tip41p [Saccharomyces cerevisiae]

SEQ ID NO: 92934 - DNA, 708 bp, Arabidopsis thaliana; identical to SEQ ID NO: 89178
  misc_feature (1)..(708): Ceres Seq. ID no. 12715939
  misc_feature: MA Experiment ID: 20000171 Result: Up-regulated in Transcription
  misc_feature: MA Experiment 20000171 PARAMETER Experiment Name: At_42deg_Heat_P Parameter: Age (day) Value: 14
  misc_feature: MA Experiment 20000171 PARAMETER Experiment Name: At_42deg_Heat_P Parameter: Organism Value: A. thaliana
  misc_feature: MA Experiment 20000171 PARAMETER Experiment Name: At_42deg_Heat_P Parameter: Plant Line Value: WS
  misc_feature: MA Experiment 20000171 PARAMETER Experiment Name: At_42deg_Heat_P Parameter: Temperature (deg C) Value: 42 vs. 22
  misc_feature: MA Experiment 20000171 PARAMETER Experiment Name: At_42deg_Heat_P Parameter: Timepoint (hr) Value: 1
  misc_feature: MA Experiment 20000171 PARAMETER Experiment Name: At_42deg_Heat_P Parameter: Tissue Value: Aerial
  misc_feature: MA Experiment ID: 20000173 Result: Up-regulated in Transcription
  misc_feature: MA Experiment 20000173 PARAMETER Experiment Name: At_42deg_Heat_P Parameter: Age (day) Value: 14
  misc_feature: MA Experiment 20000173 PARAMETER Experiment Name: At_42deg_Heat_P Parameter: Organism Value: A. thaliana
  misc_feature: MA Experiment 20000173 PARAMETER Experiment Name: At_42deg_Heat_P Parameter: Plant Line Value: WS
  misc_feature: MA Experiment 20000173 PARAMETER Experiment Name: At_42deg_Heat_P Parameter: Temperature (deg C) Value: 42 vs. 22
  misc_feature: MA Experiment 20000173 PARAMETER Experiment Name: At_42deg_Heat_P Parameter: Timepoint (hr) Value: 6
  misc_feature: MA Experiment 20000173 PARAMETER Experiment Name: At_42deg_Heat_P Parameter: Tissue Value: Aerial
  misc_feature: MA Experiment ID: 20000235 Result: Down-regulated in Transcription
  misc_feature: MA Experiment 20000235 PARAMETER Experiment Name: At_Siliques_P Parameter: Age (day) Value: 21
  misc_feature: MA Experiment 20000235 PARAMETER Experiment Name: At_Siliques_P Parameter: Organism Value: A. thaliana
  misc_feature: MA Experiment 20000235 PARAMETER Experiment Name: At_Siliques_P Parameter: Plant Line Value: WS
  misc_feature: MA Experiment 20000235 PARAMETER Experiment Name: At_Siliques_P Parameter: Tissue Value: 5-10mm Siliques vs. Whole Plant
  misc_feature: MA Experiment ID: 20000438 Result: Down-regulated in Transcription
  misc_feature: MA Experiment 20000438 PARAMETER Experiment Name: At_Shoots__P Parameter: Age (day) Value: 14
  misc_feature: MA Experiment 20000438 PARAMETER Experiment Name: At_Shoots__P Parameter: Tissue Value: Shoots vs. Whole Plant
  misc_feature: MA Experiment ID: 20000439 Result: Down-regulated in Transcription
  misc_feature: MA Experiment 20000439 PARAMETER Experiment Name: At_Roots__P Parameter: Age (day) Value: 14 vs. 21
  misc_feature: MA Experiment 20000439 PARAMETER Experiment Name: At_Roots__P Parameter: Organism Value: A. thaliana
  misc_feature: MA Experiment 20000439 PARAMETER Experiment Name: At_Roots__P Parameter: Tissue Value: Roots vs. Whole Plant
  misc_feature: MA Experiment ID: 20000794 Result: Down-regulated in Transcription
  misc_feature: MA Experiment 20000794 PARAMETER Experiment Name: At_Petals_P Parameter: Age (day) Value: 23-25 days
  misc_feature: MA Experiment 20000794 PARAMETER Experiment Name: At_Petals_P Parameter: Plant Line Value: WS
  misc_feature: MA Experiment 20000794 PARAMETER Experiment Name: At_Petals_P Parameter: Tissue Value: Petals vs. Whole plant

SEQ ID NO: 92935 - protein, 89 aa, Arabidopsis thaliana; identical to SEQ ID NO: 89179
  peptide (1)..(89): Ceres Seq. ID no. 12715940
  misc_feature (1)..(87): Homolog of NCBI NO: 38454120 NR Description: At4g34412 [Arabidopsis thaliana]
  misc_feature (1)..(87): Homolog of NCBI NO: 34895710 NR Description: P0019D06.12 [Oryza sativa (japonica
  misc_feature (1)..(87): Homolog of NCBI NO: 22329156 NR Description: hypothetical protein; protein id: At4g34412.1
  misc_feature (12)..(83): Homolog of NCBI NO: 28849893 NR Description: CGI-121 protein [Mus musculus] RIKEN cDNA 1810034M08 [Mus musculus] >gi|20071790|gb|AAH27162.1|
  misc_feature (12)..(83): Homolog of NCBI NO: 27712192 NR Description: similar to RIKEN cDNA 1810034M08 [Mus musculus]
  misc_feature (12)..(83): Homolog of NCBI NO: 7705590 NR Description: CGI-121 protein [Homo sapiens]
  misc_feature (12)..(83): Homolog of NCBI NO: 12001980 NR Description: My019 protein [Homo sapiens]
  misc_feature (16)..(83): Homolog of NCBI NO: 39794363 NR Description: Unknown (protein for MGC:75657) [Silurana
  misc_feature (12)..(83): Homolog of NCBI NO: 28175286 NR Description: Unknown (protein for MGC:53277) [Xenopus laevis]

SEQ ID NO: 92936 - protein, 60 aa, Arabidopsis thaliana; identical to SEQ ID NO: 89180
  peptide (1)..(60): Ceres Seq. ID no. 12715941
  misc_feature (1)..(58): Homolog of NCBI NO: 38454120 NR Description: At4g34412 [Arabidopsis thaliana]
  misc_feature (1)..(58): Homolog of NCBI NO: 34895710 NR Description: P0019D06.12 [Oryza sativa (japonica
  misc_feature (1)..(58): Homolog of NCBI NO: 22329156 NR Description: hypothetical protein; protein id: At4g34412.1
  misc_feature (1)..(54): Homolog of NCBI NO: 28849893 NR Description: CGI-121 protein [Mus musculus] RIKEN cDNA 1810034M08 [Mus musculus] >gi|20071790|gb|AAH27162.1|
  misc_feature (1)..(54): Homolog of NCBI NO: 27712192 NR Description: similar to RIKEN cDNA 1810034M08 [Mus musculus]
  misc_feature (1)..(54): Homolog of NCBI NO: 7705590 NR Description: CGI-121 protein [Homo sapiens]
  misc_feature (1)..(54): Homolog of NCBI NO: 12001980 NR Description: My019 protein [Homo sapiens]
  misc_feature (1)..(54): Homolog of NCBI NO: 39794363 NR Description: Unknown (protein for MGC:75657) [Silurana
  misc_feature (1)..(54): Homolog of NCBI NO: 28175286 NR Description: Unknown (protein for MGC:53277) [Xenopus laevis]

SEQ ID NO: 92937 - protein, 57 aa, Arabidopsis thaliana; identical to SEQ ID NO: 89181
  peptide (1)..(57): Ceres Seq. ID no. 12715942
  misc_feature (1)..(57): Homolog of NCBI NO: 38454120 NR Description: At4g34412 [Arabidopsis thaliana]
  misc_feature (1)..(57): Homolog of NCBI NO: 34895710 NR Description: P0019D06.12 [Oryza sativa (japonica
  misc_feature (25)..(57): Homolog of NCBI NO: 22329156 NR Description: hypothetical protein; protein id: At4g34412.1
  misc_feature (1)..(57): Homolog of NCBI NO: 28849893 NR Description: CGI-121 protein [Mus musculus] RIKEN cDNA 1810034M08 [Mus musculus] >gi|20071790|gb|AAH27162.1|
  misc_feature (1)..(57): Homolog of NCBI NO: 27712192 NR Description: similar to RIKEN cDNA 1810034M08 [Mus musculus]
  misc_feature (1)..(57): Homolog of NCBI NO: 7705590 NR Description: CGI-121 protein [Homo sapiens]
  misc_feature (1)..(57): Homolog of NCBI NO: 12001980 NR Description: My019 protein [Homo sapiens]
  misc_feature (1)..(57): Homolog of NCBI NO: 39794363 NR Description: Unknown (protein for MGC:75657) [Silurana
  misc_feature (1)..(57): Homolog of NCBI NO: 28175286 NR Description: Unknown (protein for MGC:53277) [Xenopus laevis]
  misc_feature (23)..(57): Homolog of NCBI NO: 33327290 NR Description: hypothetical protein [Phaseolus vulgaris]

SEQ ID NO: 92938 - DNA, 1204 bp, Arabidopsis thaliana; identical to SEQ ID NO: 89182
  misc_feature (1)..(1204): Ceres Seq. ID no. 12715964
  misc_feature: MA Experiment ID: 108462 Result: Up-regulated in Transcription
  misc_feature: MA Experiment 108462 PARAMETER Experiment Name: At_Germinating_Seeds_cDNA_P Parameter: Age (day) Value: 2 vs. 0
  misc_feature: MA Experiment 108462 PARAMETER Experiment Name: At_Germinating_Seeds_cDNA_P Parameter: Tissue Value: Germinating Seeds
  misc_feature: MA Experiment ID: 108463 Result: Up-regulated in Transcription
  misc_feature: MA Experiment 108463 PARAMETER Experiment Name: At_Germinating_Seeds_cDNA_P Parameter: Age (day) Value: 3 vs. 0
  misc_feature: MA Experiment 108463 PARAMETER Experiment Name: At_Germinating_Seeds_cDNA_P Parameter: Tissue Value: Germinating Seeds
  misc_feature: MA Experiment ID: 108464 Result: Up-regulated in Transcription
  misc_feature: MA Experiment 108464 PARAMETER Experiment Name: At_Germinating_Seeds_cDNA_P Parameter: Age (day) Value: 4 vs. 0
  misc_feature: MA Experiment 108464 PARAMETER Experiment Name: At_Germinating_Seeds_cDNA_P Parameter: Tissue Value: Germinating Seeds
  misc_feature: MA Experiment ID: 108579 Result: Up-regulated in Transcription
  misc_feature: MA Experiment 108579 PARAMETER Experiment Name: At_4deg_Cold_cDNA_P Parameter: Temperature (deg C) Value: 4 vs. 22
  misc_feature: MA Experiment 108579 PARAMETER Experiment Name: At_4deg_Cold_cDNA_P Parameter: Timepoint (hr) Value: 6
  misc_feature: MA Experiment 108579 PARAMETER Experiment Name: At_4deg_Cold_cDNA_P Parameter: Tissue Value: Aerial
  misc_feature: MA Experiment ID: 20000069 Result: Down-regulated in Transcription
  misc_feature: MA Experiment 20000069 PARAMETER Experiment Name: At_100uM_ABA_Mutants_cDNA_P Parameter: Plant Line Value: CS23
  misc_feature: MA Experiment 20000069 PARAMETER Experiment Name: At_100uM_ABA_Mutants_cDNA_P Parameter: Timepoint (hr) Value: 6
  misc_feature: MA Experiment 20000069 PARAMETER Experiment Name: At_100uM_ABA_Mutants_cDNA_P Parameter: Tissue Value: Aerial
  misc_feature: MA Experiment 20000069 PARAMETER Experiment Name: At_100uM_ABA_Mutants_cDNA_P Parameter: Treatment Value: 100uM ABA vs. No Treatment
  misc_feature: MA Experiment ID: 20000072 Result: Down-regulated in Transcription
  misc_feature: MA Experiment 20000072 PARAMETER Experiment Name: At_100uM_ABA_Mutants_cDNA_P Parameter: Plant Line Value: CS8105
  misc_feature: MA Experiment 20000072 PARAMETER Experiment Name: At_100uM_ABA_Mutants_cDNA_P Parameter: Timepoint (hr) Value: 6
  misc_feature: MA Experiment 20000072 PARAMETER Experiment Name: At_100uM_ABA_Mutants_cDNA_P Parameter: Tissue Value: Aerial
  misc_feature: MA Experiment 20000072 PARAMETER Experiment Name: At_100uM_ABA_Mutants_cDNA_P Parameter: Treatment Value: 100uM ABA vs. No Treatment
  misc_feature: MA Experiment ID: 20000087 Result: Down-regulated in Transcription
  misc_feature: MA Experiment 20000087 PARAMETER Experiment Name: At_100uM_ABA_Mutants_cDNA_P Parameter: Plant Line Value: WS
  misc_feature: MA Experiment 20000087 PARAMETER Experiment Name: At_100uM_ABA_Mutants_cDNA_P Parameter: Timepoint (hr) Value: 6
  misc_feature: MA Experiment 20000087 PARAMETER Experiment Name: At_100uM_ABA_Mutants_cDNA_P Parameter: Tissue Value: Aerial
  misc_feature: MA Experiment 20000087 PARAMETER Experiment Name: At_100uM_ABA_Mutants_cDNA_P Parameter: Treatment Value: 100uM ABA vs. No Treatment
  misc_feature: MA Experiment ID: 20000184 Result: Up-regulated in Transcription
  misc_feature: MA Experiment 20000184 PARAMETER Experiment Name: At_Shoots__P Parameter: Age (day) Value: 7
  misc_feature: MA Experiment 20000184 PARAMETER Experiment Name: At_Shoots__P Parameter: Tissue Value: Shoots vs. Whole Plant
  misc_feature: MA Experiment ID: 20000235 Result: Up-regulated in Transcription
  misc_feature: MA Experiment 20000235 PARAMETER Experiment Name: At_Siliques_P Parameter: Age (day) Value: 21
  misc_feature: MA Experiment 20000235 PARAMETER Experiment Name: At_Siliques_P Parameter: Organism Value: A. thaliana
  misc_feature: MA Experiment 20000235 PARAMETER Experiment Name: At_Siliques_P Parameter: Plant Line Value: WS
  misc_feature: MA Experiment 20000235 PARAMETER Experiment Name: At_Siliques_P Parameter: Tissue Value: 5-10mm Siliques vs. Whole Plant
  misc_feature: MA Experiment ID: 20000264 Result: Up-regulated in Transcription
  misc_feature: MA Experiment 20000264 PARAMETER Experiment Name: At_Open_Flower_P Parameter: Age (day) Value: 21
  misc_feature: MA Experiment 20000264 PARAMETER Experiment Name: At_Open_Flower_P Parameter: Plant Line Value: WS
  misc_feature: MA Experiment 20000264 PARAMETER Experiment Name: At_Open_Flower_P Parameter: Tissue Value: Open Flower vs. Whole Plant
  misc_feature: MA Experiment ID: 20000267 Result: Up-regulated in Transcription
  misc_feature: MA Experiment 20000267 PARAMETER Experiment Name: At_Drought_P Parameter: Age (day) Value: 7
  misc_feature: MA Experiment 20000267 PARAMETER Experiment Name: At_Drought_P Parameter: Organism Value: A. thaliana
  misc_feature: MA Experiment 20000267 PARAMETER Experiment Name: At_Drought_P Parameter: Plant Line Value: WS
  misc_feature: MA Experiment 20000267 PARAMETER Experiment Name: At_Drought_P Parameter: Timepoint (hr) Value: 6
  misc_feature: MA Experiment 20000267 PARAMETER Experiment Name: At_Drought_P Parameter: Tissue Value: Whole Plant
  misc_feature: MA Experiment 20000267 PARAMETER Experiment Name: At_Drought_P Parameter: Treatment Value: Drought vs. No Drought
  misc_feature: MA Experiment ID: 20000268 Result: Up-regulated in Transcription
  misc_feature: MA Experiment 20000268 PARAMETER Experiment Name: At_100mM_NaCl__P Parameter: Age (day) Value: 14
  misc_feature: MA Experiment 20000268 PARAMETER Experiment Name: At_100mM_NaCl__P Parameter: Organism Value: A. thaliana
  misc_feature: MA Experiment 20000268 PARAMETER Experiment Name: At_100mM_NaCl__P Parameter: Plant Line Value: WS
  misc_feature: MA Experiment 20000268 PARAMETER Experiment Name: At_100mM_NaCl__P Parameter: Timepoint (hr) Value: 6
  misc_feature: MA Experiment 20000268 PARAMETER Experiment Name: At_100mM_NaCl__P Parameter: Tissue Value: Whole Plant
  misc_feature: MA Experiment 20000268 PARAMETER Experiment Name: At_100mM_NaCl__P Parameter: Treatment Value: 100mM NaCl vs. No Treatment
  misc_feature: MA Experiment ID: 20000436 Result: Up-regulated in Transcription
  misc_feature: MA Experiment 20000436 PARAMETER Experiment Name: At_Drought_P Parameter: Age (day) Value: 7
  misc_feature: MA Experiment 20000436 PARAMETER Experiment Name: At_Drought_P Parameter: Organism Value: A. thaliana
  misc_feature: MA Experiment 20000436 PARAMETER Experiment Name: At_Drought_P Parameter: Plant Line Value: WS
  misc_feature: MA Experiment 20000436 PARAMETER Experiment Name: At_Drought_P Parameter: Timepoint (hr) Value: 12
  misc_feature: MA Experiment 20000436 PARAMETER Experiment Name: At_Drought_P Parameter: Tissue Value: Whole Plant
  misc_feature: MA Experiment 20000436 PARAMETER Experiment Name: At_Drought_P Parameter: Treatment Value: Drought vs. No Drought
  misc_feature: MA Experiment ID: 20000437 Result: Up-regulated in Transcription
  misc_feature: MA Experiment 20000437 PARAMETER Experiment Name: At_Drought_P Parameter: Age (day) Value: 8
  misc_feature: MA Experiment 20000437 PARAMETER Experiment Name: At_Drought_P Parameter: Organism Value: A. thaliana
  misc_feature: MA Experiment 20000437 PARAMETER Experiment Name: At_Drought_P Parameter: Plant Line Value: WS
  misc_feature: MA Experiment 20000437 PARAMETER Experiment Name: At_Drought_P Parameter: Timepoint (hr) Value: 24
  misc_feature: MA Experiment 20000437 PARAMETER Experiment Name: At_Drought_P Parameter: Tissue Value: Whole Plant
  misc_feature: MA Experiment 20000437 PARAMETER Experiment Name: At_Drought_P Parameter: Treatment Value: Drought vs. No Drought
  misc_feature: MA Experiment ID: 20000438 Result: Up-regulated in Transcription
  misc_feature: MA Experiment 20000438 PARAMETER Experiment Name: At_Shoots__P Parameter: Age (day) Value: 14
  misc_feature: MA Experiment 20000438 PARAMETER Experiment Name: At_Shoots__P Parameter: Tissue Value: Shoots vs. Whole Plant
  misc_feature: MA Experiment ID: 20000794 Result: Up-regulated in Transcription
  misc_feature: MA Experiment 20000794 PARAMETER Experiment Name: At_Petals_P Parameter: Age (day) Value: 23-25 days
  misc_feature: MA Experiment 20000794 PARAMETER Experiment Name: At_Petals_P Parameter: Plant Line Value: WS
  misc_feature: MA Experiment 20000794 PARAMETER Experiment Name: At_Petals_P Parameter: Tissue Value: Petals vs. Whole plant
  misc_feature: MA Experiment ID: 20001248 Result: Down-regulated in Transcription
  misc_feature: MA Experiment 20001248 PARAMETER Experiment Name: At_Far-red-induction_P Parameter: Age (day) Value: 7
  misc_feature: MA Experiment 20001248 PARAMETER Experiment Name: At_Far-red-induction_P Parameter: Light Value: Far-red vs. White
  misc_feature: MA Experiment 20001248 PARAMETER Experiment Name: At_Far-red-induction_P Parameter: Organism Value: A. thaliana
  misc_feature: MA Experiment 20001248 PARAMETER Experiment Name: At_Far-red-induction_P Parameter: Plant Line Value: Columbia
  misc_feature: MA Experiment 20001248 PARAMETER Experiment Name: At_Far-red-induction_P Parameter: Timepoint (hr) Value: 4
  misc_feature: MA Experiment 20001248 PARAMETER Experiment Name: At_Far-red-induction_P Parameter: Tissue Value: Whole Plant

SEQ ID NO: 92939 - protein, 378 aa, Arabidopsis thaliana; identical to SEQ ID NO: 89183
  peptide (1)..(378): Ceres Seq. ID no. 12715965
  misc_feature (9)..(298): Pfam Name: Squalene/phytoene synthase Pfam Description: Squalene/phytoene synthase
  misc_feature (1)..(378): Homolog of NCBI NO: 25287164 NR Description: probable squalene synthase [imported] - thaliana >gi|5678626|emb|CAA18844.2| putative squalene synthase thaliana] >gi|7270415|emb|CAB80182.1| putative squalene synthase
  misc_feature (1)..(378): Homolog of NCBI NO: 11258828 NR Description: farnesyl-diphosphate farnesyltransferase (EC
  misc_feature (1)..(378): Homolog of NCBI NO: 7434083 NR Description: farnesyl-diphosphate farnesyltransferase (EC
  misc_feature (1)..(343): Homolog of NCBI NO: 15236169 NR Description: farnesyl-diphosphate farnesyltransferase
  misc_feature (1)..(375): Homolog of NCBI NO: 15236168 NR Description: farnesyl-diphosphate farnesyltransferase synthase 1) (SQS1); protein id: At4g34640.1, supported by cDNA: supported by cDNA: gi_4098518, supported by cDNA: gi_806324

SEQ ID NO: 92940 - protein, 295 aa, Arabidopsis thaliana; identical to SEQ ID NO: 89097
  peptide (1)..(295): Ceres Seq. ID no. 12715966
  misc_feature (1)..(215): Pfam Name: Squalene/phytoene synthase Pfam Description: Squalene/phytoene synthase
  misc_feature (1)..(295): Homolog of NCBI NO: 25287164 NR Description: probable squalene synthase [imported] - thaliana >gi|5678626|emb|CAA18844.2| putative squalene synthase thaliana] >gi|7270415|emb|CAB80182.1| putative squalene synthase
  misc_feature (1)..(295): Homolog of NCBI NO: 11258828 NR Description: farnesyl-diphosphate farnesyltransferase (EC
  misc_feature (1)..(295): Homolog of NCBI NO: 7434083 NR Description: farnesyl-diphosphate farnesyltransferase (EC
  misc_feature (1)..(260): Homolog of NCBI NO: 15236169 NR Description: farnesyl-diphosphate farnesyltransferase
  misc_feature (1)..(292): Homolog of NCBI NO: 15236168 NR Description: farnesyl-diphosphate farnesyltransferase synthase 1) (SQS1); protein id: At4g34640.1, supported by cDNA: supported by cDNA: gi_4098518, supported by cDNA: gi_806324

SEQ ID NO: 92941 - protein, 267 aa, Arabidopsis thaliana; identical to SEQ ID NO: 89098
  peptide (1)..(267): Ceres Seq. ID no. 12715967
  misc_feature (1)..(187): Pfam Name: Squalene/phytoene synthase Pfam Description: Squalene/phytoene synthase
  misc_feature (1)..(267): Homolog of NCBI NO: 25287164 NR Description: probable squalene synthase [imported] - thaliana >gi|5678626|emb|CAA18844.2| putative squalene synthase thaliana] >gi|7270415|emb|CAB80182.1| putative squalene synthase
  misc_feature (1)..(267): Homolog of NCBI NO: 11258828 NR Description: farnesyl-diphosphate farnesyltransferase (EC
  misc_feature (1)..(267): Homolog of NCBI NO: 7434083 NR Description: farnesyl-diphosphate farnesyltransferase (EC
  misc_feature (1)..(232): Homolog of NCBI NO: 15236169 NR Description: farnesyl-diphosphate farnesyltransferase
  misc_feature (1)..(264): Homolog of NCBI NO: 15236168 NR Description: farnesyl-diphosphate farnesyltransferase synthase 1) (SQS1); protein id: At4g34640.1, supported by cDNA: supported by cDNA: gi_4098518, supported by cDNA: gi_806324

SEQ ID NO: 92942 - DNA, 603 bp, Arabidopsis thaliana; identical to SEQ ID NO: 89186
  misc_feature (1)..(603): Ceres Seq. ID no. 12715999
  misc_feature: MA Experiment ID: 20000179 Result: Up-regulated in Transcription
  misc_feature: MA Experiment 20000179 PARAMETER Experiment Name: At_Germinating_Seeds_P Parameter: Age (hr) Value: 6 vs. 0
  misc_feature: MA Experiment 20000179 PARAMETER Experiment Name: At_Germinating_Seeds_P Parameter: Tissue Value: Germinating Seeds
  misc_feature: MA Experiment ID: 20000180 Result: Up-regulated in Transcription
  misc_feature: MA Experiment 20000180 PARAMETER Experiment Name: At_Germinating_Seeds_P Parameter: Age (hr) Value: 24 vs. 0
  misc_feature: MA Experiment 20000180 PARAMETER Experiment Name: At_Germinating_Seeds_P Parameter: Tissue Value: Germinating Seeds
  misc_feature: MA Experiment ID: 20001451 Result: Down-regulated in Transcription
  misc_feature: MA Experiment 20001451 PARAMETER Experiment Name: At_Far-red-induction_P Parameter: Age (day) Value: 7
  misc_feature: MA Experiment 20001451 PARAMETER Experiment Name: At_Far-red-induction_P Parameter: Light Value: Far-red vs. White
  misc_feature: MA Experiment 20001451 PARAMETER Experiment Name: At_Far-red-induction_P Parameter: Organism Value: A. thaliana
  misc_feature: MA Experiment 20001451 PARAMETER Experiment Name: At_Far-red-induction_P Parameter: Plant Line Value: Columbia
  misc_feature: MA Experiment 20001451 PARAMETER Experiment Name: At_Far-red-induction_P Parameter: Timepoint (hr) Value: 24
  misc_feature: MA Experiment 20001451 PARAMETER Experiment Name: At_Far-red-induction_P Parameter: Tissue Value: Whole Plant

SEQ ID NO: 92943 - protein, 200 aa, Arabidopsis thaliana; identical to SEQ ID NO: 89187
  peptide (1)..(200): Ceres Seq. ID no. 12716000
  misc_feature (2)..(184): Pfam Name: Phosphorylase family Pfam Description: Phosphorylase family
  misc_feature (1)..(200): Homolog of NCBI NO: 30690140 NR Description: expressed protein [Arabidopsis thaliana]
  misc_feature (1)..(200): Homolog of NCBI NO: 7486865 NR Description: hypothetical protein T11I11.80 - Arabidopsis >gi|5123701|emb|CAB45445.1| putative protein [Arabidopsis >gi|7270435|emb|CAB80201.1| putative protein [Arabidopsis
  misc_feature (2)..(200): Homolog of NCBI NO: 18087497 NR Description: methylthioadenosine/S-adenosyl homocysteine
  misc_feature (2)..(200): Homolog of NCBI NO: 34897892 NR Description: ESTs C28489(C61317),AU031689(R0560) correspond to region of the predicted gene.~Similar to Arabidopsis thaliana DNA
  misc_feature (1)..(200): Homolog of NCBI NO: 7406708 NR Description: putative ripening-related protein [Vitis vinifera]
  misc_feature (1)..(200): Homolog of NCBI NO: 15234791 NR Description: putative protein; protein id: At4g38800.1, by cDNA: gi_13878068 [Arabidopsis thaliana]
  misc_feature (13)..(181): Homolog of NCBI NO: 23037085 NR Description: hypothetical protein [Oenococcus oeni MCW]
  misc_feature (14)..(185): Homolog of NCBI NO: 27468203 NR Description: 5'-methylthioadenosine nucleosidase;
  misc_feature (14)..(176): Homolog of NCBI NO: 23467396 NR Description: hypothetical protein [Haemophilus somnus 129PT]
  misc_feature (13)..(165): Homolog of NCBI NO: 24372900 NR Description: 5-methylthioadenosine

SEQ ID NO: 92944 - protein, 113 aa, Arabidopsis thaliana; identical to SEQ ID NO: 89188
  peptide (1)..(113): Ceres Seq. ID no. 12716001
  misc_feature (1)..(97): Pfam Name: Phosphorylase family Pfam Description: Phosphorylase family
  misc_feature (1)..(113): Homolog of NCBI NO: 30690140 NR Description: expressed protein [Arabidopsis thaliana]
  misc_feature (1)..(113): Homolog of NCBI NO: 7486865 NR Description: hypothetical protein T11I11.80 - Arabidopsis >gi|5123701|emb|CAB45445.1| putative protein [Arabidopsis >gi|7270435|emb|CAB80201.1| putative protein [Arabidopsis
  misc_feature (1)..(113): Homolog of NCBI NO: 18087497 NR Description: methylthioadenosine/S-adenosyl homocysteine
  misc_feature (1)..(113): Homolog of NCBI NO: 34897892 NR Description: ESTs C28489(C61317),AU031689(R0560) correspond to region of the predicted gene.~Similar to Arabidopsis thaliana DNA
  misc_feature (1)..(113): Homolog of NCBI NO: 7406708 NR Description: putative ripening-related protein [Vitis vinifera]
  misc_feature (1)..(113): Homolog of NCBI NO: 15234791 NR Description: putative protein; protein id: At4g38800.1, by cDNA: gi_13878068 [Arabidopsis thaliana]
  misc_feature (1)..(94): Homolog of NCBI NO: 23037085 NR Description: hypothetical protein [Oenococcus oeni MCW]
  misc_feature (1)..(98): Homolog of NCBI NO: 27468203 NR Description: 5'-methylthioadenosine nucleosidase;
  misc_feature (1)..(89): Homolog of NCBI NO: 23467396 NR Description: hypothetical protein [Haemophilus somnus 129PT]
  misc_feature (1)..(78): Homolog of NCBI NO: 24372900 NR Description: 5-methylthioadenosine

SEQ ID NO: 92945 - DNA, 2784 bp, Arabidopsis thaliana; identical to SEQ ID NO: 89189
  misc_feature (1)..(2784): Ceres Seq. ID no. 12716041
  misc_feature: MA Experiment ID: 20000180 Result: Down-regulated in Transcription
  misc_feature: MA Experiment 20000180 PARAMETER Experiment Name: At_Germinating_Seeds_P Parameter: Age (hr) Value: 24 vs. 0
  misc_feature: MA Experiment 20000180 PARAMETER Experiment Name: At_Germinating_Seeds_P Parameter: Tissue Value: Germinating Seeds

SEQ ID NO: 92946 - protein, 927 aa, Arabidopsis thaliana; identical to SEQ ID NO: 89190
  peptide (1)..(927): Ceres Seq. ID no. 12716042
  misc_feature (299)..(333): Pfam Name: PPR repeat Pfam Description: PPR repeat
  misc_feature (80)..(709): Homolog of NCBI NO: 15234006 NR Description: putative protein; protein id: At4g18750.1
  misc_feature (83)..(710): Homolog of NCBI NO: 34903762 NR Description: unnamed protein product [Oryza sativa (japonica group)] >gi|7340873|dbj|BAA92963.1| unnamed protein product
  misc_feature (287)..(706): Homolog of NCBI NO: 15237421 NR Description: putative protein; protein id: At5g16860.1
  misc_feature (80)..(336): Homolog of NCBI NO: 15237421 NR Description: putative protein; protein id: At5g16860.1
  misc_feature (66)..(730): Homolog of NCBI NO: 34915012 NR Description: P0458A05.10 [Oryza sativa (japonica
  misc_feature (82)..(701): Homolog of NCBI NO: 15218216 NR Description: hypothetical protein; protein id: At1g15510.1
  misc_feature (67)..(766): Homolog of NCBI NO: 38606535 NR Description: OSJNBa0016O02.23 [Oryza sativa (japonica
  misc_feature (52)..(708): Homolog of NCBI NO: 18418348 NR Description: putative protein; protein id: At4g33990.1
  misc_feature (80)..(701): Homolog of NCBI NO: 15220337 NR Description: hypothetical protein; protein id: At1g11290.1
  misc_feature (83)..(720): Homolog of NCBI NO: 15236324 NR Description: putative protein; protein id: At4g13650.1

SEQ ID NO: 92947 - protein, 848 aa, Arabidopsis thaliana; identical to SEQ ID NO: 89191
  peptide (1)..(848): Ceres Seq. ID no. 12716043
  misc_feature (220)..(254): Pfam Name: PPR repeat Pfam Description: PPR repeat
  misc_feature (1)..(630): Homolog of NCBI NO: 15234006 NR Description: putative protein; protein id: At4g18750.1
  misc_feature (4)..(631): Homolog of NCBI NO: 34903762 NR Description: unnamed protein product [Oryza sativa (japonica group)] >gi|7340873|dbj|BAA92963.1| unnamed protein product
  misc_feature (208)..(627): Homolog of NCBI NO: 15237421 NR Description: putative protein; protein id: At5g16860.1
  misc_feature (1)..(257): Homolog of NCBI NO: 15237421 NR Description: putative protein; protein id: At5g16860.1
  misc_feature (1)..(651): Homolog of NCBI NO: 34915012 NR Description: P0458A05.10 [Oryza sativa (japonica
  misc_feature (3)..(622): Homolog of NCBI NO: 15218216 NR Description: hypothetical protein; protein id: At1g15510.1
  misc_feature (1)..(687): Homolog of NCBI NO: 38606535 NR Description: OSJNBa0016O02.23 [Oryza sativa (japonica
  misc_feature (1)..(629): Homolog of NCBI NO: 18418348 NR Description: putative protein; protein id: At4g33990.1
  misc_feature (1)..(622): Homolog of NCBI NO: 15220337 NR Description: hypothetical protein; protein id: At1g11290.1
  misc_feature (4)..(641): Homolog of NCBI NO: 15236324 NR Description: putative protein; protein id: At4g13650.1

SEQ ID NO: 92948 - protein, 838 aa, Arabidopsis thaliana; identical to SEQ ID NO: 89192
  peptide (1)..(838): Ceres Seq. ID no. 12716044
  misc_feature (210)..(244): Pfam Name: PPR repeat Pfam Description: PPR repeat
  misc_feature (1)..(620): Homolog of NCBI NO: 15234006 NR Description: putative protein; protein id: At4g18750.1
  misc_feature (1)..(621): Homolog of NCBI NO: 34903762 NR Description: unnamed protein product [Oryza sativa (japonica group)] >gi|7340873|dbj|BAA92963.1| unnamed protein product
  misc_feature (198)..(617): Homolog of NCBI NO: 15237421 NR Description: putative protein; protein id: At5g16860.1
  misc_feature (1)..(247): Homolog of NCBI NO: 15237421 NR Description: putative protein; protein id: At5g16860.1
  misc_feature (1)..(641): Homolog of NCBI NO: 34915012 NR Description: P0458A05.10 [Oryza sativa (japonica
  misc_feature (1)..(612): Homolog of NCBI NO: 15218216 NR Description: hypothetical protein; protein id: At1g15510.1
  misc_feature (1)..(677): Homolog of NCBI NO: 38606535 NR Description: OSJNBa0016O02.23 [Oryza sativa (japonica
  misc_feature (1)..(619): Homolog of NCBI NO: 18418348 NR Description: putative protein; protein id: At4g33990.1
  misc_feature (1)..(612): Homolog of NCBI NO: 15220337 NR Description: hypothetical protein; protein id: At1g11290.1
  misc_feature (1)..(631): Homolog of NCBI NO: 15236324 NR Description: putative protein; protein id: At4g13650.1

SEQ ID NO: 92949 - DNA, 1089 bp, Arabidopsis thaliana; identical to SEQ ID NO: 89193
  misc_feature (1)..(1089): Ceres Seq. ID no. 12716049
  misc_feature: MA Experiment ID: 20000184 Result: Up-regulated in Transcription
  misc_feature: MA Experiment 20000184 PARAMETER Experiment Name: At_Shoots__P Parameter: Age (day) Value: 7
  misc_feature: MA Experiment 20000184 PARAMETER Experiment Name: At_Shoots__P Parameter: Tissue Value: Shoots vs. Whole Plant

SEQ ID NO: 92950 - protein, 362 aa, Arabidopsis thaliana; identical to SEQ ID NO: 89194
  peptide (1)..(362): Ceres Seq. ID no. 12716050
  misc_feature (46)..(108): Pfam Name: O-methyltransferase Pfam Description: O-methyltransferase
  misc_feature (146)..(362): Homolog of NCBI NO: 15236280 NR Description: O-methyltransferase, family 2 family; protein id:
  misc_feature (1)..(108): Homolog of NCBI NO: 15236280 NR Description: O-methyltransferase, family 2 family; protein id:
  misc_feature (1)..(362): Homolog of NCBI NO: 15236282 NR Description: O-methyltransferase, family 2 family; protein id:
  misc_feature (204)..(361): Homolog of NCBI NO: 33285922 NR Description: O-methyltransferase-like protein [Brassica rapa
  misc_feature (9)..(360): Homolog of NCBI NO: 32440935 NR Description: caffeic acid O-methyltransferase [Rosa chinensis
  misc_feature (10)..(360): Homolog of NCBI NO: 7447883 NR Description: catechol O-methyltransferase homolog - Monterey
  misc_feature (10)..(360): Homolog of NCBI NO: 4574324 NR Description: caffeic acid ortho-methyltransferase [Pinus
  misc_feature (10)..(360): Homolog of NCBI NO: 1777386 NR Description: caffeic acid O-methyltransferase
  misc_feature (10)..(347): Homolog of NCBI NO: 33286372 NR Description: (R,S)-reticuline 7-O-methyltransferase [Papaver
  misc_feature (9)..(360): Homolog of NCBI NO: 33413896 NR Description: S-adenosyl-L-methionine:norcoclaurine

SEQ ID NO: 92951 - protein, 290 aa, Arabidopsis thaliana; identical to SEQ ID NO: 89195
  peptide (1)..(290): Ceres Seq. ID no. 12716051
  misc_feature (74)..(266): Pfam Name: O-methyltransferase Pfam Description: O-methyltransferase
  misc_feature (74)..(290): Homolog of NCBI NO: 15236280 NR Description: O-methyltransferase, family 2 family; protein id:
  misc_feature (1)..(36): Homolog of NCBI NO: 15236280 NR Description: O-methyltransferase, family 2 family; protein id:
  misc_feature (1)..(290): Homolog of NCBI NO: 15236282 NR Description: O-methyltransferase, family 2 family; protein id:
  misc_feature (132)..(289): Homolog of NCBI NO: 33285922 NR Description: O-methyltransferase-like protein [Brassica rapa
  misc_feature (1)..(288): Homolog of NCBI NO: 32440935 NR Description: caffeic acid O-methyltransferase [Rosa chinensis
  misc_feature (1)..(288): Homolog of NCBI NO: 7447883 NR Description: catechol O-methyltransferase homolog - Monterey
  misc_feature (1)..(288): Homolog of NCBI NO: 4574324 NR Description: caffeic acid ortho-methyltransferase [Pinus
  misc_feature (1)..(288): Homolog of NCBI NO: 1777386 NR Description: caffeic acid O-methyltransferase
  misc_feature (1)..(275): Homolog of NCBI NO: 33286372 NR Description: (R,S)-reticuline 7-O-methyltransferase [Papaver
  misc_feature (1)..(288): Homolog of NCBI NO: 33413896 NR Description: S-adenosyl-L-methionine:norcoclaurine

SEQ ID NO: 92952 - protein, 259 aa, Arabidopsis thaliana; identical to SEQ ID NO: 89196
  peptide (1)..(259): Ceres Seq. ID no. 12716052
  misc_feature (43)..(235): Pfam Name: O-methyltransferase Pfam Description: O-methyltransferase
  misc_feature (43)..(259): Homolog of NCBI NO: 15236280 NR Description: O-methyltransferase, family 2 family; protein id:
  misc_feature (1)..(259): Homolog of NCBI NO: 15236282 NR Description: O-methyltransferase, family 2 family; protein id:
  misc_feature (101)..(258): Homolog of NCBI NO: 33285922 NR Description: O-methyltransferase-like protein [Brassica rapa
  misc_feature (1)..(257): Homolog of NCBI NO: 32440935 NR Description: caffeic acid O-methyltransferase [Rosa chinensis
  misc_feature (1)..(257): Homolog of NCBI NO: 7447883 NR Description: catechol O-methyltransferase homolog - Monterey
  misc_feature (1)..(257): Homolog of NCBI NO: 4574324 NR Description: caffeic acid ortho-methyltransferase [Pinus
  misc_feature (1)..(257): Homolog of NCBI NO: 1777386 NR Description: caffeic acid O-methyltransferase
  misc_feature (1)..(244): Homolog of NCBI NO: 33286372 NR Description: (R,S)-reticuline 7-O-methyltransferase [Papaver
  misc_feature (1)..(257): Homolog of NCBI NO: 33413896 NR Description: S-adenosyl-L-methionine:norcoclaurine
  misc_feature (1)..(257): Homolog of NCBI NO: 2282586 NR Description: methyltransferase [Prunus armeniaca]

SEQ ID NO: 92953 - DNA, 1353 bp, Arabidopsis thaliana; identical to SEQ ID NO: 89197
  misc_feature (1)..(1353): Ceres Seq. ID no. 12716053
  misc_feature: MA Experiment ID: 20000306 Result: Down-regulated in Transcription
  misc_feature: MA Experiment 20000306 PARAMETER Experiment Name: At_Germinating_Seeds_Sub_P Parameter: Age (hr) Value: 6 vs. 0
  misc_feature: MA Experiment 20000306 PARAMETER Experiment Name: At_Germinating_Seeds_Sub_P Parameter: Organism Value: A. thaliana
  misc_feature: MA Experiment 20000306 PARAMETER Experiment Name: At_Germinating_Seeds_Sub_P Parameter: Plant Line Value: WS
  misc_feature: MA Experiment 20000306 PARAMETER Experiment Name: At_Germinating_Seeds_Sub_P Parameter: Tissue Value: Germinating Seeds
  misc_feature: MA Experiment ID: 20000307 Result: Down-regulated in Transcription
  misc_feature: MA Experiment 20000307 PARAMETER Experiment Name: At_Germinating_Seeds_Sub_P Parameter: Age (hr) Value: 24 vs. 0
  misc_feature: MA Experiment 20000307 PARAMETER Experiment Name: At_Germinating_Seeds_Sub_P Parameter: Organism Value: A. thaliana
  misc_feature: MA Experiment 20000307 PARAMETER Experiment Name: At_Germinating_Seeds_Sub_P Parameter: Plant Line Value: WS
  misc_feature: MA Experiment 20000307 PARAMETER Experiment Name: At_Germinating_Seeds_Sub_P Parameter: Tissue Value: Germinating Seeds

SEQ ID NO: 92954 - protein, 450 aa, Arabidopsis thaliana; identical to SEQ ID NO: 89198
  peptide (1)..(450): Ceres Seq. ID no. 12716054
  misc_feature (1)..(446): Homolog of NCBI NO: 22329039 NR Description: WRKY family transcription factor; protein id:
  misc_feature (1)..(447): Homolog of NCBI NO: 25407696 NR Description: hypothetical protein AT4g30930 [imported] - thaliana >gi|2980773|emb|CAA18200.1| putative protein thaliana] >gi|7269995|emb|CAB79811.1| putative protein
  misc_feature (1)..(446): Homolog of NCBI NO: 29839502 NR Description: Probable WRKY transcription factor 32 (WRKY protein 32) >gi|28393378|gb|AAO42113.1| putative WRKY family factor [Arabidopsis thaliana] >gi|28827598|gb|AAO50643.1|
  misc_feature (96)..(411): Homolog of NCBI NO: 3420906 NR Description: zinc finger protein; WRKY1 [Pimpinella
  misc_feature (167)..(420): Homolog of NCBI NO: 14530685 NR Description: WRKY DNA-binding protein [Nicotiana tabacum]
  misc_feature (167)..(387): Homolog of NCBI NO: 4760692 NR Description: transcription factor NtWRKY2 [Nicotiana tabacum]
  misc_feature (161)..(446): Homolog of NCBI NO: 18158619 NR Description: WRKY-like drought-induced protein [Retama raetam]
  misc_feature (98)..(387): Homolog of NCBI NO: 15227612 NR Description: WRKY family transcription factor; protein id: supported by cDNA: gi_13506736 [Arabidopsis thaliana]
  misc_feature (169)..(411): Homolog of NCBI NO: 5917653 NR Description: zinc-finger type transcription factor WRKY1
  misc_feature (291)..(397): Homolog of NCBI NO: 13506733 NR Description: WRKY DNA-binding protein 26 [Arabidopsis thaliana]

SEQ ID NO: 92955 - protein, 409 aa, Arabidopsis thaliana; identical to SEQ ID NO: 89199
  peptide (1)..(409): Ceres Seq. ID no. 12716055
  misc_feature (1)..(405): Homolog of NCBI NO: 22329039 NR Description: WRKY family transcription factor; protein id:
  misc_feature (1)..(406): Homolog of NCBI NO: 25407696 NR Description: hypothetical protein AT4g30930 [imported] - thaliana >gi|2980773|emb|CAA18200.1| putative protein thaliana] >gi|7269995|emb|CAB79811.1| putative protein
  misc_feature (1)..(405): Homolog of NCBI NO: 29839502 NR Description: Probable WRKY transcription factor 32 (WRKY protein 32) >gi|28393378|gb|AAO42113.1| putative WRKY family factor [Arabidopsis thaliana] >gi|28827598|gb|AAO50643.1|
  misc_feature (55)..(370): Homolog of NCBI NO: 3420906 NR Description: zinc finger protein; WRKY1 [Pimpinella
  misc_feature (126)..(379): Homolog of NCBI NO: 14530685 NR Description: WRKY DNA-binding protein [Nicotiana tabacum]
  misc_feature (126)..(346): Homolog of NCBI NO: 4760692 NR Description: transcription factor NtWRKY2 [Nicotiana tabacum]
  misc_feature (120)..(405): Homolog of NCBI NO: 18158619 NR Description: WRKY-like drought-induced protein [Retama raetam]
  misc_feature (57)..(346): Homolog of NCBI NO: 15227612 NR Description: WRKY family transcription factor; protein id: supported by cDNA: gi_13506736 [Arabidopsis thaliana]
  misc_feature (128)..(370): Homolog of NCBI NO: 5917653 NR Description: zinc-finger type transcription factor WRKY1
  misc_feature (250)..(356): Homolog of NCBI NO: 13506733 NR Description: WRKY DNA-binding protein 26 [Arabidopsis thaliana]

SEQ ID NO: 92956 - DNA, 1708 bp, Arabidopsis thaliana; identical to SEQ ID NO: 89200
  misc_feature (1)..(1708): Ceres Seq. ID no. 12716089
  misc_feature: MA Experiment ID: 108488 Result: Down-regulated in Transcription
  misc_feature: MA Experiment ID: 108489 Result: Up-regulated in Transcription
  misc_feature: MA Experiment ID: 108561 Result: Up-regulated in Transcription
  misc_feature: MA Experiment 108561 PARAMETER Experiment Name: At_100uM_ABA_cDNA_P Parameter: Timepoint (hr) Value: 6
  misc_feature: MA Experiment 108561 PARAMETER Experiment Name: At_100uM_ABA_cDNA_P Parameter: Tissue Value: Aerial
  misc_feature: MA Experiment 108561 PARAMETER Experiment Name: At_100uM_ABA_cDNA_P Parameter: Treatment Value: 100uM ABA vs. No Treatment
  misc_feature: MA Experiment ID: 108595 Result: Up-regulated in Transcription
  misc_feature: MA Experiment 108595 PARAMETER Experiment Name: At_Ler-pi_Ovule_cDNA_P Parameter: Plant Line Value: null
  misc_feature: MA Experiment ID: 20000070 Result: Up-regulated in Transcription
  misc_feature: MA Experiment 20000070 PARAMETER Experiment Name: At_100uM_ABA_Mutants_cDNA_P Parameter: Plant Line Value: CS24
  misc_feature: MA Experiment 20000070 PARAMETER Experiment Name: At_100uM_ABA_Mutants_cDNA_P Parameter: Timepoint (hr) Value: 6
  misc_feature: MA Experiment 20000070 PARAMETER Experiment Name: At_100uM_ABA_Mutants_cDNA_P Parameter: Tissue Value: Aerial
  misc_feature: MA Experiment 20000070 PARAMETER Experiment Name: At_100uM_ABA_Mutants_cDNA_P Parameter: Treatment Value: 100uM ABA vs. No Treatment
  misc_feature: MA Experiment ID: 20000071 Result: Up-regulated in Transcription
  misc_feature: MA Experiment 20000071 PARAMETER Experiment Name: At_100uM_ABA_Mutants_cDNA_P Parameter: Plant Line Value: CS8104
  misc_feature: MA Experiment 20000071 PARAMETER Experiment Name: At_100uM_ABA_Mutants_cDNA_P Parameter: Timepoint (hr) Value: 6
  misc_feature: MA Experiment 20000071 PARAMETER Experiment Name: At_100uM_ABA_Mutants_cDNA_P Parameter: Tissue Value: Aerial
  misc_feature: MA Experiment 20000071 PARAMETER Experiment Name: At_100uM_ABA_Mutants_cDNA_P Parameter: Treatment Value: 100uM ABA vs. No Treatment
  misc_feature: MA Experiment ID: 20000072 Result: Up-regulated in Transcription
  misc_feature: MA Experiment 20000072 PARAMETER Experiment Name: At_100uM_ABA_Mutants_cDNA_P Parameter: Plant Line Value: CS8105
  misc_feature: MA Experiment 20000072 PARAMETER Experiment Name: At_100uM_ABA_Mutants_cDNA_P Parameter: Timepoint (hr) Value: 6
  misc_feature: MA Experiment 20000072 PARAMETER Experiment Name: At_100uM_ABA_Mutants_cDNA_P Parameter: Tissue Value: Aerial
  misc_feature: MA Experiment 20000072 PARAMETER Experiment Name: At_100uM_ABA_Mutants_cDNA_P Parameter: Treatment Value: 100uM ABA vs. No Treatment
  misc_feature: MA Experiment ID: 20000086 Result: Up-regulated in Transcription
  misc_feature: MA Experiment 20000086 PARAMETER Experiment Name: At_100uM_ABA_Mutants_cDNA_P Parameter: Plant Line Value: CS22
  misc_feature: MA Experiment 20000086 PARAMETER Experiment Name: At_100uM_ABA_Mutants_cDNA_P Parameter: Timepoint (hr) Value: 6
  misc_feature: MA Experiment 20000086 PARAMETER Experiment Name: At_100uM_ABA_Mutants_cDNA_P Parameter: Tissue Value: Aerial
  misc_feature: MA Experiment 20000086 PARAMETER Experiment Name: At_100uM_ABA_Mutants_cDNA_P Parameter: Treatment Value: 100uM ABA vs. No Treatment
  misc_feature: MA Experiment ID: 20000179 Result: Up-regulated in Transcription
  misc_feature: MA Experiment 20000179 PARAMETER Experiment Name: At_Germinating_Seeds_P Parameter: Age (hr) Value: 6 vs. 0
  misc_feature: MA Experiment 20000179 PARAMETER Experiment Name: At_Germinating_Seeds_P Parameter: Tissue Value: Germinating Seeds
  misc_feature: MA Experiment ID: 20000184 Result: Down-regulated in Transcription
  misc_feature: MA Experiment 20000184 PARAMETER Experiment Name: At_Shoots__P Parameter: Age (day) Value: 7
  misc_feature: MA Experiment 20000184 PARAMETER Experiment Name: At_Shoots__P Parameter: Tissue Value: Shoots vs. Whole Plant
  misc_feature: MA Experiment ID: 20000227 Result: Down-regulated in Transcription
  misc_feature: MA Experiment 20000227 PARAMETER Experiment Name: At_Root-Tips-vs-Tops_P Parameter: Tissue Value: Root Tips vs. Root Tops
  misc_feature: MA Experiment ID: 20000234 Result: Down-regulated in Transcription
  misc_feature: MA Experiment 20000234 PARAMETER Experiment Name: At_Siliques_P Parameter: Age (day) Value: 21
  misc_feature: MA Experiment 20000234 PARAMETER Experiment Name: At_Siliques_P Parameter: Organism Value: A. thaliana
  misc_feature: MA Experiment 20000234 PARAMETER Experiment Name: At_Siliques_P Parameter: Plant Line Value: WS
  misc_feature: MA Experiment 20000234 PARAMETER Experiment Name: At_Siliques_P Parameter: Tissue Value: Less Than 5mm Siliques vs. Whole Plant
  misc_feature: MA Experiment ID: 20000235 Result: Down-regulated in Transcription
  misc_feature: MA Experiment 20000235 PARAMETER Experiment Name: At_Siliques_P Parameter: Age (day) Value: 21
  misc_feature: MA Experiment 20000235 PARAMETER Experiment Name: At_Siliques_P Parameter: Organism Value: A. thaliana
  misc_feature: MA Experiment 20000235 PARAMETER Experiment Name: At_Siliques_P Parameter: Plant Line Value: WS
  misc_feature: MA Experiment 20000235 PARAMETER Experiment Name: At_Siliques_P Parameter: Tissue Value: 5-10mm Siliques vs. Whole Plant
  misc_feature: MA Experiment ID: 20000265 Result: Down-regulated in Transcription
  misc_feature: MA Experiment 20000265 PARAMETER Experiment Name: At_Open_Flower_P Parameter: Age (day) Value: 21
  misc_feature: MA Experiment 20000265 PARAMETER Experiment Name: At_Open_Flower_P Parameter: Plant Line Value: WS
  misc_feature: MA Experiment 20000265 PARAMETER Experiment Name: At_Open_Flower_P Parameter: Tissue Value: Closed Flower vs. Whole Plant
  misc_feature: MA Experiment ID: 20000437 Result: Up-regulated in Transcription
  misc_feature: MA Experiment 20000437 PARAMETER Experiment Name: At_Drought_P Parameter: Age (day) Value: 8
  misc_feature: MA Experiment 20000437 PARAMETER Experiment Name: At_Drought_P Parameter: Organism Value: A. thaliana
  misc_feature: MA Experiment 20000437 PARAMETER Experiment Name: At_Drought_P Parameter: Plant Line Value: WS
  misc_feature: MA Experiment 20000437 PARAMETER Experiment Name: At_Drought_P Parameter: Timepoint (hr) Value: 24
  misc_feature: MA Experiment 20000437 PARAMETER Experiment Name: At_Drought_P Parameter: Tissue Value: Whole Plant
  misc_feature: MA Experiment 20000437 PARAMETER Experiment Name: At_Drought_P Parameter: Treatment Value: Drought vs. No Drought
  misc_feature: MA Experiment ID: 20000438 Result: Down-regulated in Transcription
  misc_feature: MA Experiment 20000438 PARAMETER Experiment Name: At_Shoots__P Parameter: Age (day) Value: 14
  misc_feature: MA Experiment 20000438 PARAMETER Experiment Name: At_Shoots__P Parameter: Tissue Value: Shoots vs. Whole Plant
  misc_feature: MA Experiment ID: 20000495 Result: Up-regulated in Transcription
  misc_feature: MA Experiment 20000495 PARAMETER Experiment Name: At_Guard_Cells_P Parameter: Harvest Date Value: 8/2/2002
  misc_feature: MA Experiment 20000495 PARAMETER Experiment Name: At_Guard_Cells_P Parameter: Organism Value: A. thaliana
  misc_feature: MA Experiment 20000495 PARAMETER Experiment Name: At_Guard_Cells_P Parameter: Tissue Value: Guard Cells vs. Leaves
  misc_feature: MA Experiment ID: 20000527 Result: Down-regulated in Transcription
  misc_feature: MA Experiment 20000527 PARAMETER Experiment Name: At_10percent_PEG_P Parameter: Age (day) Value: 20
  misc_feature: MA Experiment 20000527 PARAMETER Experiment Name: At_10percent_PEG_P Parameter: Organism Value: A. thaliana
  misc_feature: MA Experiment 20000527 PARAMETER Experiment Name: At_10percent_PEG_P Parameter: Plant Line Value: WS
  misc_feature: MA Experiment 20000527 PARAMETER Experiment Name: At_10percent_PEG_P Parameter: Timepoint (day) Value: 20
  misc_feature: MA Experiment 20000527 PARAMETER Experiment Name: At_10percent_PEG_P Parameter: Tissue Value: Whole Plant
  misc_feature: MA Experiment 20000527 PARAMETER Experiment Name: At_10percent_PEG_P Parameter: Treatment Value: 10percent PEG vs. No Treatment
  misc_feature: MA Experiment ID: 20000794 Result: Up-regulated in Transcription
  misc_feature: MA Experiment 20000794 PARAMETER Experiment Name: At_Petals_P Parameter: Age (day) Value: 23-25 days
  misc_feature: MA Experiment 20000794 PARAMETER Experiment Name: At_Petals_P Parameter: Plant Line Value: WS
  misc_feature: MA Experiment 20000794 PARAMETER Experiment Name: At_Petals_P Parameter: Tissue Value: Petals vs. Whole plant
  misc_feature: MA Experiment ID: 20001555 Result: Up-regulated in Transcription
  misc_feature: MA Experiment 20001555 PARAMETER Experiment Name: At_Drought_Soil_Dry_P Parameter: Age (day) Value: 24
  misc_feature: MA Experiment 20001555 PARAMETER Experiment Name: At_Drought_Soil_Dry_P Parameter: Organism Value: A. thaliana
  misc_feature: MA Experiment 20001555 PARAMETER Experiment Name: At_Drought_Soil_Dry_P Parameter: Plant Line Value: WS
  misc_feature: MA Experiment 20001555 PARAMETER Experiment Name: At_Drought_Soil_Dry_P Parameter: Post Timepoint (hr) Value: None
  misc_feature: MA Experiment 20001555 PARAMETER Experiment Name: At_Drought_Soil_Dry_P Parameter: Post-Treatment Value: None
  misc_feature: MA Experiment 20001555 PARAMETER Experiment Name: At_Drought_Soil_Dry_P Parameter: Timepoint (day) Value: 10
  misc_feature: MA Experiment 20001555 PARAMETER Experiment Name: At_Drought_Soil_Dry_P Parameter: Treatment Value: Drought vs. No Drought
  misc_feature: MA Experiment ID: 20001556 Result: Up-regulated in Transcription
  misc_feature: MA Experiment 20001556 PARAMETER Experiment Name: At_Drought_Soil_Dry_P Parameter: Age (day) Value: 26
  misc_feature: MA Experiment 20001556 PARAMETER Experiment Name: At_Drought_Soil_Dry_P Parameter: Organism Value: A. thaliana
  misc_feature: MA Experiment 20001556 PARAMETER Experiment Name: At_Drought_Soil_Dry_P Parameter: Plant Line Value: WS
  misc_feature: MA Experiment 20001556 PARAMETER Experiment Name: At_Drought_Soil_Dry_P Parameter: Post Timepoint (hr) Value: None
  misc_feature: MA Experiment 20001556 PARAMETER Experiment Name: At_Drought_Soil_Dry_P Parameter: Post-Treatment Value: None
  misc_feature: MA Experiment 20001556 PARAMETER Experiment Name: At_Drought_Soil_Dry_P Parameter: Timepoint (day) Value: 12
  misc_feature: MA Experiment 20001556 PARAMETER Experiment Name: At_Drought_Soil_Dry_P Parameter: Treatment Value: Drought vs. No Drought
  misc_feature: MA Experiment ID: 20001557 Result: Up-regulated in Transcription
  misc_feature: MA Experiment 20001557 PARAMETER Experiment Name: At_Drought_Soil_Dry_P Parameter: Age (day) Value: 27
  misc_feature: MA Experiment 20001557 PARAMETER Experiment Name: At_Drought_Soil_Dry_P Parameter: Organism Value: A. thaliana
  misc_feature: MA Experiment 20001557 PARAMETER Experiment Name: At_Drought_Soil_Dry_P Parameter: Plant Line Value: WS
  misc_feature: MA Experiment 20001557 PARAMETER Experiment Name: At_Drought_Soil_Dry_P Parameter: Post Timepoint (hr) Value: 3
  misc_feature: MA Experiment 20001557 PARAMETER Experiment Name: At_Drought_Soil_Dry_P Parameter: Post-Treatment Value: Re-Water vs. No Drought
  misc_feature: MA Experiment 20001557 PARAMETER Experiment Name: At_Drought_Soil_Dry_P Parameter: Timepoint (day) Value: 13
  misc_feature: MA Experiment 20001557 PARAMETER Experiment Name: At_Drought_Soil_Dry_P Parameter: Treatment Value: Drought vs. No Drought
  misc_feature: MA Experiment ID: 20001559 Result: Up-regulated in Transcription
  misc_feature: MA Experiment 20001559 PARAMETER Experiment Name: At_Drought_Soil_Dry_P Parameter: Age (day) Value: 28
  misc_feature: MA Experiment 20001559 PARAMETER Experiment Name: At_Drought_Soil_Dry_P Parameter: Organism Value: A. thaliana
  misc_feature: MA Experiment 20001559 PARAMETER Experiment Name: At_Drought_Soil_Dry_P Parameter: Plant Line Value: WS
  misc_feature: MA Experiment 20001559 PARAMETER Experiment Name: At_Drought_Soil_Dry_P Parameter: Post Timepoint (hr) Value: 29
  misc_feature: MA Experiment 20001559 PARAMETER Experiment Name: At_Drought_Soil_Dry_P Parameter: Post-Treatment Value: Re-Water vs. No Drought
  misc_feature: MA Experiment 20001559 PARAMETER Experiment Name: At_Drought_Soil_Dry_P Parameter: Timepoint (day) Value: 14
  misc_feature: MA Experiment 20001559 PARAMETER Experiment Name: At_Drought_Soil_Dry_P Parameter: Treatment Value: Drought vs. No Drought
  misc_feature: MA Experiment ID: 20001904 Result: Up-regulated in Transcription
  misc_feature: MA Experiment 20001904 PARAMETER Experiment Name: At_Drought_Reproduction_P Parameter: Age (day) Value: 37
  misc_feature: MA Experiment 20001904 PARAMETER Experiment Name: At_Drought_Reproduction_P Parameter: Organism Value: A. thaliana
  misc_feature: MA Experiment 20001904 PARAMETER Experiment Name: At_Drought_Reproduction_P Parameter: Plant Line Value: WS
  misc_feature: MA Experiment 20001904 PARAMETER Experiment Name: At_Drought_Reproduction_P Parameter: Timepoint (day) Value: 7
  misc_feature: MA Experiment 20001904 PARAMETER Experiment Name: At_Drought_Reproduction_P Parameter: Tissue Value: Rosettes
  misc_feature: MA Experiment 20001904 PARAMETER Experiment Name: At_Drought_Reproduction_P Parameter: Treatment Value: Drought vs. No Drought
  misc_feature: MA Experiment ID: 20001905 Result: Up-regulated in Transcription
  misc_feature: MA Experiment 20001905 PARAMETER Experiment Name: At_Drought_Reproduction_P Parameter: Age (day) Value: 40
  misc_feature: MA Experiment 20001905 PARAMETER Experiment Name: At_Drought_Reproduction_P Parameter: Organism Value: A. thaliana
  misc_feature: MA Experiment 20001905 PARAMETER Experiment Name: At_Drought_Reproduction_P Parameter: Plant Line Value: WS
  misc_feature: MA Experiment 20001905 PARAMETER Experiment Name: At_Drought_Reproduction_P Parameter: Timepoint (day) Value: 10
  misc_feature: MA Experiment 20001905 PARAMETER Experiment Name: At_Drought_Reproduction_P Parameter: Tissue Value: Rosettes
  misc_feature: MA Experiment 20001905 PARAMETER Experiment Name: At_Drought_Reproduction_P Parameter: Treatment Value: Drought vs. No Drought
  misc_feature: MA Experiment ID: 20001906 Result: Up-regulated in Transcription
  misc_feature: MA Experiment 20001906 PARAMETER Experiment Name: At_Drought_Reproduction_P Parameter: Age (day) Value: 35
  misc_feature: MA Experiment 20001906 PARAMETER Experiment Name: At_Drought_Reproduction_P Parameter: Organism Value: A. thaliana
  misc_feature: MA Experiment 20001906 PARAMETER Experiment Name: At_Drought_Reproduction_P Parameter: Plant Line Value: WS
  misc_feature: MA Experiment 20001906 PARAMETER Experiment Name: At_Drought_Reproduction_P Parameter: Timepoint (day) Value: 5
  misc_feature: MA Experiment 20001906 PARAMETER Experiment Name: At_Drought_Reproduction_P Parameter: Tissue Value: Siliques
  misc_feature: MA Experiment 20001906 PARAMETER Experiment Name: At_Drought_Reproduction_P Parameter: Treatment Value: Drought vs. No Drought
  misc_feature: MA Experiment ID: 20001908 Result: Up-regulated in Transcription
  misc_feature: MA Experiment 20001908 PARAMETER Experiment Name: At_Drought_Reproduction_P Parameter: Age (day) Value: 40
  misc_feature: MA Experiment 20001908 PARAMETER Experiment Name: At_Drought_Reproduction_P Parameter: Organism Value: A. thaliana
  misc_feature: MA Experiment 20001908 PARAMETER Experiment Name: At_Drought_Reproduction_P Parameter: Plant Line Value: WS
  misc_feature: MA Experiment 20001908 PARAMETER Experiment Name: At_Drought_Reproduction_P Parameter: Timepoint (day) Value: 10
  misc_feature: MA Experiment 20001908 PARAMETER Experiment Name: At_Drought_Reproduction_P Parameter: Tissue Value: Siliques
  misc_feature: MA Experiment 20001908 PARAMETER Experiment Name: At_Drought_Reproduction_P Parameter: Treatment Value: Drought vs. No Drought
  misc_feature: MA Experiment ID: 20001911 Result: Up-regulated in Transcription
  misc_feature: MA Experiment 20001911 PARAMETER Experiment Name: At_Drought_Reproduction_P Parameter: Age (day) Value: 40
  misc_feature: MA Experiment 20001911 PARAMETER Experiment Name: At_Drought_Reproduction_P Parameter: Organism Value: A. thaliana
  misc_feature: MA Experiment 20001911 PARAMETER Experiment Name: At_Drought_Reproduction_P Parameter: Plant Line Value: WS
  misc_feature: MA Experiment 20001911 PARAMETER Experiment Name: At_Drought_Reproduction_P Parameter: Timepoint (day) Value: 10
  misc_feature: MA Experiment 20001911 PARAMETER Experiment Name: At_Drought_Reproduction_P Parameter: Tissue Value: Flowers
  misc_feature: MA Experiment 20001911 PARAMETER Experiment Name: At_Drought_Reproduction_P Parameter: Treatment Value: Drought vs. No Drought

SEQ ID NO: 92957 - protein, 392 aa, Arabidopsis thaliana; identical to SEQ ID NO: 22646
  peptide (1)..(392): Ceres Seq. ID no. 12716090
  misc_feature (46)..(83): Pfam Name: Thioredoxin Pfam Description: Thioredoxin
  misc_feature (1)..(392): Homolog of NCBI NO: 18417767 NR Description: similar to putative receptor kinase; protein id: supported by cDNA: 34120., supported by cDNA: gi_17380977, by cDNA: gi_20465608 [Arabidopsis thaliana]
  misc_feature (189)..(392): Homolog of NCBI NO: 7486675 NR Description: hypothetical protein F8F16.60 - Arabidopsis >gi|2827519|emb|CAA16527.1| predicted protein [Arabidopsis >gi|7270026|emb|CAB79842.1| predicted protein [Arabidopsis
  misc_feature (1)..(196): Homolog of NCBI NO: 7488267 NR Description: protein kinase homolog F8F16.70 - Arabidopsis
  misc_feature (13)..(357): Homolog of NCBI NO: 38567893 NR Description: OSJNBa0060N03.13 [Oryza sativa (japonica
  misc_feature (1)..(388): Homolog of NCBI NO: 18406743 NR Description: expressed protein; protein id: At1g60420.1, by cDNA: 34936., supported by cDNA: gi_17529293 [Arabidopsis
  misc_feature (17)..(387): Homolog of NCBI NO: 21592996 NR Description: PDI-like protein [Arabidopsis thaliana]
  misc_feature (17)..(388): Homolog of NCBI NO: 31415911 NR Description: putative trypanothione-dependent peroxidase
  misc_feature (13)..(390): Homolog of NCBI NO: 4056568 NR Description: PDI-like protein [Zea mays]
  misc_feature (19)..(388): Homolog of NCBI NO: 31415915 NR Description: putative trypanothione-dependent peroxidase
  misc_feature (17)..(333): Homolog of NCBI NO: 23304737 NR Description: PDI-like protein [Quercus suber]

SEQ ID NO: 92958 - protein, 303 aa, Arabidopsis thaliana; identical to SEQ ID NO: 22647
  peptide (1)..(303): Ceres Seq. ID no. 12716091
  misc_feature (117)..(154): Pfam Name: Thioredoxin Pfam Description: Thioredoxin
  misc_feature (1)..(303): Homolog of NCBI NO: 18417767 NR Description: similar to putative receptor kinase; protein id: supported by cDNA: 34120., supported by cDNA: gi_17380977, by cDNA: gi_20465608 [Arabidopsis thaliana]
  misc_feature (100)..(303): Homolog of NCBI NO: 7486675 NR Description: hypothetical protein F8F16.60 - Arabidopsis >gi|2827519|emb|CAA16527.1| predicted protein [Arabidopsis >gi|7270026|emb|CAB79842.1| predicted protein [Arabidopsis
  misc_feature (1)..(107): Homolog of NCBI NO: 7488267 NR Description: protein kinase homolog F8F16.70 - Arabidopsis
  misc_feature (1)..(268): Homolog of NCBI NO: 38567893 NR Description: OSJNBa0060N03.13 [Oryza sativa (japonica
  misc_feature (1)..(299): Homolog of NCBI NO: 18406743 NR Description: expressed protein; protein id: At1g60420.1, by cDNA: 34936., supported by cDNA: gi_17529293 [Arabidopsis
  misc_feature (1)..(298): Homolog of NCBI NO: 21592996 NR Description: PDI-like protein [Arabidopsis thaliana]
  misc_feature (1)..(299): Homolog of NCBI NO: 31415911 NR Description: putative trypanothione-dependent peroxidase
  misc_feature (1)..(301): Homolog of NCBI NO: 4056568 NR Description: PDI-like protein [Zea mays]
  misc_feature (1)..(299): Homolog of NCBI NO: 31415915 NR Description: putative trypanothione-dependent peroxidase
  misc_feature (1)..(244): Homolog of NCBI NO: 23304737 NR Description: PDI-like protein [Quercus suber]

SEQ ID NO: 92959 - protein, 293 aa, Arabidopsis thaliana; identical to SEQ ID NO: 22648
  peptide (1)..(293): Ceres Seq. ID no. 12716092
  misc_feature (107)..(144): Pfam Name: Thioredoxin Pfam Description: Thioredoxin
  misc_feature (1)..(293): Homolog of NCBI NO: 18417767 NR Description: similar to putative receptor kinase; protein id: supported by cDNA: 34120., supported by cDNA: gi_17380977, by cDNA: gi_20465608 [Arabidopsis thaliana]
  misc_feature (90)..(293): Homolog of NCBI NO: 7486675 NR Description: hypothetical protein F8F16.60 - Arabidopsis >gi|2827519|emb|CAA16527.1| predicted protein [Arabidopsis >gi|7270026|emb|CAB79842.1| predicted protein [Arabidopsis
  misc_feature (1)..(97): Homolog of NCBI NO: 7488267 NR Description: protein kinase homolog F8F16.70 - Arabidopsis
  misc_feature (1)..(258): Homolog of NCBI NO: 38567893 NR Description: OSJNBa0060N03.13 [Oryza sativa (japonica
  misc_feature (1)..(289): Homolog of NCBI NO: 18406743 NR Description: expressed protein; protein id: At1g60420.1, by cDNA: 34936., supported by cDNA: gi_17529293 [Arabidopsis
  misc_feature (1)..(288): Homolog of NCBI NO: 21592996 NR Description: PDI-like protein [Arabidopsis thaliana]
  misc_feature (1)..(289): Homolog of NCBI NO: 31415911 NR Description: putative trypanothione-dependent peroxidase
  misc_feature (1)..(291): Homolog of NCBI NO: 4056568 NR Description: PDI-like protein [Zea mays]
  misc_feature (1)..(289): Homolog of NCBI NO: 31415915 NR Description: putative trypanothione-dependent peroxidase
  misc_feature (1)..(234): Homolog of NCBI NO: 23304737 NR Description: PDI-like protein [Quercus suber]

SEQ ID NO: 92960 - DNA, 1139 bp, Arabidopsis thaliana; identical to SEQ ID NO: 89204
  misc_feature (1)..(1139): Ceres Seq. ID no. 12716093
  misc_feature: MA Experiment ID: 108434 Result: Up-regulated in Transcription
  misc_feature: MA Experiment 108434 PARAMETER Experiment Name: At_Root_Tips_cDNA_P Parameter: Tissue Value: Root Tips
  misc_feature: MA Experiment ID: 108473 Result: Up-regulated in Transcription
  misc_feature: MA Experiment 108473 PARAMETER Experiment Name: At_Drought_Flowers_cDNA_P Parameter: Timepoint (hr) Value: 7 d
  misc_feature: MA Experiment 108473 PARAMETER Experiment Name: At_Drought_Flowers_cDNA_P Parameter: Tissue Value: Flower
  misc_feature: MA Experiment 108473 PARAMETER Experiment Name: At_Drought_Flowers_cDNA_P Parameter: Treatment Value: Drought vs. No Drought
  misc_feature: MA Experiment ID: 108572 Result: Up-regulated in Transcription
  misc_feature: MA Experiment 108572 PARAMETER Experiment Name: At_Drought_cDNA_P Parameter: Timepoint (hr) Value: 1
  misc_feature: MA Experiment 108572 PARAMETER Experiment Name: At_Drought_cDNA_P Parameter: Tissue Value: Aerial
  misc_feature: MA Experiment 108572 PARAMETER Experiment Name: At_Drought_cDNA_P Parameter: Treatment Value: Drought vs. No Drought
  misc_feature: MA Experiment ID: 108573 Result: Up-regulated in Transcription
  misc_feature: MA Experiment 108573 PARAMETER Experiment Name: At_Drought_cDNA_P Parameter: Timepoint (hr) Value: 6
  misc_feature: MA Experiment 108573 PARAMETER Experiment Name: At_Drought_cDNA_P Parameter: Tissue Value: Aerial
  misc_feature: MA Experiment 108573 PARAMETER Experiment Name: At_Drought_cDNA_P Parameter: Treatment Value: Drought vs. No Drought
  misc_feature: MA Experiment ID: 20000069 Result: Up-regulated in Transcription
  misc_feature: MA Experiment 20000069 PARAMETER Experiment Name: At_100uM_ABA_Mutants_cDNA_P Parameter: Plant Line Value: CS23
  misc_feature: MA Experiment 20000069 PARAMETER Experiment Name: At_100uM_ABA_Mutants_cDNA_P Parameter: Timepoint (hr) Value: 6
  misc_feature: MA Experiment 20000069 PARAMETER Experiment Name: At_100uM_ABA_Mutants_cDNA_P Parameter: Tissue Value: Aerial
  misc_feature: MA Experiment 20000069 PARAMETER Experiment Name: At_100uM_ABA_Mutants_cDNA_P Parameter: Treatment Value: 100uM ABA vs. No Treatment
  misc_feature: MA Experiment ID: 20000088 Result: Up-regulated in Transcription
  misc_feature: MA Experiment 20000088 PARAMETER Experiment Name: At_100uM_ABA_Mutants_cDNA_P Parameter: Plant Line Value: Landsberg
  misc_feature: MA Experiment 20000088 PARAMETER Experiment Name: At_100uM_ABA_Mutants_cDNA_P Parameter: Timepoint (hr) Value: 6
  misc_feature: MA Experiment 20000088 PARAMETER Experiment Name: At_100uM_ABA_Mutants_cDNA_P Parameter: Tissue Value: Aerial
  misc_feature: MA Experiment 20000088 PARAMETER Experiment Name: At_100uM_ABA_Mutants_cDNA_P Parameter: Treatment Value: 100uM ABA vs. No Treatment
  misc_feature: MA Experiment ID: 20000089 Result: Up-regulated in Transcription
  misc_feature: MA Experiment ID: 20000224 Result: Down-regulated in Transcription
  misc_feature: MA Experiment ID: 20000437 Result: Up-regulated in Transcription
  misc_feature: MA Experiment 20000437 PARAMETER Experiment Name: At_Drought_P Parameter: Age (day) Value: 8
  misc_feature: MA Experiment 20000437 PARAMETER Experiment Name: At_Drought_P Parameter: Organism Value: A. thaliana
  misc_feature: MA Experiment 20000437 PARAMETER Experiment Name: At_Drought_P Parameter: Plant Line Value: WS
  misc_feature: MA Experiment 20000437 PARAMETER Experiment Name: At_Drought_P Parameter: Timepoint (hr) Value: 24
  misc_feature: MA Experiment 20000437 PARAMETER Experiment Name: At_Drought_P Parameter: Tissue Value: Whole Plant
  misc_feature: MA Experiment 20000437 PARAMETER Experiment Name: At_Drought_P Parameter: Treatment Value: Drought vs. No Drought
  misc_feature: MA Experiment ID: 20001248 Result: Up-regulated in Transcription
  misc_feature: MA Experiment 20001248 PARAMETER Experiment Name: At_Far-red-induction_P Parameter: Age (day) Value: 7
  misc_feature: MA Experiment 20001248 PARAMETER Experiment Name: At_Far-red-induction_P Parameter: Light Value: Far-red vs. White
  misc_feature: MA Experiment 20001248 PARAMETER Experiment Name: At_Far-red-induction_P Parameter: Organism Value: A. thaliana
  misc_feature: MA Experiment 20001248 PARAMETER Experiment Name: At_Far-red-induction_P Parameter: Plant Line Value: Columbia
  misc_feature: MA Experiment 20001248 PARAMETER Experiment Name: At_Far-red-induction_P Parameter: Timepoint (hr) Value: 4
  misc_feature: MA Experiment 20001248 PARAMETER Experiment Name: At_Far-red-induction_P Parameter: Tissue Value: Whole Plant
  misc_feature: MA Experiment ID: 20001450 Result: Up-regulated in Transcription
  misc_feature: MA Experiment 20001450 PARAMETER Experiment Name: At_Far-red-induction_P Parameter: Age (day) Value: 7
  misc_feature: MA Experiment 20001450 PARAMETER Experiment Name: At_Far-red-induction_P Parameter: Light Value: Far-red vs. White
  misc_feature: MA Experiment 20001450 PARAMETER Experiment Name: At_Far-red-induction_P Parameter: Organism Value: A. thaliana
  misc_feature: MA Experiment 20001450 PARAMETER Experiment Name: At_Far-red-induction_P Parameter: Plant Line Value: Columbia
  misc_feature: MA Experiment 20001450 PARAMETER Experiment Name: At_Far-red-induction_P Parameter: Timepoint (hr) Value: 8
  misc_feature: MA Experiment 20001450 PARAMETER Experiment Name: At_Far-red-induction_P Parameter: Tissue Value: Whole Plant
  misc_feature: MA Experiment ID: 20001451 Result: Up-regulated in Transcription
  misc_feature: MA Experiment 20001451 PARAMETER Experiment Name: At_Far-red-induction_P Parameter: Age (day) Value: 7
  misc_feature: MA Experiment 20001451 PARAMETER Experiment Name: At_Far-red-induction_P Parameter: Light Value: Far-red vs. White
  misc_feature: MA Experiment 20001451 PARAMETER Experiment Name: At_Far-red-induction_P Parameter: Organism Value: A. thaliana
  misc_feature: MA Experiment 20001451 PARAMETER Experiment Name: At_Far-red-induction_P Parameter: Plant Line Value: Columbia
  misc_feature: MA Experiment 20001451 PARAMETER Experiment Name: At_Far-red-induction_P Parameter: Timepoint (hr) Value: 24
  misc_feature: MA Experiment 20001451 PARAMETER Experiment Name: At_Far-red-induction_P Parameter: Tissue Value: Whole Plant
  misc_feature: MA Experiment ID: 20001556 Result: Up-regulated in Transcription
  misc_feature: MA Experiment 20001556 PARAMETER Experiment Name: At_Drought_Soil_Dry_P Parameter: Age (day) Value: 26
  misc_feature: MA Experiment 20001556 PARAMETER Experiment Name: At_Drought_Soil_Dry_P Parameter: Organism Value: A. thaliana
  misc_feature: MA Experiment 20001556 PARAMETER Experiment Name: At_Drought_Soil_Dry_P Parameter: Plant Line Value: WS
  misc_feature: MA Experiment 20001556 PARAMETER Experiment Name: At_Drought_Soil_Dry_P Parameter: Post Timepoint (hr) Value: None
  misc_feature: MA Experiment 20001556 PARAMETER Experiment Name: At_Drought_Soil_Dry_P Parameter: Post-Treatment Value: None
  misc_feature: MA Experiment 20001556 PARAMETER Experiment Name: At_Drought_Soil_Dry_P Parameter: Timepoint (day) Value: 12
  misc_feature: MA Experiment 20001556 PARAMETER Experiment Name: At_Drought_Soil_Dry_P Parameter: Treatment Value: Drought vs. No Drought

SEQ ID NO: 92961 - protein, 227 aa, Arabidopsis thaliana; identical to SEQ ID NO: 89205
  peptide (1)..(227): Ceres Seq. ID no. 12716094
  misc_feature (3)..(181): Pfam Name: ChaC-like protein Pfam Description: ChaC-like protein
  misc_feature (1)..(227): Homolog of NCBI NO: 18417778 NR Description: unknown protein; protein id: At4g31290.1,
  misc_feature (1)..(227): Homolog of NCBI NO: 21593515 NR Description: unknown [Arabidopsis thaliana]
  misc_feature (1)..(215): Homolog of NCBI NO: 15239626 NR Description: putative protein; protein id: At5g26220.1 thaliana] >gi|26450775|dbj|BAC42496.1| unknown protein thaliana] >gi|28950749|gb|AAO63298.1| At5g26220 [Arabidopsis
  misc_feature (1)..(224): Homolog of NCBI NO: 27525010 NR Description: putative cation transporter [Beta procumbens]
  misc_feature (1)..(81): Homolog of NCBI NO: 7486662 NR Description: hypothetical protein F8F16.110 - Arabidopsis >gi|2827524|emb|CAA16532.1| predicted protein [Arabidopsis >gi|7270031|emb|CAB79847.1| predicted protein [Arabidopsis
  misc_feature (148)..(227): Homolog of NCBI NO: 7486662 NR Description: hypothetical protein F8F16.110 - Arabidopsis >gi|2827524|emb|CAA16532.1| predicted protein [Arabidopsis >gi|7270031|emb|CAB79847.1| predicted protein [Arabidopsis
  misc_feature (100)..(165): Homolog of NCBI NO: 7486662 NR Description: hypothetical protein F8F16.110 - Arabidopsis >gi|2827524|emb|CAA16532.1| predicted protein [Arabidopsis >gi|7270031|emb|CAB79847.1| predicted protein [Arabidopsis
  misc_feature (100)..(215): Homolog of NCBI NO: 7486723 NR Description: hypothetical protein F9D12.14 - Arabidopsis >gi|3319340|gb|AAC26229.1| contains similarity to E. coli cation
  misc_feature (1)..(81): Homolog of NCBI NO: 7486723 NR Description: hypothetical protein F9D12.14 - Arabidopsis >gi|3319340|gb|AAC26229.1| contains similarity to E. coli cation
  misc_feature (1)..(185): Homolog of NCBI NO: 18401334 NR Description: expressed protein; protein id: At1g44790.1,

SEQ ID NO: 92962 - protein, 225 aa, Arabidopsis thaliana; identical to SEQ ID NO: 89206
  peptide (1)..(225): Ceres Seq. ID no. 12716095
  misc_feature (1)..(179): Pfam Name: ChaC-like protein Pfam Description: ChaC-like protein
  misc_feature (1)..(225): Homolog of NCBI NO: 18417778 NR Description: unknown protein; protein id: At4g31290.1,
  misc_feature (1)..(225): Homolog of NCBI NO: 21593515 NR Description: unknown [Arabidopsis thaliana]
  misc_feature (1)..(213): Homolog of NCBI NO: 15239626 NR Description: putative protein; protein id: At5g26220.1 thaliana] >gi|26450775|dbj|BAC42496.1| unknown protein thaliana] >gi|28950749|gb|AAO63298.1| At5g26220 [Arabidopsis
  misc_feature (1)..(222): Homolog of NCBI NO: 27525010 NR Description: putative cation transporter [Beta procumbens]
  misc_feature (1)..(79): Homolog of NCBI NO: 7486662 NR Description: hypothetical protein F8F16.110 - Arabidopsis >gi|2827524|emb|CAA16532.1| predicted protein [Arabidopsis >gi|7270031|emb|CAB79847.1| predicted protein [Arabidopsis
  misc_feature (146)..(225): Homolog of NCBI NO: 7486662 NR Description: hypothetical protein F8F16.110 - Arabidopsis >gi|2827524|emb|CAA16532.1| predicted protein [Arabidopsis >gi|7270031|emb|CAB79847.1| predicted protein [Arabidopsis
  misc_feature (98)..(163): Homolog of NCBI NO: 7486662 NR Description: hypothetical protein F8F16.110 - Arabidopsis >gi|2827524|emb|CAA16532.1| predicted protein [Arabidopsis >gi|7270031|emb|CAB79847.1| predicted protein [Arabidopsis
  misc_feature (98)..(213): Homolog of NCBI NO: 7486723 NR Description: hypothetical protein F9D12.14 - Arabidopsis >gi|3319340|gb|AAC26229.1| contains similarity to E. coli cation
  misc_feature (1)..(79): Homolog of NCBI NO: 7486723 NR Description: hypothetical protein F9D12.14 - Arabidopsis >gi|3319340|gb|AAC26229.1| contains similarity to E. coli cation
  misc_feature (1)..(183): Homolog of NCBI NO: 18401334 NR Description: expressed protein; protein id: At1g44790.1,

SEQ ID NO: 92963 - protein, 148 aa, Arabidopsis thaliana; identical to SEQ ID NO: 89207
  peptide (1)..(148): Ceres Seq. ID no. 12716096
  misc_feature (1)..(102): Pfam Name: ChaC-like protein Pfam Description: ChaC-like protein
  misc_feature (1)..(148): Homolog of NCBI NO: 18417778 NR Description: unknown protein; protein id: At4g31290.1,
  misc_feature (1)..(148): Homolog of NCBI NO: 21593515 NR Description: unknown [Arabidopsis thaliana]
  misc_feature (1)..(136): Homolog of NCBI NO: 15239626 NR Description: putative protein; protein id: At5g26220.1 thaliana] >gi|26450775|dbj|BAC42496.1| unknown protein thaliana] >gi|28950749|gb|AAO63298.1| At5g26220 [Arabidopsis
  misc_feature (1)..(145): Homolog of NCBI NO: 27525010 NR Description: putative cation transporter [Beta procumbens]
  misc_feature (69)..(148): Homolog of NCBI NO: 7486662 NR Description: hypothetical protein F8F16.110 - Arabidopsis >gi|2827524|emb|CAA16532.1| predicted protein [Arabidopsis >gi|7270031|emb|CAB79847.1| predicted protein [Arabidopsis
  misc_feature (21)..(86): Homolog of NCBI NO: 7486662 NR Description: hypothetical protein F8F16.110 - Arabidopsis >gi|2827524|emb|CAA16532.1| predicted protein [Arabidopsis >gi|7270031|emb|CAB79847.1| predicted protein [Arabidopsis
  misc_feature (21)..(136): Homolog of NCBI NO: 7486723 NR Description: hypothetical protein F9D12.14 - Arabidopsis >gi|3319340|gb|AAC26229.1| contains similarity to E. coli cation
  misc_feature (1)..(106): Homolog of NCBI NO: 18401334 NR Description: expressed protein; protein id: At1g44790.1,
  misc_feature (1)..(106): Homolog of NCBI NO: 12083292 NR Description: unknown protein [Arabidopsis thaliana]
  misc_feature (1)..(101): Homolog of NCBI NO: 38344831 NR Description: OSJNBa0064H22.12 [Oryza sativa (japonica

SEQ ID NO: 92964 - DNA, 1042 bp, Arabidopsis thaliana; identical to SEQ ID NO: 89208
  misc_feature (1)..(1042): Ceres Seq. ID no. 12716097
  misc_feature: MA Experiment ID: 108434 Result: Up-regulated in Transcription
  misc_feature: MA Experiment 108434 PARAMETER Experiment Name: At_Root_Tips_cDNA_P Parameter: Tissue Value: Root Tips
  misc_feature: MA Experiment ID: 108461 Result: Down-regulated in Transcription
  misc_feature: MA Experiment 108461 PARAMETER Experiment Name: At_Germinating_Seeds_cDNA_P Parameter: Age (day) Value: 1 vs. 0
  misc_feature: MA Experiment 108461 PARAMETER Experiment Name: At_Germinating_Seeds_cDNA_P Parameter: Tissue Value: Germinating Seeds
  misc_feature: MA Experiment ID: 108462 Result: Down-regulated in Transcription
  misc_feature: MA Experiment 108462 PARAMETER Experiment Name: At_Germinating_Seeds_cDNA_P Parameter: Age (day) Value: 2 vs. 0
  misc_feature: MA Experiment 108462 PARAMETER Experiment Name: At_Germinating_Seeds_cDNA_P Parameter: Tissue Value: Germinating Seeds
  misc_feature: MA Experiment ID: 108463 Result: Down-regulated in Transcription
  misc_feature: MA Experiment 108463 PARAMETER Experiment Name: At_Germinating_Seeds_cDNA_P Parameter: Age (day) Value: 3 vs. 0
  misc_feature: MA Experiment 108463 PARAMETER Experiment Name: At_Germinating_Seeds_cDNA_P Parameter: Tissue Value: Germinating Seeds
  misc_feature: MA Experiment ID: 108464 Result: Down-regulated in Transcription
  misc_feature: MA Experiment 108464 PARAMETER Experiment Name: At_Germinating_Seeds_cDNA_P Parameter: Age (day) Value: 4 vs. 0
  misc_feature: MA Experiment 108464 PARAMETER Experiment Name: At_Germinating_Seeds_cDNA_P Parameter: Tissue Value: Germinating Seeds
  misc_feature: MA Experiment ID: 108573 Result: Up-regulated in Transcription
  misc_feature: MA Experiment 108573 PARAMETER Experiment Name: At_Drought_cDNA_P Parameter: Timepoint (hr) Value: 6
  misc_feature: MA Experiment 108573 PARAMETER Experiment Name: At_Drought_cDNA_P Parameter: Tissue Value: Aerial
  misc_feature: MA Experiment 108573 PARAMETER Experiment Name: At_Drought_cDNA_P Parameter: Treatment Value: Drought vs. No Drought
  misc_feature: MA Experiment ID: 108585 Result: Up-regulated in Transcription
  misc_feature: MA Experiment 108585 PARAMETER Experiment Name: At_5mM_NaNP_cDNA_P Parameter: Timepoint (hr) Value: 6
  misc_feature: MA Experiment 108585 PARAMETER Experiment Name: At_5mM_NaNP_cDNA_P Parameter: Tissue Value: Aerial
  misc_feature: MA Experiment 108585 PARAMETER Experiment Name: At_5mM_NaNP_cDNA_P Parameter: Treatment Value: null

SEQ ID NO: 92965 - protein, 233 aa, Arabidopsis thaliana; identical to SEQ ID NO: 25662
  peptide (1)..(233): Ceres Seq. ID no. 12716098
  misc_feature (9)..(191): Pfam Name: Proteasome A-type and B-type Pfam Description: Proteasome A-type and B-type
  misc_feature (1)..(233): Homolog of NCBI NO: 15235889 NR Description: 20S proteasome beta subunit A (PBA1); protein id: supported by cDNA: 229., supported by cDNA: gi_15450504, by cDNA: gi_16323317, supported by cDNA: gi_3421098 [Arabidopsis
  misc_feature (11)..(233): Homolog of NCBI NO: 21592365 NR Description: multicatalytic endopeptidase complex, proteasome
  misc_feature (4)..(231): Homolog of NCBI NO: 3024440 NR Description: Proteasome subunit beta type 6 precursor
  misc_feature (1)..(231): Homolog of NCBI NO: 8671502 NR Description: beta 1 subunit of 20S proteasome [Oryza sativa
  misc_feature (5)..(209): Homolog of NCBI NO: 7435894 NR Description: proteasome subunit 1 - slime mold (Dictyostelium >gi|3116216|dbj|BAA25923.1| proteasome subunit [Dictyostelium
  misc_feature (11)..(204): Homolog of NCBI NO: 19113087 NR Description: proteasome component precursor pombe] >gi|17380244|sp|O43063|PSB6_SCHPO Probable proteasome
  misc_feature (1)..(209): Homolog of NCBI NO: 5823090 NR Description: proteasome delta [Oncorhynchus mykiss]
  misc_feature (10)..(206): Homolog of NCBI NO: 17380261 NR Description: Proteasome subunit beta type 6 precursor delta chain) (Macropain delta chain) (Multicatalytic
  misc_feature (10)..(206): Homolog of NCBI NO: 26347247 NR Description: unnamed protein product [Mus musculus]
  misc_feature (10)..(206): Homolog of NCBI NO: 464446 NR Description: Proteasome subunit beta type 6 precursor delta chain) (Macropain delta chain) (Multicatalytic

SEQ ID NO: 92966 - protein, 223 aa, Arabidopsis thaliana; identical to SEQ ID NO: 25663
  peptide (1)..(223): Ceres Seq. ID no. 12716099
  misc_feature (1)..(181): Pfam Name: Proteasome A-type and B-type Pfam Description: Proteasome A-type and B-type
  misc_feature (1)..(223): Homolog of NCBI NO: 15235889 NR Description: 20S proteasome beta subunit A (PBA1); protein id: supported by cDNA: 229., supported by cDNA: gi_15450504, by cDNA: gi_16323317, supported by cDNA: gi_3421098 [Arabidopsis
  misc_feature (1)..(223): Homolog of NCBI NO: 21592365 NR Description: multicatalytic endopeptidase complex, proteasome
  misc_feature (1)..(221): Homolog of NCBI NO: 3024440 NR Description: Proteasome subunit beta type 6 precursor
  misc_feature (1)..(221): Homolog of NCBI NO: 8671502 NR Description: beta 1 subunit of 20S proteasome [Oryza sativa
  misc_feature (1)..(199): Homolog of NCBI NO: 7435894 NR Description: proteasome subunit 1 - slime mold (Dictyostelium >gi|3116216|dbj|BAA25923.1| proteasome subunit [Dictyostelium
  misc_feature (1)..(194): Homolog of NCBI NO: 19113087 NR Description: proteasome component precursor pombe] >gi|17380244|sp|O43063|PSB6_SCHPO Probable proteasome
  misc_feature (1)..(199): Homolog of NCBI NO: 5823090 NR Description: proteasome delta [Oncorhynchus mykiss]
  misc_feature (1)..(196): Homolog of NCBI NO: 17380261 NR Description: Proteasome subunit beta type 6 precursor delta chain) (Macropain delta chain) (Multicatalytic
  misc_feature (1)..(196): Homolog of NCBI NO: 26347247 NR Description: unnamed protein product [Mus musculus]
  misc_feature (1)..(196): Homolog of NCBI NO: 464446 NR Description: Proteasome subunit beta type 6 precursor delta chain) (Macropain delta chain) (Multicatalytic

SEQ ID NO: 92967 - protein, 198 aa, Arabidopsis thaliana; identical to SEQ ID NO: 25664
  peptide (1)..(198): Ceres Seq. ID no. 12716100
  misc_feature (1)..(156): Pfam Name: Proteasome A-type and B-type Pfam Description: Proteasome A-type and B-type
  misc_feature (1)..(198): Homolog of NCBI NO: 15235889 NR Description: 20S proteasome beta subunit A (PBA1); protein id: supported by cDNA: 229., supported by cDNA: gi_15450504, by cDNA: gi_16323317, supported by cDNA: gi_3421098 [Arabidopsis
  misc_feature (1)..(198): Homolog of NCBI NO: 21592365 NR Description: multicatalytic endopeptidase complex, proteasome
  misc_feature (1)..(196): Homolog of NCBI NO: 3024440 NR Description: Proteasome subunit beta type 6 precursor
  misc_feature (1)..(196): Homolog of NCBI NO: 8671502 NR Description: beta 1 subunit of 20S proteasome [Oryza sativa
  misc_feature (1)..(174): Homolog of NCBI NO: 7435894 NR Description: proteasome subunit 1 - slime mold (Dictyostelium >gi|3116216|dbj|BAA25923.1| proteasome subunit [Dictyostelium
  misc_feature (1)..(169): Homolog of NCBI NO: 19113087 NR Description: proteasome component precursor pombe] >gi|17380244|sp|O43063|PSB6_SCHPO Probable proteasome
  misc_feature (1)..(174): Homolog of NCBI NO: 5823090 NR Description: proteasome delta [Oncorhynchus mykiss]
  misc_feature (1)..(171): Homolog of NCBI NO: 17380261 NR Description: Proteasome subunit beta type 6 precursor delta chain) (Macropain delta chain) (Multicatalytic
  misc_feature (1)..(171): Homolog of NCBI NO: 26347247 NR Description: unnamed protein product [Mus musculus]
  misc_feature (1)..(171): Homolog of NCBI NO: 464446 NR Description: Proteasome subunit beta type 6 precursor delta chain) (Macropain delta chain) (Multicatalytic

SEQ ID NO: 92968 - DNA, 1177 bp, Arabidopsis thaliana; identical to SEQ ID NO: 89212
  misc_feature (1)..(1177): Ceres Seq. ID no. 12716125
  misc_feature: MA Experiment ID: 108434 Result: Down-regulated in Transcription
  misc_feature: MA Experiment 108434 PARAMETER Experiment Name: At_Root_Tips_cDNA_P Parameter: Tissue Value: Root Tips
  misc_feature: MA Experiment ID: 108573 Result: Up-regulated in Transcription
  misc_feature: MA Experiment 108573 PARAMETER Experiment Name: At_Drought_cDNA_P Parameter: Timepoint (hr) Value: 6
  misc_feature: MA Experiment 108573 PARAMETER Experiment Name: At_Drought_cDNA_P Parameter: Tissue Value: Aerial
  misc_feature: MA Experiment 108573 PARAMETER Experiment Name: At_Drought_cDNA_P Parameter: Treatment Value: Drought vs. No Drought
  misc_feature: MA Experiment ID: 108574 Result: Up-regulated in Transcription
  misc_feature: MA Experiment 108574 PARAMETER Experiment Name: At_Wounding__cDNA_P Parameter: Timepoint (hr) Value: 1
  misc_feature: MA Experiment 108574 PARAMETER Experiment Name: At_Wounding__cDNA_P Parameter: Tissue Value: Aerial
  misc_feature: MA Experiment 108574 PARAMETER Experiment Name: At_Wounding__cDNA_P Parameter: Treatment Value: Wounding vs. No Wounding
  misc_feature: MA Experiment ID: 108579 Result: Up-regulated in Transcription
  misc_feature: MA Experiment 108579 PARAMETER Experiment Name: At_4deg_Cold_cDNA_P Parameter: Temperature (deg C) Value: 4 vs. 22
  misc_feature: MA Experiment 108579 PARAMETER Experiment Name: At_4deg_Cold_cDNA_P Parameter: Timepoint (hr) Value: 6
  misc_feature: MA Experiment 108579 PARAMETER Experiment Name: At_4deg_Cold_cDNA_P Parameter: Tissue Value: Aerial
  misc_feature: MA Experiment ID: 108594 Result: Down-regulated in Transcription
  misc_feature: MA Experiment 108594 PARAMETER Experiment Name: At_Ler-rhl_Root_cDNA_P Parameter: Plant Line Value: null
  misc_feature: MA Experiment ID: 108605 Result: Up-regulated in Transcription
  misc_feature: MA Experiment 108605 PARAMETER Experiment Name: At_100uM_ABA_cDNA_P Parameter: Timepoint (hr) Value: 6
  misc_feature: MA Experiment 108605 PARAMETER Experiment Name: At_100uM_ABA_cDNA_P Parameter: Tissue Value: Aerial
  misc_feature: MA Experiment 108605 PARAMETER Experiment Name: At_100uM_ABA_cDNA_P Parameter: Treatment Value: 100uM ABA vs. No Treatment
  misc_feature: MA Experiment ID: 108607 Result: Up-regulated in Transcription
  misc_feature: MA Experiment 108607 PARAMETER Experiment Name: At_100uM_ABA_cDNA_P Parameter: Timepoint (hr) Value: 4
  misc_feature: MA Experiment 108607 PARAMETER Experiment Name: At_100uM_ABA_cDNA_P Parameter: Tissue Value: Aerial
  misc_feature: MA Experiment 108607 PARAMETER Experiment Name: At_100uM_ABA_cDNA_P Parameter: Treatment Value: 100uM ABA vs. No Treatment
  misc_feature: MA Experiment ID: 20000069 Result: Up-regulated in Transcription
  misc_feature: MA Experiment 20000069 PARAMETER Experiment Name: At_100uM_ABA_Mutants_cDNA_P Parameter: Plant Line Value: CS23
  misc_feature: MA Experiment 20000069 PARAMETER Experiment Name: At_100uM_ABA_Mutants_cDNA_P Parameter: Timepoint (hr) Value: 6
  misc_feature: MA Experiment 20000069 PARAMETER Experiment Name: At_100uM_ABA_Mutants_cDNA_P Parameter: Tissue Value: Aerial
  misc_feature: MA Experiment 20000069 PARAMETER Experiment Name: At_100uM_ABA_Mutants_cDNA_P Parameter: Treatment Value: 100uM ABA vs. No Treatment
  misc_feature: MA Experiment ID: 20000070 Result: Up-regulated in Transcription
  misc_feature: MA Experiment 20000070 PARAMETER Experiment Name: At_100uM_ABA_Mutants_cDNA_P Parameter: Plant Line Value: CS24
  misc_feature: MA Experiment 20000070 PARAMETER Experiment Name: At_100uM_ABA_Mutants_cDNA_P Parameter: Timepoint (hr) Value: 6
  misc_feature: MA Experiment 20000070 PARAMETER Experiment Name: At_100uM_ABA_Mutants_cDNA_P Parameter: Tissue Value: Aerial
  misc_feature: MA Experiment 20000070 PARAMETER Experiment Name: At_100uM_ABA_Mutants_cDNA_P Parameter: Treatment Value: 100uM ABA vs. No Treatment
  misc_feature: MA Experiment ID: 20000071 Result: Up-regulated in Transcription
  misc_feature: MA Experiment 20000071 PARAMETER Experiment Name: At_100uM_ABA_Mutants_cDNA_P Parameter: Plant Line Value: CS8104
  misc_feature: MA Experiment 20000071 PARAMETER Experiment Name: At_100uM_ABA_Mutants_cDNA_P Parameter: Timepoint (hr) Value: 6
  misc_feature: MA Experiment 20000071 PARAMETER Experiment Name: At_100uM_ABA_Mutants_cDNA_P Parameter: Tissue Value: Aerial
  misc_feature: MA Experiment 20000071 PARAMETER Experiment Name: At_100uM_ABA_Mutants_cDNA_P Parameter: Treatment Value: 100uM ABA vs. No Treatment
  misc_feature: MA Experiment ID: 20000072 Result: Up-regulated in Transcription
  misc_feature: MA Experiment 20000072 PARAMETER Experiment Name: At_100uM_ABA_Mutants_cDNA_P Parameter: Plant Line Value: CS8105
  misc_feature: MA Experiment 20000072 PARAMETER Experiment Name: At_100uM_ABA_Mutants_cDNA_P Parameter: Timepoint (hr) Value: 6
  misc_feature: MA Experiment 20000072 PARAMETER Experiment Name: At_100uM_ABA_Mutants_cDNA_P Parameter: Tissue Value: Aerial
  misc_feature: MA Experiment 20000072 PARAMETER Experiment Name: At_100uM_ABA_Mutants_cDNA_P Parameter: Treatment Value: 100uM ABA vs. No Treatment
  misc_feature: MA Experiment ID: 20000086 Result: Up-regulated in Transcription
  misc_feature: MA Experiment 20000086 PARAMETER Experiment Name: At_100uM_ABA_Mutants_cDNA_P Parameter: Plant Line Value: CS22
  misc_feature: MA Experiment 20000086 PARAMETER Experiment Name: At_100uM_ABA_Mutants_cDNA_P Parameter: Timepoint (hr) Value: 6
  misc_feature: MA Experiment 20000086 PARAMETER Experiment Name: At_100uM_ABA_Mutants_cDNA_P Parameter: Tissue Value: Aerial
  misc_feature: MA Experiment 20000086 PARAMETER Experiment Name: At_100uM_ABA_Mutants_cDNA_P Parameter: Treatment Value: 100uM ABA vs. No Treatment
  misc_feature: MA Experiment ID: 20000087 Result: Up-regulated in Transcription
  misc_feature: MA Experiment 20000087 PARAMETER Experiment Name: At_100uM_ABA_Mutants_cDNA_P Parameter: Plant Line Value: WS
  misc_feature: MA Experiment 20000087 PARAMETER Experiment Name: At_100uM_ABA_Mutants_cDNA_P Parameter: Timepoint (hr) Value: 6
  misc_feature: MA Experiment 20000087 PARAMETER Experiment Name: At_100uM_ABA_Mutants_cDNA_P Parameter: Tissue Value: Aerial
  misc_feature: MA Experiment 20000087 PARAMETER Experiment Name: At_100uM_ABA_Mutants_cDNA_P Parameter: Treatment Value: 100uM ABA vs. No Treatment
  misc_feature: MA Experiment ID: 20000088 Result: Up-regulated in Transcription
  misc_feature: MA Experiment 20000088 PARAMETER Experiment Name: At_100uM_ABA_Mutants_cDNA_P Parameter: Plant Line Value: Landsberg
  misc_feature: MA Experiment 20000088 PARAMETER Experiment Name: At_100uM_ABA_Mutants_cDNA_P Parameter: Timepoint (hr) Value: 6
  misc_feature: MA Experiment 20000088 PARAMETER Experiment Name: At_100uM_ABA_Mutants_cDNA_P Parameter: Tissue Value: Aerial
  misc_feature: MA Experiment 20000088 PARAMETER Experiment Name: At_100uM_ABA_Mutants_cDNA_P Parameter: Treatment Value: 100uM ABA vs. No Treatment
  misc_feature: MA Experiment ID: 20000111 Result: Down-regulated in Transcription
  misc_feature: MA Experiment 20000111 PARAMETER Experiment Name: At_42deg_Heat_cDNA_P Parameter: Temperature (deg C) Value: 42 vs. 22
  misc_feature: MA Experiment 20000111 PARAMETER Experiment Name: At_42deg_Heat_cDNA_P Parameter: Timepoint (hr) Value: 6
  misc_feature: MA Experiment 20000111 PARAMETER Experiment Name: At_42deg_Heat_cDNA_P Parameter: Tissue Value: Aerial
  misc_feature: MA Experiment ID: 20000113 Result: Down-regulated in Transcription
  misc_feature: MA Experiment 20000113 PARAMETER Experiment Name: At_42deg_Heat_cDNA_P Parameter: Temperature (deg C) Value: 42 vs. 22
  misc_feature: MA Experiment 20000113 PARAMETER Experiment Name: At_42deg_Heat_cDNA_P Parameter: Timepoint (hr) Value: 8
  misc_feature: MA Experiment 20000113 PARAMETER Experiment Name: At_42deg_Heat_cDNA_P Parameter: Tissue Value: Aerial
  misc_feature: MA Experiment ID: 20000117 Result: Up-regulated in Transcription
  misc_feature: MA Experiment 20000117 PARAMETER Experiment Name: At_100uM_ABA_Mutants_cDNA_P Parameter: Plant Line Value: Columbia
  misc_feature: MA Experiment 20000117 PARAMETER Experiment Name: At_100uM_ABA_Mutants_cDNA_P Parameter: Timepoint (hr) Value: 6
  misc_feature: MA Experiment 20000117 PARAMETER Experiment Name: At_100uM_ABA_Mutants_cDNA_P Parameter: Tissue Value: Aerial
  misc_feature: MA Experiment 20000117 PARAMETER Experiment Name: At_100uM_ABA_Mutants_cDNA_P Parameter: Treatment Value: 100uM ABA vs. No Treatment
  misc_feature: MA Experiment ID: 20000169 Result: Up-regulated in Transcription
  misc_feature: MA Experiment 20000169 PARAMETER Experiment Name: At_100uM_ABA_P Parameter: Age (day) Value: 14
  misc_feature: MA Experiment 20000169 PARAMETER Experiment Name: At_100uM_ABA_P Parameter: Organism Value: A. thaliana
  misc_feature: MA Experiment 20000169 PARAMETER Experiment Name: At_100uM_ABA_P Parameter: Plant Line Value: WS
  misc_feature: MA Experiment 20000169 PARAMETER Experiment Name: At_100uM_ABA_P Parameter: Timepoint (hr) Value: 6
  misc_feature: MA Experiment 20000169 PARAMETER Experiment Name: At_100uM_ABA_P Parameter: Tissue Value: Aerial
  misc_feature: MA Experiment 20000169 PARAMETER Experiment Name: At_100uM_ABA_P Parameter: Treatment Value: 100uM ABA vs. No Treatment
  misc_feature: MA Experiment ID: 20000173 Result: Down-regulated in Transcription
  misc_feature: MA Experiment 20000173 PARAMETER Experiment Name: At_42deg_Heat_P Parameter: Age (day) Value: 14
  misc_feature: MA Experiment 20000173 PARAMETER Experiment Name: At_42deg_Heat_P Parameter: Organism Value: A. thaliana
  misc_feature: MA Experiment 20000173 PARAMETER Experiment Name: At_42deg_Heat_P Parameter: Plant Line Value: WS
  misc_feature: MA Experiment 20000173 PARAMETER Experiment Name: At_42deg_Heat_P Parameter: Temperature (deg C) Value: 42 vs. 22
  misc_feature: MA Experiment 20000173 PARAMETER Experiment Name: At_42deg_Heat_P Parameter: Timepoint (hr) Value: 6
  misc_feature: MA Experiment 20000173 PARAMETER Experiment Name: At_42deg_Heat_P Parameter: Tissue Value: Aerial
  misc_feature: MA Experiment ID: 20000184 Result: Down-regulated in Transcription
  misc_feature: MA Experiment 20000184 PARAMETER Experiment Name: At_Shoots__P Parameter: Age (day) Value: 7
  misc_feature: MA Experiment 20000184 PARAMETER Experiment Name: At_Shoots__P Parameter: Tissue Value: Shoots vs. Whole Plant
  misc_feature: MA Experiment ID: 20000227 Result: Down-regulated in Transcription
  misc_feature: MA Experiment 20000227 PARAMETER Experiment Name: At_Root-Tips-vs-Tops_P Parameter: Tissue Value: Root Tips vs. Root Tops
  misc_feature: MA Experiment ID: 20000234 Result: Down-regulated in Transcription
  misc_feature: MA Experiment 20000234 PARAMETER Experiment Name: At_Siliques_P Parameter: Age (day) Value: 21
  misc_feature: MA Experiment 20000234 PARAMETER Experiment Name: At_Siliques_P Parameter: Organism Value: A. thaliana
  misc_feature: MA Experiment 20000234 PARAMETER Experiment Name: At_Siliques_P Parameter: Plant Line Value: WS
  misc_feature: MA Experiment 20000234 PARAMETER Experiment Name: At_Siliques_P Parameter: Tissue Value: Less Than 5mm Siliques vs. Whole Plant
  misc_feature: MA Experiment ID: 20000265 Result: Down-regulated in Transcription
  misc_feature: MA Experiment 20000265 PARAMETER Experiment Name: At_Open_Flower_P Parameter: Age (day) Value: 21
  misc_feature: MA Experiment 20000265 PARAMETER Experiment Name: At_Open_Flower_P Parameter: Plant Line Value: WS
  misc_feature: MA Experiment 20000265 PARAMETER Experiment Name: At_Open_Flower_P Parameter: Tissue Value: Closed Flower vs. Whole Plant
  misc_feature: MA Experiment ID: 20000437 Result: Up-regulated in Transcription
  misc_feature: MA Experiment 20000437 PARAMETER Experiment Name: At_Drought_P Parameter: Age (day) Value: 8
  misc_feature: MA Experiment 20000437 PARAMETER Experiment Name: At_Drought_P Parameter: Organism Value: A. thaliana
  misc_feature: MA Experiment 20000437 PARAMETER Experiment Name: At_Drought_P Parameter: Plant Line Value: WS
  misc_feature: MA Experiment 20000437 PARAMETER Experiment Name: At_Drought_P Parameter: Timepoint (hr) Value: 24
  misc_feature: MA Experiment 20000437 PARAMETER Experiment Name: At_Drought_P Parameter: Tissue Value: Whole Plant
  misc_feature: MA Experiment 20000437 PARAMETER Experiment Name: At_Drought_P Parameter: Treatment Value: Drought vs. No Drought
  misc_feature: MA Experiment ID: 20000460 Result: Up-regulated in Transcription
  misc_feature: MA Experiment 20000460 PARAMETER Experiment Name: At_10percent_PEG_P Parameter: Age (day) Value: 12
  misc_feature: MA Experiment 20000460 PARAMETER Experiment Name: At_10percent_PEG_P Parameter: Organism Value: A. thaliana
  misc_feature: MA Experiment 20000460 PARAMETER Experiment Name: At_10percent_PEG_P Parameter: Plant Line Value: WS
  misc_feature: MA Experiment 20000460 PARAMETER Experiment Name: At_10percent_PEG_P Parameter: Timepoint (day) Value: 12
  misc_feature: MA Experiment 20000460 PARAMETER Experiment Name: At_10percent_PEG_P Parameter: Tissue Value: Whole Plant
  misc_feature: MA Experiment 20000460 PARAMETER Experiment Name: At_10percent_PEG_P Parameter: Treatment Value: 10percent PEG vs. No Treatment
  misc_feature: MA Experiment ID: 20000495 Result: Down-regulated in Transcription
  misc_feature: MA Experiment 20000495 PARAMETER Experiment Name: At_Guard_Cells_P Parameter: Harvest Date Value: 8/2/2002
  misc_feature: MA Experiment 20000495 PARAMETER Experiment Name: At_Guard_Cells_P Parameter: Organism Value: A. thaliana
  misc_feature: MA Experiment 20000495 PARAMETER Experiment Name: At_Guard_Cells_P Parameter: Tissue Value: Guard Cells vs. Leaves
  misc_feature: MA Experiment ID: 20000496 Result: Down-regulated in Transcription
  misc_feature: MA Experiment 20000496 PARAMETER Experiment Name: At_Guard_Cells_P Parameter: Harvest Date Value: 7/19/2002
  misc_feature: MA Experiment 20000496 PARAMETER Experiment Name: At_Guard_Cells_P Parameter: Organism Value: Canola
  misc_feature: MA Experiment 20000496 PARAMETER Experiment Name: At_Guard_Cells_P Parameter: Tissue Value: Guard Cells vs. Leaves
  misc_feature: MA Experiment ID: 20001911 Result: Up-regulated in Transcription
  misc_feature: MA Experiment 20001911 PARAMETER Experiment Name: At_Drought_Reproduction_P Parameter: Age (day) Value: 40
  misc_feature: MA Experiment 20001911 PARAMETER Experiment Name: At_Drought_Reproduction_P Parameter: Organism Value: A. thaliana
  misc_feature: MA Experiment 20001911 PARAMETER Experiment Name: At_Drought_Reproduction_P Parameter: Plant Line Value: WS
  misc_feature: MA Experiment 20001911 PARAMETER Experiment Name: At_Drought_Reproduction_P Parameter: Timepoint (day) Value: 10
  misc_feature: MA Experiment 20001911 PARAMETER Experiment Name: At_Drought_Reproduction_P Parameter: Tissue Value: Flowers
  misc_feature: MA Experiment 20001911 PARAMETER Experiment Name: At_Drought_Reproduction_P Parameter: Treatment Value: Drought vs. No Drought

SEQ ID NO: 92969 - protein, 352 aa, Arabidopsis thaliana; identical to SEQ ID NO: 89213
  peptide (1)..(352): Ceres Seq. ID no. 12716126
  misc_feature (272)..(332): Pfam Name: WRKY DNA -binding domain Pfam Description: WRKY DNA -binding domain
  misc_feature (28)..(352): Homolog of NCBI NO: 30689072 NR Description: WRKY family transcription factor [Arabidopsis
  misc_feature (28)..(352): Homolog of NCBI NO: 16604573 NR Description: putative putaive DNA-binding protein [Arabidopsis
  misc_feature (28)..(352): Homolog of NCBI NO: 21537078 NR Description: putaive DNA-binding protein [Arabidopsis thaliana]
  misc_feature (28)..(352): Homolog of NCBI NO: 22329054 NR Description: WRKY family transcription factor; protein id: supported by cDNA: gi_15384214 [Arabidopsis thaliana]
  misc_feature (28)..(352): Homolog of NCBI NO: 18400580 NR Description: WRKY family transcription factor; protein id: supported by cDNA: gi_15991743 [Arabidopsis thaliana] WRKY transcription factor 17 [Arabidopsis thaliana]
  misc_feature (28)..(347): Homolog of NCBI NO: 25348152 NR Description: probable WRKY-type DNA binding protein [imported]
  misc_feature (28)..(338): Homolog of NCBI NO: 4760596 NR Description: DNA-binding protein NtWRKY3 [Nicotiana tabacum]
  misc_feature (30)..(334): Homolog of NCBI NO: 38568048 NR Description: OSJNBa0065J03.18 [Oryza sativa (japonica
  misc_feature (28)..(344): Homolog of NCBI NO: 7488950 NR Description: DNA-binding protein WRKY3 - parsley
  misc_feature (147)..(330): Homolog of NCBI NO: 4894963 NR Description: DNA-binding protein WRKY3 [Avena sativa]

SEQ ID NO: 92970 - protein, 325 aa, Arabidopsis thaliana; identical to SEQ ID NO: 28793
  peptide (1)..(325): Ceres Seq. ID no. 12716127
  misc_feature (245)..(305): Pfam Name: WRKY DNA -binding domain Pfam Description: WRKY DNA -binding domain
  misc_feature (1)..(325): Homolog of NCBI NO: 30689072 NR Description: WRKY family transcription factor [Arabidopsis
  misc_feature (1)..(325): Homolog of NCBI NO: 16604573 NR Description: putative putaive DNA-binding protein [Arabidopsis
  misc_feature (1)..(325): Homolog of NCBI NO: 21537078 NR Description: putaive DNA-binding protein [Arabidopsis thaliana]
  misc_feature (1)..(325): Homolog of NCBI NO: 22329054 NR Description: WRKY family transcription factor; protein id: supported by cDNA: gi_15384214 [Arabidopsis thaliana]
  misc_feature (1)..(325): Homolog of NCBI NO: 18400580 NR Description: WRKY family transcription factor; protein id: supported by cDNA: gi_15991743 [Arabidopsis thaliana] WRKY transcription factor 17 [Arabidopsis thaliana]
  misc_feature (1)..(320): Homolog of NCBI NO: 25348152 NR Description: probable WRKY-type DNA binding protein [imported]
  misc_feature (1)..(311): Homolog of NCBI NO: 4760596 NR Description: DNA-binding protein NtWRKY3 [Nicotiana tabacum]
  misc_feature (3)..(307): Homolog of NCBI NO: 38568048 NR Description: OSJNBa0065J03.18 [Oryza sativa (japonica
  misc_feature (1)..(317): Homolog of NCBI NO: 7488950 NR Description: DNA-binding protein WRKY3 - parsley
  misc_feature (120)..(303): Homolog of NCBI NO: 4894963 NR Description: DNA-binding protein WRKY3 [Avena sativa]

SEQ ID NO: 92971 - protein, 320 aa, Arabidopsis thaliana; identical to SEQ ID NO: 28794
  peptide (1)..(320): Ceres Seq. ID no. 12716128
  misc_feature (240)..(300): Pfam Name: WRKY DNA -binding domain Pfam Description: WRKY DNA -binding domain
  misc_feature (1)..(320): Homolog of NCBI NO: 30689072 NR Description: WRKY family transcription factor [Arabidopsis
  misc_feature (1)..(320): Homolog of NCBI NO: 16604573 NR Description: putative putaive DNA-binding protein [Arabidopsis
  misc_feature (1)..(320): Homolog of NCBI NO: 21537078 NR Description: putaive DNA-binding protein [Arabidopsis thaliana]
  misc_feature (1)..(320): Homolog of NCBI NO: 22329054 NR Description: WRKY family transcription factor; protein id: supported by cDNA: gi_15384214 [Arabidopsis thaliana]
  misc_feature (1)..(320): Homolog of NCBI NO: 18400580 NR Description: WRKY family transcription factor; protein id: supported by cDNA: gi_15991743 [Arabidopsis thaliana] WRKY transcription factor 17 [Arabidopsis thaliana]
  misc_feature (1)..(315): Homolog of NCBI NO: 25348152 NR Description: probable WRKY-type DNA binding protein [imported]
  misc_feature (1)..(306): Homolog of NCBI NO: 4760596 NR Description: DNA-binding protein NtWRKY3 [Nicotiana tabacum]
  misc_feature (1)..(302): Homolog of NCBI NO: 38568048 NR Description: OSJNBa0065J03.18 [Oryza sativa (japonica
  misc_feature (1)..(312): Homolog of NCBI NO: 7488950 NR Description: DNA-binding protein WRKY3 - parsley
  misc_feature (115)..(298): Homolog of NCBI NO: 4894963 NR Description: DNA-binding protein WRKY3 [Avena sativa]

SEQ ID NO: 92972 - DNA, 1572 bp, Arabidopsis thaliana; identical to SEQ ID NO: 89216
  misc_feature (1)..(1572): Ceres Seq. ID no. 12716133
  misc_feature: MA Experiment ID: 20000307 Result: Up-regulated in Transcription
  misc_feature: MA Experiment 20000307 PARAMETER Experiment Name: At_Germinating_Seeds_Sub_P Parameter: Age (hr) Value: 24 vs. 0
  misc_feature: MA Experiment 20000307 PARAMETER Experiment Name: At_Germinating_Seeds_Sub_P Parameter: Organism Value: A. thaliana
  misc_feature: MA Experiment 20000307 PARAMETER Experiment Name: At_Germinating_Seeds_Sub_P Parameter: Plant Line Value: WS
  misc_feature: MA Experiment 20000307 PARAMETER Experiment Name: At_Germinating_Seeds_Sub_P Parameter: Tissue Value: Germinating Seeds
  misc_feature: MA Experiment ID: 20000328 Result: Down-regulated in Transcription
  misc_feature: MA Experiment 20000328 PARAMETER Experiment Name: At_42deg_Heat_Sub_P Parameter: Age (day) Value: 14
  misc_feature: MA Experiment 20000328 PARAMETER Experiment Name: At_42deg_Heat_Sub_P Parameter: Organism Value: A. thaliana
  misc_feature: MA Experiment 20000328 PARAMETER Experiment Name: At_42deg_Heat_Sub_P Parameter: Plant Line Value: WS
  misc_feature: MA Experiment 20000328 PARAMETER Experiment Name: At_42deg_Heat_Sub_P Parameter: Temperature (deg C) Value: 42 vs. 22
  misc_feature: MA Experiment 20000328 PARAMETER Experiment Name: At_42deg_Heat_Sub_P Parameter: Timepoint (hr) Value: 6
  misc_feature: MA Experiment 20000328 PARAMETER Experiment Name: At_42deg_Heat_Sub_P Parameter: Tissue Value: Aerial
  misc_feature: MA Experiment ID: 20000440 Result: Up-regulated in Transcription
  misc_feature: MA Experiment 20000440 PARAMETER Experiment Name: At_Closed-Flower__Sub_P Parameter: Tissue Value: Closed Flower vs. Whole Plant

SEQ ID NO: 92973 - protein, 523 aa, Arabidopsis thaliana; identical to SEQ ID NO: 89217
  peptide (1)..(523): Ceres Seq. ID no. 12716134
  misc_feature (151)..(250): Pfam Name: B3 DNA binding domain Pfam Description: B3 DNA binding domain
  misc_feature (126)..(523): Homolog of NCBI NO: 15236032 NR Description: putative protein; protein id: At4g31650.1
  misc_feature (1)..(106): Homolog of NCBI NO: 15236032 NR Description: putative protein; protein id: At4g31650.1
  misc_feature (1)..(317): Homolog of NCBI NO: 15236030 NR Description: putative protein; protein id: At4g31640.1
  misc_feature (1)..(246): Homolog of NCBI NO: 15236040 NR Description: putative protein; protein id: At4g31690.1
  misc_feature (1)..(246): Homolog of NCBI NO: 20152540 NR Description: putative auxin response factor 23 [Arabidopsis
  misc_feature (1)..(247): Homolog of NCBI NO: 30689117 NR Description: transcriptional factor B3 family [Arabidopsis >gi|24817267|emb|CAD56214.1| putative auxin response factor 24
  misc_feature (1)..(247): Homolog of NCBI NO: 7486320 NR Description: hypothetical protein F28M20.130 - Arabidopsis >gi|3281860|emb|CAA19755.1| putative protein [Arabidopsis >gi|7270071|emb|CAB79886.1| putative protein [Arabidopsis
  misc_feature (1)..(133): Homolog of NCBI NO: 7486322 NR Description: hypothetical protein F28M20.150 - Arabidopsis >gi|3281862|emb|CAA19757.1| putative protein [Arabidopsis >gi|7270069|emb|CAB79884.1| putative protein [Arabidopsis
  misc_feature (118)..(227): Homolog of NCBI NO: 7486322 NR Description: hypothetical protein F28M20.150 - Arabidopsis >gi|3281862|emb|CAA19757.1| putative protein [Arabidopsis >gi|7270069|emb|CAB79884.1| putative protein [Arabidopsis
  misc_feature (412)..(505): Homolog of NCBI NO: 7486322 NR Description: hypothetical protein F28M20.150 - Arabidopsis >gi|3281862|emb|CAA19757.1| putative protein [Arabidopsis >gi|7270069|emb|CAB79884.1| putative protein [Arabidopsis

SEQ ID NO: 92974 - protein, 431 aa, Arabidopsis thaliana; identical to SEQ ID NO: 89218
  peptide (1)..(431): Ceres Seq. ID no. 12716135
  misc_feature (59)..(158): Pfam Name: B3 DNA binding domain Pfam Description: B3 DNA binding domain
  misc_feature (34)..(431): Homolog of NCBI NO: 15236032 NR Description: putative protein; protein id: At4g31650.1
  misc_feature (1)..(14): Homolog of NCBI NO: 15236032 NR Description: putative protein; protein id: At4g31650.1
  misc_feature (1)..(225): Homolog of NCBI NO: 15236030 NR Description: putative protein; protein id: At4g31640.1
  misc_feature (1)..(154): Homolog of NCBI NO: 15236040 NR Description: putative protein; protein id: At4g31690.1
  misc_feature (1)..(154): Homolog of NCBI NO: 20152540 NR Description: putative auxin response factor 23 [Arabidopsis
  misc_feature (1)..(155): Homolog of NCBI NO: 30689117 NR Description: transcriptional factor B3 family [Arabidopsis >gi|24817267|emb|CAD56214.1| putative auxin response factor 24
  misc_feature (1)..(155): Homolog of NCBI NO: 7486320 NR Description: hypothetical protein F28M20.130 - Arabidopsis >gi|3281860|emb|CAA19755.1| putative protein [Arabidopsis >gi|7270071|emb|CAB79886.1| putative protein [Arabidopsis
  misc_feature (1)..(41): Homolog of NCBI NO: 7486322 NR Description: hypothetical protein F28M20.150 - Arabidopsis >gi|3281862|emb|CAA19757.1| putative protein [Arabidopsis >gi|7270069|emb|CAB79884.1| putative protein [Arabidopsis
  misc_feature (26)..(135): Homolog of NCBI NO: 7486322 NR Description: hypothetical protein F28M20.150 - Arabidopsis >gi|3281862|emb|CAA19757.1| putative protein [Arabidopsis >gi|7270069|emb|CAB79884.1| putative protein [Arabidopsis
  misc_feature (320)..(413): Homolog of NCBI NO: 7486322 NR Description: hypothetical protein F28M20.150 - Arabidopsis >gi|3281862|emb|CAA19757.1| putative protein [Arabidopsis >gi|7270069|emb|CAB79884.1| putative protein [Arabidopsis

SEQ ID NO: 92975 - protein, 362 aa, Arabidopsis thaliana; identical to SEQ ID NO: 89219
  peptide (1)..(362): Ceres Seq. ID no. 12716136
  misc_feature (1)..(89): Pfam Name: B3 DNA binding domain Pfam Description: B3 DNA binding domain
  misc_feature (1)..(362): Homolog of NCBI NO: 15236032 NR Description: putative protein; protein id: At4g31650.1
  misc_feature (1)..(156): Homolog of NCBI NO: 15236030 NR Description: putative protein; protein id: At4g31640.1
  misc_feature (1)..(85): Homolog of NCBI NO: 15236040 NR Description: putative protein; protein id: At4g31690.1
  misc_feature (1)..(85): Homolog of NCBI NO: 20152540 NR Description: putative auxin response factor 23 [Arabidopsis
  misc_feature (1)..(86): Homolog of NCBI NO: 30689117 NR Description: transcriptional factor B3 family [Arabidopsis >gi|24817267|emb|CAD56214.1| putative auxin response factor 24
  misc_feature (1)..(86): Homolog of NCBI NO: 7486320 NR Description: hypothetical protein F28M20.130 - Arabidopsis >gi|3281860|emb|CAA19755.1| putative protein [Arabidopsis >gi|7270071|emb|CAB79886.1| putative protein [Arabidopsis
  misc_feature (1)..(66): Homolog of NCBI NO: 7486322 NR Description: hypothetical protein F28M20.150 - Arabidopsis >gi|3281862|emb|CAA19757.1| putative protein [Arabidopsis >gi|7270069|emb|CAB79884.1| putative protein [Arabidopsis
  misc_feature (251)..(344): Homolog of NCBI NO: 7486322 NR Description: hypothetical protein F28M20.150 - Arabidopsis >gi|3281862|emb|CAA19757.1| putative protein [Arabidopsis >gi|7270069|emb|CAB79884.1| putative protein [Arabidopsis
  misc_feature (1)..(107): Homolog of NCBI NO: 27754629 NR Description: unknown protein [Arabidopsis thaliana]
  misc_feature (104)..(357): Homolog of NCBI NO: 27754629 NR Description: unknown protein [Arabidopsis thaliana]

SEQ ID NO: 92976 - DNA, 1836 bp, Arabidopsis thaliana; identical to SEQ ID NO: 89220
  misc_feature (1)..(1836): Ceres Seq. ID no. 12716177
  misc_feature: MA Experiment ID: 108434 Result: Up-regulated in Transcription
  misc_feature: MA Experiment 108434 PARAMETER Experiment Name: At_Root_Tips_cDNA_P Parameter: Tissue Value: Root Tips
  misc_feature: MA Experiment ID: 108461 Result: Up-regulated in Transcription
  misc_feature: MA Experiment 108461 PARAMETER Experiment Name: At_Germinating_Seeds_cDNA_P Parameter: Age (day) Value: 1 vs. 0
  misc_feature: MA Experiment 108461 PARAMETER Experiment Name: At_Germinating_Seeds_cDNA_P Parameter: Tissue Value: Germinating Seeds
  misc_feature: MA Experiment ID: 108462 Result: Up-regulated in Transcription
  misc_feature: MA Experiment 108462 PARAMETER Experiment Name: At_Germinating_Seeds_cDNA_P Parameter: Age (day) Value: 2 vs. 0
  misc_feature: MA Experiment 108462 PARAMETER Experiment Name: At_Germinating_Seeds_cDNA_P Parameter: Tissue Value: Germinating Seeds
  misc_feature: MA Experiment ID: 20000179 Result: Up-regulated in Transcription
  misc_feature: MA Experiment 20000179 PARAMETER Experiment Name: At_Germinating_Seeds_P Parameter: Age (hr) Value: 6 vs. 0
  misc_feature: MA Experiment 20000179 PARAMETER Experiment Name: At_Germinating_Seeds_P Parameter: Tissue Value: Germinating Seeds
  misc_feature: MA Experiment ID: 20000180 Result: Up-regulated in Transcription
  misc_feature: MA Experiment 20000180 PARAMETER Experiment Name: At_Germinating_Seeds_P Parameter: Age (hr) Value: 24 vs. 0
  misc_feature: MA Experiment 20000180 PARAMETER Experiment Name: At_Germinating_Seeds_P Parameter: Tissue Value: Germinating Seeds
  misc_feature: MA Experiment ID: 20000794 Result: Up-regulated in Transcription
  misc_feature: MA Experiment 20000794 PARAMETER Experiment Name: At_Petals_P Parameter: Age (day) Value: 23-25 days
  misc_feature: MA Experiment 20000794 PARAMETER Experiment Name: At_Petals_P Parameter: Plant Line Value: WS
  misc_feature: MA Experiment 20000794 PARAMETER Experiment Name: At_Petals_P Parameter: Tissue Value: Petals vs. Whole plant
  misc_feature: MA Experiment ID: 20001451 Result: Down-regulated in Transcription
  misc_feature: MA Experiment 20001451 PARAMETER Experiment Name: At_Far-red-induction_P Parameter: Age (day) Value: 7
  misc_feature: MA Experiment 20001451 PARAMETER Experiment Name: At_Far-red-induction_P Parameter: Light Value: Far-red vs. White
  misc_feature: MA Experiment 20001451 PARAMETER Experiment Name: At_Far-red-induction_P Parameter: Organism Value: A. thaliana
  misc_feature: MA Experiment 20001451 PARAMETER Experiment Name: At_Far-red-induction_P Parameter: Plant Line Value: Columbia
  misc_feature: MA Experiment 20001451 PARAMETER Experiment Name: At_Far-red-induction_P Parameter: Timepoint (hr) Value: 24
  misc_feature: MA Experiment 20001451 PARAMETER Experiment Name: At_Far-red-induction_P Parameter: Tissue Value: Whole Plant
  misc_feature: MA Experiment ID: 20001556 Result: Up-regulated in Transcription
  misc_feature: MA Experiment 20001556 PARAMETER Experiment Name: At_Drought_Soil_Dry_P Parameter: Age (day) Value: 26
  misc_feature: MA Experiment 20001556 PARAMETER Experiment Name: At_Drought_Soil_Dry_P Parameter: Organism Value: A. thaliana
  misc_feature: MA Experiment 20001556 PARAMETER Experiment Name: At_Drought_Soil_Dry_P Parameter: Plant Line Value: WS
  misc_feature: MA Experiment 20001556 PARAMETER Experiment Name: At_Drought_Soil_Dry_P Parameter: Post Timepoint (hr) Value: None
  misc_feature: MA Experiment 20001556 PARAMETER Experiment Name: At_Drought_Soil_Dry_P Parameter: Post-Treatment Value: None
  misc_feature: MA Experiment 20001556 PARAMETER Experiment Name: At_Drought_Soil_Dry_P Parameter: Timepoint (day) Value: 12
  misc_feature: MA Experiment 20001556 PARAMETER Experiment Name: At_Drought_Soil_Dry_P Parameter: Treatment Value: Drought vs. No Drought

SEQ ID NO: 92977 - protein, 453 aa, Arabidopsis thaliana; identical to SEQ ID NO: 39108
  peptide (1)..(453): Ceres Seq. ID no. 12716178
  misc_feature (131)..(449): Pfam Name: Aminotransferase class I and II Pfam Description: Aminotransferase class I and II
  misc_feature (1)..(453): Homolog of NCBI NO: 15236129 NR Description: aspartate aminotransferase; protein id: supported by cDNA: 103854., supported by cDNA: 33414., supported cDNA: gi_15451159, supported by cDNA: gi_20148354 [Arabidopsis
  misc_feature (1)..(453): Homolog of NCBI NO: 531555 NR Description: aspartate aminotransferase [Arabidopsis thaliana]
  misc_feature (1)..(453): Homolog of NCBI NO: 21618222 NR Description: aspartate aminotransferase [Arabidopsis thaliana]
  misc_feature (1)..(453): Homolog of NCBI NO: 1076500 NR Description: aspartate transaminase (EC 2.6.1.1) - alfalfa
  misc_feature (1)..(453): Homolog of NCBI NO: 445118 NR Description: Asp aminotransferase
  misc_feature (1)..(453): Homolog of NCBI NO: 25990362 NR Description: aspartate aminotransferase [Phaseolus vulgaris]
  misc_feature (2)..(453): Homolog of NCBI NO: 2605932 NR Description: aspartate aminotransferase [Lotus corniculatus]
  misc_feature (1)..(453): Homolog of NCBI NO: 485495 NR Description: aspartate transaminase (EC 2.6.1.1) AAT5

SEQ ID NO: 92978 - protein, 449 aa, Arabidopsis thaliana; identical to SEQ ID NO: 39109
  peptide (1)..(449): Ceres Seq. ID no. 12716179
  misc_feature (127)..(445): Pfam Name: Aminotransferase class I and II Pfam Description: Aminotransferase class I and II
  misc_feature (1)..(449): Homolog of NCBI NO: 15236129 NR Description: aspartate aminotransferase; protein id: supported by cDNA: 103854., supported by cDNA: 33414., supported cDNA: gi_15451159, supported by cDNA: gi_20148354 [Arabidopsis
  misc_feature (1)..(449): Homolog of NCBI NO: 531555 NR Description: aspartate aminotransferase [Arabidopsis thaliana]
  misc_feature (1)..(449): Homolog of NCBI NO: 21618222 NR Description: aspartate aminotransferase [Arabidopsis thaliana]
  misc_feature (1)..(449): Homolog of NCBI NO: 1076500 NR Description: aspartate transaminase (EC 2.6.1.1) - alfalfa
  misc_feature (1)..(449): Homolog of NCBI NO: 445118 NR Description: Asp aminotransferase
  misc_feature (1)..(449): Homolog of NCBI NO: 25990362 NR Description: aspartate aminotransferase [Phaseolus vulgaris]
  misc_feature (1)..(449): Homolog of NCBI NO: 2605932 NR Description: aspartate aminotransferase [Lotus corniculatus]
  misc_feature (1)..(449): Homolog of NCBI NO: 485495 NR Description: aspartate transaminase (EC 2.6.1.1) AAT5

SEQ ID NO: 92979 - protein, 410 aa, Arabidopsis thaliana; identical to SEQ ID NO: 39110
  peptide (1)..(410): Ceres Seq. ID no. 12716180
  misc_feature (88)..(406): Pfam Name: Aminotransferase class I and II Pfam Description: Aminotransferase class I and II
  misc_feature (1)..(410): Homolog of NCBI NO: 15236129 NR Description: aspartate aminotransferase; protein id: supported by cDNA: 103854., supported by cDNA: 33414., supported cDNA: gi_15451159, supported by cDNA: gi_20148354 [Arabidopsis
  misc_feature (1)..(410): Homolog of NCBI NO: 531555 NR Description: aspartate aminotransferase [Arabidopsis thaliana]
  misc_feature (1)..(410): Homolog of NCBI NO: 21618222 NR Description: aspartate aminotransferase [Arabidopsis thaliana]
  misc_feature (1)..(410): Homolog of NCBI NO: 1076500 NR Description: aspartate transaminase (EC 2.6.1.1) - alfalfa
  misc_feature (1)..(410): Homolog of NCBI NO: 445118 NR Description: Asp aminotransferase
  misc_feature (1)..(410): Homolog of NCBI NO: 25990362 NR Description: aspartate aminotransferase [Phaseolus vulgaris]
  misc_feature (1)..(410): Homolog of NCBI NO: 2605932 NR Description: aspartate aminotransferase [Lotus corniculatus]
  misc_feature (1)..(410): Homolog of NCBI NO: 485495 NR Description: aspartate transaminase (EC 2.6.1.1) AAT5

SEQ ID NO: 92980 - DNA, 2373 bp, Arabidopsis thaliana; identical to SEQ ID NO: 89224
  misc_feature (1)..(2373): Ceres Seq. ID no. 12716265
  misc_feature: MA Experiment ID: 20000185 Result: Up-regulated in Transcription
  misc_feature: MA Experiment 20000185 PARAMETER Experiment Name: At_Roots__P Parameter: Age (day) Value: 7 vs. 21
  misc_feature: MA Experiment 20000185 PARAMETER Experiment Name: At_Roots__P Parameter: Organism Value: A. thaliana
  misc_feature: MA Experiment 20000185 PARAMETER Experiment Name: At_Roots__P Parameter: Tissue Value: Roots vs. Whole Plant
  misc_feature: MA Experiment ID: 20000234 Result: Up-regulated in Transcription
  misc_feature: MA Experiment 20000234 PARAMETER Experiment Name: At_Siliques_P Parameter: Age (day) Value: 21
  misc_feature: MA Experiment 20000234 PARAMETER Experiment Name: At_Siliques_P Parameter: Organism Value: A. thaliana
  misc_feature: MA Experiment 20000234 PARAMETER Experiment Name: At_Siliques_P Parameter: Plant Line Value: WS
  misc_feature: MA Experiment 20000234 PARAMETER Experiment Name: At_Siliques_P Parameter: Tissue Value: Less Than 5mm Siliques vs. Whole Plant
  misc_feature: MA Experiment ID: 20000264 Result: Up-regulated in Transcription
  misc_feature: MA Experiment 20000264 PARAMETER Experiment Name: At_Open_Flower_P Parameter: Age (day) Value: 21
  misc_feature: MA Experiment 20000264 PARAMETER Experiment Name: At_Open_Flower_P Parameter: Plant Line Value: WS
  misc_feature: MA Experiment 20000264 PARAMETER Experiment Name: At_Open_Flower_P Parameter: Tissue Value: Open Flower vs. Whole Plant
  misc_feature: MA Experiment ID: 20000286 Result: Up-regulated in Transcription
  misc_feature: MA Experiment 20000286 PARAMETER Experiment Name: At_Open_Flower_P Parameter: Age (day) Value: 21
  misc_feature: MA Experiment 20000286 PARAMETER Experiment Name: At_Open_Flower_P Parameter: Plant Line Value: WS
  misc_feature: MA Experiment 20000286 PARAMETER Experiment Name: At_Open_Flower_P Parameter: Tissue Value: Half Open vs. Whole Plant
  misc_feature: MA Experiment ID: 20000437 Result: Down-regulated in Transcription
  misc_feature: MA Experiment 20000437 PARAMETER Experiment Name: At_Drought_P Parameter: Age (day) Value: 8
  misc_feature: MA Experiment 20000437 PARAMETER Experiment Name: At_Drought_P Parameter: Organism Value: A. thaliana
  misc_feature: MA Experiment 20000437 PARAMETER Experiment Name: At_Drought_P Parameter: Plant Line Value: WS
  misc_feature: MA Experiment 20000437 PARAMETER Experiment Name: At_Drought_P Parameter: Timepoint (hr) Value: 24
  misc_feature: MA Experiment 20000437 PARAMETER Experiment Name: At_Drought_P Parameter: Tissue Value: Whole Plant
  misc_feature: MA Experiment 20000437 PARAMETER Experiment Name: At_Drought_P Parameter: Treatment Value: Drought vs. No Drought
  misc_feature: MA Experiment ID: 20000439 Result: Up-regulated in Transcription
  misc_feature: MA Experiment 20000439 PARAMETER Experiment Name: At_Roots__P Parameter: Age (day) Value: 14 vs. 21
  misc_feature: MA Experiment 20000439 PARAMETER Experiment Name: At_Roots__P Parameter: Organism Value: A. thaliana
  misc_feature: MA Experiment 20000439 PARAMETER Experiment Name: At_Roots__P Parameter: Tissue Value: Roots vs. Whole Plant
  misc_feature: MA Experiment ID: 20000496 Result: Up-regulated in Transcription
  misc_feature: MA Experiment 20000496 PARAMETER Experiment Name: At_Guard_Cells_P Parameter: Harvest Date Value: 7/19/2002
  misc_feature: MA Experiment 20000496 PARAMETER Experiment Name: At_Guard_Cells_P Parameter: Organism Value: Canola
  misc_feature: MA Experiment 20000496 PARAMETER Experiment Name: At_Guard_Cells_P Parameter: Tissue Value: Guard Cells vs. Leaves
  misc_feature: MA Experiment ID: 20001450 Result: Down-regulated in Transcription
  misc_feature: MA Experiment 20001450 PARAMETER Experiment Name: At_Far-red-induction_P Parameter: Age (day) Value: 7
  misc_feature: MA Experiment 20001450 PARAMETER Experiment Name: At_Far-red-induction_P Parameter: Light Value: Far-red vs. White
  misc_feature: MA Experiment 20001450 PARAMETER Experiment Name: At_Far-red-induction_P Parameter: Organism Value: A. thaliana
  misc_feature: MA Experiment 20001450 PARAMETER Experiment Name: At_Far-red-induction_P Parameter: Plant Line Value: Columbia
  misc_feature: MA Experiment 20001450 PARAMETER Experiment Name: At_Far-red-induction_P Parameter: Timepoint (hr) Value: 8
  misc_feature: MA Experiment 20001450 PARAMETER Experiment Name: At_Far-red-induction_P Parameter: Tissue Value: Whole Plant
  misc_feature: MA Experiment ID: 20001451 Result: Down-regulated in Transcription
  misc_feature: MA Experiment 20001451 PARAMETER Experiment Name: At_Far-red-induction_P Parameter: Age (day) Value: 7
  misc_feature: MA Experiment 20001451 PARAMETER Experiment Name: At_Far-red-induction_P Parameter: Light Value: Far-red vs. White
  misc_feature: MA Experiment 20001451 PARAMETER Experiment Name: At_Far-red-induction_P Parameter: Organism Value: A. thaliana
  misc_feature: MA Experiment 20001451 PARAMETER Experiment Name: At_Far-red-induction_P Parameter: Plant Line Value: Columbia
  misc_feature: MA Experiment 20001451 PARAMETER Experiment Name: At_Far-red-induction_P Parameter: Timepoint (hr) Value: 24
  misc_feature: MA Experiment 20001451 PARAMETER Experiment Name: At_Far-red-induction_P Parameter: Tissue Value: Whole Plant

SEQ ID NO: 92981 - protein, 790 aa, Arabidopsis thaliana; identical to SEQ ID NO: 89225
  peptide (1)..(790): Ceres Seq. ID no. 12716266
  misc_feature (42)..(426): Pfam Name: Myosin tail Pfam Description: Myosin tail
  misc_feature (48)..(790): Homolog of NCBI NO: 18416938 NR Description: kinesin-like protein B (katB); protein id:
  misc_feature (51)..(790): Homolog of NCBI NO: 18423656 NR Description: kinesin-like protein C (katC); protein id:
  misc_feature (48)..(790): Homolog of NCBI NO: 7446304 NR Description: kinesin-related protein katB - Arabidopsis
  misc_feature (131)..(790): Homolog of NCBI NO: 10176794 NR Description: kinesin-like protein [Arabidopsis thaliana]
  misc_feature (128)..(783): Homolog of NCBI NO: 34915504 NR Description: putative kinesin-related protein katA [Oryza
  misc_feature (383)..(783): Homolog of NCBI NO: 33354214 NR Description: kinesin-related protein KLPA-like protein [Oryza
  misc_feature (1)..(394): Homolog of NCBI NO: 4455160 NR Description: kinesin-related protein katA (fragment)
  misc_feature (424)..(778): Homolog of NCBI NO: 15208457 NR Description: kinesin heavy chain [Zea mays]
  misc_feature (498)..(774): Homolog of NCBI NO: 15208463 NR Description: kinesin heavy chain [Zea mays]
  misc_feature (251)..(777): Homolog of NCBI NO: 3133267 NR Description: kinesin-related protein K2 [Dictyostelium

SEQ ID NO: 92982 - protein, 699 aa, Arabidopsis thaliana; identical to SEQ ID NO: 89226
  peptide (1)..(699): Ceres Seq. ID no. 12716267
  misc_feature (1)..(335): Pfam Name: Myosin tail Pfam Description: Myosin tail
  misc_feature (1)..(699): Homolog of NCBI NO: 18416938 NR Description: kinesin-like protein B (katB); protein id:
  misc_feature (1)..(699): Homolog of NCBI NO: 18423656 NR Description: kinesin-like protein C (katC); protein id:
  misc_feature (1)..(699): Homolog of NCBI NO: 7446304 NR Description: kinesin-related protein katB - Arabidopsis
  misc_feature (40)..(699): Homolog of NCBI NO: 10176794 NR Description: kinesin-like protein [Arabidopsis thaliana]
  misc_feature (37)..(692): Homolog of NCBI NO: 34915504 NR Description: putative kinesin-related protein katA [Oryza
  misc_feature (292)..(692): Homolog of NCBI NO: 33354214 NR Description: kinesin-related protein KLPA-like protein [Oryza
  misc_feature (1)..(303): Homolog of NCBI NO: 4455160 NR Description: kinesin-related protein katA (fragment)
  misc_feature (333)..(687): Homolog of NCBI NO: 15208457 NR Description: kinesin heavy chain [Zea mays]
  misc_feature (407)..(683): Homolog of NCBI NO: 15208463 NR Description: kinesin heavy chain [Zea mays]
  misc_feature (160)..(686): Homolog of NCBI NO: 3133267 NR Description: kinesin-related protein K2 [Dictyostelium

SEQ ID NO: 92983 - protein, 639 aa, Arabidopsis thaliana; identical to SEQ ID NO: 89227
  peptide (1)..(639): Ceres Seq. ID no. 12716268
  misc_feature (1)..(275): Pfam Name: Myosin tail Pfam Description: Myosin tail
  misc_feature (1)..(639): Homolog of NCBI NO: 18416938 NR Description: kinesin-like protein B (katB); protein id:
  misc_feature (1)..(639): Homolog of NCBI NO: 18423656 NR Description: kinesin-like protein C (katC); protein id:
  misc_feature (1)..(639): Homolog of NCBI NO: 7446304 NR Description: kinesin-related protein katB - Arabidopsis
  misc_feature (1)..(639): Homolog of NCBI NO: 10176794 NR Description: kinesin-like protein [Arabidopsis thaliana]
  misc_feature (1)..(632): Homolog of NCBI NO: 34915504 NR Description: putative kinesin-related protein katA [Oryza
  misc_feature (232)..(632): Homolog of NCBI NO: 33354214 NR Description: kinesin-related protein KLPA-like protein [Oryza
  misc_feature (1)..(243): Homolog of NCBI NO: 4455160 NR Description: kinesin-related protein katA (fragment)
  misc_feature (273)..(627): Homolog of NCBI NO: 15208457 NR Description: kinesin heavy chain [Zea mays]
  misc_feature (347)..(623): Homolog of NCBI NO: 15208463 NR Description: kinesin heavy chain [Zea mays]
  misc_feature (100)..(626): Homolog of NCBI NO: 3133267 NR Description: kinesin-related protein K2 [Dictyostelium

SEQ ID NO: 92984 - DNA, 1320 bp, Arabidopsis thaliana; identical to SEQ ID NO: 89228
  misc_feature (1)..(1320): Ceres Seq. ID no. 12716284
  misc_feature: MA Experiment ID: 20000171 Result: Up-regulated in Transcription
  misc_feature: MA Experiment 20000171 PARAMETER Experiment Name: At_42deg_Heat_P Parameter: Age (day) Value: 14
  misc_feature: MA Experiment 20000171 PARAMETER Experiment Name: At_42deg_Heat_P Parameter: Organism Value: A. thaliana
  misc_feature: MA Experiment 20000171 PARAMETER Experiment Name: At_42deg_Heat_P Parameter: Plant Line Value: WS
  misc_feature: MA Experiment 20000171 PARAMETER Experiment Name: At_42deg_Heat_P Parameter: Temperature (deg C) Value: 42 vs. 22
  misc_feature: MA Experiment 20000171 PARAMETER Experiment Name: At_42deg_Heat_P Parameter: Timepoint (hr) Value: 1
  misc_feature: MA Experiment 20000171 PARAMETER Experiment Name: At_42deg_Heat_P Parameter: Tissue Value: Aerial
  misc_feature: MA Experiment ID: 20000573 Result: Up-regulated in Transcription
  misc_feature: MA Experiment 20000573 PARAMETER Experiment Name: At_100uM_ABA_Mutants__P Parameter: Organism Value: A. thaliana
  misc_feature: MA Experiment 20000573 PARAMETER Experiment Name: At_100uM_ABA_Mutants__P Parameter: Plant Line Value: CS22 vs. Ler wt
  misc_feature: MA Experiment 20000573 PARAMETER Experiment Name: At_100uM_ABA_Mutants__P Parameter: Timepoint (hr) Value: N/A
  misc_feature: MA Experiment 20000573 PARAMETER Experiment Name: At_100uM_ABA_Mutants__P Parameter: Tissue Value: Whole Plant
  misc_feature: MA Experiment 20000573 PARAMETER Experiment Name: At_100uM_ABA_Mutants__P Parameter: Treatment Value: None
  misc_feature: MA Experiment ID: 20000574 Result: Up-regulated in Transcription
  misc_feature: MA Experiment 20000574 PARAMETER Experiment Name: At_100uM_ABA_Mutants__P Parameter: Organism Value: A. thaliana
  misc_feature: MA Experiment 20000574 PARAMETER Experiment Name: At_100uM_ABA_Mutants__P Parameter: Plant Line Value: CS23 vs. Ler wt
  misc_feature: MA Experiment 20000574 PARAMETER Experiment Name: At_100uM_ABA_Mutants__P Parameter: Timepoint (hr) Value: N/A
  misc_feature: MA Experiment 20000574 PARAMETER Experiment Name: At_100uM_ABA_Mutants__P Parameter: Tissue Value: Whole Plant
  misc_feature: MA Experiment 20000574 PARAMETER Experiment Name: At_100uM_ABA_Mutants__P Parameter: Treatment Value: None
  misc_feature: MA Experiment ID: 20000576 Result: Up-regulated in Transcription
  misc_feature: MA Experiment 20000576 PARAMETER Experiment Name: At_100uM_ABA_Mutants__P Parameter: Organism Value: A. thaliana
  misc_feature: MA Experiment 20000576 PARAMETER Experiment Name: At_100uM_ABA_Mutants__P Parameter: Plant Line Value: CS23
  misc_feature: MA Experiment 20000576 PARAMETER Experiment Name: At_100uM_ABA_Mutants__P Parameter: Timepoint (hr) Value: 6
  misc_feature: MA Experiment 20000576 PARAMETER Experiment Name: At_100uM_ABA_Mutants__P Parameter: Tissue Value: Whole Plant
  misc_feature: MA Experiment 20000576 PARAMETER Experiment Name: At_100uM_ABA_Mutants__P Parameter: Treatment Value: 1uM ABA vs. No Treatment

SEQ ID NO: 92985 - protein, 439 aa, Arabidopsis thaliana; identical to SEQ ID NO: 89229
  peptide (1)..(439): Ceres Seq. ID no. 12716285
  misc_feature (136)..(439): Homolog of NCBI NO: 15218579 NR Description: unknown protein; protein id: At1g43910.1
  misc_feature (3)..(159): Homolog of NCBI NO: 15218579 NR Description: unknown protein; protein id: At1g43910.1
  misc_feature (136)..(439): Homolog of NCBI NO: 39104583 NR Description: unknown protein [Arabidopsis thaliana]
  misc_feature (3)..(159): Homolog of NCBI NO: 39104583 NR Description: unknown protein [Arabidopsis thaliana]
  misc_feature (192)..(439): Homolog of NCBI NO: 15235565 NR Description: putative protein; protein id: At4g05380.1
  misc_feature (136)..(434): Homolog of NCBI NO: 30686502 NR Description: BCS1 - like protein [Arabidopsis thaliana]
  misc_feature (6)..(135): Homolog of NCBI NO: 30686502 NR Description: BCS1 - like protein [Arabidopsis thaliana]
  misc_feature (136)..(439): Homolog of NCBI NO: 25411838 NR Description: probable AAA-type ATPase [imported] - Arabidopsis
  misc_feature (136)..(439): Homolog of NCBI NO: 30680274 NR Description: AAA-type ATPase family [Arabidopsis thaliana]
  misc_feature (11)..(172): Homolog of NCBI NO: 25411838 NR Description: probable AAA-type ATPase [imported] - Arabidopsis

SEQ ID NO: 92986 - protein, 367 aa, Arabidopsis thaliana; identical to SEQ ID NO: 89230
  peptide (1)..(367): Ceres Seq. ID no. 12716286
  misc_feature (64)..(367): Homolog of NCBI NO: 15218579 NR Description: unknown protein; protein id: At1g43910.1
  misc_feature (1)..(87): Homolog of NCBI NO: 15218579 NR Description: unknown protein; protein id: At1g43910.1
  misc_feature (64)..(367): Homolog of NCBI NO: 39104583 NR Description: unknown protein [Arabidopsis thaliana]
  misc_feature (1)..(87): Homolog of NCBI NO: 39104583 NR Description: unknown protein [Arabidopsis thaliana]
  misc_feature (120)..(367): Homolog of NCBI NO: 15235565 NR Description: putative protein; protein id: At4g05380.1
  misc_feature (64)..(362): Homolog of NCBI NO: 30686502 NR Description: BCS1 - like protein [Arabidopsis thaliana]
  misc_feature (1)..(63): Homolog of NCBI NO: 30686502 NR Description: BCS1 - like protein [Arabidopsis thaliana]
  misc_feature (64)..(367): Homolog of NCBI NO: 25411838 NR Description: probable AAA-type ATPase [imported] - Arabidopsis
  misc_feature (64)..(367): Homolog of NCBI NO: 30680274 NR Description: AAA-type ATPase family [Arabidopsis thaliana]
  misc_feature (1)..(100): Homolog of NCBI NO: 25411838 NR Description: probable AAA-type ATPase [imported] - Arabidopsis

SEQ ID NO: 92987 - protein, 333 aa, Arabidopsis thaliana; identical to SEQ ID NO: 89231
  peptide (1)..(333): Ceres Seq. ID no. 12716287
  misc_feature (30)..(333): Homolog of NCBI NO: 15218579 NR Description: unknown protein; protein id: At1g43910.1
  misc_feature (1)..(53): Homolog of NCBI NO: 15218579 NR Description: unknown protein; protein id: At1g43910.1
  misc_feature (30)..(333): Homolog of NCBI NO: 39104583 NR Description: unknown protein [Arabidopsis thaliana]
  misc_feature (1)..(53): Homolog of NCBI NO: 39104583 NR Description: unknown protein [Arabidopsis thaliana]
  misc_feature (86)..(333): Homolog of NCBI NO: 15235565 NR Description: putative protein; protein id: At4g05380.1
  misc_feature (30)..(328): Homolog of NCBI NO: 30686502 NR Description: BCS1 - like protein [Arabidopsis thaliana]
  misc_feature (1)..(29): Homolog of NCBI NO: 30686502 NR Description: BCS1 - like protein [Arabidopsis thaliana]
  misc_feature (30)..(333): Homolog of NCBI NO: 25411838 NR Description: probable AAA-type ATPase [imported] - Arabidopsis
  misc_feature (30)..(333): Homolog of NCBI NO: 30680274 NR Description: AAA-type ATPase family [Arabidopsis thaliana]
  misc_feature (1)..(66): Homolog of NCBI NO: 25411838 NR Description: probable AAA-type ATPase [imported] - Arabidopsis

SEQ ID NO: 92988 - DNA, 897 bp, Arabidopsis thaliana; identical to SEQ ID NO: 89232
  misc_feature (1)..(897): Ceres Seq. ID no. 12716632
  misc_feature: MA Experiment ID: 20000185 Result: Down-regulated in Transcription
  misc_feature: MA Experiment 20000185 PARAMETER Experiment Name: At_Roots__P Parameter: Age (day) Value: 7 vs. 21
  misc_feature: MA Experiment 20000185 PARAMETER Experiment Name: At_Roots__P Parameter: Organism Value: A. thaliana
  misc_feature: MA Experiment 20000185 PARAMETER Experiment Name: At_Roots__P Parameter: Tissue Value: Roots vs. Whole Plant
  misc_feature: MA Experiment ID: 20000437 Result: Down-regulated in Transcription
  misc_feature: MA Experiment 20000437 PARAMETER Experiment Name: At_Drought_P Parameter: Age (day) Value: 8
  misc_feature: MA Experiment 20000437 PARAMETER Experiment Name: At_Drought_P Parameter: Organism Value: A. thaliana
  misc_feature: MA Experiment 20000437 PARAMETER Experiment Name: At_Drought_P Parameter: Plant Line Value: WS
  misc_feature: MA Experiment 20000437 PARAMETER Experiment Name: At_Drought_P Parameter: Timepoint (hr) Value: 24
  misc_feature: MA Experiment 20000437 PARAMETER Experiment Name: At_Drought_P Parameter: Tissue Value: Whole Plant
  misc_feature: MA Experiment 20000437 PARAMETER Experiment Name: At_Drought_P Parameter: Treatment Value: Drought vs. No Drought
  misc_feature: MA Experiment ID: 20000438 Result: Up-regulated in Transcription
  misc_feature: MA Experiment 20000438 PARAMETER Experiment Name: At_Shoots__P Parameter: Age (day) Value: 14
  misc_feature: MA Experiment 20000438 PARAMETER Experiment Name: At_Shoots__P Parameter: Tissue Value: Shoots vs. Whole Plant
  misc_feature: MA Experiment ID: 20000439 Result: Down-regulated in Transcription
  misc_feature: MA Experiment 20000439 PARAMETER Experiment Name: At_Roots__P Parameter: Age (day) Value: 14 vs. 21
  misc_feature: MA Experiment 20000439 PARAMETER Experiment Name: At_Roots__P Parameter: Organism Value: A. thaliana
  misc_feature: MA Experiment 20000439 PARAMETER Experiment Name: At_Roots__P Parameter: Tissue Value: Roots vs. Whole Plant
  misc_feature: MA Experiment ID: 20000495 Result: Down-regulated in Transcription
  misc_feature: MA Experiment 20000495 PARAMETER Experiment Name: At_Guard_Cells_P Parameter: Harvest Date Value: 8/2/2002
  misc_feature: MA Experiment 20000495 PARAMETER Experiment Name: At_Guard_Cells_P Parameter: Organism Value: A. thaliana
  misc_feature: MA Experiment 20000495 PARAMETER Experiment Name: At_Guard_Cells_P Parameter: Tissue Value: Guard Cells vs. Leaves
  misc_feature: MA Experiment ID: 20000794 Result: Down-regulated in Transcription
  misc_feature: MA Experiment 20000794 PARAMETER Experiment Name: At_Petals_P Parameter: Age (day) Value: 23-25 days
  misc_feature: MA Experiment 20000794 PARAMETER Experiment Name: At_Petals_P Parameter: Plant Line Value: WS
  misc_feature: MA Experiment 20000794 PARAMETER Experiment Name: At_Petals_P Parameter: Tissue Value: Petals vs. Whole plant
  misc_feature: MA Experiment ID: 20001451 Result: Down-regulated in Transcription
  misc_feature: MA Experiment 20001451 PARAMETER Experiment Name: At_Far-red-induction_P Parameter: Age (day) Value: 7
  misc_feature: MA Experiment 20001451 PARAMETER Experiment Name: At_Far-red-induction_P Parameter: Light Value: Far-red vs. White
  misc_feature: MA Experiment 20001451 PARAMETER Experiment Name: At_Far-red-induction_P Parameter: Organism Value: A. thaliana
  misc_feature: MA Experiment 20001451 PARAMETER Experiment Name: At_Far-red-induction_P Parameter: Plant Line Value: Columbia
  misc_feature: MA Experiment 20001451 PARAMETER Experiment Name: At_Far-red-induction_P Parameter: Timepoint (hr) Value: 24
  misc_feature: MA Experiment 20001451 PARAMETER Experiment Name: At_Far-red-induction_P Parameter: Tissue Value: Whole Plant
  misc_feature: MA Experiment ID: 20001556 Result: Up-regulated in Transcription
  misc_feature: MA Experiment 20001556 PARAMETER Experiment Name: At_Drought_Soil_Dry_P Parameter: Age (day) Value: 26
  misc_feature: MA Experiment 20001556 PARAMETER Experiment Name: At_Drought_Soil_Dry_P Parameter: Organism Value: A. thaliana
  misc_feature: MA Experiment 20001556 PARAMETER Experiment Name: At_Drought_Soil_Dry_P Parameter: Plant Line Value: WS
  misc_feature: MA Experiment 20001556 PARAMETER Experiment Name: At_Drought_Soil_Dry_P Parameter: Post Timepoint (hr) Value: None
  misc_feature: MA Experiment 20001556 PARAMETER Experiment Name: At_Drought_Soil_Dry_P Parameter: Post-Treatment Value: None
  misc_feature: MA Experiment 20001556 PARAMETER Experiment Name: At_Drought_Soil_Dry_P Parameter: Timepoint (day) Value: 12
  misc_feature: MA Experiment 20001556 PARAMETER Experiment Name: At_Drought_Soil_Dry_P Parameter: Treatment Value: Drought vs. No Drought
  misc_feature: MA Experiment ID: 20001558 Result: Up-regulated in Transcription
  misc_feature: MA Experiment 20001558 PARAMETER Experiment Name: At_Drought_Soil_Dry_P Parameter: Age (day) Value: 27
  misc_feature: MA Experiment 20001558 PARAMETER Experiment Name: At_Drought_Soil_Dry_P Parameter: Organism Value: A. thaliana
  misc_feature: MA Experiment 20001558 PARAMETER Experiment Name: At_Drought_Soil_Dry_P Parameter: Plant Line Value: WS
  misc_feature: MA Experiment 20001558 PARAMETER Experiment Name: At_Drought_Soil_Dry_P Parameter: Post Timepoint (hr) Value: 6
  misc_feature: MA Experiment 20001558 PARAMETER Experiment Name: At_Drought_Soil_Dry_P Parameter: Post-Treatment Value: Re-Water vs. No Drought
  misc_feature: MA Experiment 20001558 PARAMETER Experiment Name: At_Drought_Soil_Dry_P Parameter: Timepoint (day) Value: 13
  misc_feature: MA Experiment 20001558 PARAMETER Experiment Name: At_Drought_Soil_Dry_P Parameter: Treatment Value: Drought vs. No Drought
  misc_feature: MA Experiment ID: 20001757 Result: Up-regulated in Transcription
  misc_feature: MA Experiment 20001757 PARAMETER Experiment Name: At_50mM_NH4NO3_L-to-H_P Parameter: Timepoint (hr) Value: 6
  misc_feature: MA Experiment 20001757 PARAMETER Experiment Name: At_50mM_NH4NO3_L-to-H_P Parameter: Tissue Value: Leaf
  misc_feature: MA Experiment 20001757 PARAMETER Experiment Name: At_50mM_NH4NO3_L-to-H_P Parameter: Treatment Value: 50mM NH4NO3 vs 100mM Mannitol
  misc_feature: MA Experiment ID: 20001911 Result: Down-regulated in Transcription
  misc_feature: MA Experiment 20001911 PARAMETER Experiment Name: At_Drought_Reproduction_P Parameter: Age (day) Value: 40
  misc_feature: MA Experiment 20001911 PARAMETER Experiment Name: At_Drought_Reproduction_P Parameter: Organism Value: A. thaliana
  misc_feature: MA Experiment 20001911 PARAMETER Experiment Name: At_Drought_Reproduction_P Parameter: Plant Line Value: WS
  misc_feature: MA Experiment 20001911 PARAMETER Experiment Name: At_Drought_Reproduction_P Parameter: Timepoint (day) Value: 10
  misc_feature: MA Experiment 20001911 PARAMETER Experiment Name: At_Drought_Reproduction_P Parameter: Tissue Value: Flowers
  misc_feature: MA Experiment 20001911 PARAMETER Experiment Name: At_Drought_Reproduction_P Parameter: Treatment Value: Drought vs. No Drought

SEQ ID NO: 92989 - protein, 298 aa, Arabidopsis thaliana; identical to SEQ ID NO: 45097
  peptide (1)..(298): Ceres Seq. ID no. 12716633
  misc_feature (98)..(288): Pfam Name: Conserved hypothetical protein 95 Pfam Description: Conserved hypothetical protein 95
  misc_feature (1)..(298): Homolog of NCBI NO: 22331389 NR Description: unknown protein; protein id: At3g28460.1, by cDNA: gi_18389225 [Arabidopsis thaliana] gb|AAC66597.1~gene_id:MFJ20.15~similar to unknown protein
  misc_feature (23)..(298): Homolog of NCBI NO: 29788862 NR Description: hypothetical protein [Oryza sativa (japonica
  misc_feature (98)..(287): Homolog of NCBI NO: 39996346 NR Description: methyltransferase, putative [Geobacter PCA] >gi|39983226|gb|AAR34620.1| methyltransferase, putative
  misc_feature (121)..(287): Homolog of NCBI NO: 22973536 NR Description: hypothetical protein [Chloroflexus aurantiacus]
  misc_feature (98)..(287): Homolog of NCBI NO: 34763572 NR Description: METHYLTRANSFERASE [Fusobacterium nucleatum subsp. ATCC 49256] >gi|27886761|gb|EAA23899.1| METHYLTRANSFERASE
  misc_feature (98)..(287): Homolog of NCBI NO: 19704664 NR Description: Methyltransferase [Fusobacterium nucleatum subsp. ATCC 25586] >gi|19714972|gb|AAL95525.1| Methyltransferase
  misc_feature (98)..(287): Homolog of NCBI NO: 16804092 NR Description: similar to unknown proteins [Listeria
  misc_feature (98)..(290): Homolog of NCBI NO: 28210920 NR Description: methyltransferase [Clostridium tetani E88]
  misc_feature (98)..(287): Homolog of NCBI NO: 16801225 NR Description: similar to unknown proteins [Listeria innocua]
  misc_feature (98)..(287): Homolog of NCBI NO: 20807931 NR Description: N6-adenine-specific methylase [Thermoanaerobacter

SEQ ID NO: 92990 - protein, 224 aa, Arabidopsis thaliana; identical to SEQ ID NO: 89234
  peptide (1)..(224): Ceres Seq. ID no. 12716634
  misc_feature (24)..(214): Pfam Name: Conserved hypothetical protein 95 Pfam Description: Conserved hypothetical protein 95
  misc_feature (1)..(224): Homolog of NCBI NO: 22331389 NR Description: unknown protein; protein id: At3g28460.1, by cDNA: gi_18389225 [Arabidopsis thaliana] gb|AAC66597.1~gene_id:MFJ20.15~similar to unknown protein
  misc_feature (1)..(224): Homolog of NCBI NO: 29788862 NR Description: hypothetical protein [Oryza sativa (japonica
  misc_feature (24)..(213): Homolog of NCBI NO: 39996346 NR Description: methyltransferase, putative [Geobacter PCA] >gi|39983226|gb|AAR34620.1| methyltransferase, putative
  misc_feature (47)..(213): Homolog of NCBI NO: 22973536 NR Description: hypothetical protein [Chloroflexus aurantiacus]
  misc_feature (24)..(213): Homolog of NCBI NO: 34763572 NR Description: METHYLTRANSFERASE [Fusobacterium nucleatum subsp. ATCC 49256] >gi|27886761|gb|EAA23899.1| METHYLTRANSFERASE
  misc_feature (24)..(213): Homolog of NCBI NO: 19704664 NR Description: Methyltransferase [Fusobacterium nucleatum subsp. ATCC 25586] >gi|19714972|gb|AAL95525.1| Methyltransferase
  misc_feature (24)..(213): Homolog of NCBI NO: 16804092 NR Description: similar to unknown proteins [Listeria
  misc_feature (24)..(216): Homolog of NCBI NO: 28210920 NR Description: methyltransferase [Clostridium tetani E88]
  misc_feature (24)..(213): Homolog of NCBI NO: 16801225 NR Description: similar to unknown proteins [Listeria innocua]
  misc_feature (24)..(213): Homolog of NCBI NO: 20807931 NR Description: N6-adenine-specific methylase [Thermoanaerobacter

SEQ ID NO: 92991 - protein, 183 aa, Arabidopsis thaliana; identical to SEQ ID NO: 89235
  peptide (1)..(183): Ceres Seq. ID no. 12716635
  misc_feature (1)..(173): Pfam Name: Conserved hypothetical protein 95 Pfam Description: Conserved hypothetical protein 95
  misc_feature (1)..(183): Homolog of NCBI NO: 22331389 NR Description: unknown protein; protein id: At3g28460.1, by cDNA: gi_18389225 [Arabidopsis thaliana] gb|AAC66597.1~gene_id:MFJ20.15~similar to unknown protein
  misc_feature (1)..(183): Homolog of NCBI NO: 29788862 NR Description: hypothetical protein [Oryza sativa (japonica
  misc_feature (1)..(172): Homolog of NCBI NO: 39996346 NR Description: methyltransferase, putative [Geobacter PCA] >gi|39983226|gb|AAR34620.1| methyltransferase, putative
  misc_feature (6)..(172): Homolog of NCBI NO: 22973536 NR Description: hypothetical protein [Chloroflexus aurantiacus]
  misc_feature (1)..(172): Homolog of NCBI NO: 34763572 NR Description: METHYLTRANSFERASE [Fusobacterium nucleatum subsp. ATCC 49256] >gi|27886761|gb|EAA23899.1| METHYLTRANSFERASE
  misc_feature (1)..(172): Homolog of NCBI NO: 19704664 NR Description: Methyltransferase [Fusobacterium nucleatum subsp. ATCC 25586] >gi|19714972|gb|AAL95525.1| Methyltransferase
  misc_feature (1)..(172): Homolog of NCBI NO: 16804092 NR Description: similar to unknown proteins [Listeria
  misc_feature (1)..(175): Homolog of NCBI NO: 28210920 NR Description: methyltransferase [Clostridium tetani E88]
  misc_feature (1)..(172): Homolog of NCBI NO: 16801225 NR Description: similar to unknown proteins [Listeria innocua]
  misc_feature (1)..(172): Homolog of NCBI NO: 20807931 NR Description: N6-adenine-specific methylase [Thermoanaerobacter

SEQ ID NO: 92992 - DNA, 2982 bp, Arabidopsis thaliana; identical to SEQ ID NO: 89236
  misc_feature (1)..(2982): Ceres Seq. ID no. 12716642
  misc_feature: MA Experiment ID: 20000307 Result: Up-regulated in Transcription
  misc_feature: MA Experiment 20000307 PARAMETER Experiment Name: At_Germinating_Seeds_Sub_P Parameter: Age (hr) Value: 24 vs. 0
  misc_feature: MA Experiment 20000307 PARAMETER Experiment Name: At_Germinating_Seeds_Sub_P Parameter: Organism Value: A. thaliana
  misc_feature: MA Experiment 20000307 PARAMETER Experiment Name: At_Germinating_Seeds_Sub_P Parameter: Plant Line Value: WS
  misc_feature: MA Experiment 20000307 PARAMETER Experiment Name: At_Germinating_Seeds_Sub_P Parameter: Tissue Value: Germinating Seeds
  misc_feature: MA Experiment ID: 20000314 Result: Up-regulated in Transcription
  misc_feature: MA Experiment 20000314 PARAMETER Experiment Name: At_14day_Shoots-Roots_Sub_P Parameter: Age (day) Value: 14
  misc_feature: MA Experiment 20000314 PARAMETER Experiment Name: At_14day_Shoots-Roots_Sub_P Parameter: Organism Value: A. thaliana
  misc_feature: MA Experiment 20000314 PARAMETER Experiment Name: At_14day_Shoots-Roots_Sub_P Parameter: Plant Line Value: WS
  misc_feature: MA Experiment 20000314 PARAMETER Experiment Name: At_14day_Shoots-Roots_Sub_P Parameter: Tissue Value: Roots vs. Whole Plant

SEQ ID NO: 92993 - protein, 993 aa, Arabidopsis thaliana; identical to SEQ ID NO: 89237
  peptide (1)..(993): Ceres Seq. ID no. 12716643
  misc_feature (638)..(942): Pfam Name: Formin Homology 2 Domain Pfam Description: Formin Homology 2 Domain
  misc_feature (32)..(602): Homolog of NCBI NO: 15239790 NR Description: putative protein; protein id: At5g49080.1 thaliana] >gi|10176941|dbj|BAB10090.1|
  misc_feature (142)..(719): Homolog of NCBI NO: 15239790 NR Description: putative protein; protein id: At5g49080.1 thaliana] >gi|10176941|dbj|BAB10090.1|
  misc_feature (192)..(769): Homolog of NCBI NO: 15239790 NR Description: putative protein; protein id: At5g49080.1 thaliana] >gi|10176941|dbj|BAB10090.1|
  misc_feature (160)..(744): Homolog of NCBI NO: 15239790 NR Description: putative protein; protein id: At5g49080.1 thaliana] >gi|10176941|dbj|BAB10090.1|
  misc_feature (367)..(944): Homolog of NCBI NO: 15239790 NR Description: putative protein; protein id: At5g49080.1 thaliana] >gi|10176941|dbj|BAB10090.1|
  misc_feature (392)..(980): Homolog of NCBI NO: 15239790 NR Description: putative protein; protein id: At5g49080.1 thaliana] >gi|10176941|dbj|BAB10090.1|
  misc_feature (217)..(794): Homolog of NCBI NO: 15239790 NR Description: putative protein; protein id: At5g49080.1 thaliana] >gi|10176941|dbj|BAB10090.1|
  misc_feature (342)..(919): Homolog of NCBI NO: 15239790 NR Description: putative protein; protein id: At5g49080.1 thaliana] >gi|10176941|dbj|BAB10090.1|
  misc_feature (242)..(819): Homolog of NCBI NO: 15239790 NR Description: putative protein; protein id: At5g49080.1 thaliana] >gi|10176941|dbj|BAB10090.1|
  misc_feature (267)..(844): Homolog of NCBI NO: 15239790 NR Description: putative protein; protein id: At5g49080.1 thaliana] >gi|10176941|dbj|BAB10090.1|

SEQ ID NO: 92994 - protein, 978 aa, Arabidopsis thaliana; identical to SEQ ID NO: 89238
  peptide (1)..(978): Ceres Seq. ID no. 12716644
  misc_feature (623)..(927): Pfam Name: Formin Homology 2 Domain Pfam Description: Formin Homology 2 Domain
  misc_feature (17)..(587): Homolog of NCBI NO: 15239790 NR Description: putative protein; protein id: At5g49080.1 thaliana] >gi|10176941|dbj|BAB10090.1|
  misc_feature (127)..(704): Homolog of NCBI NO: 15239790 NR Description: putative protein; protein id: At5g49080.1 thaliana] >gi|10176941|dbj|BAB10090.1|
  misc_feature (177)..(754): Homolog of NCBI NO: 15239790 NR Description: putative protein; protein id: At5g49080.1 thaliana] >gi|10176941|dbj|BAB10090.1|
  misc_feature (145)..(729): Homolog of NCBI NO: 15239790 NR Description: putative protein; protein id: At5g49080.1 thaliana] >gi|10176941|dbj|BAB10090.1|
  misc_feature (352)..(929): Homolog of NCBI NO: 15239790 NR Description: putative protein; protein id: At5g49080.1 thaliana] >gi|10176941|dbj|BAB10090.1|
  misc_feature (377)..(965): Homolog of NCBI NO: 15239790 NR Description: putative protein; protein id: At5g49080.1 thaliana] >gi|10176941|dbj|BAB10090.1|
  misc_feature (202)..(779): Homolog of NCBI NO: 15239790 NR Description: putative protein; protein id: At5g49080.1 thaliana] >gi|10176941|dbj|BAB10090.1|
  misc_feature (327)..(904): Homolog of NCBI NO: 15239790 NR Description: putative protein; protein id: At5g49080.1 thaliana] >gi|10176941|dbj|BAB10090.1|
  misc_feature (227)..(804): Homolog of NCBI NO: 15239790 NR Description: putative protein; protein id: At5g49080.1 thaliana] >gi|10176941|dbj|BAB10090.1|
  misc_feature (252)..(829): Homolog of NCBI NO: 15239790 NR Description: putative protein; protein id: At5g49080.1 thaliana] >gi|10176941|dbj|BAB10090.1|

SEQ ID NO: 92995 - protein, 975 aa, Arabidopsis thaliana; identical to SEQ ID NO: 89239
  peptide (1)..(975): Ceres Seq. ID no. 12716645
  misc_feature (620)..(924): Pfam Name: Formin Homology 2 Domain Pfam Description: Formin Homology 2 Domain
  misc_feature (14)..(584): Homolog of NCBI NO: 15239790 NR Description: putative protein; protein id: At5g49080.1 thaliana] >gi|10176941|dbj|BAB10090.1|
  misc_feature (124)..(701): Homolog of NCBI NO: 15239790 NR Description: putative protein; protein id: At5g49080.1 thaliana] >gi|10176941|dbj|BAB10090.1|
  misc_feature (174)..(751): Homolog of NCBI NO: 15239790 NR Description: putative protein; protein id: At5g49080.1 thaliana] >gi|10176941|dbj|BAB10090.1|
  misc_feature (142)..(726): Homolog of NCBI NO: 15239790 NR Description: putative protein; protein id: At5g49080.1 thaliana] >gi|10176941|dbj|BAB10090.1|
  misc_feature (349)..(926): Homolog of NCBI NO: 15239790 NR Description: putative protein; protein id: At5g49080.1 thaliana] >gi|10176941|dbj|BAB10090.1|
  misc_feature (374)..(962): Homolog of NCBI NO: 15239790 NR Description: putative protein; protein id: At5g49080.1 thaliana] >gi|10176941|dbj|BAB10090.1|
  misc_feature (199)..(776): Homolog of NCBI NO: 15239790 NR Description: putative protein; protein id: At5g49080.1 thaliana] >gi|10176941|dbj|BAB10090.1|
  misc_feature (324)..(901): Homolog of NCBI NO: 15239790 NR Description: putative protein; protein id: At5g49080.1 thaliana] >gi|10176941|dbj|BAB10090.1|
  misc_feature (224)..(801): Homolog of NCBI NO: 15239790 NR Description: putative protein; protein id: At5g49080.1 thaliana] >gi|10176941|dbj|BAB10090.1|
  misc_feature (249)..(826): Homolog of NCBI NO: 15239790 NR Description: putative protein; protein id: At5g49080.1 thaliana] >gi|10176941|dbj|BAB10090.1|

SEQ ID NO: 92996 - DNA, 1434 bp, Arabidopsis thaliana; identical to SEQ ID NO: 89240
  misc_feature (1)..(1434): Ceres Seq. ID no. 12716650
  misc_feature: MA Experiment ID: 20000347 Result: Up-regulated in Transcription
  misc_feature: MA Experiment 20000347 PARAMETER Experiment Name: At_2mM_SA_Sub_P Parameter: Age (day) Value: 14
  misc_feature: MA Experiment 20000347 PARAMETER Experiment Name: At_2mM_SA_Sub_P Parameter: Organism Value: A. thaliana
  misc_feature: MA Experiment 20000347 PARAMETER Experiment Name: At_2mM_SA_Sub_P Parameter: Plant Line Value: WS
  misc_feature: MA Experiment 20000347 PARAMETER Experiment Name: At_2mM_SA_Sub_P Parameter: Timepoint (hr) Value: 6
  misc_feature: MA Experiment 20000347 PARAMETER Experiment Name: At_2mM_SA_Sub_P Parameter: Tissue Value: Aerial
  misc_feature: MA Experiment 20000347 PARAMETER Experiment Name: At_2mM_SA_Sub_P Parameter: Treatment Value: 2mM SA vs. No Treatment
  misc_feature: MA Experiment ID: 20000440 Result: Up-regulated in Transcription
  misc_feature: MA Experiment 20000440 PARAMETER Experiment Name: At_Closed-Flower__Sub_P Parameter: Tissue Value: Closed Flower vs. Whole Plant

SEQ ID NO: 92997 - protein, 477 aa, Arabidopsis thaliana; identical to SEQ ID NO: 89241
  peptide (1)..(477): Ceres Seq. ID no. 12716651
  misc_feature (240)..(435): Pfam Name: ATPase family associated with various cellular Pfam Description: ATPase family associated with various cellular
  misc_feature (3)..(477): Homolog of NCBI NO: 15233039 NR Description: unknown protein; protein id: At3g28600.1
  misc_feature (2)..(471): Homolog of NCBI NO: 9294274 NR Description: mitochondrial protein-like [Arabidopsis thaliana]
  misc_feature (3)..(471): Homolog of NCBI NO: 15233040 NR Description: unknown protein; protein id: At3g28610.1
  misc_feature (1)..(463): Homolog of NCBI NO: 10176992 NR Description: contains similarity to AAA-type
  misc_feature (1)..(463): Homolog of NCBI NO: 15242534 NR Description: putative protein; protein id: At5g40000.1
  misc_feature (8)..(458): Homolog of NCBI NO: 9294271 NR Description: mitochondrial protein-like [Arabidopsis thaliana]
  misc_feature (8)..(458): Homolog of NCBI NO: 15233036 NR Description: unknown protein; protein id: At3g28570.1
  misc_feature (8)..(470): Homolog of NCBI NO: 15233010 NR Description: hypothetical protein; protein id: At3g28510.1, by cDNA: gi_20466451 [Arabidopsis thaliana]
  misc_feature (5)..(462): Homolog of NCBI NO: 15242536 NR Description: putative protein; protein id: At5g40010.1
  misc_feature (2)..(466): Homolog of NCBI NO: 15233037 NR Description: hypothetical protein; protein id: At3g28580.1, by cDNA: gi_18175626 [Arabidopsis thaliana]

SEQ ID NO: 92998 - protein, 476 aa, Arabidopsis thaliana; identical to SEQ ID NO: 89242
  peptide (1)..(476): Ceres Seq. ID no. 12716652
  misc_feature (239)..(434): Pfam Name: ATPase family associated with various cellular Pfam Description: ATPase family associated with various cellular
  misc_feature (2)..(476): Homolog of NCBI NO: 15233039 NR Description: unknown protein; protein id: At3g28600.1
  misc_feature (1)..(470): Homolog of NCBI NO: 9294274 NR Description: mitochondrial protein-like [Arabidopsis thaliana]
  misc_feature (2)..(470): Homolog of NCBI NO: 15233040 NR Description: unknown protein; protein id: At3g28610.1
  misc_feature (1)..(462): Homolog of NCBI NO: 10176992 NR Description: contains similarity to AAA-type
  misc_feature (1)..(462): Homolog of NCBI NO: 15242534 NR Description: putative protein; protein id: At5g40000.1
  misc_feature (7)..(457): Homolog of NCBI NO: 9294271 NR Description: mitochondrial protein-like [Arabidopsis thaliana]
  misc_feature (7)..(457): Homolog of NCBI NO: 15233036 NR Description: unknown protein; protein id: At3g28570.1
  misc_feature (7)..(469): Homolog of NCBI NO: 15233010 NR Description: hypothetical protein; protein id: At3g28510.1, by cDNA: gi_20466451 [Arabidopsis thaliana]
  misc_feature (4)..(461): Homolog of NCBI NO: 15242536 NR Description: putative protein; protein id: At5g40010.1
  misc_feature (1)..(465): Homolog of NCBI NO: 15233037 NR Description: hypothetical protein; protein id: At3g28580.1, by cDNA: gi_18175626 [Arabidopsis thaliana]

SEQ ID NO: 92999 - protein, 475 aa, Arabidopsis thaliana; identical to SEQ ID NO: 73765
  peptide (1)..(475): Ceres Seq. ID no. 12716653
  misc_feature (238)..(433): Pfam Name: ATPase family associated with various cellular Pfam Description: ATPase family associated with various cellular
  misc_feature (1)..(475): Homolog of NCBI NO: 15233039 NR Description: unknown protein; protein id: At3g28600.1
  misc_feature (1)..(469): Homolog of NCBI NO: 9294274 NR Description: mitochondrial protein-like [Arabidopsis thaliana]
  misc_feature (1)..(469): Homolog of NCBI NO: 15233040 NR Description: unknown protein; protein id: At3g28610.1
  misc_feature (1)..(461): Homolog of NCBI NO: 10176992 NR Description: contains similarity to AAA-type
  misc_feature (1)..(461): Homolog of NCBI NO: 15242534 NR Description: putative protein; protein id: At5g40000.1
  misc_feature (6)..(456): Homolog of NCBI NO: 9294271 NR Description: mitochondrial protein-like [Arabidopsis thaliana]
  misc_feature (6)..(456): Homolog of NCBI NO: 15233036 NR Description: unknown protein; protein id: At3g28570.1
  misc_feature (6)..(468): Homolog of NCBI NO: 15233010 NR Description: hypothetical protein; protein id: At3g28510.1, by cDNA: gi_20466451 [Arabidopsis thaliana]
  misc_feature (3)..(460): Homolog of NCBI NO: 15242536 NR Description: putative protein; protein id: At5g40010.1
  misc_feature (1)..(464): Homolog of NCBI NO: 15233037 NR Description: hypothetical protein; protein id: At3g28580.1, by cDNA: gi_18175626 [Arabidopsis thaliana]

SEQ ID NO: 93000 - DNA, 921 bp, Arabidopsis thaliana; identical to SEQ ID NO: 89244
  misc_feature (1)..(921): Ceres Seq. ID no. 12716713
  misc_feature: MA Experiment ID: 20000327 Result: Down-regulated in Transcription
  misc_feature: MA Experiment 20000327 PARAMETER Experiment Name: At_42deg_Heat_Sub_P Parameter: Age (day) Value: 14
  misc_feature: MA Experiment 20000327 PARAMETER Experiment Name: At_42deg_Heat_Sub_P Parameter: Organism Value: A. thaliana
  misc_feature: MA Experiment 20000327 PARAMETER Experiment Name: At_42deg_Heat_Sub_P Parameter: Plant Line Value: WS
  misc_feature: MA Experiment 20000327 PARAMETER Experiment Name: At_42deg_Heat_Sub_P Parameter: Temperature (deg C) Value: 42 vs. 22
  misc_feature: MA Experiment 20000327 PARAMETER Experiment Name: At_42deg_Heat_Sub_P Parameter: Timepoint (hr) Value: 1
  misc_feature: MA Experiment 20000327 PARAMETER Experiment Name: At_42deg_Heat_Sub_P Parameter: Tissue Value: Aerial
  misc_feature: MA Experiment ID: 20000328 Result: Down-regulated in Transcription
  misc_feature: MA Experiment 20000328 PARAMETER Experiment Name: At_42deg_Heat_Sub_P Parameter: Age (day) Value: 14
  misc_feature: MA Experiment 20000328 PARAMETER Experiment Name: At_42deg_Heat_Sub_P Parameter: Organism Value: A. thaliana
  misc_feature: MA Experiment 20000328 PARAMETER Experiment Name: At_42deg_Heat_Sub_P Parameter: Plant Line Value: WS
  misc_feature: MA Experiment 20000328 PARAMETER Experiment Name: At_42deg_Heat_Sub_P Parameter: Temperature (deg C) Value: 42 vs. 22
  misc_feature: MA Experiment 20000328 PARAMETER Experiment Name: At_42deg_Heat_Sub_P Parameter: Timepoint (hr) Value: 6
  misc_feature: MA Experiment 20000328 PARAMETER Experiment Name: At_42deg_Heat_Sub_P Parameter: Tissue Value: Aerial

SEQ ID NO: 93001 - protein, 306 aa, Arabidopsis thaliana; identical to SEQ ID NO: 49016
  peptide (1)..(306): Ceres Seq. ID no. 12716714
  misc_feature (41)..(102): Pfam Name: ZF-HD protein dimerisation region Pfam Description: ZF-HD protein dimerisation region
  misc_feature (1)..(306): Homolog of NCBI NO: 15228530 NR Description: unknown protein; protein id: At3g28920.1, by cDNA: gi_20260543 [Arabidopsis thaliana] contains similarity to unknown
  misc_feature (4)..(305): Homolog of NCBI NO: 18421904 NR Description: putative protein; protein id: At5g39760.1, by cDNA: 249321., supported by cDNA: gi_20259469 [Arabidopsis >gi|10177976|dbj|BAB11382.1| gene_id:MKM21.8~pir||T00609~similar
  misc_feature (4)..(305): Homolog of NCBI NO: 21592512 NR Description: unknown [Arabidopsis thaliana]
  misc_feature (4)..(306): Homolog of NCBI NO: 13277220 NR Description: ZF-HD homeobox protein [Flaveria bidentis]
  misc_feature (68)..(306): Homolog of NCBI NO: 13277222 NR Description: ZF-HD homeobox protein [Flaveria bidentis]
  misc_feature (7)..(172): Homolog of NCBI NO: 15242243 NR Description: putative protein; protein id: At5g15210.1
  misc_feature (44)..(244): Homolog of NCBI NO: 15222382 NR Description: hypothetical protein; protein id: At1g69600.1
  misc_feature (43)..(256): Homolog of NCBI NO: 5091602 NR Description: 10A19I.6 [Oryza sativa]
  misc_feature (7)..(260): Homolog of NCBI NO: 15223757 NR Description: hypothetical protein; protein id: At1g14440.1, by cDNA: gi_18377625, supported by cDNA: gi_20465766 [Arabidopsis
  misc_feature (10)..(244): Homolog of NCBI NO: 15226993 NR Description: hypothetical protein; protein id: At2g02540.1, by cDNA: gi_20148767 [Arabidopsis thaliana]

SEQ ID NO: 93002 - protein, 304 aa, Arabidopsis thaliana; identical to SEQ ID NO: 49017
  peptide (1)..(304): Ceres Seq. ID no. 12716715
  misc_feature (39)..(100): Pfam Name: ZF-HD protein dimerisation region Pfam Description: ZF-HD protein dimerisation region
  misc_feature (1)..(304): Homolog of NCBI NO: 15228530 NR Description: unknown protein; protein id: At3g28920.1, by cDNA: gi_20260543 [Arabidopsis thaliana] contains similarity to unknown
  misc_feature (2)..(303): Homolog of NCBI NO: 18421904 NR Description: putative protein; protein id: At5g39760.1, by cDNA: 249321., supported by cDNA: gi_20259469 [Arabidopsis >gi|10177976|dbj|BAB11382.1| gene_id:MKM21.8~pir||T00609~similar
  misc_feature (2)..(303): Homolog of NCBI NO: 21592512 NR Description: unknown [Arabidopsis thaliana]
  misc_feature (2)..(304): Homolog of NCBI NO: 13277220 NR Description: ZF-HD homeobox protein [Flaveria bidentis]
  misc_feature (66)..(304): Homolog of NCBI NO: 13277222 NR Description: ZF-HD homeobox protein [Flaveria bidentis]
  misc_feature (5)..(170): Homolog of NCBI NO: 15242243 NR Description: putative protein; protein id: At5g15210.1
  misc_feature (42)..(242): Homolog of NCBI NO: 15222382 NR Description: hypothetical protein; protein id: At1g69600.1
  misc_feature (41)..(254): Homolog of NCBI NO: 5091602 NR Description: 10A19I.6 [Oryza sativa]
  misc_feature (5)..(258): Homolog of NCBI NO: 15223757 NR Description: hypothetical protein; protein id: At1g14440.1, by cDNA: gi_18377625, supported by cDNA: gi_20465766 [Arabidopsis
  misc_feature (8)..(242): Homolog of NCBI NO: 15226993 NR Description: hypothetical protein; protein id: At2g02540.1, by cDNA: gi_20148767 [Arabidopsis thaliana]

SEQ ID NO: 93003 - protein, 238 aa, Arabidopsis thaliana; identical to SEQ ID NO: 89247
  peptide (1)..(238): Ceres Seq. ID no. 12716716
  misc_feature (1)..(238): Homolog of NCBI NO: 15228530 NR Description: unknown protein; protein id: At3g28920.1, by cDNA: gi_20260543 [Arabidopsis thaliana] contains similarity to unknown
  misc_feature (1)..(237): Homolog of NCBI NO: 18421904 NR Description: putative protein; protein id: At5g39760.1, by cDNA: 249321., supported by cDNA: gi_20259469 [Arabidopsis >gi|10177976|dbj|BAB11382.1| gene_id:MKM21.8~pir||T00609~similar
  misc_feature (1)..(237): Homolog of NCBI NO: 21592512 NR Description: unknown [Arabidopsis thaliana]
  misc_feature (1)..(238): Homolog of NCBI NO: 13277220 NR Description: ZF-HD homeobox protein [Flaveria bidentis]
  misc_feature (1)..(238): Homolog of NCBI NO: 13277222 NR Description: ZF-HD homeobox protein [Flaveria bidentis]
  misc_feature (1)..(104): Homolog of NCBI NO: 15242243 NR Description: putative protein; protein id: At5g15210.1
  misc_feature (1)..(176): Homolog of NCBI NO: 15222382 NR Description: hypothetical protein; protein id: At1g69600.1
  misc_feature (1)..(188): Homolog of NCBI NO: 5091602 NR Description: 10A19I.6 [Oryza sativa]
  misc_feature (1)..(192): Homolog of NCBI NO: 15223757 NR Description: hypothetical protein; protein id: At1g14440.1, by cDNA: gi_18377625, supported by cDNA: gi_20465766 [Arabidopsis
  misc_feature (1)..(176): Homolog of NCBI NO: 15226993 NR Description: hypothetical protein; protein id: At2g02540.1, by cDNA: gi_20148767 [Arabidopsis thaliana]

SEQ ID NO: 93004 - DNA, 924 bp, Arabidopsis thaliana; identical to SEQ ID NO: 89248
  misc_feature (1)..(924): Ceres Seq. ID no. 12716736
  misc_feature: MA Experiment ID: 20000185 Result: Down-regulated in Transcription
  misc_feature: MA Experiment 20000185 PARAMETER Experiment Name: At_Roots__P Parameter: Age (day) Value: 7 vs. 21
  misc_feature: MA Experiment 20000185 PARAMETER Experiment Name: At_Roots__P Parameter: Organism Value: A. thaliana
  misc_feature: MA Experiment 20000185 PARAMETER Experiment Name: At_Roots__P Parameter: Tissue Value: Roots vs. Whole Plant
  misc_feature: MA Experiment ID: 20000234 Result: Down-regulated in Transcription
  misc_feature: MA Experiment 20000234 PARAMETER Experiment Name: At_Siliques_P Parameter: Age (day) Value: 21
  misc_feature: MA Experiment 20000234 PARAMETER Experiment Name: At_Siliques_P Parameter: Organism Value: A. thaliana
  misc_feature: MA Experiment 20000234 PARAMETER Experiment Name: At_Siliques_P Parameter: Plant Line Value: WS
  misc_feature: MA Experiment 20000234 PARAMETER Experiment Name: At_Siliques_P Parameter: Tissue Value: Less Than 5mm Siliques vs. Whole Plant
  misc_feature: MA Experiment ID: 20000235 Result: Down-regulated in Transcription
  misc_feature: MA Experiment 20000235 PARAMETER Experiment Name: At_Siliques_P Parameter: Age (day) Value: 21
  misc_feature: MA Experiment 20000235 PARAMETER Experiment Name: At_Siliques_P Parameter: Organism Value: A. thaliana
  misc_feature: MA Experiment 20000235 PARAMETER Experiment Name: At_Siliques_P Parameter: Plant Line Value: WS
  misc_feature: MA Experiment 20000235 PARAMETER Experiment Name: At_Siliques_P Parameter: Tissue Value: 5-10mm Siliques vs. Whole Plant
  misc_feature: MA Experiment ID: 20000264 Result: Down-regulated in Transcription
  misc_feature: MA Experiment 20000264 PARAMETER Experiment Name: At_Open_Flower_P Parameter: Age (day) Value: 21
  misc_feature: MA Experiment 20000264 PARAMETER Experiment Name: At_Open_Flower_P Parameter: Plant Line Value: WS
  misc_feature: MA Experiment 20000264 PARAMETER Experiment Name: At_Open_Flower_P Parameter: Tissue Value: Open Flower vs. Whole Plant
  misc_feature: MA Experiment ID: 20001560 Result: Down-regulated in Transcription
  misc_feature: MA Experiment 20001560 PARAMETER Experiment Name: At_Drought_Soil_Dry_P Parameter: Age (day) Value: 28
  misc_feature: MA Experiment 20001560 PARAMETER Experiment Name: At_Drought_Soil_Dry_P Parameter: Organism Value: A. thaliana
  misc_feature: MA Experiment 20001560 PARAMETER Experiment Name: At_Drought_Soil_Dry_P Parameter: Plant Line Value: WS
  misc_feature: MA Experiment 20001560 PARAMETER Experiment Name: At_Drought_Soil_Dry_P Parameter: Post Timepoint (hr) Value: None
  misc_feature: MA Experiment 20001560 PARAMETER Experiment Name: At_Drought_Soil_Dry_P Parameter: Post-Treatment Value: None
  misc_feature: MA Experiment 20001560 PARAMETER Experiment Name: At_Drought_Soil_Dry_P Parameter: Timepoint (day) Value: 14
  misc_feature: MA Experiment 20001560 PARAMETER Experiment Name: At_Drought_Soil_Dry_P Parameter: Treatment Value: Drought vs. No Drought

SEQ ID NO: 93005 - protein, 307 aa, Arabidopsis thaliana; identical to SEQ ID NO: 89249
  peptide (1)..(307): Ceres Seq. ID no. 12716737
  misc_feature (157)..(277): Pfam Name: Domain of unknown function (DUF298) Pfam Description: Domain of unknown function (DUF298)
  misc_feature (1)..(307): Homolog of NCBI NO: 15228555 NR Description: unknown protein; protein id: At3g28970.1 thaliana] >gi|7939547|dbj|BAA95750.1| gene_id:K5K13.10~unknown [Arabidopsis thaliana] >gi|26452857|dbj|BAC43507.1| unknown
  misc_feature (45)..(255): Homolog of NCBI NO: 33146550 NR Description: leucine zipper protein-like [Oryza sativa
  misc_feature (45)..(192): Homolog of NCBI NO: 34913252 NR Description: P0011H09.36 [Oryza sativa (japonica
  misc_feature (94)..(189): Homolog of NCBI NO: 24664675 NR Description: CG7427-PA [Drosophila melanogaster]
  misc_feature (94)..(204): Homolog of NCBI NO: 7019967 NR Description: unnamed protein product [Homo sapiens]
  misc_feature (94)..(204): Homolog of NCBI NO: 34784818 NR Description: RP42 homolog [Homo sapiens]
  misc_feature (94)..(192): Homolog of NCBI NO: 15292985 NR Description: unknown protein [Arabidopsis thaliana]
  misc_feature (94)..(192): Homolog of NCBI NO: 18399737 NR Description: expressed protein; protein id: At3g12760.1, by cDNA: gi_15292984 [Arabidopsis thaliana] gb|AAF04863.1~gene_id:MBK21.14~similar to unknown protein
  misc_feature (94)..(203): Homolog of NCBI NO: 34784120 NR Description: Unknown (protein for MGC:66414) [Danio rerio]
  misc_feature (98)..(203): Homolog of NCBI NO: 18700658 NR Description: leucine zipper protein [Homo sapiens]

SEQ ID NO: 93006 - protein, 234 aa, Arabidopsis thaliana; identical to SEQ ID NO: 89250
  peptide (1)..(234): Ceres Seq. ID no. 12716738
  misc_feature (84)..(204): Pfam Name: Domain of unknown function (DUF298) Pfam Description: Domain of unknown function (DUF298)
  misc_feature (1)..(234): Homolog of NCBI NO: 15228555 NR Description: unknown protein; protein id: At3g28970.1 thaliana] >gi|7939547|dbj|BAA95750.1| gene_id:K5K13.10~unknown [Arabidopsis thaliana] >gi|26452857|dbj|BAC43507.1| unknown
  misc_feature (1)..(182): Homolog of NCBI NO: 33146550 NR Description: leucine zipper protein-like [Oryza sativa
  misc_feature (1)..(119): Homolog of NCBI NO: 34913252 NR Description: P0011H09.36 [Oryza sativa (japonica
  misc_feature (21)..(116): Homolog of NCBI NO: 24664675 NR Description: CG7427-PA [Drosophila melanogaster]
  misc_feature (21)..(131): Homolog of NCBI NO: 7019967 NR Description: unnamed protein product [Homo sapiens]
  misc_feature (21)..(131): Homolog of NCBI NO: 34784818 NR Description: RP42 homolog [Homo sapiens]
  misc_feature (21)..(119): Homolog of NCBI NO: 15292985 NR Description: unknown protein [Arabidopsis thaliana]
  misc_feature (21)..(119): Homolog of NCBI NO: 18399737 NR Description: expressed protein; protein id: At3g12760.1, by cDNA: gi_15292984 [Arabidopsis thaliana] gb|AAF04863.1~gene_id:MBK21.14~similar to unknown protein
  misc_feature (21)..(130): Homolog of NCBI NO: 34784120 NR Description: Unknown (protein for MGC:66414) [Danio rerio]
  misc_feature (25)..(130): Homolog of NCBI NO: 18700658 NR Description: leucine zipper protein [Homo sapiens]

SEQ ID NO: 93007 - protein, 228 aa, Arabidopsis thaliana; identical to SEQ ID NO: 89251
  peptide (1)..(228): Ceres Seq. ID no. 12716739
  misc_feature (78)..(198): Pfam Name: Domain of unknown function (DUF298) Pfam Description: Domain of unknown function (DUF298)
  misc_feature (1)..(228): Homolog of NCBI NO: 15228555 NR Description: unknown protein; protein id: At3g28970.1 thaliana] >gi|7939547|dbj|BAA95750.1| gene_id:K5K13.10~unknown [Arabidopsis thaliana] >gi|26452857|dbj|BAC43507.1| unknown
  misc_feature (1)..(176): Homolog of NCBI NO: 33146550 NR Description: leucine zipper protein-like [Oryza sativa
  misc_feature (1)..(113): Homolog of NCBI NO: 34913252 NR Description: P0011H09.36 [Oryza sativa (japonica
  misc_feature (15)..(110): Homolog of NCBI NO: 24664675 NR Description: CG7427-PA [Drosophila melanogaster]
  misc_feature (15)..(125): Homolog of NCBI NO: 7019967 NR Description: unnamed protein product [Homo sapiens]
  misc_feature (15)..(125): Homolog of NCBI NO: 34784818 NR Description: RP42 homolog [Homo sapiens]
  misc_feature (15)..(113): Homolog of NCBI NO: 15292985 NR Description: unknown protein [Arabidopsis thaliana]
  misc_feature (15)..(113): Homolog of NCBI NO: 18399737 NR Description: expressed protein; protein id: At3g12760.1, by cDNA: gi_15292984 [Arabidopsis thaliana] gb|AAF04863.1~gene_id:MBK21.14~similar to unknown protein
  misc_feature (15)..(124): Homolog of NCBI NO: 34784120 NR Description: Unknown (protein for MGC:66414) [Danio rerio]
  misc_feature (19)..(124): Homolog of NCBI NO: 18700658 NR Description: leucine zipper protein [Homo sapiens]

SEQ ID NO: 93008 - DNA, 936 bp, Arabidopsis thaliana; identical to SEQ ID NO: 89252
  misc_feature (1)..(936): Ceres Seq. ID no. 12716751
  misc_feature: MA Experiment ID: 20000440 Result: Up-regulated in Transcription
  misc_feature: MA Experiment 20000440 PARAMETER Experiment Name: At_Closed-Flower__Sub_P Parameter: Tissue Value: Closed Flower vs. Whole Plant

SEQ ID NO: 93009 - protein, 311 aa, Arabidopsis thaliana; identical to SEQ ID NO: 89253
  peptide (1)..(311): Ceres Seq. ID no. 12716752
  misc_feature (242)..(301): Pfam Name: Domain of unknown function DUF26 Pfam Description: Domain of unknown function DUF26
  misc_feature (1)..(311): Homolog of NCBI NO: 11994709 NR Description: contains similarity to receptor protein
  misc_feature (162)..(311): Homolog of NCBI NO: 15228584 NR Description: hypothetical protein; protein id: At3g29050.1
  misc_feature (19)..(89): Homolog of NCBI NO: 15228584 NR Description: hypothetical protein; protein id: At3g29050.1
  misc_feature (113)..(310): Homolog of NCBI NO: 15233201 NR Description: hypothetical protein; protein id: At3g21910.1 thaliana] >gi|9279742|dbj|BAB01368.1| contains similarity to
  misc_feature (6)..(84): Homolog of NCBI NO: 15233201 NR Description: hypothetical protein; protein id: At3g21910.1 thaliana] >gi|9279742|dbj|BAB01368.1| contains similarity to
  misc_feature (112)..(311): Homolog of NCBI NO: 15233204 NR Description: pollen coat receptor kinase, putative; protein At3g21920.1 [Arabidopsis thaliana] >gi|9279743|dbj|BAB01369.1| similarity to receptor protein kinase~gene_id:MZN24.4
  misc_feature (2)..(77): Homolog of NCBI NO: 15233204 NR Description: pollen coat receptor kinase, putative; protein At3g21920.1 [Arabidopsis thaliana] >gi|9279743|dbj|BAB01369.1| similarity to receptor protein kinase~gene_id:MZN24.4
  misc_feature (112)..(311): Homolog of NCBI NO: 9279744 NR Description: contains similarity to receptor protein
  misc_feature (112)..(311): Homolog of NCBI NO: 15233207 NR Description: receptor kinase, putative; protein id:
  misc_feature (2)..(77): Homolog of NCBI NO: 9279744 NR Description: contains similarity to receptor protein

SEQ ID NO: 93010 - protein, 294 aa, Arabidopsis thaliana; identical to SEQ ID NO: 89254
  peptide (1)..(294): Ceres Seq. ID no. 12716753
  misc_feature (225)..(284): Pfam Name: Domain of unknown function DUF26 Pfam Description: Domain of unknown function DUF26
  misc_feature (1)..(294): Homolog of NCBI NO: 11994709 NR Description: contains similarity to receptor protein
  misc_feature (145)..(294): Homolog of NCBI NO: 15228584 NR Description: hypothetical protein; protein id: At3g29050.1
  misc_feature (2)..(72): Homolog of NCBI NO: 15228584 NR Description: hypothetical protein; protein id: At3g29050.1
  misc_feature (96)..(293): Homolog of NCBI NO: 15233201 NR Description: hypothetical protein; protein id: At3g21910.1 thaliana] >gi|9279742|dbj|BAB01368.1| contains similarity to
  misc_feature (1)..(67): Homolog of NCBI NO: 15233201 NR Description: hypothetical protein; protein id: At3g21910.1 thaliana] >gi|9279742|dbj|BAB01368.1| contains similarity to
  misc_feature (95)..(294): Homolog of NCBI NO: 15233204 NR Description: pollen coat receptor kinase, putative; protein At3g21920.1 [Arabidopsis thaliana] >gi|9279743|dbj|BAB01369.1| similarity to receptor protein kinase~gene_id:MZN24.4
  misc_feature (1)..(60): Homolog of NCBI NO: 15233204 NR Description: pollen coat receptor kinase, putative; protein At3g21920.1 [Arabidopsis thaliana] >gi|9279743|dbj|BAB01369.1| similarity to receptor protein kinase~gene_id:MZN24.4
  misc_feature (95)..(294): Homolog of NCBI NO: 9279744 NR Description: contains similarity to receptor protein
  misc_feature (95)..(294): Homolog of NCBI NO: 15233207 NR Description: receptor kinase, putative; protein id:
  misc_feature (1)..(60): Homolog of NCBI NO: 9279744 NR Description: contains similarity to receptor protein

SEQ ID NO: 93011 - protein, 293 aa, Arabidopsis thaliana; identical to SEQ ID NO: 89255
  peptide (1)..(293): Ceres Seq. ID no. 12716754
  misc_feature (224)..(283): Pfam Name: Domain of unknown function DUF26 Pfam Description: Domain of unknown function DUF26
  misc_feature (1)..(293): Homolog of NCBI NO: 11994709 NR Description: contains similarity to receptor protein
  misc_feature (144)..(293): Homolog of NCBI NO: 15228584 NR Description: hypothetical protein; protein id: At3g29050.1
  misc_feature (1)..(71): Homolog of NCBI NO: 15228584 NR Description: hypothetical protein; protein id: At3g29050.1
  misc_feature (95)..(292): Homolog of NCBI NO: 15233201 NR Description: hypothetical protein; protein id: At3g21910.1 thaliana] >gi|9279742|dbj|BAB01368.1| contains similarity to
  misc_feature (1)..(66): Homolog of NCBI NO: 15233201 NR Description: hypothetical protein; protein id: At3g21910.1 thaliana] >gi|9279742|dbj|BAB01368.1| contains similarity to
  misc_feature (94)..(293): Homolog of NCBI NO: 15233204 NR Description: pollen coat receptor kinase, putative; protein At3g21920.1 [Arabidopsis thaliana] >gi|9279743|dbj|BAB01369.1| similarity to receptor protein kinase~gene_id:MZN24.4
  misc_feature (1)..(59): Homolog of NCBI NO: 15233204 NR Description: pollen coat receptor kinase, putative; protein At3g21920.1 [Arabidopsis thaliana] >gi|9279743|dbj|BAB01369.1| similarity to receptor protein kinase~gene_id:MZN24.4
  misc_feature (94)..(293): Homolog of NCBI NO: 9279744 NR Description: contains similarity to receptor protein
  misc_feature (94)..(293): Homolog of NCBI NO: 15233207 NR Description: receptor kinase, putative; protein id:
  misc_feature (1)..(59): Homolog of NCBI NO: 9279744 NR Description: contains similarity to receptor protein

SEQ ID NO: 93012 - DNA, 504 bp, Arabidopsis thaliana; identical to SEQ ID NO: 89256
  misc_feature (1)..(504): Ceres Seq. ID no. 12716784
  misc_feature: MA Experiment ID: 20000328 Result: Down-regulated in Transcription
  misc_feature: MA Experiment 20000328 PARAMETER Experiment Name: At_42deg_Heat_Sub_P Parameter: Age (day) Value: 14
  misc_feature: MA Experiment 20000328 PARAMETER Experiment Name: At_42deg_Heat_Sub_P Parameter: Organism Value: A. thaliana
  misc_feature: MA Experiment 20000328 PARAMETER Experiment Name: At_42deg_Heat_Sub_P Parameter: Plant Line Value: WS
  misc_feature: MA Experiment 20000328 PARAMETER Experiment Name: At_42deg_Heat_Sub_P Parameter: Temperature (deg C) Value: 42 vs. 22
  misc_feature: MA Experiment 20000328 PARAMETER Experiment Name: At_42deg_Heat_Sub_P Parameter: Timepoint (hr) Value: 6
  misc_feature: MA Experiment 20000328 PARAMETER Experiment Name: At_42deg_Heat_Sub_P Parameter: Tissue Value: Aerial
  misc_feature: MA Experiment ID: 20000355 Result: Up-regulated in Transcription
  misc_feature: MA Experiment 20000355 PARAMETER Experiment Name: At_Siliques_Sub_P Parameter: Age (day) Value: 21
  misc_feature: MA Experiment 20000355 PARAMETER Experiment Name: At_Siliques_Sub_P Parameter: Organism Value: A. thaliana
  misc_feature: MA Experiment 20000355 PARAMETER Experiment Name: At_Siliques_Sub_P Parameter: Plant Line Value: WS
  misc_feature: MA Experiment 20000355 PARAMETER Experiment Name: At_Siliques_Sub_P Parameter: Tissue Value: Less Than 5mm Siliques vs. Whole Plant
  misc_feature: MA Experiment ID: 20000440 Result: Up-regulated in Transcription
  misc_feature: MA Experiment 20000440 PARAMETER Experiment Name: At_Closed-Flower__Sub_P Parameter: Tissue Value: Closed Flower vs. Whole Plant

SEQ ID NO: 93013 - protein, 167 aa, Arabidopsis thaliana; identical to SEQ ID NO: 89257
  peptide (1)..(167): Ceres Seq. ID no. 12716785
  misc_feature (1)..(142): Pfam Name: Vesicle transport v-SNARE protein Pfam Description: Vesicle transport v-SNARE protein
  misc_feature (1)..(167): Homolog of NCBI NO: 15228600 NR Description: SNARE protein AtVTI13; protein id: At3g29100.1
  misc_feature (1)..(167): Homolog of NCBI NO: 26451552 NR Description: putative vesicle transport protein [Arabidopsis
  misc_feature (1)..(167): Homolog of NCBI NO: 6690274 NR Description: v-SNARE AtVTI1a [Arabidopsis thaliana]
  misc_feature (1)..(167): Homolog of NCBI NO: 15241780 NR Description: v-SNARE AtVTI1a (ZIG); protein id: At5g39510.1, by cDNA: gi_17979269, supported by cDNA: gi_20147178, supported
  misc_feature (1)..(165): Homolog of NCBI NO: 34910406 NR Description: putative vesicle transport v-SNARE protein [Oryza
  misc_feature (1)..(164): Homolog of NCBI NO: 34914100 NR Description: similar to vesicle transport protein [Oryza
  misc_feature (1)..(166): Homolog of NCBI NO: 6690276 NR Description: v-SNARE AtVTI1b [Arabidopsis thaliana]
  misc_feature (1)..(166): Homolog of NCBI NO: 18396008 NR Description: v-SNARE protein AtVTI1b, putative; protein id: supported by cDNA: gi_6690275 [Arabidopsis thaliana]
  misc_feature (1)..(166): Homolog of NCBI NO: 27805772 NR Description: Vesicle transport v-SNARE 12 (AtVTI12) (Vesicle v- SNARE protein VTI1b) (Vesicle soluble NSF attachment protein
  misc_feature (1)..(167): Homolog of NCBI NO: 15241823 NR Description: SNARE protein AtMEMB11; protein id: At5g39630.1

SEQ ID NO: 93014 - protein, 113 aa, Arabidopsis thaliana; identical to SEQ ID NO: 89258
  peptide (1)..(113): Ceres Seq. ID no. 12716786
  misc_feature (1)..(88): Pfam Name: Vesicle transport v-SNARE protein Pfam Description: Vesicle transport v-SNARE protein
  misc_feature (1)..(113): Homolog of NCBI NO: 15228600 NR Description: SNARE protein AtVTI13; protein id: At3g29100.1
  misc_feature (1)..(113): Homolog of NCBI NO: 26451552 NR Description: putative vesicle transport protein [Arabidopsis
  misc_feature (1)..(113): Homolog of NCBI NO: 6690274 NR Description: v-SNARE AtVTI1a [Arabidopsis thaliana]
  misc_feature (1)..(113): Homolog of NCBI NO: 15241780 NR Description: v-SNARE AtVTI1a (ZIG); protein id: At5g39510.1, by cDNA: gi_17979269, supported by cDNA: gi_20147178, supported
  misc_feature (1)..(111): Homolog of NCBI NO: 34910406 NR Description: putative vesicle transport v-SNARE protein [Oryza
  misc_feature (1)..(110): Homolog of NCBI NO: 34914100 NR Description: similar to vesicle transport protein [Oryza
  misc_feature (1)..(112): Homolog of NCBI NO: 6690276 NR Description: v-SNARE AtVTI1b [Arabidopsis thaliana]
  misc_feature (1)..(112): Homolog of NCBI NO: 27805772 NR Description: Vesicle transport v-SNARE 12 (AtVTI12) (Vesicle v- SNARE protein VTI1b) (Vesicle soluble NSF attachment protein
  misc_feature (1)..(112): Homolog of NCBI NO: 18396008 NR Description: v-SNARE protein AtVTI1b, putative; protein id: supported by cDNA: gi_6690275 [Arabidopsis thaliana]
  misc_feature (1)..(113): Homolog of NCBI NO: 15241823 NR Description: SNARE protein AtMEMB11; protein id: At5g39630.1

SEQ ID NO: 93015 - protein, 98 aa, Arabidopsis thaliana; identical to SEQ ID NO: 89259
  peptide (1)..(98): Ceres Seq. ID no. 12716787
  misc_feature (1)..(73): Pfam Name: Vesicle transport v-SNARE protein Pfam Description: Vesicle transport v-SNARE protein
  misc_feature (1)..(98): Homolog of NCBI NO: 15228600 NR Description: SNARE protein AtVTI13; protein id: At3g29100.1
  misc_feature (1)..(98): Homolog of NCBI NO: 26451552 NR Description: putative vesicle transport protein [Arabidopsis
  misc_feature (1)..(98): Homolog of NCBI NO: 6690274 NR Description: v-SNARE AtVTI1a [Arabidopsis thaliana]
  misc_feature (1)..(98): Homolog of NCBI NO: 15241780 NR Description: v-SNARE AtVTI1a (ZIG); protein id: At5g39510.1, by cDNA: gi_17979269, supported by cDNA: gi_20147178, supported
  misc_feature (1)..(96): Homolog of NCBI NO: 34910406 NR Description: putative vesicle transport v-SNARE protein [Oryza
  misc_feature (1)..(95): Homolog of NCBI NO: 34914100 NR Description: similar to vesicle transport protein [Oryza
  misc_feature (1)..(97): Homolog of NCBI NO: 6690276 NR Description: v-SNARE AtVTI1b [Arabidopsis thaliana]
  misc_feature (1)..(97): Homolog of NCBI NO: 27805772 NR Description: Vesicle transport v-SNARE 12 (AtVTI12) (Vesicle v- SNARE protein VTI1b) (Vesicle soluble NSF attachment protein
  misc_feature (1)..(97): Homolog of NCBI NO: 18396008 NR Description: v-SNARE protein AtVTI1b, putative; protein id: supported by cDNA: gi_6690275 [Arabidopsis thaliana]
  misc_feature (1)..(98): Homolog of NCBI NO: 15241823 NR Description: SNARE protein AtMEMB11; protein id: At5g39630.1

SEQ ID NO: 93016 - DNA, 783 bp, Arabidopsis thaliana; identical to SEQ ID NO: 89260
  misc_feature (1)..(783): Ceres Seq. ID no. 12716831
  misc_feature: MA Experiment ID: 20000173 Result: Up-regulated in Transcription
  misc_feature: MA Experiment 20000173 PARAMETER Experiment Name: At_42deg_Heat_P Parameter: Age (day) Value: 14
  misc_feature: MA Experiment 20000173 PARAMETER Experiment Name: At_42deg_Heat_P Parameter: Organism Value: A. thaliana
  misc_feature: MA Experiment 20000173 PARAMETER Experiment Name: At_42deg_Heat_P Parameter: Plant Line Value: WS
  misc_feature: MA Experiment 20000173 PARAMETER Experiment Name: At_42deg_Heat_P Parameter: Temperature (deg C) Value: 42 vs. 22
  misc_feature: MA Experiment 20000173 PARAMETER Experiment Name: At_42deg_Heat_P Parameter: Timepoint (hr) Value: 6
  misc_feature: MA Experiment 20000173 PARAMETER Experiment Name: At_42deg_Heat_P Parameter: Tissue Value: Aerial

SEQ ID NO: 93017 - protein, 260 aa, Arabidopsis thaliana; identical to SEQ ID NO: 89261
  peptide (1)..(260): Ceres Seq. ID no. 12716832
  misc_feature (1)..(260): Homolog of NCBI NO: 15228656 NR Description: short-chain alcohol dehydrogenase, putative;
  misc_feature (1)..(257): Homolog of NCBI NO: 9293918 NR Description: alcohol dehydrogenase-like protein [Arabidopsis
  misc_feature (1)..(256): Homolog of NCBI NO: 15226503 NR Description: (NM_130281) putative alcohol dehydrogenase; id: At2g47130.1 [Arabidopsis thaliana] >gi|7431088|pir||T02175
  misc_feature (14)..(257): Homolog of NCBI NO: 22331405 NR Description: short-chain alcohol dehydrogenase, putative;
  misc_feature (1)..(256): Homolog of NCBI NO: 15226500 NR Description: (NM_130280) putative alcohol dehydrogenase; id: At2g47120.1 [Arabidopsis thaliana] >gi|7431089|pir||T02176
  misc_feature (1)..(256): Homolog of NCBI NO: 18407273 NR Description: putative alcohol dehydrogenase; protein id: supported by cDNA: gi_13878112, supported by cDNA: gi_17104782 thaliana] >gi|13878113|gb|AAK44134.1|AF370319_1 putative alcohol
  misc_feature (6)..(256): Homolog of NCBI NO: 7431087 NR Description: probable alcohol dehydrogenase [imported] -
  misc_feature (95)..(260): Homolog of NCBI NO: 9293921 NR Description: contains similarity to alcohol
  misc_feature (1)..(256): Homolog of NCBI NO: 15983819 NR Description: 3-beta-hydroxysteroiddehydrogenase [Digitalis
  misc_feature (1)..(257): Homolog of NCBI NO: 7981382 NR Description: putative alcohol dehydrogenase [Lycopersicon

SEQ ID NO: 93018 - protein, 166 aa, Arabidopsis thaliana; identical to SEQ ID NO: 89262
  peptide (1)..(166): Ceres Seq. ID no. 12716833
  misc_feature (1)..(166): Homolog of NCBI NO: 15228656 NR Description: short-chain alcohol dehydrogenase, putative;
  misc_feature (1)..(163): Homolog of NCBI NO: 9293918 NR Description: alcohol dehydrogenase-like protein [Arabidopsis
  misc_feature (1)..(162): Homolog of NCBI NO: 15226503 NR Description: (NM_130281) putative alcohol dehydrogenase; id: At2g47130.1 [Arabidopsis thaliana] >gi|7431088|pir||T02175
  misc_feature (1)..(163): Homolog of NCBI NO: 22331405 NR Description: short-chain alcohol dehydrogenase, putative;
  misc_feature (1)..(162): Homolog of NCBI NO: 15226500 NR Description: (NM_130280) putative alcohol dehydrogenase; id: At2g47120.1 [Arabidopsis thaliana] >gi|7431089|pir||T02176
  misc_feature (1)..(162): Homolog of NCBI NO: 18407273 NR Description: putative alcohol dehydrogenase; protein id: supported by cDNA: gi_13878112, supported by cDNA: gi_17104782 thaliana] >gi|13878113|gb|AAK44134.1|AF370319_1 putative alcohol
  misc_feature (1)..(162): Homolog of NCBI NO: 7431087 NR Description: probable alcohol dehydrogenase [imported] -
  misc_feature (1)..(166): Homolog of NCBI NO: 9293921 NR Description: contains similarity to alcohol
  misc_feature (1)..(162): Homolog of NCBI NO: 15983819 NR Description: 3-beta-hydroxysteroiddehydrogenase [Digitalis
  misc_feature (1)..(163): Homolog of NCBI NO: 7981382 NR Description: putative alcohol dehydrogenase [Lycopersicon

SEQ ID NO: 93019 - protein, 148 aa, Arabidopsis thaliana; identical to SEQ ID NO: 89263
  peptide (1)..(148): Ceres Seq. ID no. 12716834
  misc_feature (1)..(148): Homolog of NCBI NO: 15228656 NR Description: short-chain alcohol dehydrogenase, putative;
  misc_feature (1)..(145): Homolog of NCBI NO: 9293918 NR Description: alcohol dehydrogenase-like protein [Arabidopsis
  misc_feature (1)..(144): Homolog of NCBI NO: 15226503 NR Description: (NM_130281) putative alcohol dehydrogenase; id: At2g47130.1 [Arabidopsis thaliana] >gi|7431088|pir||T02175
  misc_feature (1)..(145): Homolog of NCBI NO: 22331405 NR Description: short-chain alcohol dehydrogenase, putative;
  misc_feature (1)..(144): Homolog of NCBI NO: 15226500 NR Description: (NM_130280) putative alcohol dehydrogenase; id: At2g47120.1 [Arabidopsis thaliana] >gi|7431089|pir||T02176
  misc_feature (1)..(144): Homolog of NCBI NO: 18407273 NR Description: putative alcohol dehydrogenase; protein id: supported by cDNA: gi_13878112, supported by cDNA: gi_17104782 thaliana] >gi|13878113|gb|AAK44134.1|AF370319_1 putative alcohol
  misc_feature (1)..(144): Homolog of NCBI NO: 7431087 NR Description: probable alcohol dehydrogenase [imported] -
  misc_feature (1)..(148): Homolog of NCBI NO: 9293921 NR Description: contains similarity to alcohol
  misc_feature (1)..(144): Homolog of NCBI NO: 15983819 NR Description: 3-beta-hydroxysteroiddehydrogenase [Digitalis
  misc_feature (1)..(145): Homolog of NCBI NO: 7981382 NR Description: putative alcohol dehydrogenase [Lycopersicon

SEQ ID NO: 93020 - DNA, 1794 bp, Arabidopsis thaliana; identical to SEQ ID NO: 89264
  misc_feature (1)..(1794): Ceres Seq. ID no. 12716936
  misc_feature: MA Experiment ID: 108668 Result: Up-regulated in Transcription
  misc_feature: MA Experiment 108668 PARAMETER Experiment Name: At_2mM_SA_cDNA_P Parameter: Plant Line Value: WS
  misc_feature: MA Experiment 108668 PARAMETER Experiment Name: At_2mM_SA_cDNA_P Parameter: Timepoint (hr) Value: 6
  misc_feature: MA Experiment 108668 PARAMETER Experiment Name: At_2mM_SA_cDNA_P Parameter: Treatment Value: 2mM SA vs. No Treatment
  misc_feature: MA Experiment ID: 20000111 Result: Down-regulated in Transcription
  misc_feature: MA Experiment 20000111 PARAMETER Experiment Name: At_42deg_Heat_cDNA_P Parameter: Temperature (deg C) Value: 42 vs. 22
  misc_feature: MA Experiment 20000111 PARAMETER Experiment Name: At_42deg_Heat_cDNA_P Parameter: Timepoint (hr) Value: 6
  misc_feature: MA Experiment 20000111 PARAMETER Experiment Name: At_42deg_Heat_cDNA_P Parameter: Tissue Value: Aerial
  misc_feature: MA Experiment ID: 20000113 Result: Down-regulated in Transcription
  misc_feature: MA Experiment 20000113 PARAMETER Experiment Name: At_42deg_Heat_cDNA_P Parameter: Temperature (deg C) Value: 42 vs. 22
  misc_feature: MA Experiment 20000113 PARAMETER Experiment Name: At_42deg_Heat_cDNA_P Parameter: Timepoint (hr) Value: 8
  misc_feature: MA Experiment 20000113 PARAMETER Experiment Name: At_42deg_Heat_cDNA_P Parameter: Tissue Value: Aerial
  misc_feature: MA Experiment ID: 20000224 Result: Up-regulated in Transcription
  misc_feature: MA Experiment ID: 20000315 Result: Down-regulated in Transcription
  misc_feature: MA Experiment 20000315 PARAMETER Experiment Name: At_14day_Shoots-Roots_Sub_P Parameter: Age (day) Value: 14
  misc_feature: MA Experiment 20000315 PARAMETER Experiment Name: At_14day_Shoots-Roots_Sub_P Parameter: Organism Value: A. thaliana
  misc_feature: MA Experiment 20000315 PARAMETER Experiment Name: At_14day_Shoots-Roots_Sub_P Parameter: Plant Line Value: WS
  misc_feature: MA Experiment 20000315 PARAMETER Experiment Name: At_14day_Shoots-Roots_Sub_P Parameter: Tissue Value: Shoots vs. Whole Plant
  misc_feature: MA Experiment ID: 20000328 Result: Down-regulated in Transcription
  misc_feature: MA Experiment 20000328 PARAMETER Experiment Name: At_42deg_Heat_Sub_P Parameter: Age (day) Value: 14
  misc_feature: MA Experiment 20000328 PARAMETER Experiment Name: At_42deg_Heat_Sub_P Parameter: Organism Value: A. thaliana
  misc_feature: MA Experiment 20000328 PARAMETER Experiment Name: At_42deg_Heat_Sub_P Parameter: Plant Line Value: WS
  misc_feature: MA Experiment 20000328 PARAMETER Experiment Name: At_42deg_Heat_Sub_P Parameter: Temperature (deg C) Value: 42 vs. 22
  misc_feature: MA Experiment 20000328 PARAMETER Experiment Name: At_42deg_Heat_Sub_P Parameter: Timepoint (hr) Value: 6
  misc_feature: MA Experiment 20000328 PARAMETER Experiment Name: At_42deg_Heat_Sub_P Parameter: Tissue Value: Aerial
  misc_feature: MA Experiment ID: 20000347 Result: Up-regulated in Transcription
  misc_feature: MA Experiment 20000347 PARAMETER Experiment Name: At_2mM_SA_Sub_P Parameter: Age (day) Value: 14
  misc_feature: MA Experiment 20000347 PARAMETER Experiment Name: At_2mM_SA_Sub_P Parameter: Organism Value: A. thaliana
  misc_feature: MA Experiment 20000347 PARAMETER Experiment Name: At_2mM_SA_Sub_P Parameter: Plant Line Value: WS
  misc_feature: MA Experiment 20000347 PARAMETER Experiment Name: At_2mM_SA_Sub_P Parameter: Timepoint (hr) Value: 6
  misc_feature: MA Experiment 20000347 PARAMETER Experiment Name: At_2mM_SA_Sub_P Parameter: Tissue Value: Aerial
  misc_feature: MA Experiment 20000347 PARAMETER Experiment Name: At_2mM_SA_Sub_P Parameter: Treatment Value: 2mM SA vs. No Treatment
  misc_feature: Pfam Name: Pkinase_Tyr Pfam Description: Protein tyrosine kinase

SEQ ID NO: 93021 - protein, 412 aa, Arabidopsis thaliana; identical to SEQ ID NO: 43168
  peptide (1)..(412): Ceres Seq. ID no. 12716937
  misc_feature: Pfam Name: Pkinase_Tyr Pfam Description: Protein tyrosine kinase
  misc_feature (1)..(412): Homolog of NCBI NO: 15235845 NR Description: protein kinase - like protein; protein id: supported by cDNA: 156374. [Arabidopsis thaliana]
  misc_feature (1)..(412): Homolog of NCBI NO: 18400528 NR Description: putative protein kinase; protein id: At2g24360.1, by cDNA: gi_15028152 [Arabidopsis thaliana] putative protein kinase [Arabidopsis thaliana]
  misc_feature (1)..(412): Homolog of NCBI NO: 25287646 NR Description: probable protein kinase [imported] - Arabidopsis
  misc_feature (1)..(412): Homolog of NCBI NO: 27085278 NR Description: serine/threonine protein kinase [Oryza sativa
  misc_feature (1)..(412): Homolog of NCBI NO: 27085280 NR Description: serine/threonine protein kinase [Oryza sativa
  misc_feature (1)..(412): Homolog of NCBI NO: 13124865 NR Description: serine/threonine/tyrosine kinase [Arachis
  misc_feature (1)..(412): Homolog of NCBI NO: 14571547 NR Description: serine/threonine protein kinase [Triticum
  misc_feature (5)..(412): Homolog of NCBI NO: 27085282 NR Description: serine/threonine protein kinase [Oryza sativa
  misc_feature (13)..(412): Homolog of NCBI NO: 28864539 NR Description: serine/threonine protein kinase [Oryza sativa
  misc_feature (55)..(412): Homolog of NCBI NO: 29367355 NR Description: serine/thronine protein kinase-like protein

SEQ ID NO: 93022 - protein, 374 aa, Arabidopsis thaliana; identical to SEQ ID NO: 43169
  peptide (1)..(374): Ceres Seq. ID no. 12716938
  misc_feature: Pfam Name: Pkinase_Tyr Pfam Description: Protein tyrosine kinase
  misc_feature (1)..(374): Homolog of NCBI NO: 15235845 NR Description: protein kinase - like protein; protein id: supported by cDNA: 156374. [Arabidopsis thaliana]
  misc_feature (1)..(374): Homolog of NCBI NO: 18400528 NR Description: putative protein kinase; protein id: At2g24360.1, by cDNA: gi_15028152 [Arabidopsis thaliana] putative protein kinase [Arabidopsis thaliana]
  misc_feature (1)..(374): Homolog of NCBI NO: 25287646 NR Description: probable protein kinase [imported] - Arabidopsis
  misc_feature (1)..(374): Homolog of NCBI NO: 27085278 NR Description: serine/threonine protein kinase [Oryza sativa
  misc_feature (1)..(374): Homolog of NCBI NO: 27085280 NR Description: serine/threonine protein kinase [Oryza sativa
  misc_feature (1)..(374): Homolog of NCBI NO: 13124865 NR Description: serine/threonine/tyrosine kinase [Arachis
  misc_feature (1)..(374): Homolog of NCBI NO: 14571547 NR Description: serine/threonine protein kinase [Triticum
  misc_feature (1)..(374): Homolog of NCBI NO: 27085282 NR Description: serine/threonine protein kinase [Oryza sativa
  misc_feature (1)..(374): Homolog of NCBI NO: 28864539 NR Description: serine/threonine protein kinase [Oryza sativa
  misc_feature (17)..(374): Homolog of NCBI NO: 29367355 NR Description: serine/thronine protein kinase-like protein

SEQ ID NO: 93023 - protein, 369 aa, Arabidopsis thaliana; identical to SEQ ID NO: 43170
  peptide (1)..(369): Ceres Seq. ID no. 12716939
  misc_feature: Pfam Name: Pkinase_Tyr Pfam Description: Protein tyrosine kinase
  misc_feature (1)..(369): Homolog of NCBI NO: 15235845 NR Description: protein kinase - like protein; protein id: supported by cDNA: 156374. [Arabidopsis thaliana]
  misc_feature (1)..(369): Homolog of NCBI NO: 18400528 NR Description: putative protein kinase; protein id: At2g24360.1, by cDNA: gi_15028152 [Arabidopsis thaliana] putative protein kinase [Arabidopsis thaliana]
  misc_feature (1)..(369): Homolog of NCBI NO: 25287646 NR Description: probable protein kinase [imported] - Arabidopsis
  misc_feature (1)..(369): Homolog of NCBI NO: 27085278 NR Description: serine/threonine protein kinase [Oryza sativa
  misc_feature (1)..(369): Homolog of NCBI NO: 27085280 NR Description: serine/threonine protein kinase [Oryza sativa
  misc_feature (1)..(369): Homolog of NCBI NO: 13124865 NR Description: serine/threonine/tyrosine kinase [Arachis
  misc_feature (1)..(369): Homolog of NCBI NO: 14571547 NR Description: serine/threonine protein kinase [Triticum
  misc_feature (1)..(369): Homolog of NCBI NO: 27085282 NR Description: serine/threonine protein kinase [Oryza sativa
  misc_feature (1)..(369): Homolog of NCBI NO: 28864539 NR Description: serine/threonine protein kinase [Oryza sativa
  misc_feature (12)..(369): Homolog of NCBI NO: 29367355 NR Description: serine/thronine protein kinase-like protein

SEQ ID NO: 93024 - DNA, 2179 bp, Arabidopsis thaliana; identical to SEQ ID NO: 89268
  misc_feature (1)..(2179): Ceres Seq. ID no. 12716983
  misc_feature: MA Experiment ID: 20000169 Result: Up-regulated in Transcription
  misc_feature: MA Experiment 20000169 PARAMETER Experiment Name: At_100uM_ABA_P Parameter: Age (day) Value: 14
  misc_feature: MA Experiment 20000169 PARAMETER Experiment Name: At_100uM_ABA_P Parameter: Organism Value: A. thaliana
  misc_feature: MA Experiment 20000169 PARAMETER Experiment Name: At_100uM_ABA_P Parameter: Plant Line Value: WS
  misc_feature: MA Experiment 20000169 PARAMETER Experiment Name: At_100uM_ABA_P Parameter: Timepoint (hr) Value: 6
  misc_feature: MA Experiment 20000169 PARAMETER Experiment Name: At_100uM_ABA_P Parameter: Tissue Value: Aerial
  misc_feature: MA Experiment 20000169 PARAMETER Experiment Name: At_100uM_ABA_P Parameter: Treatment Value: 100uM ABA vs. No Treatment
  misc_feature: MA Experiment ID: 20000185 Result: Down-regulated in Transcription
  misc_feature: MA Experiment 20000185 PARAMETER Experiment Name: At_Roots__P Parameter: Age (day) Value: 7 vs. 21
  misc_feature: MA Experiment 20000185 PARAMETER Experiment Name: At_Roots__P Parameter: Organism Value: A. thaliana
  misc_feature: MA Experiment 20000185 PARAMETER Experiment Name: At_Roots__P Parameter: Tissue Value: Roots vs. Whole Plant
  misc_feature: MA Experiment ID: 20000264 Result: Up-regulated in Transcription
  misc_feature: MA Experiment 20000264 PARAMETER Experiment Name: At_Open_Flower_P Parameter: Age (day) Value: 21
  misc_feature: MA Experiment 20000264 PARAMETER Experiment Name: At_Open_Flower_P Parameter: Plant Line Value: WS
  misc_feature: MA Experiment 20000264 PARAMETER Experiment Name: At_Open_Flower_P Parameter: Tissue Value: Open Flower vs. Whole Plant
  misc_feature: MA Experiment ID: 20000436 Result: Up-regulated in Transcription
  misc_feature: MA Experiment 20000436 PARAMETER Experiment Name: At_Drought_P Parameter: Age (day) Value: 7
  misc_feature: MA Experiment 20000436 PARAMETER Experiment Name: At_Drought_P Parameter: Organism Value: A. thaliana
  misc_feature: MA Experiment 20000436 PARAMETER Experiment Name: At_Drought_P Parameter: Plant Line Value: WS
  misc_feature: MA Experiment 20000436 PARAMETER Experiment Name: At_Drought_P Parameter: Timepoint (hr) Value: 12
  misc_feature: MA Experiment 20000436 PARAMETER Experiment Name: At_Drought_P Parameter: Tissue Value: Whole Plant
  misc_feature: MA Experiment 20000436 PARAMETER Experiment Name: At_Drought_P Parameter: Treatment Value: Drought vs. No Drought
  misc_feature: MA Experiment ID: 20000437 Result: Up-regulated in Transcription
  misc_feature: MA Experiment 20000437 PARAMETER Experiment Name: At_Drought_P Parameter: Age (day) Value: 8
  misc_feature: MA Experiment 20000437 PARAMETER Experiment Name: At_Drought_P Parameter: Organism Value: A. thaliana
  misc_feature: MA Experiment 20000437 PARAMETER Experiment Name: At_Drought_P Parameter: Plant Line Value: WS
  misc_feature: MA Experiment 20000437 PARAMETER Experiment Name: At_Drought_P Parameter: Timepoint (hr) Value: 24
  misc_feature: MA Experiment 20000437 PARAMETER Experiment Name: At_Drought_P Parameter: Tissue Value: Whole Plant
  misc_feature: MA Experiment 20000437 PARAMETER Experiment Name: At_Drought_P Parameter: Treatment Value: Drought vs. No Drought
  misc_feature: MA Experiment ID: 20000439 Result: Down-regulated in Transcription
  misc_feature: MA Experiment 20000439 PARAMETER Experiment Name: At_Roots__P Parameter: Age (day) Value: 14 vs. 21
  misc_feature: MA Experiment 20000439 PARAMETER Experiment Name: At_Roots__P Parameter: Organism Value: A. thaliana
  misc_feature: MA Experiment 20000439 PARAMETER Experiment Name: At_Roots__P Parameter: Tissue Value: Roots vs. Whole Plant
  misc_feature: MA Experiment ID: 20000453 Result: Up-regulated in Transcription
  misc_feature: MA Experiment 20000453 PARAMETER Experiment Name: At_100uM_ABA_P Parameter: Age (day) Value: 15
  misc_feature: MA Experiment 20000453 PARAMETER Experiment Name: At_100uM_ABA_P Parameter: Organism Value: A. thaliana
  misc_feature: MA Experiment 20000453 PARAMETER Experiment Name: At_100uM_ABA_P Parameter: Plant Line Value: WS
  misc_feature: MA Experiment 20000453 PARAMETER Experiment Name: At_100uM_ABA_P Parameter: Timepoint (hr) Value: 24
  misc_feature: MA Experiment 20000453 PARAMETER Experiment Name: At_100uM_ABA_P Parameter: Tissue Value: Aerial
  misc_feature: MA Experiment 20000453 PARAMETER Experiment Name: At_100uM_ABA_P Parameter: Treatment Value: 100uM ABA vs. No Treatment
  misc_feature: MA Experiment ID: 20000794 Result: Up-regulated in Transcription
  misc_feature: MA Experiment 20000794 PARAMETER Experiment Name: At_Petals_P Parameter: Age (day) Value: 23-25 days
  misc_feature: MA Experiment 20000794 PARAMETER Experiment Name: At_Petals_P Parameter: Plant Line Value: WS
  misc_feature: MA Experiment 20000794 PARAMETER Experiment Name: At_Petals_P Parameter: Tissue Value: Petals vs. Whole plant
  misc_feature: MA Experiment ID: 20001559 Result: Up-regulated in Transcription
  misc_feature: MA Experiment 20001559 PARAMETER Experiment Name: At_Drought_Soil_Dry_P Parameter: Age (day) Value: 28
  misc_feature: MA Experiment 20001559 PARAMETER Experiment Name: At_Drought_Soil_Dry_P Parameter: Organism Value: A. thaliana
  misc_feature: MA Experiment 20001559 PARAMETER Experiment Name: At_Drought_Soil_Dry_P Parameter: Plant Line Value: WS
  misc_feature: MA Experiment 20001559 PARAMETER Experiment Name: At_Drought_Soil_Dry_P Parameter: Post Timepoint (hr) Value: 29
  misc_feature: MA Experiment 20001559 PARAMETER Experiment Name: At_Drought_Soil_Dry_P Parameter: Post-Treatment Value: Re-Water vs. No Drought
  misc_feature: MA Experiment 20001559 PARAMETER Experiment Name: At_Drought_Soil_Dry_P Parameter: Timepoint (day) Value: 14
  misc_feature: MA Experiment 20001559 PARAMETER Experiment Name: At_Drought_Soil_Dry_P Parameter: Treatment Value: Drought vs. No Drought
  misc_feature: MA Experiment ID: 20001904 Result: Up-regulated in Transcription
  misc_feature: MA Experiment 20001904 PARAMETER Experiment Name: At_Drought_Reproduction_P Parameter: Age (day) Value: 37
  misc_feature: MA Experiment 20001904 PARAMETER Experiment Name: At_Drought_Reproduction_P Parameter: Organism Value: A. thaliana
  misc_feature: MA Experiment 20001904 PARAMETER Experiment Name: At_Drought_Reproduction_P Parameter: Plant Line Value: WS
  misc_feature: MA Experiment 20001904 PARAMETER Experiment Name: At_Drought_Reproduction_P Parameter: Timepoint (day) Value: 7
  misc_feature: MA Experiment 20001904 PARAMETER Experiment Name: At_Drought_Reproduction_P Parameter: Tissue Value: Rosettes
  misc_feature: MA Experiment 20001904 PARAMETER Experiment Name: At_Drought_Reproduction_P Parameter: Treatment Value: Drought vs. No Drought
  misc_feature: MA Experiment ID: 20001905 Result: Up-regulated in Transcription
  misc_feature: MA Experiment 20001905 PARAMETER Experiment Name: At_Drought_Reproduction_P Parameter: Age (day) Value: 40
  misc_feature: MA Experiment 20001905 PARAMETER Experiment Name: At_Drought_Reproduction_P Parameter: Organism Value: A. thaliana
  misc_feature: MA Experiment 20001905 PARAMETER Experiment Name: At_Drought_Reproduction_P Parameter: Plant Line Value: WS
  misc_feature: MA Experiment 20001905 PARAMETER Experiment Name: At_Drought_Reproduction_P Parameter: Timepoint (day) Value: 10
  misc_feature: MA Experiment 20001905 PARAMETER Experiment Name: At_Drought_Reproduction_P Parameter: Tissue Value: Rosettes
  misc_feature: MA Experiment 20001905 PARAMETER Experiment Name: At_Drought_Reproduction_P Parameter: Treatment Value: Drought vs. No Drought
  misc_feature: MA Experiment ID: 20001906 Result: Up-regulated in Transcription
  misc_feature: MA Experiment 20001906 PARAMETER Experiment Name: At_Drought_Reproduction_P Parameter: Age (day) Value: 35
  misc_feature: MA Experiment 20001906 PARAMETER Experiment Name: At_Drought_Reproduction_P Parameter: Organism Value: A. thaliana
  misc_feature: MA Experiment 20001906 PARAMETER Experiment Name: At_Drought_Reproduction_P Parameter: Plant Line Value: WS
  misc_feature: MA Experiment 20001906 PARAMETER Experiment Name: At_Drought_Reproduction_P Parameter: Timepoint (day) Value: 5
  misc_feature: MA Experiment 20001906 PARAMETER Experiment Name: At_Drought_Reproduction_P Parameter: Tissue Value: Siliques
  misc_feature: MA Experiment 20001906 PARAMETER Experiment Name: At_Drought_Reproduction_P Parameter: Treatment Value: Drought vs. No Drought
  misc_feature: MA Experiment ID: 20001908 Result: Up-regulated in Transcription
  misc_feature: MA Experiment 20001908 PARAMETER Experiment Name: At_Drought_Reproduction_P Parameter: Age (day) Value: 40
  misc_feature: MA Experiment 20001908 PARAMETER Experiment Name: At_Drought_Reproduction_P Parameter: Organism Value: A. thaliana
  misc_feature: MA Experiment 20001908 PARAMETER Experiment Name: At_Drought_Reproduction_P Parameter: Plant Line Value: WS
  misc_feature: MA Experiment 20001908 PARAMETER Experiment Name: At_Drought_Reproduction_P Parameter: Timepoint (day) Value: 10
  misc_feature: MA Experiment 20001908 PARAMETER Experiment Name: At_Drought_Reproduction_P Parameter: Tissue Value: Siliques
  misc_feature: MA Experiment 20001908 PARAMETER Experiment Name: At_Drought_Reproduction_P Parameter: Treatment Value: Drought vs. No Drought

SEQ ID NO: 93025 - protein, 611 aa, Arabidopsis thaliana; identical to SEQ ID NO: 45166
  peptide (1)..(611): Ceres Seq. ID no. 12716984
  misc_feature (29)..(331): Homolog of NCBI NO: 18420244 NR Description: protein kinase like protein; protein id:
  misc_feature (5)..(309): Homolog of NCBI NO: 34393850 NR Description: putative serine/threonine protein kinase [Oryza
  misc_feature (45)..(300): Homolog of NCBI NO: 34334393 NR Description: NIMA-related kinase 2 [Chlamydomonas reinhardtii]
  misc_feature (5)..(311): Homolog of NCBI NO: 34901608 NR Description: P0571D04.18 [Oryza sativa (japonica
  misc_feature (41)..(308): Homolog of NCBI NO: 25146954 NR Description: Protein kinase [Caenorhabditis elegans] Hypothetical protein F19H6.1 [Caenorhabditis elegans]
  misc_feature (33)..(309): Homolog of NCBI NO: 38345798 NR Description: OSJNBa0085I10.15 [Oryza sativa (japonica
  misc_feature (40)..(302): Homolog of NCBI NO: 39588025 NR Description: Hypothetical protein CBG00136 [Caenorhabditis
  misc_feature (47)..(316): Homolog of NCBI NO: 27085282 NR Description: serine/threonine protein kinase [Oryza sativa
  misc_feature (24)..(300): Homolog of NCBI NO: 34334391 NR Description: NIMA-related kinase 1 [Chlamydomonas reinhardtii]
  misc_feature (47)..(316): Homolog of NCBI NO: 28864539 NR Description: serine/threonine protein kinase [Oryza sativa

SEQ ID NO: 93026 - protein, 578 aa, Arabidopsis thaliana; identical to SEQ ID NO: 45167
  peptide (1)..(578): Ceres Seq. ID no. 12716985
  misc_feature (1)..(298): Homolog of NCBI NO: 18420244 NR Description: protein kinase like protein; protein id:
  misc_feature (1)..(276): Homolog of NCBI NO: 34393850 NR Description: putative serine/threonine protein kinase [Oryza
  misc_feature (12)..(267): Homolog of NCBI NO: 34334393 NR Description: NIMA-related kinase 2 [Chlamydomonas reinhardtii]
  misc_feature (1)..(278): Homolog of NCBI NO: 34901608 NR Description: P0571D04.18 [Oryza sativa (japonica
  misc_feature (8)..(275): Homolog of NCBI NO: 25146954 NR Description: Protein kinase [Caenorhabditis elegans] Hypothetical protein F19H6.1 [Caenorhabditis elegans]
  misc_feature (1)..(276): Homolog of NCBI NO: 38345798 NR Description: OSJNBa0085I10.15 [Oryza sativa (japonica
  misc_feature (7)..(269): Homolog of NCBI NO: 39588025 NR Description: Hypothetical protein CBG00136 [Caenorhabditis
  misc_feature (14)..(283): Homolog of NCBI NO: 27085282 NR Description: serine/threonine protein kinase [Oryza sativa
  misc_feature (1)..(267): Homolog of NCBI NO: 34334391 NR Description: NIMA-related kinase 1 [Chlamydomonas reinhardtii]
  misc_feature (14)..(283): Homolog of NCBI NO: 28864539 NR Description: serine/threonine protein kinase [Oryza sativa

SEQ ID NO: 93027 - protein, 537 aa, Arabidopsis thaliana; identical to SEQ ID NO: 45168
  peptide (1)..(537): Ceres Seq. ID no. 12716986
  misc_feature (1)..(257): Homolog of NCBI NO: 18420244 NR Description: protein kinase like protein; protein id:
  misc_feature (1)..(235): Homolog of NCBI NO: 34393850 NR Description: putative serine/threonine protein kinase [Oryza
  misc_feature (1)..(226): Homolog of NCBI NO: 34334393 NR Description: NIMA-related kinase 2 [Chlamydomonas reinhardtii]
  misc_feature (1)..(237): Homolog of NCBI NO: 34901608 NR Description: P0571D04.18 [Oryza sativa (japonica
  misc_feature (1)..(234): Homolog of NCBI NO: 25146954 NR Description: Protein kinase [Caenorhabditis elegans] Hypothetical protein F19H6.1 [Caenorhabditis elegans]
  misc_feature (1)..(235): Homolog of NCBI NO: 38345798 NR Description: OSJNBa0085I10.15 [Oryza sativa (japonica
  misc_feature (1)..(228): Homolog of NCBI NO: 39588025 NR Description: Hypothetical protein CBG00136 [Caenorhabditis
  misc_feature (1)..(242): Homolog of NCBI NO: 27085282 NR Description: serine/threonine protein kinase [Oryza sativa
  misc_feature (1)..(226): Homolog of NCBI NO: 34334391 NR Description: NIMA-related kinase 1 [Chlamydomonas reinhardtii]
  misc_feature (1)..(242): Homolog of NCBI NO: 28864539 NR Description: serine/threonine protein kinase [Oryza sativa

SEQ ID NO: 93028 - DNA, 948 bp, Arabidopsis thaliana; identical to SEQ ID NO: 89272
  misc_feature (1)..(948): Ceres Seq. ID no. 12717108
  misc_feature: MA Experiment ID: 20000171 Result: Up-regulated in Transcription
  misc_feature: MA Experiment 20000171 PARAMETER Experiment Name: At_42deg_Heat_P Parameter: Age (day) Value: 14
  misc_feature: MA Experiment 20000171 PARAMETER Experiment Name: At_42deg_Heat_P Parameter: Organism Value: A. thaliana
  misc_feature: MA Experiment 20000171 PARAMETER Experiment Name: At_42deg_Heat_P Parameter: Plant Line Value: WS
  misc_feature: MA Experiment 20000171 PARAMETER Experiment Name: At_42deg_Heat_P Parameter: Temperature (deg C) Value: 42 vs. 22
  misc_feature: MA Experiment 20000171 PARAMETER Experiment Name: At_42deg_Heat_P Parameter: Timepoint (hr) Value: 1
  misc_feature: MA Experiment 20000171 PARAMETER Experiment Name: At_42deg_Heat_P Parameter: Tissue Value: Aerial
  misc_feature: MA Experiment ID: 20000173 Result: Up-regulated in Transcription
  misc_feature: MA Experiment 20000173 PARAMETER Experiment Name: At_42deg_Heat_P Parameter: Age (day) Value: 14
  misc_feature: MA Experiment 20000173 PARAMETER Experiment Name: At_42deg_Heat_P Parameter: Organism Value: A. thaliana
  misc_feature: MA Experiment 20000173 PARAMETER Experiment Name: At_42deg_Heat_P Parameter: Plant Line Value: WS
  misc_feature: MA Experiment 20000173 PARAMETER Experiment Name: At_42deg_Heat_P Parameter: Temperature (deg C) Value: 42 vs. 22
  misc_feature: MA Experiment 20000173 PARAMETER Experiment Name: At_42deg_Heat_P Parameter: Timepoint (hr) Value: 6
  misc_feature: MA Experiment 20000173 PARAMETER Experiment Name: At_42deg_Heat_P Parameter: Tissue Value: Aerial
  misc_feature: MA Experiment ID: 20000184 Result: Down-regulated in Transcription
  misc_feature: MA Experiment 20000184 PARAMETER Experiment Name: At_Shoots__P Parameter: Age (day) Value: 7
  misc_feature: MA Experiment 20000184 PARAMETER Experiment Name: At_Shoots__P Parameter: Tissue Value: Shoots vs. Whole Plant
  misc_feature: MA Experiment ID: 20001451 Result: Up-regulated in Transcription
  misc_feature: MA Experiment 20001451 PARAMETER Experiment Name: At_Far-red-induction_P Parameter: Age (day) Value: 7
  misc_feature: MA Experiment 20001451 PARAMETER Experiment Name: At_Far-red-induction_P Parameter: Light Value: Far-red vs. White
  misc_feature: MA Experiment 20001451 PARAMETER Experiment Name: At_Far-red-induction_P Parameter: Organism Value: A. thaliana
  misc_feature: MA Experiment 20001451 PARAMETER Experiment Name: At_Far-red-induction_P Parameter: Plant Line Value: Columbia
  misc_feature: MA Experiment 20001451 PARAMETER Experiment Name: At_Far-red-induction_P Parameter: Timepoint (hr) Value: 24
  misc_feature: MA Experiment 20001451 PARAMETER Experiment Name: At_Far-red-induction_P Parameter: Tissue Value: Whole Plant

SEQ ID NO: 93029 - protein, 315 aa, Arabidopsis thaliana; identical to SEQ ID NO: 89273
  peptide (1)..(315): Ceres Seq. ID no. 12717109
  misc_feature (10)..(313): Pfam Name: Caldesmon Pfam Description: Caldesmon
  misc_feature (1)..(315): Homolog of NCBI NO: 15233865 NR Description: putative protein; protein id: At4g32610.1
  misc_feature (1)..(315): Homolog of NCBI NO: 18400901 NR Description: expressed protein; protein id: At2g25670.1, by cDNA: 12261., supported by cDNA: gi_17529065 [Arabidopsis >gi|25412339|pir||C84651 hypothetical protein At2g25670
  misc_feature (1)..(315): Homolog of NCBI NO: 21537167 NR Description: unknown [Arabidopsis thaliana]
  misc_feature (1)..(315): Homolog of NCBI NO: 17529066 NR Description: unknown protein [Arabidopsis thaliana]
  misc_feature (105)..(315): Homolog of NCBI NO: 34906156 NR Description: P0509B06.15 [Oryza sativa (japonica
  misc_feature (1)..(114): Homolog of NCBI NO: 34906156 NR Description: P0509B06.15 [Oryza sativa (japonica
  misc_feature (1)..(315): Homolog of NCBI NO: 33620414 NR Description: M355 [Lilium longiflorum]
  misc_feature (107)..(315): Homolog of NCBI NO: 7522210 NR Description: hypothetical protein pAFD103 - apple tree
  misc_feature (30)..(308): Homolog of NCBI NO: 39593039 NR Description: Hypothetical protein CBG09238 [Caenorhabditis
  misc_feature (28)..(297): Homolog of NCBI NO: 8096269 NR Description: KED [Nicotiana tabacum]

SEQ ID NO: 93030 - protein, 303 aa, Arabidopsis thaliana; identical to SEQ ID NO: 89274
  peptide (1)..(303): Ceres Seq. ID no. 12717110
  misc_feature (1)..(301): Pfam Name: Caldesmon Pfam Description: Caldesmon
  misc_feature (1)..(303): Homolog of NCBI NO: 15233865 NR Description: putative protein; protein id: At4g32610.1
  misc_feature (1)..(303): Homolog of NCBI NO: 18400901 NR Description: expressed protein; protein id: At2g25670.1, by cDNA: 12261., supported by cDNA: gi_17529065 [Arabidopsis >gi|25412339|pir||C84651 hypothetical protein At2g25670
  misc_feature (1)..(303): Homolog of NCBI NO: 21537167 NR Description: unknown [Arabidopsis thaliana]
  misc_feature (1)..(303): Homolog of NCBI NO: 17529066 NR Description: unknown protein [Arabidopsis thaliana]
  misc_feature (93)..(303): Homolog of NCBI NO: 34906156 NR Description: P0509B06.15 [Oryza sativa (japonica
  misc_feature (1)..(102): Homolog of NCBI NO: 34906156 NR Description: P0509B06.15 [Oryza sativa (japonica
  misc_feature (1)..(303): Homolog of NCBI NO: 33620414 NR Description: M355 [Lilium longiflorum]
  misc_feature (95)..(303): Homolog of NCBI NO: 7522210 NR Description: hypothetical protein pAFD103 - apple tree
  misc_feature (18)..(296): Homolog of NCBI NO: 39593039 NR Description: Hypothetical protein CBG09238 [Caenorhabditis
  misc_feature (16)..(285): Homolog of NCBI NO: 8096269 NR Description: KED [Nicotiana tabacum]

SEQ ID NO: 93031 - DNA, 1881 bp, Arabidopsis thaliana; identical to SEQ ID NO: 89275
  misc_feature (1)..(1881): Ceres Seq. ID no. 12717111
  misc_feature: MA Experiment ID: 20000264 Result: Up-regulated in Transcription
  misc_feature: MA Experiment 20000264 PARAMETER Experiment Name: At_Open_Flower_P Parameter: Age (day) Value: 21
  misc_feature: MA Experiment 20000264 PARAMETER Experiment Name: At_Open_Flower_P Parameter: Plant Line Value: WS
  misc_feature: MA Experiment 20000264 PARAMETER Experiment Name: At_Open_Flower_P Parameter: Tissue Value: Open Flower vs. Whole Plant
  misc_feature: MA Experiment ID: 20001910 Result: Up-regulated in Transcription
  misc_feature: MA Experiment 20001910 PARAMETER Experiment Name: At_Drought_Reproduction_P Parameter: Age (day) Value: 37
  misc_feature: MA Experiment 20001910 PARAMETER Experiment Name: At_Drought_Reproduction_P Parameter: Organism Value: A. thaliana
  misc_feature: MA Experiment 20001910 PARAMETER Experiment Name: At_Drought_Reproduction_P Parameter: Plant Line Value: WS
  misc_feature: MA Experiment 20001910 PARAMETER Experiment Name: At_Drought_Reproduction_P Parameter: Timepoint (day) Value: 7
  misc_feature: MA Experiment 20001910 PARAMETER Experiment Name: At_Drought_Reproduction_P Parameter: Tissue Value: Flowers
  misc_feature: MA Experiment 20001910 PARAMETER Experiment Name: At_Drought_Reproduction_P Parameter: Treatment Value: Drought vs. No Drought

SEQ ID NO: 93032 - protein, 626 aa, Arabidopsis thaliana; identical to SEQ ID NO: 89276
  peptide (1)..(626): Ceres Seq. ID no. 12717112
  misc_feature (8)..(120): Pfam Name: Putative GTPase activating protein for Arf Pfam Description: Putative GTPase activating protein for Arf
  misc_feature (1)..(439): Homolog of NCBI NO: 15233867 NR Description: hypothetical protein; protein id: At4g32630.1
  misc_feature (470)..(560): Homolog of NCBI NO: 15233867 NR Description: hypothetical protein; protein id: At4g32630.1
  misc_feature (1)..(584): Homolog of NCBI NO: 22328591 NR Description: putative protein; protein id: At4g13350.1, by cDNA: gi_17064857 [Arabidopsis thaliana]
  misc_feature (1)..(584): Homolog of NCBI NO: 7487869 NR Description: hypothetical protein T9E8.90 - Arabidopsis >gi|4584540|emb|CAB40770.1| putative protein [Arabidopsis >gi|7268038|emb|CAB78377.1| putative protein [Arabidopsis
  misc_feature (2)..(236): Homolog of NCBI NO: 30680768 NR Description: ARF GAP-like zinc finger-containing protein
  misc_feature (2)..(236): Homolog of NCBI NO: 30680774 NR Description: ARF GAP-like zinc finger-containing protein [Arabidopsis thaliana] >gi|19698913|gb|AAL91192.1| unknown [Arabidopsis thaliana] >gi|30725470|gb|AAP37757.1| At1g08690
  misc_feature (49)..(130): Homolog of NCBI NO: 9802557 NR Description: F22O13.16 [Arabidopsis thaliana]
  misc_feature (2)..(49): Homolog of NCBI NO: 9802557 NR Description: F22O13.16 [Arabidopsis thaliana]
  misc_feature (2)..(104): Homolog of NCBI NO: 7485983 NR Description: hypothetical protein F22O13.17 - Arabidopsis
  misc_feature (2)..(118): Homolog of NCBI NO: 29245305 NR Description: GLP_333_15386_14190 [Giardia lamblia ATCC 50803]

SEQ ID NO: 93033 - protein, 565 aa, Arabidopsis thaliana; identical to SEQ ID NO: 89277
  peptide (1)..(565): Ceres Seq. ID no. 12717113
  misc_feature (1)..(59): Pfam Name: Putative GTPase activating protein for Arf Pfam Description: Putative GTPase activating protein for Arf
  misc_feature (1)..(378): Homolog of NCBI NO: 15233867 NR Description: hypothetical protein; protein id: At4g32630.1
  misc_feature (409)..(499): Homolog of NCBI NO: 15233867 NR Description: hypothetical protein; protein id: At4g32630.1
  misc_feature (1)..(523): Homolog of NCBI NO: 22328591 NR Description: putative protein; protein id: At4g13350.1, by cDNA: gi_17064857 [Arabidopsis thaliana]
  misc_feature (1)..(523): Homolog of NCBI NO: 7487869 NR Description: hypothetical protein T9E8.90 - Arabidopsis >gi|4584540|emb|CAB40770.1| putative protein [Arabidopsis >gi|7268038|emb|CAB78377.1| putative protein [Arabidopsis
  misc_feature (1)..(175): Homolog of NCBI NO: 30680768 NR Description: ARF GAP-like zinc finger-containing protein
  misc_feature (1)..(175): Homolog of NCBI NO: 30680774 NR Description: ARF GAP-like zinc finger-containing protein [Arabidopsis thaliana] >gi|19698913|gb|AAL91192.1| unknown [Arabidopsis thaliana] >gi|30725470|gb|AAP37757.1| At1g08690
  misc_feature (1)..(69): Homolog of NCBI NO: 9802557 NR Description: F22O13.16 [Arabidopsis thaliana]
  misc_feature (1)..(43): Homolog of NCBI NO: 7485983 NR Description: hypothetical protein F22O13.17 - Arabidopsis
  misc_feature (1)..(57): Homolog of NCBI NO: 29245305 NR Description: GLP_333_15386_14190 [Giardia lamblia ATCC 50803]
  misc_feature (1)..(341): Homolog of NCBI NO: 26325842 NR Description: unnamed protein product [Mus musculus]

SEQ ID NO: 93034 - protein, 387 aa, Arabidopsis thaliana; identical to SEQ ID NO: 89278
  peptide (1)..(387): Ceres Seq. ID no. 12717114
  misc_feature (1)..(200): Homolog of NCBI NO: 15233867 NR Description: hypothetical protein; protein id: At4g32630.1
  misc_feature (231)..(321): Homolog of NCBI NO: 15233867 NR Description: hypothetical protein; protein id: At4g32630.1
  misc_feature (1)..(345): Homolog of NCBI NO: 22328591 NR Description: putative protein; protein id: At4g13350.1, by cDNA: gi_17064857 [Arabidopsis thaliana]
  misc_feature (1)..(345): Homolog of NCBI NO: 7487869 NR Description: hypothetical protein T9E8.90 - Arabidopsis >gi|4584540|emb|CAB40770.1| putative protein [Arabidopsis >gi|7268038|emb|CAB78377.1| putative protein [Arabidopsis
  misc_feature (1)..(163): Homolog of NCBI NO: 26325842 NR Description: unnamed protein product [Mus musculus]
  misc_feature (1)..(169): Homolog of NCBI NO: 39591833 NR Description: Hypothetical protein CBG18321 [Caenorhabditis
  misc_feature (1)..(145): Homolog of NCBI NO: 28850371 NR Description: similar to Plasmodium falciparum (isolate 3D7).

SEQ ID NO: 93035 - DNA, 1656 bp, Arabidopsis thaliana; identical to SEQ ID NO: 89279
  misc_feature (1)..(1656): Ceres Seq. ID no. 12717172
  misc_feature: MA Experiment ID: 20000438 Result: Up-regulated in Transcription
  misc_feature: MA Experiment 20000438 PARAMETER Experiment Name: At_Shoots__P Parameter: Age (day) Value: 14
  misc_feature: MA Experiment 20000438 PARAMETER Experiment Name: At_Shoots__P Parameter: Tissue Value: Shoots vs. Whole Plant
  misc_feature: MA Experiment ID: 20000527 Result: Down-regulated in Transcription
  misc_feature: MA Experiment 20000527 PARAMETER Experiment Name: At_10percent_PEG_P Parameter: Age (day) Value: 20
  misc_feature: MA Experiment 20000527 PARAMETER Experiment Name: At_10percent_PEG_P Parameter: Organism Value: A. thaliana
  misc_feature: MA Experiment 20000527 PARAMETER Experiment Name: At_10percent_PEG_P Parameter: Plant Line Value: WS
  misc_feature: MA Experiment 20000527 PARAMETER Experiment Name: At_10percent_PEG_P Parameter: Timepoint (day) Value: 20
  misc_feature: MA Experiment 20000527 PARAMETER Experiment Name: At_10percent_PEG_P Parameter: Tissue Value: Whole Plant
  misc_feature: MA Experiment 20000527 PARAMETER Experiment Name: At_10percent_PEG_P Parameter: Treatment Value: 10percent PEG vs. No Treatment
  misc_feature: MA Experiment ID: 20000794 Result: Up-regulated in Transcription
  misc_feature: MA Experiment 20000794 PARAMETER Experiment Name: At_Petals_P Parameter: Age (day) Value: 23-25 days
  misc_feature: MA Experiment 20000794 PARAMETER Experiment Name: At_Petals_P Parameter: Plant Line Value: WS
  misc_feature: MA Experiment 20000794 PARAMETER Experiment Name: At_Petals_P Parameter: Tissue Value: Petals vs. Whole plant
  misc_feature: MA Experiment ID: 20001247 Result: Up-regulated in Transcription
  misc_feature: MA Experiment 20001247 PARAMETER Experiment Name: At_Far-red-induction_P Parameter: Age (day) Value: 7
  misc_feature: MA Experiment 20001247 PARAMETER Experiment Name: At_Far-red-induction_P Parameter: Light Value: Far-red vs. White
  misc_feature: MA Experiment 20001247 PARAMETER Experiment Name: At_Far-red-induction_P Parameter: Organism Value: A. thaliana
  misc_feature: MA Experiment 20001247 PARAMETER Experiment Name: At_Far-red-induction_P Parameter: Plant Line Value: Columbia
  misc_feature: MA Experiment 20001247 PARAMETER Experiment Name: At_Far-red-induction_P Parameter: Timepoint (hr) Value: 1
  misc_feature: MA Experiment 20001247 PARAMETER Experiment Name: At_Far-red-induction_P Parameter: Tissue Value: Whole Plant
  misc_feature: MA Experiment ID: 20001248 Result: Up-regulated in Transcription
  misc_feature: MA Experiment 20001248 PARAMETER Experiment Name: At_Far-red-induction_P Parameter: Age (day) Value: 7
  misc_feature: MA Experiment 20001248 PARAMETER Experiment Name: At_Far-red-induction_P Parameter: Light Value: Far-red vs. White
  misc_feature: MA Experiment 20001248 PARAMETER Experiment Name: At_Far-red-induction_P Parameter: Organism Value: A. thaliana
  misc_feature: MA Experiment 20001248 PARAMETER Experiment Name: At_Far-red-induction_P Parameter: Plant Line Value: Columbia
  misc_feature: MA Experiment 20001248 PARAMETER Experiment Name: At_Far-red-induction_P Parameter: Timepoint (hr) Value: 4
  misc_feature: MA Experiment 20001248 PARAMETER Experiment Name: At_Far-red-induction_P Parameter: Tissue Value: Whole Plant
  misc_feature: MA Experiment ID: 20001450 Result: Up-regulated in Transcription
  misc_feature: MA Experiment 20001450 PARAMETER Experiment Name: At_Far-red-induction_P Parameter: Age (day) Value: 7
  misc_feature: MA Experiment 20001450 PARAMETER Experiment Name: At_Far-red-induction_P Parameter: Light Value: Far-red vs. White
  misc_feature: MA Experiment 20001450 PARAMETER Experiment Name: At_Far-red-induction_P Parameter: Organism Value: A. thaliana
  misc_feature: MA Experiment 20001450 PARAMETER Experiment Name: At_Far-red-induction_P Parameter: Plant Line Value: Columbia
  misc_feature: MA Experiment 20001450 PARAMETER Experiment Name: At_Far-red-induction_P Parameter: Timepoint (hr) Value: 8
  misc_feature: MA Experiment 20001450 PARAMETER Experiment Name: At_Far-red-induction_P Parameter: Tissue Value: Whole Plant
  misc_feature: MA Experiment ID: 20001554 Result: Down-regulated in Transcription
  misc_feature: MA Experiment 20001554 PARAMETER Experiment Name: At_Drought_Soil_Dry_P Parameter: Age (day) Value: 21
  misc_feature: MA Experiment 20001554 PARAMETER Experiment Name: At_Drought_Soil_Dry_P Parameter: Organism Value: A. thaliana
  misc_feature: MA Experiment 20001554 PARAMETER Experiment Name: At_Drought_Soil_Dry_P Parameter: Plant Line Value: WS
  misc_feature: MA Experiment 20001554 PARAMETER Experiment Name: At_Drought_Soil_Dry_P Parameter: Post Timepoint (hr) Value: None
  misc_feature: MA Experiment 20001554 PARAMETER Experiment Name: At_Drought_Soil_Dry_P Parameter: Post-Treatment Value: None
  misc_feature: MA Experiment 20001554 PARAMETER Experiment Name: At_Drought_Soil_Dry_P Parameter: Timepoint (day) Value: 7
  misc_feature: MA Experiment 20001554 PARAMETER Experiment Name: At_Drought_Soil_Dry_P Parameter: Treatment Value: Drought vs. No Drought
  misc_feature: MA Experiment ID: 20001770 Result: Up-regulated in Transcription
  misc_feature: MA Experiment 20001770 PARAMETER Experiment Name: At_Far-red-enriched-adult_P Parameter: Age (day) Value: 28
  misc_feature: MA Experiment 20001770 PARAMETER Experiment Name: At_Far-red-enriched-adult_P Parameter: Light Value: Far-red enriched vs. White
  misc_feature: MA Experiment 20001770 PARAMETER Experiment Name: At_Far-red-enriched-adult_P Parameter: Organism Value: A. thaliana
  misc_feature: MA Experiment 20001770 PARAMETER Experiment Name: At_Far-red-enriched-adult_P Parameter: Plant Line Value: Columbia
  misc_feature: MA Experiment 20001770 PARAMETER Experiment Name: At_Far-red-enriched-adult_P Parameter: Timepoint (hr) Value: 8
  misc_feature: MA Experiment 20001770 PARAMETER Experiment Name: At_Far-red-enriched-adult_P Parameter: Tissue Value: Aerial

SEQ ID NO: 93036 - protein, 551 aa, Arabidopsis thaliana; identical to SEQ ID NO: 89280
  peptide (1)..(551): Ceres Seq. ID no. 12717173
  misc_feature (24)..(376): Pfam Name: Pyridine nucleotide-disulphide oxidoreductase Pfam Description: Pyridine nucleotide-disulphide oxidoreductase
  misc_feature (1)..(420): Homolog of NCBI NO: 15235409 NR Description: putative protein; protein id: At4g28720.1
  misc_feature (1)..(420): Homolog of NCBI NO: 15240026 NR Description: dimethylaniline monooxygenase-like; protein id: [Arabidopsis thaliana] >gi|8953750|dbj|BAA98069.1|
  misc_feature (1)..(419): Homolog of NCBI NO: 15219671 NR Description: putative dimethylaniline monooxygenase; protein At1g04180.1 [Arabidopsis thaliana] >gi|7485875|pir||T00955
  misc_feature (3)..(420): Homolog of NCBI NO: 15219767 NR Description: putative dimethylaniline monooxygenase; protein At1g04610.1 [Arabidopsis thaliana] >gi|25406796|pir||G86178
  misc_feature (8)..(412): Homolog of NCBI NO: 15225816 NR Description: putative flavin-containing monooxygenase; protein
  misc_feature (9)..(420): Homolog of NCBI NO: 38346518 NR Description: OSJNBa0027H09.13 [Oryza sativa (japonica
  misc_feature (18)..(407): Homolog of NCBI NO: 33147034 NR Description: putative dimethylaniline monooxygenase [Oryza
  misc_feature (20)..(403): Homolog of NCBI NO: 15239020 NR Description: putative protein; protein id: At5g11320.1 thaliana] >gi|8953394|emb|CAB96667.1| putative protein
  misc_feature (6)..(404): Homolog of NCBI NO: 22327064 NR Description: putative protein; protein id: At5g25620.1, by cDNA: gi_17528989, supported by cDNA: gi_21280978 [Arabidopsis >gi|17528990|gb|AAL38705.1| unknown protein [Arabidopsis
  misc_feature (10)..(404): Homolog of NCBI NO: 15010541 NR Description: flavin monoxygenase-like protein floozy [Petunia

SEQ ID NO: 93037 - protein, 548 aa, Arabidopsis thaliana; identical to SEQ ID NO: 89281
  peptide (1)..(548): Ceres Seq. ID no. 12717174
  misc_feature (21)..(373): Pfam Name: Pyridine nucleotide-disulphide oxidoreductase Pfam Description: Pyridine nucleotide-disulphide oxidoreductase
  misc_feature (1)..(417): Homolog of NCBI NO: 15235409 NR Description: putative protein; protein id: At4g28720.1
  misc_feature (1)..(417): Homolog of NCBI NO: 15240026 NR Description: dimethylaniline monooxygenase-like; protein id: [Arabidopsis thaliana] >gi|8953750|dbj|BAA98069.1|
  misc_feature (1)..(416): Homolog of NCBI NO: 15219671 NR Description: putative dimethylaniline monooxygenase; protein At1g04180.1 [Arabidopsis thaliana] >gi|7485875|pir||T00955
  misc_feature (1)..(417): Homolog of NCBI NO: 15219767 NR Description: putative dimethylaniline monooxygenase; protein At1g04610.1 [Arabidopsis thaliana] >gi|25406796|pir||G86178
  misc_feature (5)..(409): Homolog of NCBI NO: 15225816 NR Description: putative flavin-containing monooxygenase; protein
  misc_feature (6)..(417): Homolog of NCBI NO: 38346518 NR Description: OSJNBa0027H09.13 [Oryza sativa (japonica
  misc_feature (15)..(404): Homolog of NCBI NO: 33147034 NR Description: putative dimethylaniline monooxygenase [Oryza
  misc_feature (17)..(400): Homolog of NCBI NO: 15239020 NR Description: putative protein; protein id: At5g11320.1 thaliana] >gi|8953394|emb|CAB96667.1| putative protein
  misc_feature (3)..(401): Homolog of NCBI NO: 22327064 NR Description: putative protein; protein id: At5g25620.1, by cDNA: gi_17528989, supported by cDNA: gi_21280978 [Arabidopsis >gi|17528990|gb|AAL38705.1| unknown protein [Arabidopsis
  misc_feature (7)..(401): Homolog of NCBI NO: 15010541 NR Description: flavin monoxygenase-like protein floozy [Petunia

SEQ ID NO: 93038 - protein, 544 aa, Arabidopsis thaliana; identical to SEQ ID NO: 89282
  peptide (1)..(544): Ceres Seq. ID no. 12717175
  misc_feature (17)..(369): Pfam Name: Pyridine nucleotide-disulphide oxidoreductase Pfam Description: Pyridine nucleotide-disulphide oxidoreductase
  misc_feature (1)..(413): Homolog of NCBI NO: 15235409 NR Description: putative protein; protein id: At4g28720.1
  misc_feature (1)..(413): Homolog of NCBI NO: 15240026 NR Description: dimethylaniline monooxygenase-like; protein id: [Arabidopsis thaliana] >gi|8953750|dbj|BAA98069.1|
  misc_feature (1)..(412): Homolog of NCBI NO: 15219671 NR Description: putative dimethylaniline monooxygenase; protein At1g04180.1 [Arabidopsis thaliana] >gi|7485875|pir||T00955
  misc_feature (1)..(413): Homolog of NCBI NO: 15219767 NR Description: putative dimethylaniline monooxygenase; protein At1g04610.1 [Arabidopsis thaliana] >gi|25406796|pir||G86178
  misc_feature (1)..(405): Homolog of NCBI NO: 15225816 NR Description: putative flavin-containing monooxygenase; protein
  misc_feature (2)..(413): Homolog of NCBI NO: 38346518 NR Description: OSJNBa0027H09.13 [Oryza sativa (japonica
  misc_feature (11)..(400): Homolog of NCBI NO: 33147034 NR Description: putative dimethylaniline monooxygenase [Oryza
  misc_feature (13)..(396): Homolog of NCBI NO: 15239020 NR Description: putative protein; protein id: At5g11320.1 thaliana] >gi|8953394|emb|CAB96667.1| putative protein
  misc_feature (1)..(397): Homolog of NCBI NO: 22327064 NR Description: putative protein; protein id: At5g25620.1, by cDNA: gi_17528989, supported by cDNA: gi_21280978 [Arabidopsis >gi|17528990|gb|AAL38705.1| unknown protein [Arabidopsis
  misc_feature (3)..(397): Homolog of NCBI NO: 15010541 NR Description: flavin monoxygenase-like protein floozy [Petunia

SEQ ID NO: 93039 - DNA, 1209 bp, Arabidopsis thaliana; identical to SEQ ID NO: 89283
  misc_feature (1)..(1209): Ceres Seq. ID no. 12717180
  misc_feature: MA Experiment ID: 108461 Result: Up-regulated in Transcription
  misc_feature: MA Experiment 108461 PARAMETER Experiment Name: At_Germinating_Seeds_cDNA_P Parameter: Age (day) Value: 1 vs. 0
  misc_feature: MA Experiment 108461 PARAMETER Experiment Name: At_Germinating_Seeds_cDNA_P Parameter: Tissue Value: Germinating Seeds
  misc_feature: MA Experiment ID: 108462 Result: Up-regulated in Transcription
  misc_feature: MA Experiment 108462 PARAMETER Experiment Name: At_Germinating_Seeds_cDNA_P Parameter: Age (day) Value: 2 vs. 0
  misc_feature: MA Experiment 108462 PARAMETER Experiment Name: At_Germinating_Seeds_cDNA_P Parameter: Tissue Value: Germinating Seeds
  misc_feature: MA Experiment ID: 108463 Result: Up-regulated in Transcription
  misc_feature: MA Experiment 108463 PARAMETER Experiment Name: At_Germinating_Seeds_cDNA_P Parameter: Age (day) Value: 3 vs. 0
  misc_feature: MA Experiment 108463 PARAMETER Experiment Name: At_Germinating_Seeds_cDNA_P Parameter: Tissue Value: Germinating Seeds
  misc_feature: MA Experiment ID: 108464 Result: Up-regulated in Transcription
  misc_feature: MA Experiment 108464 PARAMETER Experiment Name: At_Germinating_Seeds_cDNA_P Parameter: Age (day) Value: 4 vs. 0
  misc_feature: MA Experiment 108464 PARAMETER Experiment Name: At_Germinating_Seeds_cDNA_P Parameter: Tissue Value: Germinating Seeds
  misc_feature: MA Experiment ID: 108488 Result: Up-regulated in Transcription
  misc_feature: MA Experiment ID: 108579 Result: Up-regulated in Transcription
  misc_feature: MA Experiment 108579 PARAMETER Experiment Name: At_4deg_Cold_cDNA_P Parameter: Temperature (deg C) Value: 4 vs. 22
  misc_feature: MA Experiment 108579 PARAMETER Experiment Name: At_4deg_Cold_cDNA_P Parameter: Timepoint (hr) Value: 6
  misc_feature: MA Experiment 108579 PARAMETER Experiment Name: At_4deg_Cold_cDNA_P Parameter: Tissue Value: Aerial
  misc_feature: MA Experiment ID: 108585 Result: Down-regulated in Transcription
  misc_feature: MA Experiment 108585 PARAMETER Experiment Name: At_5mM_NaNP_cDNA_P Parameter: Timepoint (hr) Value: 6
  misc_feature: MA Experiment 108585 PARAMETER Experiment Name: At_5mM_NaNP_cDNA_P Parameter: Tissue Value: Aerial
  misc_feature: MA Experiment 108585 PARAMETER Experiment Name: At_5mM_NaNP_cDNA_P Parameter: Treatment Value: null
  misc_feature: MA Experiment ID: 108595 Result: Down-regulated in Transcription
  misc_feature: MA Experiment 108595 PARAMETER Experiment Name: At_Ler-pi_Ovule_cDNA_P Parameter: Plant Line Value: null
  misc_feature: MA Experiment ID: 20000179 Result: Up-regulated in Transcription
  misc_feature: MA Experiment 20000179 PARAMETER Experiment Name: At_Germinating_Seeds_P Parameter: Age (hr) Value: 6 vs. 0
  misc_feature: MA Experiment 20000179 PARAMETER Experiment Name: At_Germinating_Seeds_P Parameter: Tissue Value: Germinating Seeds
  misc_feature: MA Experiment ID: 20000180 Result: Up-regulated in Transcription
  misc_feature: MA Experiment 20000180 PARAMETER Experiment Name: At_Germinating_Seeds_P Parameter: Age (hr) Value: 24 vs. 0
  misc_feature: MA Experiment 20000180 PARAMETER Experiment Name: At_Germinating_Seeds_P Parameter: Tissue Value: Germinating Seeds
  misc_feature: MA Experiment ID: 20000184 Result: Up-regulated in Transcription
  misc_feature: MA Experiment 20000184 PARAMETER Experiment Name: At_Shoots__P Parameter: Age (day) Value: 7
  misc_feature: MA Experiment 20000184 PARAMETER Experiment Name: At_Shoots__P Parameter: Tissue Value: Shoots vs. Whole Plant
  misc_feature: MA Experiment ID: 20000185 Result: Down-regulated in Transcription
  misc_feature: MA Experiment 20000185 PARAMETER Experiment Name: At_Roots__P Parameter: Age (day) Value: 7 vs. 21
  misc_feature: MA Experiment 20000185 PARAMETER Experiment Name: At_Roots__P Parameter: Organism Value: A. thaliana
  misc_feature: MA Experiment 20000185 PARAMETER Experiment Name: At_Roots__P Parameter: Tissue Value: Roots vs. Whole Plant
  misc_feature: MA Experiment ID: 20000438 Result: Up-regulated in Transcription
  misc_feature: MA Experiment 20000438 PARAMETER Experiment Name: At_Shoots__P Parameter: Age (day) Value: 14
  misc_feature: MA Experiment 20000438 PARAMETER Experiment Name: At_Shoots__P Parameter: Tissue Value: Shoots vs. Whole Plant
  misc_feature: MA Experiment ID: 20000527 Result: Up-regulated in Transcription
  misc_feature: MA Experiment 20000527 PARAMETER Experiment Name: At_10percent_PEG_P Parameter: Age (day) Value: 20
  misc_feature: MA Experiment 20000527 PARAMETER Experiment Name: At_10percent_PEG_P Parameter: Organism Value: A. thaliana
  misc_feature: MA Experiment 20000527 PARAMETER Experiment Name: At_10percent_PEG_P Parameter: Plant Line Value: WS
  misc_feature: MA Experiment 20000527 PARAMETER Experiment Name: At_10percent_PEG_P Parameter: Timepoint (day) Value: 20
  misc_feature: MA Experiment 20000527 PARAMETER Experiment Name: At_10percent_PEG_P Parameter: Tissue Value: Whole Plant
  misc_feature: MA Experiment 20000527 PARAMETER Experiment Name: At_10percent_PEG_P Parameter: Treatment Value: 10percent PEG vs. No Treatment
  misc_feature: MA Experiment ID: 20001248 Result: Down-regulated in Transcription
  misc_feature: MA Experiment 20001248 PARAMETER Experiment Name: At_Far-red-induction_P Parameter: Age (day) Value: 7
  misc_feature: MA Experiment 20001248 PARAMETER Experiment Name: At_Far-red-induction_P Parameter: Light Value: Far-red vs. White
  misc_feature: MA Experiment 20001248 PARAMETER Experiment Name: At_Far-red-induction_P Parameter: Organism Value: A. thaliana
  misc_feature: MA Experiment 20001248 PARAMETER Experiment Name: At_Far-red-induction_P Parameter: Plant Line Value: Columbia
  misc_feature: MA Experiment 20001248 PARAMETER Experiment Name: At_Far-red-induction_P Parameter: Timepoint (hr) Value: 4
  misc_feature: MA Experiment 20001248 PARAMETER Experiment Name: At_Far-red-induction_P Parameter: Tissue Value: Whole Plant
  misc_feature: MA Experiment ID: 20001450 Result: Down-regulated in Transcription
  misc_feature: MA Experiment 20001450 PARAMETER Experiment Name: At_Far-red-induction_P Parameter: Age (day) Value: 7
  misc_feature: MA Experiment 20001450 PARAMETER Experiment Name: At_Far-red-induction_P Parameter: Light Value: Far-red vs. White
  misc_feature: MA Experiment 20001450 PARAMETER Experiment Name: At_Far-red-induction_P Parameter: Organism Value: A. thaliana
  misc_feature: MA Experiment 20001450 PARAMETER Experiment Name: At_Far-red-induction_P Parameter: Plant Line Value: Columbia
  misc_feature: MA Experiment 20001450 PARAMETER Experiment Name: At_Far-red-induction_P Parameter: Timepoint (hr) Value: 8
  misc_feature: MA Experiment 20001450 PARAMETER Experiment Name: At_Far-red-induction_P Parameter: Tissue Value: Whole Plant

SEQ ID NO: 93040 - protein, 347 aa, Arabidopsis thaliana; identical to SEQ ID NO: 89284
  peptide (1)..(347): Ceres Seq. ID no. 12717181
  misc_feature (1)..(347): Homolog of NCBI NO: 18417257 NR Description: expressed protein; protein id: At4g28740.1, by cDNA: 36080., supported by cDNA: gi_15081661, supported by
  misc_feature (1)..(347): Homolog of NCBI NO: 15081662 NR Description: AT4g28740/F16A16_150 [Arabidopsis thaliana]
  misc_feature (17)..(347): Homolog of NCBI NO: 7485530 NR Description: hypothetical protein F16A16.150 - Arabidopsis >gi|4218124|emb|CAA22978.1| hypothetical protein [Arabidopsis >gi|7269729|emb|CAB81462.1| hypothetical protein [Arabidopsis
  misc_feature (82)..(347): Homolog of NCBI NO: 32489514 NR Description: OSJNBa0043L24.5 [Oryza sativa (japonica
  misc_feature (94)..(242): Homolog of NCBI NO: 15218638 NR Description: hypothetical protein; protein id: At1g02910.1
  misc_feature (282)..(332): Homolog of NCBI NO: 15218638 NR Description: hypothetical protein; protein id: At1g02910.1

SEQ ID NO: 93041 - protein, 331 aa, Arabidopsis thaliana; identical to SEQ ID NO: 89285
  peptide (1)..(331): Ceres Seq. ID no. 12717182
  misc_feature (1)..(331): Homolog of NCBI NO: 18417257 NR Description: expressed protein; protein id: At4g28740.1, by cDNA: 36080., supported by cDNA: gi_15081661, supported by
  misc_feature (1)..(331): Homolog of NCBI NO: 15081662 NR Description: AT4g28740/F16A16_150 [Arabidopsis thaliana]
  misc_feature (1)..(331): Homolog of NCBI NO: 7485530 NR Description: hypothetical protein F16A16.150 - Arabidopsis >gi|4218124|emb|CAA22978.1| hypothetical protein [Arabidopsis >gi|7269729|emb|CAB81462.1| hypothetical protein [Arabidopsis
  misc_feature (66)..(331): Homolog of NCBI NO: 32489514 NR Description: OSJNBa0043L24.5 [Oryza sativa (japonica
  misc_feature (78)..(226): Homolog of NCBI NO: 15218638 NR Description: hypothetical protein; protein id: At1g02910.1
  misc_feature (266)..(316): Homolog of NCBI NO: 15218638 NR Description: hypothetical protein; protein id: At1g02910.1

SEQ ID NO: 93042 - protein, 238 aa, Arabidopsis thaliana; identical to SEQ ID NO: 89286
  peptide (1)..(238): Ceres Seq. ID no. 12717183
  misc_feature (1)..(238): Homolog of NCBI NO: 18417257 NR Description: expressed protein; protein id: At4g28740.1, by cDNA: 36080., supported by cDNA: gi_15081661, supported by
  misc_feature (1)..(238): Homolog of NCBI NO: 15081662 NR Description: AT4g28740/F16A16_150 [Arabidopsis thaliana]
  misc_feature (1)..(238): Homolog of NCBI NO: 7485530 NR Description: hypothetical protein F16A16.150 - Arabidopsis >gi|4218124|emb|CAA22978.1| hypothetical protein [Arabidopsis >gi|7269729|emb|CAB81462.1| hypothetical protein [Arabidopsis
  misc_feature (1)..(238): Homolog of NCBI NO: 32489514 NR Description: OSJNBa0043L24.5 [Oryza sativa (japonica
  misc_feature (1)..(133): Homolog of NCBI NO: 15218638 NR Description: hypothetical protein; protein id: At1g02910.1
  misc_feature (173)..(223): Homolog of NCBI NO: 15218638 NR Description: hypothetical protein; protein id: At1g02910.1

SEQ ID NO: 93043 - DNA, 2748 bp, Arabidopsis thaliana; identical to SEQ ID NO: 89287
  misc_feature (1)..(2748): Ceres Seq. ID no. 12717220
  misc_feature: MA Experiment ID: 20000185 Result: Up-regulated in Transcription
  misc_feature: MA Experiment 20000185 PARAMETER Experiment Name: At_Roots__P Parameter: Age (day) Value: 7 vs. 21
  misc_feature: MA Experiment 20000185 PARAMETER Experiment Name: At_Roots__P Parameter: Organism Value: A. thaliana
  misc_feature: MA Experiment 20000185 PARAMETER Experiment Name: At_Roots__P Parameter: Tissue Value: Roots vs. Whole Plant
  misc_feature: MA Experiment ID: 20000227 Result: Up-regulated in Transcription
  misc_feature: MA Experiment 20000227 PARAMETER Experiment Name: At_Root-Tips-vs-Tops_P Parameter: Tissue Value: Root Tips vs. Root Tops
  misc_feature: MA Experiment ID: 20000439 Result: Up-regulated in Transcription
  misc_feature: MA Experiment 20000439 PARAMETER Experiment Name: At_Roots__P Parameter: Age (day) Value: 14 vs. 21
  misc_feature: MA Experiment 20000439 PARAMETER Experiment Name: At_Roots__P Parameter: Organism Value: A. thaliana
  misc_feature: MA Experiment 20000439 PARAMETER Experiment Name: At_Roots__P Parameter: Tissue Value: Roots vs. Whole Plant
  misc_feature: MA Experiment ID: 20000527 Result: Down-regulated in Transcription
  misc_feature: MA Experiment 20000527 PARAMETER Experiment Name: At_10percent_PEG_P Parameter: Age (day) Value: 20
  misc_feature: MA Experiment 20000527 PARAMETER Experiment Name: At_10percent_PEG_P Parameter: Organism Value: A. thaliana
  misc_feature: MA Experiment 20000527 PARAMETER Experiment Name: At_10percent_PEG_P Parameter: Plant Line Value: WS
  misc_feature: MA Experiment 20000527 PARAMETER Experiment Name: At_10percent_PEG_P Parameter: Timepoint (day) Value: 20
  misc_feature: MA Experiment 20000527 PARAMETER Experiment Name: At_10percent_PEG_P Parameter: Tissue Value: Whole Plant
  misc_feature: MA Experiment 20000527 PARAMETER Experiment Name: At_10percent_PEG_P Parameter: Treatment Value: 10percent PEG vs. No Treatment

SEQ ID NO: 93044 - protein, 915 aa, Arabidopsis thaliana; identical to SEQ ID NO: 89288
  peptide (1)..(915): Ceres Seq. ID no. 12717221
  misc_feature (12)..(869): Homolog of NCBI NO: 2129635 NR Description: serine/threonine-specific receptor protein kinase
  misc_feature (12)..(869): Homolog of NCBI NO: 15233796 NR Description: serine threonine-specific receptor protein kinase protein id: At4g29990.1 [Arabidopsis thaliana]
  misc_feature (6)..(857): Homolog of NCBI NO: 15224738 NR Description: putative receptor-like protein kinase; protein id:
  misc_feature (1)..(862): Homolog of NCBI NO: 25387148 NR Description: probable protein kinase [imported] - Arabidopsis >gi|9802795|gb|AAF99864.1|AC015448_14 Putative protein kinase
  misc_feature (8)..(872): Homolog of NCBI NO: 15232537 NR Description: serine/threonine-specific protein kinase,
  misc_feature (8)..(856): Homolog of NCBI NO: 15224743 NR Description: putative receptor-like protein kinase; protein id:
  misc_feature (7)..(493): Homolog of NCBI NO: 25405503 NR Description: probable protein kinase [imported] - Arabidopsis >gi|9802787|gb|AAF99856.1|AC015448_6 Putative protein kinase
  misc_feature (427)..(866): Homolog of NCBI NO: 25405503 NR Description: probable protein kinase [imported] - Arabidopsis >gi|9802787|gb|AAF99856.1|AC015448_6 Putative protein kinase
  misc_feature (4)..(868): Homolog of NCBI NO: 15222042 NR Description: light repressible receptor protein kinase,
  misc_feature (80)..(859): Homolog of NCBI NO: 25387154 NR Description: protein F22G5.6 [imported] - Arabidopsis thaliana

SEQ ID NO: 93045 - protein, 802 aa, Arabidopsis thaliana; identical to SEQ ID NO: 89289
  peptide (1)..(802): Ceres Seq. ID no. 12717222
  misc_feature (1)..(756): Homolog of NCBI NO: 2129635 NR Description: serine/threonine-specific receptor protein kinase
  misc_feature (1)..(756): Homolog of NCBI NO: 15233796 NR Description: serine threonine-specific receptor protein kinase protein id: At4g29990.1 [Arabidopsis thaliana]
  misc_feature (1)..(744): Homolog of NCBI NO: 15224738 NR Description: putative receptor-like protein kinase; protein id:
  misc_feature (1)..(749): Homolog of NCBI NO: 25387148 NR Description: probable protein kinase [imported] - Arabidopsis >gi|9802795|gb|AAF99864.1|AC015448_14 Putative protein kinase
  misc_feature (1)..(759): Homolog of NCBI NO: 15232537 NR Description: serine/threonine-specific protein kinase,
  misc_feature (1)..(743): Homolog of NCBI NO: 15224743 NR Description: putative receptor-like protein kinase; protein id:
  misc_feature (1)..(380): Homolog of NCBI NO: 25405503 NR Description: probable protein kinase [imported] - Arabidopsis >gi|9802787|gb|AAF99856.1|AC015448_6 Putative protein kinase
  misc_feature (314)..(753): Homolog of NCBI NO: 25405503 NR Description: probable protein kinase [imported] - Arabidopsis >gi|9802787|gb|AAF99856.1|AC015448_6 Putative protein kinase
  misc_feature (1)..(755): Homolog of NCBI NO: 15222042 NR Description: light repressible receptor protein kinase,
  misc_feature (1)..(746): Homolog of NCBI NO: 25387154 NR Description: protein F22G5.6 [imported] - Arabidopsis thaliana

SEQ ID NO: 93046 - protein, 733 aa, Arabidopsis thaliana; identical to SEQ ID NO: 89290
  peptide (1)..(733): Ceres Seq. ID no. 12717223
  misc_feature (1)..(687): Homolog of NCBI NO: 2129635 NR Description: serine/threonine-specific receptor protein kinase
  misc_feature (1)..(687): Homolog of NCBI NO: 15233796 NR Description: serine threonine-specific receptor protein kinase protein id: At4g29990.1 [Arabidopsis thaliana]
  misc_feature (1)..(675): Homolog of NCBI NO: 15224738 NR Description: putative receptor-like protein kinase; protein id:
  misc_feature (1)..(680): Homolog of NCBI NO: 25387148 NR Description: probable protein kinase [imported] - Arabidopsis >gi|9802795|gb|AAF99864.1|AC015448_14 Putative protein kinase
  misc_feature (1)..(690): Homolog of NCBI NO: 15232537 NR Description: serine/threonine-specific protein kinase,
  misc_feature (1)..(674): Homolog of NCBI NO: 15224743 NR Description: putative receptor-like protein kinase; protein id:
  misc_feature (1)..(311): Homolog of NCBI NO: 25405503 NR Description: probable protein kinase [imported] - Arabidopsis >gi|9802787|gb|AAF99856.1|AC015448_6 Putative protein kinase
  misc_feature (245)..(684): Homolog of NCBI NO: 25405503 NR Description: probable protein kinase [imported] - Arabidopsis >gi|9802787|gb|AAF99856.1|AC015448_6 Putative protein kinase
  misc_feature (1)..(686): Homolog of NCBI NO: 15222042 NR Description: light repressible receptor protein kinase,
  misc_feature (1)..(677): Homolog of NCBI NO: 25387154 NR Description: protein F22G5.6 [imported] - Arabidopsis thaliana

SEQ ID NO: 93047 - DNA, 1494 bp, Arabidopsis thaliana; identical to SEQ ID NO: 89291
  misc_feature (1)..(1494): Ceres Seq. ID no. 12717228
  misc_feature: MA Experiment ID: 20000184 Result: Down-regulated in Transcription
  misc_feature: MA Experiment 20000184 PARAMETER Experiment Name: At_Shoots__P Parameter: Age (day) Value: 7
  misc_feature: MA Experiment 20000184 PARAMETER Experiment Name: At_Shoots__P Parameter: Tissue Value: Shoots vs. Whole Plant
  misc_feature: MA Experiment ID: 20000264 Result: Down-regulated in Transcription
  misc_feature: MA Experiment 20000264 PARAMETER Experiment Name: At_Open_Flower_P Parameter: Age (day) Value: 21
  misc_feature: MA Experiment 20000264 PARAMETER Experiment Name: At_Open_Flower_P Parameter: Plant Line Value: WS
  misc_feature: MA Experiment 20000264 PARAMETER Experiment Name: At_Open_Flower_P Parameter: Tissue Value: Open Flower vs. Whole Plant
  misc_feature: MA Experiment ID: 20000265 Result: Down-regulated in Transcription
  misc_feature: MA Experiment 20000265 PARAMETER Experiment Name: At_Open_Flower_P Parameter: Age (day) Value: 21
  misc_feature: MA Experiment 20000265 PARAMETER Experiment Name: At_Open_Flower_P Parameter: Plant Line Value: WS
  misc_feature: MA Experiment 20000265 PARAMETER Experiment Name: At_Open_Flower_P Parameter: Tissue Value: Closed Flower vs. Whole Plant
  misc_feature: MA Experiment ID: 20000438 Result: Down-regulated in Transcription
  misc_feature: MA Experiment 20000438 PARAMETER Experiment Name: At_Shoots__P Parameter: Age (day) Value: 14
  misc_feature: MA Experiment 20000438 PARAMETER Experiment Name: At_Shoots__P Parameter: Tissue Value: Shoots vs. Whole Plant

SEQ ID NO: 93048 - protein, 497 aa, Arabidopsis thaliana; identical to SEQ ID NO: 89292
  peptide (1)..(497): Ceres Seq. ID no. 12717229
  misc_feature (47)..(196): Pfam Name: No apical meristem (NAM) protein Pfam Description: No apical meristem (NAM) protein
  misc_feature (1)..(497): Homolog of NCBI NO: 15233497 NR Description: putative protein; protein id: At4g29230.1
  misc_feature (14)..(241): Homolog of NCBI NO: 15241889 NR Description: putative protein; protein id: At5g56620.1 thaliana] >gi|10176766|dbj|BAB09880.1|
  misc_feature (278)..(398): Homolog of NCBI NO: 15241889 NR Description: putative protein; protein id: At5g56620.1 thaliana] >gi|10176766|dbj|BAB09880.1|
  misc_feature (50)..(353): Homolog of NCBI NO: 34906416 NR Description: P0710E05.22 [Oryza sativa (japonica
  misc_feature (29)..(261): Homolog of NCBI NO: 15235314 NR Description: similar to NAM protein, putative; protein id:
  misc_feature (29)..(260): Homolog of NCBI NO: 34911014 NR Description: OJ1125_C04.12 [Oryza sativa (japonica
  misc_feature (17)..(220): Homolog of NCBI NO: 21554371 NR Description: NAM protein, putative [Arabidopsis thaliana]
  misc_feature (31)..(220): Homolog of NCBI NO: 18396807 NR Description: NAM protein, putative; protein id: At1g28470.1,
  misc_feature (43)..(220): Homolog of NCBI NO: 6560767 NR Description: F3M18.9 [Arabidopsis thaliana]
  misc_feature (28)..(219): Homolog of NCBI NO: 25518116 NR Description: hypothetical protein F2J7.1 - Arabidopsis >gi|12321499|gb|AAG50802.1|AC079281_4 hypothetical protein

SEQ ID NO: 93049 - protein, 339 aa, Arabidopsis thaliana; identical to SEQ ID NO: 71328
  peptide (1)..(339): Ceres Seq. ID no. 12717230
  misc_feature (1)..(339): Homolog of NCBI NO: 15233497 NR Description: putative protein; protein id: At4g29230.1
  misc_feature (1)..(83): Homolog of NCBI NO: 15241889 NR Description: putative protein; protein id: At5g56620.1 thaliana] >gi|10176766|dbj|BAB09880.1|
  misc_feature (120)..(240): Homolog of NCBI NO: 15241889 NR Description: putative protein; protein id: At5g56620.1 thaliana] >gi|10176766|dbj|BAB09880.1|
  misc_feature (1)..(195): Homolog of NCBI NO: 34906416 NR Description: P0710E05.22 [Oryza sativa (japonica
  misc_feature (1)..(103): Homolog of NCBI NO: 15235314 NR Description: similar to NAM protein, putative; protein id:
  misc_feature (1)..(102): Homolog of NCBI NO: 34911014 NR Description: OJ1125_C04.12 [Oryza sativa (japonica
  misc_feature (1)..(62): Homolog of NCBI NO: 21554371 NR Description: NAM protein, putative [Arabidopsis thaliana]
  misc_feature (1)..(62): Homolog of NCBI NO: 18396807 NR Description: NAM protein, putative; protein id: At1g28470.1,
  misc_feature (1)..(62): Homolog of NCBI NO: 6560767 NR Description: F3M18.9 [Arabidopsis thaliana]
  misc_feature (1)..(61): Homolog of NCBI NO: 25518116 NR Description: hypothetical protein F2J7.1 - Arabidopsis >gi|12321499|gb|AAG50802.1|AC079281_4 hypothetical protein

SEQ ID NO: 93050 - protein, 308 aa, Arabidopsis thaliana; identical to SEQ ID NO: 71329
  peptide (1)..(308): Ceres Seq. ID no. 12717231
  misc_feature (1)..(308): Homolog of NCBI NO: 15233497 NR Description: putative protein; protein id: At4g29230.1
  misc_feature (1)..(52): Homolog of NCBI NO: 15241889 NR Description: putative protein; protein id: At5g56620.1 thaliana] >gi|10176766|dbj|BAB09880.1|
  misc_feature (89)..(209): Homolog of NCBI NO: 15241889 NR Description: putative protein; protein id: At5g56620.1 thaliana] >gi|10176766|dbj|BAB09880.1|
  misc_feature (1)..(164): Homolog of NCBI NO: 34906416 NR Description: P0710E05.22 [Oryza sativa (japonica
  misc_feature (1)..(72): Homolog of NCBI NO: 15235314 NR Description: similar to NAM protein, putative; protein id:
  misc_feature (1)..(71): Homolog of NCBI NO: 34911014 NR Description: OJ1125_C04.12 [Oryza sativa (japonica
  misc_feature (1)..(31): Homolog of NCBI NO: 21554371 NR Description: NAM protein, putative [Arabidopsis thaliana]
  misc_feature (1)..(31): Homolog of NCBI NO: 18396807 NR Description: NAM protein, putative; protein id: At1g28470.1,
  misc_feature (1)..(31): Homolog of NCBI NO: 6560767 NR Description: F3M18.9 [Arabidopsis thaliana]
  misc_feature (1)..(30): Homolog of NCBI NO: 25518116 NR Description: hypothetical protein F2J7.1 - Arabidopsis >gi|12321499|gb|AAG50802.1|AC079281_4 hypothetical protein

SEQ ID NO: 93051 - DNA, 979 bp, Arabidopsis thaliana; identical to SEQ ID NO: 89295
  misc_feature (1)..(979): Ceres Seq. ID no. 12717396
  misc_feature: MA Experiment ID: 108434 Result: Down-regulated in Transcription
  misc_feature: MA Experiment 108434 PARAMETER Experiment Name: At_Root_Tips_cDNA_P Parameter: Tissue Value: Root Tips
  misc_feature: MA Experiment ID: 108462 Result: Down-regulated in Transcription
  misc_feature: MA Experiment 108462 PARAMETER Experiment Name: At_Germinating_Seeds_cDNA_P Parameter: Age (day) Value: 2 vs. 0
  misc_feature: MA Experiment 108462 PARAMETER Experiment Name: At_Germinating_Seeds_cDNA_P Parameter: Tissue Value: Germinating Seeds
  misc_feature: MA Experiment ID: 108464 Result: Down-regulated in Transcription
  misc_feature: MA Experiment 108464 PARAMETER Experiment Name: At_Germinating_Seeds_cDNA_P Parameter: Age (day) Value: 4 vs. 0
  misc_feature: MA Experiment 108464 PARAMETER Experiment Name: At_Germinating_Seeds_cDNA_P Parameter: Tissue Value: Germinating Seeds
  misc_feature: MA Experiment ID: 108574 Result: Down-regulated in Transcription
  misc_feature: MA Experiment 108574 PARAMETER Experiment Name: At_Wounding__cDNA_P Parameter: Timepoint (hr) Value: 1
  misc_feature: MA Experiment 108574 PARAMETER Experiment Name: At_Wounding__cDNA_P Parameter: Tissue Value: Aerial
  misc_feature: MA Experiment 108574 PARAMETER Experiment Name: At_Wounding__cDNA_P Parameter: Treatment Value: Wounding vs. No Wounding
  misc_feature: MA Experiment ID: 108595 Result: Down-regulated in Transcription
  misc_feature: MA Experiment 108595 PARAMETER Experiment Name: At_Ler-pi_Ovule_cDNA_P Parameter: Plant Line Value: null
  misc_feature: MA Experiment ID: 20000069 Result: Up-regulated in Transcription
  misc_feature: MA Experiment 20000069 PARAMETER Experiment Name: At_100uM_ABA_Mutants_cDNA_P Parameter: Plant Line Value: CS23
  misc_feature: MA Experiment 20000069 PARAMETER Experiment Name: At_100uM_ABA_Mutants_cDNA_P Parameter: Timepoint (hr) Value: 6
  misc_feature: MA Experiment 20000069 PARAMETER Experiment Name: At_100uM_ABA_Mutants_cDNA_P Parameter: Tissue Value: Aerial
  misc_feature: MA Experiment 20000069 PARAMETER Experiment Name: At_100uM_ABA_Mutants_cDNA_P Parameter: Treatment Value: 100uM ABA vs. No Treatment
  misc_feature: MA Experiment ID: 20000071 Result: Up-regulated in Transcription
  misc_feature: MA Experiment 20000071 PARAMETER Experiment Name: At_100uM_ABA_Mutants_cDNA_P Parameter: Plant Line Value: CS8104
  misc_feature: MA Experiment 20000071 PARAMETER Experiment Name: At_100uM_ABA_Mutants_cDNA_P Parameter: Timepoint (hr) Value: 6
  misc_feature: MA Experiment 20000071 PARAMETER Experiment Name: At_100uM_ABA_Mutants_cDNA_P Parameter: Tissue Value: Aerial
  misc_feature: MA Experiment 20000071 PARAMETER Experiment Name: At_100uM_ABA_Mutants_cDNA_P Parameter: Treatment Value: 100uM ABA vs. No Treatment
  misc_feature: MA Experiment ID: 20000072 Result: Up-regulated in Transcription
  misc_feature: MA Experiment 20000072 PARAMETER Experiment Name: At_100uM_ABA_Mutants_cDNA_P Parameter: Plant Line Value: CS8105
  misc_feature: MA Experiment 20000072 PARAMETER Experiment Name: At_100uM_ABA_Mutants_cDNA_P Parameter: Timepoint (hr) Value: 6
  misc_feature: MA Experiment 20000072 PARAMETER Experiment Name: At_100uM_ABA_Mutants_cDNA_P Parameter: Tissue Value: Aerial
  misc_feature: MA Experiment 20000072 PARAMETER Experiment Name: At_100uM_ABA_Mutants_cDNA_P Parameter: Treatment Value: 100uM ABA vs. No Treatment
  misc_feature: MA Experiment ID: 20000117 Result: Up-regulated in Transcription
  misc_feature: MA Experiment 20000117 PARAMETER Experiment Name: At_100uM_ABA_Mutants_cDNA_P Parameter: Plant Line Value: Columbia
  misc_feature: MA Experiment 20000117 PARAMETER Experiment Name: At_100uM_ABA_Mutants_cDNA_P Parameter: Timepoint (hr) Value: 6
  misc_feature: MA Experiment 20000117 PARAMETER Experiment Name: At_100uM_ABA_Mutants_cDNA_P Parameter: Tissue Value: Aerial
  misc_feature: MA Experiment 20000117 PARAMETER Experiment Name: At_100uM_ABA_Mutants_cDNA_P Parameter: Treatment Value: 100uM ABA vs. No Treatment
  misc_feature: MA Experiment ID: 20000214 Result: Down-regulated in Transcription
  misc_feature: MA Experiment 20000214 PARAMETER Experiment Name: At_4deg_Cold_P Parameter: Timepoint (hr) Value: 6
  misc_feature: MA Experiment ID: 20000224 Result: Down-regulated in Transcription
  misc_feature: MA Experiment ID: 20000234 Result: Down-regulated in Transcription
  misc_feature: MA Experiment 20000234 PARAMETER Experiment Name: At_Siliques_P Parameter: Age (day) Value: 21
  misc_feature: MA Experiment 20000234 PARAMETER Experiment Name: At_Siliques_P Parameter: Organism Value: A. thaliana
  misc_feature: MA Experiment 20000234 PARAMETER Experiment Name: At_Siliques_P Parameter: Plant Line Value: WS
  misc_feature: MA Experiment 20000234 PARAMETER Experiment Name: At_Siliques_P Parameter: Tissue Value: Less Than 5mm Siliques vs. Whole Plant
  misc_feature: MA Experiment ID: 20000265 Result: Down-regulated in Transcription
  misc_feature: MA Experiment 20000265 PARAMETER Experiment Name: At_Open_Flower_P Parameter: Age (day) Value: 21
  misc_feature: MA Experiment 20000265 PARAMETER Experiment Name: At_Open_Flower_P Parameter: Plant Line Value: WS
  misc_feature: MA Experiment 20000265 PARAMETER Experiment Name: At_Open_Flower_P Parameter: Tissue Value: Closed Flower vs. Whole Plant
  misc_feature: MA Experiment ID: 20000441 Result: Up-regulated in Transcription
  misc_feature: MA Experiment 20000441 PARAMETER Experiment Name: At_1uM_BR-BRZ__P Parameter: Tissue Value: Shoot Apices
  misc_feature: MA Experiment 20000441 PARAMETER Experiment Name: At_1uM_BR-BRZ__P Parameter: Treatment Value: 1uM BR vs. No Treatment
  misc_feature: MA Experiment ID: 20000443 Result: Up-regulated in Transcription
  misc_feature: MA Experiment 20000443 PARAMETER Experiment Name: At_1uM_BR-BRZ__P Parameter: Tissue Value: Shoot Apices
  misc_feature: MA Experiment 20000443 PARAMETER Experiment Name: At_1uM_BR-BRZ__P Parameter: Treatment Value: 1uM BRZ vs. No Treatment
  misc_feature: MA Experiment ID: 20000527 Result: Up-regulated in Transcription
  misc_feature: MA Experiment 20000527 PARAMETER Experiment Name: At_10percent_PEG_P Parameter: Age (day) Value: 20
  misc_feature: MA Experiment 20000527 PARAMETER Experiment Name: At_10percent_PEG_P Parameter: Organism Value: A. thaliana
  misc_feature: MA Experiment 20000527 PARAMETER Experiment Name: At_10percent_PEG_P Parameter: Plant Line Value: WS
  misc_feature: MA Experiment 20000527 PARAMETER Experiment Name: At_10percent_PEG_P Parameter: Timepoint (day) Value: 20
  misc_feature: MA Experiment 20000527 PARAMETER Experiment Name: At_10percent_PEG_P Parameter: Tissue Value: Whole Plant
  misc_feature: MA Experiment 20000527 PARAMETER Experiment Name: At_10percent_PEG_P Parameter: Treatment Value: 10percent PEG vs. No Treatment
  misc_feature: MA Experiment ID: 20001247 Result: Up-regulated in Transcription
  misc_feature: MA Experiment 20001247 PARAMETER Experiment Name: At_Far-red-induction_P Parameter: Age (day) Value: 7
  misc_feature: MA Experiment 20001247 PARAMETER Experiment Name: At_Far-red-induction_P Parameter: Light Value: Far-red vs. White
  misc_feature: MA Experiment 20001247 PARAMETER Experiment Name: At_Far-red-induction_P Parameter: Organism Value: A. thaliana
  misc_feature: MA Experiment 20001247 PARAMETER Experiment Name: At_Far-red-induction_P Parameter: Plant Line Value: Columbia
  misc_feature: MA Experiment 20001247 PARAMETER Experiment Name: At_Far-red-induction_P Parameter: Timepoint (hr) Value: 1
  misc_feature: MA Experiment 20001247 PARAMETER Experiment Name: At_Far-red-induction_P Parameter: Tissue Value: Whole Plant
  misc_feature: MA Experiment ID: 20001248 Result: Up-regulated in Transcription
  misc_feature: MA Experiment 20001248 PARAMETER Experiment Name: At_Far-red-induction_P Parameter: Age (day) Value: 7
  misc_feature: MA Experiment 20001248 PARAMETER Experiment Name: At_Far-red-induction_P Parameter: Light Value: Far-red vs. White
  misc_feature: MA Experiment 20001248 PARAMETER Experiment Name: At_Far-red-induction_P Parameter: Organism Value: A. thaliana
  misc_feature: MA Experiment 20001248 PARAMETER Experiment Name: At_Far-red-induction_P Parameter: Plant Line Value: Columbia
  misc_feature: MA Experiment 20001248 PARAMETER Experiment Name: At_Far-red-induction_P Parameter: Timepoint (hr) Value: 4
  misc_feature: MA Experiment 20001248 PARAMETER Experiment Name: At_Far-red-induction_P Parameter: Tissue Value: Whole Plant
  misc_feature: MA Experiment ID: 20001450 Result: Up-regulated in Transcription
  misc_feature: MA Experiment 20001450 PARAMETER Experiment Name: At_Far-red-induction_P Parameter: Age (day) Value: 7
  misc_feature: MA Experiment 20001450 PARAMETER Experiment Name: At_Far-red-induction_P Parameter: Light Value: Far-red vs. White
  misc_feature: MA Experiment 20001450 PARAMETER Experiment Name: At_Far-red-induction_P Parameter: Organism Value: A. thaliana
  misc_feature: MA Experiment 20001450 PARAMETER Experiment Name: At_Far-red-induction_P Parameter: Plant Line Value: Columbia
  misc_feature: MA Experiment 20001450 PARAMETER Experiment Name: At_Far-red-induction_P Parameter: Timepoint (hr) Value: 8
  misc_feature: MA Experiment 20001450 PARAMETER Experiment Name: At_Far-red-induction_P Parameter: Tissue Value: Whole Plant
  misc_feature: MA Experiment ID: 20001558 Result: Down-regulated in Transcription
  misc_feature: MA Experiment 20001558 PARAMETER Experiment Name: At_Drought_Soil_Dry_P Parameter: Age (day) Value: 27
  misc_feature: MA Experiment 20001558 PARAMETER Experiment Name: At_Drought_Soil_Dry_P Parameter: Organism Value: A. thaliana
  misc_feature: MA Experiment 20001558 PARAMETER Experiment Name: At_Drought_Soil_Dry_P Parameter: Plant Line Value: WS
  misc_feature: MA Experiment 20001558 PARAMETER Experiment Name: At_Drought_Soil_Dry_P Parameter: Post Timepoint (hr) Value: 6
  misc_feature: MA Experiment 20001558 PARAMETER Experiment Name: At_Drought_Soil_Dry_P Parameter: Post-Treatment Value: Re-Water vs. No Drought
  misc_feature: MA Experiment 20001558 PARAMETER Experiment Name: At_Drought_Soil_Dry_P Parameter: Timepoint (day) Value: 13
  misc_feature: MA Experiment 20001558 PARAMETER Experiment Name: At_Drought_Soil_Dry_P Parameter: Treatment Value: Drought vs. No Drought

SEQ ID NO: 93052 - protein, 249 aa, Arabidopsis thaliana; identical to SEQ ID NO: 37218
  peptide (1)..(249): Ceres Seq. ID no. 12717397
  misc_feature (48)..(96): Pfam Name: Zinc finger, C3HC4 type (RING finger) Pfam Description: Zinc finger, C3HC4 type (RING finger)
  misc_feature (1)..(249): Homolog of NCBI NO: 15236326 NR Description: E3 ubiquitin ligase, RMA1; protein id: supported by cDNA: gi_3164221 [Arabidopsis thaliana]
  misc_feature (35)..(249): Homolog of NCBI NO: 22795037 NR Description: putative RING protein [Populus x canescens]
  misc_feature (39)..(169): Homolog of NCBI NO: 15235242 NR Description: putative protein; protein id: At4g28270.1
  misc_feature (181)..(249): Homolog of NCBI NO: 15235242 NR Description: putative protein; protein id: At4g28270.1
  misc_feature (19)..(249): Homolog of NCBI NO: 30687607 NR Description: zinc finger (C3HC4-type RING finger) protein [Arabidopsis thaliana] >gi|27311647|gb|AAO00789.1| putative RING finger protein [Arabidopsis thaliana] >gi|30023720|gb|AAP13393.1|
  misc_feature (19)..(240): Homolog of NCBI NO: 7488309 NR Description: RING zinc finger protein F27G19.70 - Arabidopsis >gi|4972072|emb|CAB43879.1| putative RING zinc finger protein thaliana] >gi|7269601|emb|CAB81397.1| putative RING zinc finger
  misc_feature (46)..(249): Homolog of NCBI NO: 38346627 NR Description: OSJNBa0074L08.21 [Oryza sativa (japonica
  misc_feature (38)..(141): Homolog of NCBI NO: 18394721 NR Description: expressed protein; protein id: At1g19310.1, by cDNA: 1402., supported by cDNA: gi_16323201 [Arabidopsis
  misc_feature (28)..(144): Homolog of NCBI NO: 21912604 NR Description: putative ubiquitin ligase [Taenia solium]
  misc_feature (38)..(247): Homolog of NCBI NO: 15224062 NR Description: putative RING zinc finger protein; protein id: supported by cDNA: 17402. [Arabidopsis thaliana]

SEQ ID NO: 93053 - DNA, 876 bp, Arabidopsis thaliana; identical to SEQ ID NO: 89297
  misc_feature (1)..(876): Ceres Seq. ID no. 12717411
  misc_feature: MA Experiment ID: 20000307 Result: Up-regulated in Transcription
  misc_feature: MA Experiment 20000307 PARAMETER Experiment Name: At_Germinating_Seeds_Sub_P Parameter: Age (hr) Value: 24 vs. 0
  misc_feature: MA Experiment 20000307 PARAMETER Experiment Name: At_Germinating_Seeds_Sub_P Parameter: Organism Value: A. thaliana
  misc_feature: MA Experiment 20000307 PARAMETER Experiment Name: At_Germinating_Seeds_Sub_P Parameter: Plant Line Value: WS
  misc_feature: MA Experiment 20000307 PARAMETER Experiment Name: At_Germinating_Seeds_Sub_P Parameter: Tissue Value: Germinating Seeds
  misc_feature: MA Experiment ID: 20000314 Result: Up-regulated in Transcription
  misc_feature: MA Experiment 20000314 PARAMETER Experiment Name: At_14day_Shoots-Roots_Sub_P Parameter: Age (day) Value: 14
  misc_feature: MA Experiment 20000314 PARAMETER Experiment Name: At_14day_Shoots-Roots_Sub_P Parameter: Organism Value: A. thaliana
  misc_feature: MA Experiment 20000314 PARAMETER Experiment Name: At_14day_Shoots-Roots_Sub_P Parameter: Plant Line Value: WS
  misc_feature: MA Experiment 20000314 PARAMETER Experiment Name: At_14day_Shoots-Roots_Sub_P Parameter: Tissue Value: Roots vs. Whole Plant

SEQ ID NO: 93054 - protein, 291 aa, Arabidopsis thaliana; identical to SEQ ID NO: 89298
  peptide (1)..(291): Ceres Seq. ID no. 12717412
  misc_feature (58)..(254): Pfam Name: Metallo-beta-lactamase superfamily Pfam Description: Metallo-beta-lactamase superfamily
  misc_feature (1)..(274): Homolog of NCBI NO: 15236346 NR Description: putative hydrolase; protein id: At4g03610.1
  misc_feature (6)..(291): Homolog of NCBI NO: 25513552 NR Description: 36.3K hypothetical protein F12P21.8 - Arabidopsis >gi|12320859|gb|AAG50569.1|AC073506_11 hypothetical protein
  misc_feature (6)..(291): Homolog of NCBI NO: 30691663 NR Description: expressed protein [Arabidopsis thaliana]
  misc_feature (6)..(291): Homolog of NCBI NO: 9294602 NR Description: hydrolase-like protein [Arabidopsis thaliana]
  misc_feature (6)..(218): Homolog of NCBI NO: 15231379 NR Description: hydrolase, putative; protein id: At3g13800.1
  misc_feature (231)..(291): Homolog of NCBI NO: 15231379 NR Description: hydrolase, putative; protein id: At3g13800.1
  misc_feature (10)..(284): Homolog of NCBI NO: 19075752 NR Description: putative hydrolase [Schizosaccharomyces pombe]
  misc_feature (238)..(291): Homolog of NCBI NO: 12322123 NR Description: hypothetical protein, 5' partial [Arabidopsis
  misc_feature (52)..(287): Homolog of NCBI NO: 27379625 NR Description: bll4514 [Bradyrhizobium japonicum]
  misc_feature (13)..(289): Homolog of NCBI NO: 22964709 NR Description: hypothetical protein [Rhodopseudomonas palustris]

SEQ ID NO: 93055 - protein, 162 aa, Arabidopsis thaliana; identical to SEQ ID NO: 89299
  peptide (1)..(162): Ceres Seq. ID no. 12717413
  misc_feature (1)..(125): Pfam Name: Metallo-beta-lactamase superfamily Pfam Description: Metallo-beta-lactamase superfamily
  misc_feature (1)..(145): Homolog of NCBI NO: 15236346 NR Description: putative hydrolase; protein id: At4g03610.1
  misc_feature (1)..(162): Homolog of NCBI NO: 25513552 NR Description: 36.3K hypothetical protein F12P21.8 - Arabidopsis >gi|12320859|gb|AAG50569.1|AC073506_11 hypothetical protein
  misc_feature (1)..(162): Homolog of NCBI NO: 30691663 NR Description: expressed protein [Arabidopsis thaliana]
  misc_feature (1)..(162): Homolog of NCBI NO: 9294602 NR Description: hydrolase-like protein [Arabidopsis thaliana]
  misc_feature (1)..(89): Homolog of NCBI NO: 15231379 NR Description: hydrolase, putative; protein id: At3g13800.1
  misc_feature (102)..(162): Homolog of NCBI NO: 15231379 NR Description: hydrolase, putative; protein id: At3g13800.1
  misc_feature (1)..(155): Homolog of NCBI NO: 19075752 NR Description: putative hydrolase [Schizosaccharomyces pombe]
  misc_feature (109)..(162): Homolog of NCBI NO: 12322123 NR Description: hypothetical protein, 5' partial [Arabidopsis
  misc_feature (1)..(158): Homolog of NCBI NO: 27379625 NR Description: bll4514 [Bradyrhizobium japonicum]
  misc_feature (1)..(160): Homolog of NCBI NO: 22964709 NR Description: hypothetical protein [Rhodopseudomonas palustris]

SEQ ID NO: 93056 - DNA, 1533 bp, Arabidopsis thaliana; identical to SEQ ID NO: 89300
  misc_feature (1)..(1533): Ceres Seq. ID no. 12717542
  misc_feature: MA Experiment ID: 20000355 Result: Up-regulated in Transcription
  misc_feature: MA Experiment 20000355 PARAMETER Experiment Name: At_Siliques_Sub_P Parameter: Age (day) Value: 21
  misc_feature: MA Experiment 20000355 PARAMETER Experiment Name: At_Siliques_Sub_P Parameter: Organism Value: A. thaliana
  misc_feature: MA Experiment 20000355 PARAMETER Experiment Name: At_Siliques_Sub_P Parameter: Plant Line Value: WS
  misc_feature: MA Experiment 20000355 PARAMETER Experiment Name: At_Siliques_Sub_P Parameter: Tissue Value: Less Than 5mm Siliques vs. Whole Plant

SEQ ID NO: 93057 - protein, 510 aa, Arabidopsis thaliana; identical to SEQ ID NO: 89301
  peptide (1)..(510): Ceres Seq. ID no. 12717543
  misc_feature (201)..(496): Pfam Name: Pectinesterase Pfam Description: Pectinesterase
  misc_feature (1)..(510): Homolog of NCBI NO: 22328305 NR Description: pectin methylesterase, putative; protein id:
  misc_feature (1)..(510): Homolog of NCBI NO: 7447391 NR Description: probable pectinesterase (EC 3.1.1.11) - thaliana >gi|3319371|gb|AAC28220.1| Similar to pectinesterase; [Arabidopsis thaliana] >gi|7267148|emb|CAB80816.1| putative
  misc_feature (1)..(510): Homolog of NCBI NO: 28393148 NR Description: putative pectin methylesterase [Arabidopsis >gi|28827352|gb|AAO50520.1| putative pectin methylesterase
  misc_feature (1)..(285): Homolog of NCBI NO: 6554192 NR Description: T23J18.25 [Arabidopsis thaliana]
  misc_feature (283)..(510): Homolog of NCBI NO: 6554192 NR Description: T23J18.25 [Arabidopsis thaliana]
  misc_feature (1)..(510): Homolog of NCBI NO: 30682309 NR Description: pectin methylesterase, putative [Arabidopsis
  misc_feature (46)..(510): Homolog of NCBI NO: 15232875 NR Description: pectinesterase family; protein id: At3g27980.1
  misc_feature (13)..(510): Homolog of NCBI NO: 14334992 NR Description: At1g11580/T23J18_33 [Arabidopsis thaliana]
  misc_feature (13)..(510): Homolog of NCBI NO: 15220424 NR Description: pectin methylesterase, putative; protein id:
  misc_feature (13)..(510): Homolog of NCBI NO: 6174913 NR Description: Pectinesterase 1 precursor (Pectin methylesterase

SEQ ID NO: 93058 - protein, 458 aa, Arabidopsis thaliana; identical to SEQ ID NO: 89302
  peptide (1)..(458): Ceres Seq. ID no. 12717544
  misc_feature (149)..(444): Pfam Name: Pectinesterase Pfam Description: Pectinesterase
  misc_feature (1)..(458): Homolog of NCBI NO: 22328305 NR Description: pectin methylesterase, putative; protein id:
  misc_feature (1)..(458): Homolog of NCBI NO: 7447391 NR Description: probable pectinesterase (EC 3.1.1.11) - thaliana >gi|3319371|gb|AAC28220.1| Similar to pectinesterase; [Arabidopsis thaliana] >gi|7267148|emb|CAB80816.1| putative
  misc_feature (1)..(458): Homolog of NCBI NO: 28393148 NR Description: putative pectin methylesterase [Arabidopsis >gi|28827352|gb|AAO50520.1| putative pectin methylesterase
  misc_feature (1)..(233): Homolog of NCBI NO: 6554192 NR Description: T23J18.25 [Arabidopsis thaliana]
  misc_feature (231)..(458): Homolog of NCBI NO: 6554192 NR Description: T23J18.25 [Arabidopsis thaliana]
  misc_feature (1)..(458): Homolog of NCBI NO: 30682309 NR Description: pectin methylesterase, putative [Arabidopsis
  misc_feature (1)..(458): Homolog of NCBI NO: 15232875 NR Description: pectinesterase family; protein id: At3g27980.1
  misc_feature (1)..(458): Homolog of NCBI NO: 14334992 NR Description: At1g11580/T23J18_33 [Arabidopsis thaliana]
  misc_feature (1)..(458): Homolog of NCBI NO: 15220424 NR Description: pectin methylesterase, putative; protein id:
  misc_feature (1)..(458): Homolog of NCBI NO: 6174913 NR Description: Pectinesterase 1 precursor (Pectin methylesterase

SEQ ID NO: 93059 - protein, 456 aa, Arabidopsis thaliana; identical to SEQ ID NO: 89303
  peptide (1)..(456): Ceres Seq. ID no. 12717545
  misc_feature (147)..(442): Pfam Name: Pectinesterase Pfam Description: Pectinesterase
  misc_feature (1)..(456): Homolog of NCBI NO: 22328305 NR Description: pectin methylesterase, putative; protein id:
  misc_feature (1)..(456): Homolog of NCBI NO: 7447391 NR Description: probable pectinesterase (EC 3.1.1.11) - thaliana >gi|3319371|gb|AAC28220.1| Similar to pectinesterase; [Arabidopsis thaliana] >gi|7267148|emb|CAB80816.1| putative
  misc_feature (1)..(456): Homolog of NCBI NO: 28393148 NR Description: putative pectin methylesterase [Arabidopsis >gi|28827352|gb|AAO50520.1| putative pectin methylesterase
  misc_feature (1)..(231): Homolog of NCBI NO: 6554192 NR Description: T23J18.25 [Arabidopsis thaliana]
  misc_feature (229)..(456): Homolog of NCBI NO: 6554192 NR Description: T23J18.25 [Arabidopsis thaliana]
  misc_feature (1)..(456): Homolog of NCBI NO: 30682309 NR Description: pectin methylesterase, putative [Arabidopsis
  misc_feature (1)..(456): Homolog of NCBI NO: 15232875 NR Description: pectinesterase family; protein id: At3g27980.1
  misc_feature (1)..(456): Homolog of NCBI NO: 14334992 NR Description: At1g11580/T23J18_33 [Arabidopsis thaliana]
  misc_feature (1)..(456): Homolog of NCBI NO: 15220424 NR Description: pectin methylesterase, putative; protein id:
  misc_feature (1)..(456): Homolog of NCBI NO: 6174913 NR Description: Pectinesterase 1 precursor (Pectin methylesterase

SEQ ID NO: 93060 - DNA, 3426 bp, Arabidopsis thaliana; identical to SEQ ID NO: 89304
  misc_feature (1)..(3426): Ceres Seq. ID no. 12717577
  misc_feature: MA Experiment ID: 20000184 Result: Up-regulated in Transcription
  misc_feature: MA Experiment 20000184 PARAMETER Experiment Name: At_Shoots__P Parameter: Age (day) Value: 7
  misc_feature: MA Experiment 20000184 PARAMETER Experiment Name: At_Shoots__P Parameter: Tissue Value: Shoots vs. Whole Plant

SEQ ID NO: 93061 - protein, 1141 aa, Arabidopsis thaliana; identical to SEQ ID NO: 89305
  peptide (1)..(1141): Ceres Seq. ID no. 12717578
  misc_feature (273)..(497): Pfam Name: Endonuclease/Exonuclease/phosphatase family Pfam Description: Endonuclease/Exonuclease/phosphatase family
  misc_feature (1)..(255): Homolog of NCBI NO: 15226504 NR Description: putative non-LTR retroelement reverse protein id: At2g15380.1 [Arabidopsis thaliana]
  misc_feature (468)..(713): Homolog of NCBI NO: 15226504 NR Description: putative non-LTR retroelement reverse protein id: At2g15380.1 [Arabidopsis thaliana]
  misc_feature (1007)..(1081): Homolog of NCBI NO: 15226504 NR Description: putative non-LTR retroelement reverse protein id: At2g15380.1 [Arabidopsis thaliana]
  misc_feature (802)..(870): Homolog of NCBI NO: 15226504 NR Description: putative non-LTR retroelement reverse protein id: At2g15380.1 [Arabidopsis thaliana]
  misc_feature (876)..(931): Homolog of NCBI NO: 15226504 NR Description: putative non-LTR retroelement reverse protein id: At2g15380.1 [Arabidopsis thaliana]
  misc_feature (383)..(863): Homolog of NCBI NO: 7485606 NR Description: hypothetical protein F17A8.60 - Arabidopsis
  misc_feature (848)..(1030): Homolog of NCBI NO: 7485606 NR Description: hypothetical protein F17A8.60 - Arabidopsis
  misc_feature (1021)..(1081): Homolog of NCBI NO: 7485606 NR Description: hypothetical protein F17A8.60 - Arabidopsis
  misc_feature (304)..(361): Homolog of NCBI NO: 7485606 NR Description: hypothetical protein F17A8.60 - Arabidopsis
  misc_feature (390)..(863): Homolog of NCBI NO: 15234025 NR Description: RNA-directed DNA polymerase -like protein;

SEQ ID NO: 93062 - protein, 1127 aa, Arabidopsis thaliana; identical to SEQ ID NO: 89306
  peptide (1)..(1127): Ceres Seq. ID no. 12717579
  misc_feature (259)..(483): Pfam Name: Endonuclease/Exonuclease/phosphatase family Pfam Description: Endonuclease/Exonuclease/phosphatase family
  misc_feature (1)..(241): Homolog of NCBI NO: 15226504 NR Description: putative non-LTR retroelement reverse protein id: At2g15380.1 [Arabidopsis thaliana]
  misc_feature (454)..(699): Homolog of NCBI NO: 15226504 NR Description: putative non-LTR retroelement reverse protein id: At2g15380.1 [Arabidopsis thaliana]
  misc_feature (993)..(1067): Homolog of NCBI NO: 15226504 NR Description: putative non-LTR retroelement reverse protein id: At2g15380.1 [Arabidopsis thaliana]
  misc_feature (788)..(856): Homolog of NCBI NO: 15226504 NR Description: putative non-LTR retroelement reverse protein id: At2g15380.1 [Arabidopsis thaliana]
  misc_feature (862)..(917): Homolog of NCBI NO: 15226504 NR Description: putative non-LTR retroelement reverse protein id: At2g15380.1 [Arabidopsis thaliana]
  misc_feature (369)..(849): Homolog of NCBI NO: 7485606 NR Description: hypothetical protein F17A8.60 - Arabidopsis
  misc_feature (834)..(1016): Homolog of NCBI NO: 7485606 NR Description: hypothetical protein F17A8.60 - Arabidopsis
  misc_feature (1007)..(1067): Homolog of NCBI NO: 7485606 NR Description: hypothetical protein F17A8.60 - Arabidopsis
  misc_feature (290)..(347): Homolog of NCBI NO: 7485606 NR Description: hypothetical protein F17A8.60 - Arabidopsis
  misc_feature (376)..(849): Homolog of NCBI NO: 15234025 NR Description: RNA-directed DNA polymerase -like protein;

SEQ ID NO: 93063 - protein, 1078 aa, Arabidopsis thaliana; identical to SEQ ID NO: 89307
  peptide (1)..(1078): Ceres Seq. ID no. 12717580
  misc_feature (210)..(434): Pfam Name: Endonuclease/Exonuclease/phosphatase family Pfam Description: Endonuclease/Exonuclease/phosphatase family
  misc_feature (1)..(192): Homolog of NCBI NO: 15226504 NR Description: putative non-LTR retroelement reverse protein id: At2g15380.1 [Arabidopsis thaliana]
  misc_feature (405)..(650): Homolog of NCBI NO: 15226504 NR Description: putative non-LTR retroelement reverse protein id: At2g15380.1 [Arabidopsis thaliana]
  misc_feature (944)..(1018): Homolog of NCBI NO: 15226504 NR Description: putative non-LTR retroelement reverse protein id: At2g15380.1 [Arabidopsis thaliana]
  misc_feature (739)..(807): Homolog of NCBI NO: 15226504 NR Description: putative non-LTR retroelement reverse protein id: At2g15380.1 [Arabidopsis thaliana]
  misc_feature (813)..(868): Homolog of NCBI NO: 15226504 NR Description: putative non-LTR retroelement reverse protein id: At2g15380.1 [Arabidopsis thaliana]
  misc_feature (320)..(800): Homolog of NCBI NO: 7485606 NR Description: hypothetical protein F17A8.60 - Arabidopsis
  misc_feature (785)..(967): Homolog of NCBI NO: 7485606 NR Description: hypothetical protein F17A8.60 - Arabidopsis
  misc_feature (958)..(1018): Homolog of NCBI NO: 7485606 NR Description: hypothetical protein F17A8.60 - Arabidopsis
  misc_feature (241)..(298): Homolog of NCBI NO: 7485606 NR Description: hypothetical protein F17A8.60 - Arabidopsis
  misc_feature (327)..(800): Homolog of NCBI NO: 15234025 NR Description: RNA-directed DNA polymerase -like protein;

SEQ ID NO: 93064 - DNA, 2607 bp, Arabidopsis thaliana; identical to SEQ ID NO: 89308
  misc_feature (1)..(2607): Ceres Seq. ID no. 12717677
  misc_feature: MA Experiment ID: 20000315 Result: Down-regulated in Transcription
  misc_feature: MA Experiment 20000315 PARAMETER Experiment Name: At_14day_Shoots-Roots_Sub_P Parameter: Age (day) Value: 14
  misc_feature: MA Experiment 20000315 PARAMETER Experiment Name: At_14day_Shoots-Roots_Sub_P Parameter: Organism Value: A. thaliana
  misc_feature: MA Experiment 20000315 PARAMETER Experiment Name: At_14day_Shoots-Roots_Sub_P Parameter: Plant Line Value: WS
  misc_feature: MA Experiment 20000315 PARAMETER Experiment Name: At_14day_Shoots-Roots_Sub_P Parameter: Tissue Value: Shoots vs. Whole Plant
  misc_feature: MA Experiment ID: 20000327 Result: Down-regulated in Transcription
  misc_feature: MA Experiment 20000327 PARAMETER Experiment Name: At_42deg_Heat_Sub_P Parameter: Age (day) Value: 14
  misc_feature: MA Experiment 20000327 PARAMETER Experiment Name: At_42deg_Heat_Sub_P Parameter: Organism Value: A. thaliana
  misc_feature: MA Experiment 20000327 PARAMETER Experiment Name: At_42deg_Heat_Sub_P Parameter: Plant Line Value: WS
  misc_feature: MA Experiment 20000327 PARAMETER Experiment Name: At_42deg_Heat_Sub_P Parameter: Temperature (deg C) Value: 42 vs. 22
  misc_feature: MA Experiment 20000327 PARAMETER Experiment Name: At_42deg_Heat_Sub_P Parameter: Timepoint (hr) Value: 1
  misc_feature: MA Experiment 20000327 PARAMETER Experiment Name: At_42deg_Heat_Sub_P Parameter: Tissue Value: Aerial
  misc_feature: MA Experiment ID: 20000328 Result: Down-regulated in Transcription
  misc_feature: MA Experiment 20000328 PARAMETER Experiment Name: At_42deg_Heat_Sub_P Parameter: Age (day) Value: 14
  misc_feature: MA Experiment 20000328 PARAMETER Experiment Name: At_42deg_Heat_Sub_P Parameter: Organism Value: A. thaliana
  misc_feature: MA Experiment 20000328 PARAMETER Experiment Name: At_42deg_Heat_Sub_P Parameter: Plant Line Value: WS
  misc_feature: MA Experiment 20000328 PARAMETER Experiment Name: At_42deg_Heat_Sub_P Parameter: Temperature (deg C) Value: 42 vs. 22
  misc_feature: MA Experiment 20000328 PARAMETER Experiment Name: At_42deg_Heat_Sub_P Parameter: Timepoint (hr) Value: 6
  misc_feature: MA Experiment 20000328 PARAMETER Experiment Name: At_42deg_Heat_Sub_P Parameter: Tissue Value: Aerial
  misc_feature: MA Experiment ID: 20000440 Result: Up-regulated in Transcription
  misc_feature: MA Experiment 20000440 PARAMETER Experiment Name: At_Closed-Flower__Sub_P Parameter: Tissue Value: Closed Flower vs. Whole Plant

SEQ ID NO: 93065 - protein, 868 aa, Arabidopsis thaliana; identical to SEQ ID NO: 89309
  peptide (1)..(868): Ceres Seq. ID no. 12717678
  misc_feature (763)..(868): Pfam Name: Protein of unknown function (DUF1068) Pfam Description: Protein of unknown function (DUF1068)
  misc_feature (14)..(726): Homolog of NCBI NO: 34897084 NR Description: hypothetical protein [Oryza sativa (japonica group)] >gi|12957718|gb|AAK09236.1| hypothetical protein [Oryza
  misc_feature (1)..(718): Homolog of NCBI NO: 15228590 NR Description: hypothetical protein; protein id: At3g03580.1 thaliana] >gi|6091764|gb|AAF03474.1|AC009327_13 hypothetical [Arabidopsis thaliana] >gi|28393735|gb|AAO42278.1| unknown
  misc_feature (18)..(726): Homolog of NCBI NO: 15236324 NR Description: putative protein; protein id: At4g13650.1
  misc_feature (5)..(707): Homolog of NCBI NO: 15218216 NR Description: hypothetical protein; protein id: At1g15510.1
  misc_feature (9)..(734): Homolog of NCBI NO: 15233590 NR Description: putative protein; protein id: At4g21300.1
  misc_feature (8)..(691): Homolog of NCBI NO: 15221304 NR Description: hypothetical protein; protein id: At1g74600.1
  misc_feature (40)..(709): Homolog of NCBI NO: 15220337 NR Description: hypothetical protein; protein id: At1g11290.1
  misc_feature (14)..(726): Homolog of NCBI NO: 34903762 NR Description: unnamed protein product [Oryza sativa (japonica group)] >gi|7340873|dbj|BAA92963.1| unnamed protein product
  misc_feature (47)..(700): Homolog of NCBI NO: 18409250 NR Description: PPR-repeat protein, putative; protein id: [Arabidopsis thaliana] >gi|12325094|gb|AAG52503.1|AC018364_21
  misc_feature (14)..(695): Homolog of NCBI NO: 38567725 NR Description: B1358B12.23 [Oryza sativa (japonica

SEQ ID NO: 93066 - protein, 832 aa, Arabidopsis thaliana; identical to SEQ ID NO: 89310
  peptide (1)..(832): Ceres Seq. ID no. 12717679
  misc_feature (727)..(832): Pfam Name: Protein of unknown function (DUF1068) Pfam Description: Protein of unknown function (DUF1068)
  misc_feature (1)..(690): Homolog of NCBI NO: 34897084 NR Description: hypothetical protein [Oryza sativa (japonica group)] >gi|12957718|gb|AAK09236.1| hypothetical protein [Oryza
  misc_feature (1)..(682): Homolog of NCBI NO: 15228590 NR Description: hypothetical protein; protein id: At3g03580.1 thaliana] >gi|6091764|gb|AAF03474.1|AC009327_13 hypothetical [Arabidopsis thaliana] >gi|28393735|gb|AAO42278.1| unknown
  misc_feature (1)..(690): Homolog of NCBI NO: 15236324 NR Description: putative protein; protein id: At4g13650.1
  misc_feature (1)..(671): Homolog of NCBI NO: 15218216 NR Description: hypothetical protein; protein id: At1g15510.1
  misc_feature (1)..(698): Homolog of NCBI NO: 15233590 NR Description: putative protein; protein id: At4g21300.1
  misc_feature (1)..(655): Homolog of NCBI NO: 15221304 NR Description: hypothetical protein; protein id: At1g74600.1
  misc_feature (4)..(673): Homolog of NCBI NO: 15220337 NR Description: hypothetical protein; protein id: At1g11290.1
  misc_feature (1)..(690): Homolog of NCBI NO: 34903762 NR Description: unnamed protein product [Oryza sativa (japonica group)] >gi|7340873|dbj|BAA92963.1| unnamed protein product
  misc_feature (11)..(664): Homolog of NCBI NO: 18409250 NR Description: PPR-repeat protein, putative; protein id: [Arabidopsis thaliana] >gi|12325094|gb|AAG52503.1|AC018364_21
  misc_feature (1)..(659): Homolog of NCBI NO: 38567725 NR Description: B1358B12.23 [Oryza sativa (japonica

SEQ ID NO: 93067 - protein, 762 aa, Arabidopsis thaliana; identical to SEQ ID NO: 89311
  peptide (1)..(762): Ceres Seq. ID no. 12717680
  misc_feature (657)..(762): Pfam Name: Protein of unknown function (DUF1068) Pfam Description: Protein of unknown function (DUF1068)
  misc_feature (1)..(620): Homolog of NCBI NO: 34897084 NR Description: hypothetical protein [Oryza sativa (japonica group)] >gi|12957718|gb|AAK09236.1| hypothetical protein [Oryza
  misc_feature (1)..(612): Homolog of NCBI NO: 15228590 NR Description: hypothetical protein; protein id: At3g03580.1 thaliana] >gi|6091764|gb|AAF03474.1|AC009327_13 hypothetical [Arabidopsis thaliana] >gi|28393735|gb|AAO42278.1| unknown
  misc_feature (1)..(620): Homolog of NCBI NO: 15236324 NR Description: putative protein; protein id: At4g13650.1
  misc_feature (1)..(601): Homolog of NCBI NO: 15218216 NR Description: hypothetical protein; protein id: At1g15510.1
  misc_feature (1)..(628): Homolog of NCBI NO: 15233590 NR Description: putative protein; protein id: At4g21300.1
  misc_feature (1)..(585): Homolog of NCBI NO: 15221304 NR Description: hypothetical protein; protein id: At1g74600.1
  misc_feature (1)..(603): Homolog of NCBI NO: 15220337 NR Description: hypothetical protein; protein id: At1g11290.1
  misc_feature (1)..(620): Homolog of NCBI NO: 34903762 NR Description: unnamed protein product [Oryza sativa (japonica group)] >gi|7340873|dbj|BAA92963.1| unnamed protein product
  misc_feature (1)..(594): Homolog of NCBI NO: 18409250 NR Description: PPR-repeat protein, putative; protein id: [Arabidopsis thaliana] >gi|12325094|gb|AAG52503.1|AC018364_21
  misc_feature (1)..(589): Homolog of NCBI NO: 38567725 NR Description: B1358B12.23 [Oryza sativa (japonica

SEQ ID NO: 93068 - DNA, 801 bp, Arabidopsis thaliana; identical to SEQ ID NO: 89312
  misc_feature (1)..(801): Ceres Seq. ID no. 12717834
  misc_feature: MA Experiment ID: 20000264 Result: Down-regulated in Transcription
  misc_feature: MA Experiment 20000264 PARAMETER Experiment Name: At_Open_Flower_P Parameter: Age (day) Value: 21
  misc_feature: MA Experiment 20000264 PARAMETER Experiment Name: At_Open_Flower_P Parameter: Plant Line Value: WS
  misc_feature: MA Experiment 20000264 PARAMETER Experiment Name: At_Open_Flower_P Parameter: Tissue Value: Open Flower vs. Whole Plant
  misc_feature: MA Experiment ID: 20000286 Result: Down-regulated in Transcription
  misc_feature: MA Experiment 20000286 PARAMETER Experiment Name: At_Open_Flower_P Parameter: Age (day) Value: 21
  misc_feature: MA Experiment 20000286 PARAMETER Experiment Name: At_Open_Flower_P Parameter: Plant Line Value: WS
  misc_feature: MA Experiment 20000286 PARAMETER Experiment Name: At_Open_Flower_P Parameter: Tissue Value: Half Open vs. Whole Plant

SEQ ID NO: 93069 - protein, 266 aa, Arabidopsis thaliana; identical to SEQ ID NO: 89313
  peptide (1)..(266): Ceres Seq. ID no. 12717835
  misc_feature (62)..(156): Pfam Name: TCP family transcription factor Pfam Description: TCP family transcription factor
  misc_feature (1)..(156): Homolog of NCBI NO: 15232059 NR Description: unknown protein; protein id: At3g27010.1 thaliana] >gi|9279624|dbj|BAB01082.1| gene_id:MOJ10.8~unknown [Arabidopsis thaliana] >gi|11595501|emb|CAC18326.1| putative
  misc_feature (155)..(266): Homolog of NCBI NO: 15232059 NR Description: unknown protein; protein id: At3g27010.1 thaliana] >gi|9279624|dbj|BAB01082.1| gene_id:MOJ10.8~unknown [Arabidopsis thaliana] >gi|11595501|emb|CAC18326.1| putative
  misc_feature (1)..(261): Homolog of NCBI NO: 15237545 NR Description: putative protein; protein id: At5g41030.1 thaliana] >gi|9759149|dbj|BAB09705.1|
  misc_feature (44)..(141): Homolog of NCBI NO: 18409345 NR Description: expressed protein; protein id: At1g69690.1, by cDNA: gi_15912212, supported by cDNA: gi_19547990 [Arabidopsis
  misc_feature (73)..(256): Homolog of NCBI NO: 5731257 NR Description: auxin-induced basic helix-loop-helix
  misc_feature (74)..(265): Homolog of NCBI NO: 11357581 NR Description: hypothetical protein F1P2.170 - Arabidopsis >gi|6522545|emb|CAB61988.1| putative protein [Arabidopsis
  misc_feature (74)..(265): Homolog of NCBI NO: 22331641 NR Description: putative protein; protein id: At3g47620.1, by cDNA: gi_16604510 [Arabidopsis thaliana] AT3g47620/F1P2_170 [Arabidopsis thaliana]
  misc_feature (72)..(155): Homolog of NCBI NO: 20975251 NR Description: transcription factor PCF3 [Oryza sativa (japonica
  misc_feature (63)..(196): Homolog of NCBI NO: 15241596 NR Description: putative protein; protein id: At5g08330.1, by cDNA: gi_15724267, supported by cDNA: gi_18252260 [Arabidopsis >gi|10178275|emb|CAC08333.1| putative protein [Arabidopsis
  misc_feature (74)..(201): Homolog of NCBI NO: 15217857 NR Description: auxin-induced basic helix-loop-helix factor, putative; protein id: At1g58100.1, supported by cDNA:

SEQ ID NO: 93070 - protein, 173 aa, Arabidopsis thaliana; identical to SEQ ID NO: 89314
  peptide (1)..(173): Ceres Seq. ID no. 12717836
  misc_feature (1)..(63): Pfam Name: TCP family transcription factor Pfam Description: TCP family transcription factor
  misc_feature (1)..(63): Homolog of NCBI NO: 15232059 NR Description: unknown protein; protein id: At3g27010.1 thaliana] >gi|9279624|dbj|BAB01082.1| gene_id:MOJ10.8~unknown [Arabidopsis thaliana] >gi|11595501|emb|CAC18326.1| putative
  misc_feature (62)..(173): Homolog of NCBI NO: 15232059 NR Description: unknown protein; protein id: At3g27010.1 thaliana] >gi|9279624|dbj|BAB01082.1| gene_id:MOJ10.8~unknown [Arabidopsis thaliana] >gi|11595501|emb|CAC18326.1| putative
  misc_feature (1)..(168): Homolog of NCBI NO: 15237545 NR Description: putative protein; protein id: At5g41030.1 thaliana] >gi|9759149|dbj|BAB09705.1|
  misc_feature (1)..(48): Homolog of NCBI NO: 18409345 NR Description: expressed protein; protein id: At1g69690.1, by cDNA: gi_15912212, supported by cDNA: gi_19547990 [Arabidopsis
  misc_feature (1)..(163): Homolog of NCBI NO: 5731257 NR Description: auxin-induced basic helix-loop-helix
  misc_feature (1)..(172): Homolog of NCBI NO: 11357581 NR Description: hypothetical protein F1P2.170 - Arabidopsis >gi|6522545|emb|CAB61988.1| putative protein [Arabidopsis
  misc_feature (1)..(172): Homolog of NCBI NO: 22331641 NR Description: putative protein; protein id: At3g47620.1, by cDNA: gi_16604510 [Arabidopsis thaliana] AT3g47620/F1P2_170 [Arabidopsis thaliana]
  misc_feature (1)..(62): Homolog of NCBI NO: 20975251 NR Description: transcription factor PCF3 [Oryza sativa (japonica
  misc_feature (1)..(103): Homolog of NCBI NO: 15241596 NR Description: putative protein; protein id: At5g08330.1, by cDNA: gi_15724267, supported by cDNA: gi_18252260 [Arabidopsis >gi|10178275|emb|CAC08333.1| putative protein [Arabidopsis
  misc_feature (1)..(108): Homolog of NCBI NO: 15217857 NR Description: auxin-induced basic helix-loop-helix factor, putative; protein id: At1g58100.1, supported by cDNA:

SEQ ID NO: 93071 - DNA, 702 bp, Arabidopsis thaliana; identical to SEQ ID NO: 89315
  misc_feature (1)..(702): Ceres Seq. ID no. 12717867
  misc_feature: MA Experiment ID: 20000307 Result: Up-regulated in Transcription
  misc_feature: MA Experiment 20000307 PARAMETER Experiment Name: At_Germinating_Seeds_Sub_P Parameter: Age (hr) Value: 24 vs. 0
  misc_feature: MA Experiment 20000307 PARAMETER Experiment Name: At_Germinating_Seeds_Sub_P Parameter: Organism Value: A. thaliana
  misc_feature: MA Experiment 20000307 PARAMETER Experiment Name: At_Germinating_Seeds_Sub_P Parameter: Plant Line Value: WS
  misc_feature: MA Experiment 20000307 PARAMETER Experiment Name: At_Germinating_Seeds_Sub_P Parameter: Tissue Value: Germinating Seeds
  misc_feature: MA Experiment ID: 20000314 Result: Down-regulated in Transcription
  misc_feature: MA Experiment 20000314 PARAMETER Experiment Name: At_14day_Shoots-Roots_Sub_P Parameter: Age (day) Value: 14
  misc_feature: MA Experiment 20000314 PARAMETER Experiment Name: At_14day_Shoots-Roots_Sub_P Parameter: Organism Value: A. thaliana
  misc_feature: MA Experiment 20000314 PARAMETER Experiment Name: At_14day_Shoots-Roots_Sub_P Parameter: Plant Line Value: WS
  misc_feature: MA Experiment 20000314 PARAMETER Experiment Name: At_14day_Shoots-Roots_Sub_P Parameter: Tissue Value: Roots vs. Whole Plant
  misc_feature: MA Experiment ID: 20000315 Result: Down-regulated in Transcription
  misc_feature: MA Experiment 20000315 PARAMETER Experiment Name: At_14day_Shoots-Roots_Sub_P Parameter: Age (day) Value: 14
  misc_feature: MA Experiment 20000315 PARAMETER Experiment Name: At_14day_Shoots-Roots_Sub_P Parameter: Organism Value: A. thaliana
  misc_feature: MA Experiment 20000315 PARAMETER Experiment Name: At_14day_Shoots-Roots_Sub_P Parameter: Plant Line Value: WS
  misc_feature: MA Experiment 20000315 PARAMETER Experiment Name: At_14day_Shoots-Roots_Sub_P Parameter: Tissue Value: Shoots vs. Whole Plant
  misc_feature: MA Experiment ID: 20000327 Result: Down-regulated in Transcription
  misc_feature: MA Experiment 20000327 PARAMETER Experiment Name: At_42deg_Heat_Sub_P Parameter: Age (day) Value: 14
  misc_feature: MA Experiment 20000327 PARAMETER Experiment Name: At_42deg_Heat_Sub_P Parameter: Organism Value: A. thaliana
  misc_feature: MA Experiment 20000327 PARAMETER Experiment Name: At_42deg_Heat_Sub_P Parameter: Plant Line Value: WS
  misc_feature: MA Experiment 20000327 PARAMETER Experiment Name: At_42deg_Heat_Sub_P Parameter: Temperature (deg C) Value: 42 vs. 22
  misc_feature: MA Experiment 20000327 PARAMETER Experiment Name: At_42deg_Heat_Sub_P Parameter: Timepoint (hr) Value: 1
  misc_feature: MA Experiment 20000327 PARAMETER Experiment Name: At_42deg_Heat_Sub_P Parameter: Tissue Value: Aerial
  misc_feature: MA Experiment ID: 20000346 Result: Up-regulated in Transcription
  misc_feature: MA Experiment 20000346 PARAMETER Experiment Name: At_2mM_SA_Sub_P Parameter: Age (day) Value: 14
  misc_feature: MA Experiment 20000346 PARAMETER Experiment Name: At_2mM_SA_Sub_P Parameter: Organism Value: A. thaliana
  misc_feature: MA Experiment 20000346 PARAMETER Experiment Name: At_2mM_SA_Sub_P Parameter: Plant Line Value: WS
  misc_feature: MA Experiment 20000346 PARAMETER Experiment Name: At_2mM_SA_Sub_P Parameter: Timepoint (hr) Value: 1
  misc_feature: MA Experiment 20000346 PARAMETER Experiment Name: At_2mM_SA_Sub_P Parameter: Tissue Value: Aerial
  misc_feature: MA Experiment 20000346 PARAMETER Experiment Name: At_2mM_SA_Sub_P Parameter: Treatment Value: 2mM SA vs. No Treatment
  misc_feature: MA Experiment ID: 20000352 Result: Up-regulated in Transcription
  misc_feature: MA Experiment 20000352 PARAMETER Experiment Name: At_Drought_Sub_P Parameter: Age (day) Value: 7
  misc_feature: MA Experiment 20000352 PARAMETER Experiment Name: At_Drought_Sub_P Parameter: Organism Value: A. thaliana
  misc_feature: MA Experiment 20000352 PARAMETER Experiment Name: At_Drought_Sub_P Parameter: Plant Line Value: WS
  misc_feature: MA Experiment 20000352 PARAMETER Experiment Name: At_Drought_Sub_P Parameter: Timepoint (hr) Value: 6
  misc_feature: MA Experiment 20000352 PARAMETER Experiment Name: At_Drought_Sub_P Parameter: Tissue Value: Whole Plant
  misc_feature: MA Experiment 20000352 PARAMETER Experiment Name: At_Drought_Sub_P Parameter: Treatment Value: Drought vs. No Drought
  misc_feature: MA Experiment ID: 20000355 Result: Down-regulated in Transcription
  misc_feature: MA Experiment 20000355 PARAMETER Experiment Name: At_Siliques_Sub_P Parameter: Age (day) Value: 21
  misc_feature: MA Experiment 20000355 PARAMETER Experiment Name: At_Siliques_Sub_P Parameter: Organism Value: A. thaliana
  misc_feature: MA Experiment 20000355 PARAMETER Experiment Name: At_Siliques_Sub_P Parameter: Plant Line Value: WS
  misc_feature: MA Experiment 20000355 PARAMETER Experiment Name: At_Siliques_Sub_P Parameter: Tissue Value: Less Than 5mm Siliques vs. Whole Plant
  misc_feature: MA Experiment ID: 20000440 Result: Down-regulated in Transcription
  misc_feature: MA Experiment 20000440 PARAMETER Experiment Name: At_Closed-Flower__Sub_P Parameter: Tissue Value: Closed Flower vs. Whole Plant
  misc_feature: MA Experiment ID: 20000634 Result: Up-regulated in Transcription
  misc_feature: MA Experiment 20000634 PARAMETER Experiment Name: At_10percent_PEG_Sub_P Parameter: Age (day) Value: 12
  misc_feature: MA Experiment 20000634 PARAMETER Experiment Name: At_10percent_PEG_Sub_P Parameter: Organism Value: A. thaliana
  misc_feature: MA Experiment 20000634 PARAMETER Experiment Name: At_10percent_PEG_Sub_P Parameter: Plant Line Value: WS
  misc_feature: MA Experiment 20000634 PARAMETER Experiment Name: At_10percent_PEG_Sub_P Parameter: Timepoint (day) Value: 12
  misc_feature: MA Experiment 20000634 PARAMETER Experiment Name: At_10percent_PEG_Sub_P Parameter: Tissue Value: Whole Plant
  misc_feature: MA Experiment 20000634 PARAMETER Experiment Name: At_10percent_PEG_Sub_P Parameter: Treatment Value: 10% PEG vs. No Treatment
  misc_feature: MA Experiment ID: 20001807 Result: Down-regulated in Transcription
  misc_feature: MA Experiment 20001807 PARAMETER Experiment Name: At_50mM_NH4NO3_L-to-H_Sub_P Parameter: Timepoint (hr) Value: 6
  misc_feature: MA Experiment 20001807 PARAMETER Experiment Name: At_50mM_NH4NO3_L-to-H_Sub_P Parameter: Tissue Value: Leaf
  misc_feature: MA Experiment 20001807 PARAMETER Experiment Name: At_50mM_NH4NO3_L-to-H_Sub_P Parameter: Treatment Value: 50mM NH4NO3 vs 100mM Mannitol

SEQ ID NO: 93072 - protein, 233 aa, Arabidopsis thaliana; identical to SEQ ID NO: 89316
  peptide (1)..(233): Ceres Seq. ID no. 12717868
  misc_feature (49)..(209): Pfam Name: Protein phosphatase 2C Pfam Description: Protein phosphatase 2C
  misc_feature (1)..(232): Homolog of NCBI NO: 9294079 NR Description: serine/threonine phosphatase type 2c-like protein
  misc_feature (49)..(217): Homolog of NCBI NO: 15227687 NR Description: protein phosphatase 2C (PP2C); protein id: supported by cDNA: gi_13877670 [Arabidopsis thaliana]
  misc_feature (1)..(48): Homolog of NCBI NO: 15227687 NR Description: protein phosphatase 2C (PP2C); protein id: supported by cDNA: gi_13877670 [Arabidopsis thaliana]
  misc_feature (122)..(230): Homolog of NCBI NO: 22331365 NR Description: protein phosphatase 2C (PP2C), putative; protein
  misc_feature (1)..(93): Homolog of NCBI NO: 22331365 NR Description: protein phosphatase 2C (PP2C), putative; protein
  misc_feature (1)..(217): Homolog of NCBI NO: 15236450 NR Description: protein phosphatase 2C (PP2C), putative; protein At4g08260.1 [Arabidopsis thaliana] >gi|7486866|pir||T10553
  misc_feature (49)..(216): Homolog of NCBI NO: 15222312 NR Description: protein phosphatase 2C (PP2C); protein id: supported by cDNA: gi_20258779 [Arabidopsis thaliana]
  misc_feature (1)..(48): Homolog of NCBI NO: 15222312 NR Description: protein phosphatase 2C (PP2C); protein id: supported by cDNA: gi_20258779 [Arabidopsis thaliana]
  misc_feature (114)..(216): Homolog of NCBI NO: 25352225 NR Description: hypothetical protein [imported] - Arabidopsis >gi|8954030|gb|AAF82204.1|AC067971_12 Contains similarity to phosphatase 2C from Arabidopsis thaliana gb|AF085279. It contains
  misc_feature (49)..(113): Homolog of NCBI NO: 25352225 NR Description: hypothetical protein [imported] - Arabidopsis >gi|8954030|gb|AAF82204.1|AC067971_12 Contains similarity to phosphatase 2C from Arabidopsis thaliana gb|AF085279. It contains

SEQ ID NO: 93073 - protein, 148 aa, Arabidopsis thaliana; identical to SEQ ID NO: 89317
  peptide (1)..(148): Ceres Seq. ID no. 12717869
  misc_feature (1)..(124): Pfam Name: Protein phosphatase 2C Pfam Description: Protein phosphatase 2C
  misc_feature (1)..(147): Homolog of NCBI NO: 9294079 NR Description: serine/threonine phosphatase type 2c-like protein
  misc_feature (1)..(132): Homolog of NCBI NO: 15227687 NR Description: protein phosphatase 2C (PP2C); protein id: supported by cDNA: gi_13877670 [Arabidopsis thaliana]
  misc_feature (37)..(145): Homolog of NCBI NO: 22331365 NR Description: protein phosphatase 2C (PP2C), putative; protein
  misc_feature (1)..(132): Homolog of NCBI NO: 15236450 NR Description: protein phosphatase 2C (PP2C), putative; protein At4g08260.1 [Arabidopsis thaliana] >gi|7486866|pir||T10553
  misc_feature (1)..(131): Homolog of NCBI NO: 15222312 NR Description: protein phosphatase 2C (PP2C); protein id: supported by cDNA: gi_20258779 [Arabidopsis thaliana]
  misc_feature (29)..(131): Homolog of NCBI NO: 25352225 NR Description: hypothetical protein [imported] - Arabidopsis >gi|8954030|gb|AAF82204.1|AC067971_12 Contains similarity to phosphatase 2C from Arabidopsis thaliana gb|AF085279. It contains
  misc_feature (1)..(28): Homolog of NCBI NO: 25352225 NR Description: hypothetical protein [imported] - Arabidopsis >gi|8954030|gb|AAF82204.1|AC067971_12 Contains similarity to phosphatase 2C from Arabidopsis thaliana gb|AF085279. It contains
  misc_feature (1)..(132): Homolog of NCBI NO: 30013681 NR Description: Avr9/Cf-9 rapidly elicited protein 284 [Nicotiana
  misc_feature (1)..(132): Homolog of NCBI NO: 7488754 NR Description: protein phosphatase 2C - alfalfa
  misc_feature (1)..(132): Homolog of NCBI NO: 15225656 NR Description: protein phosphatase 2C (PP2C); protein id: [Arabidopsis thaliana] >gi|25352216|pir||C84826 protein

SEQ ID NO: 93074 - DNA, 411 bp, Arabidopsis thaliana; identical to SEQ ID NO: 89318
  misc_feature (1)..(411): Ceres Seq. ID no. 12717908
  misc_feature: MA Experiment ID: 20000355 Result: Up-regulated in Transcription
  misc_feature: MA Experiment 20000355 PARAMETER Experiment Name: At_Siliques_Sub_P Parameter: Age (day) Value: 21
  misc_feature: MA Experiment 20000355 PARAMETER Experiment Name: At_Siliques_Sub_P Parameter: Organism Value: A. thaliana
  misc_feature: MA Experiment 20000355 PARAMETER Experiment Name: At_Siliques_Sub_P Parameter: Plant Line Value: WS
  misc_feature: MA Experiment 20000355 PARAMETER Experiment Name: At_Siliques_Sub_P Parameter: Tissue Value: Less Than 5mm Siliques vs. Whole Plant

SEQ ID NO: 93075 - protein, 136 aa, Arabidopsis thaliana; identical to SEQ ID NO: 89319
  peptide (1)..(136): Ceres Seq. ID no. 12717909
  misc_feature (23)..(135): Pfam Name: Plant self-incompatibility protein S1 Pfam Description: Plant self-incompatibility protein S1
  misc_feature (1)..(136): Homolog of NCBI NO: 25405865 NR Description: protein F9C16.21 [imported] - Arabidopsis >gi|8778659|gb|AAF79667.1|AC022314_8 F9C16.21 [Arabidopsis
  misc_feature (1)..(135): Homolog of NCBI NO: 15232231 NR Description: hypothetical protein; protein id: At3g27680.1 thaliana] >gi|9294473|dbj|BAB02692.1|
  misc_feature (3)..(124): Homolog of NCBI NO: 15231635 NR Description: putative self-incompatibility protein; protein At3g26860.1 [Arabidopsis thaliana] >gi|9279676|dbj|BAB01233.1| similarity to Drosophila pumilio protein~gene_id:MDJ14.20
  misc_feature (15)..(130): Homolog of NCBI NO: 18400665 NR Description: unknown protein; protein id: At2g24870.1 thaliana] >gi|20197878|gb|AAD23025.2| unknown protein
  misc_feature (15)..(130): Homolog of NCBI NO: 25412258 NR Description: hypothetical protein At2g24870 [imported] -
  misc_feature (1)..(135): Homolog of NCBI NO: 9279785 NR Description: gb|AAC28191.1~gene_id:F21A17.7~similar to unknown
  misc_feature (1)..(135): Homolog of NCBI NO: 15231636 NR Description: putative self-incompatibility protein; protein At3g26870.1 [Arabidopsis thaliana] >gi|9279677|dbj|BAB01234.1| similarity to Drosophila pumilio protein~gene_id:MDJ14.21
  misc_feature (1)..(94): Homolog of NCBI NO: 15236527 NR Description: putative self-incompatability RNA-binding protein id: At4g08560.1 [Arabidopsis thaliana]
  misc_feature (1)..(100): Homolog of NCBI NO: 18400667 NR Description: unknown protein; protein id: At2g24880.1 thaliana] >gi|20197877|gb|AAD23024.2| unknown protein
  misc_feature (1)..(93): Homolog of NCBI NO: 25412260 NR Description: hypothetical protein At2g24880 [imported] -

SEQ ID NO: 93076 - protein, 122 aa, Arabidopsis thaliana; identical to SEQ ID NO: 89320
  peptide (1)..(122): Ceres Seq. ID no. 12717910
  misc_feature (9)..(121): Pfam Name: Plant self-incompatibility protein S1 Pfam Description: Plant self-incompatibility protein S1
  misc_feature (1)..(122): Homolog of NCBI NO: 25405865 NR Description: protein F9C16.21 [imported] - Arabidopsis >gi|8778659|gb|AAF79667.1|AC022314_8 F9C16.21 [Arabidopsis
  misc_feature (1)..(121): Homolog of NCBI NO: 15232231 NR Description: hypothetical protein; protein id: At3g27680.1 thaliana] >gi|9294473|dbj|BAB02692.1|
  misc_feature (1)..(110): Homolog of NCBI NO: 15231635 NR Description: putative self-incompatibility protein; protein At3g26860.1 [Arabidopsis thaliana] >gi|9279676|dbj|BAB01233.1| similarity to Drosophila pumilio protein~gene_id:MDJ14.20
  misc_feature (1)..(116): Homolog of NCBI NO: 18400665 NR Description: unknown protein; protein id: At2g24870.1 thaliana] >gi|20197878|gb|AAD23025.2| unknown protein
  misc_feature (1)..(116): Homolog of NCBI NO: 25412258 NR Description: hypothetical protein At2g24870 [imported] -
  misc_feature (1)..(121): Homolog of NCBI NO: 9279785 NR Description: gb|AAC28191.1~gene_id:F21A17.7~similar to unknown
  misc_feature (1)..(121): Homolog of NCBI NO: 15231636 NR Description: putative self-incompatibility protein; protein At3g26870.1 [Arabidopsis thaliana] >gi|9279677|dbj|BAB01234.1| similarity to Drosophila pumilio protein~gene_id:MDJ14.21
  misc_feature (1)..(80): Homolog of NCBI NO: 15236527 NR Description: putative self-incompatability RNA-binding protein id: At4g08560.1 [Arabidopsis thaliana]
  misc_feature (1)..(86): Homolog of NCBI NO: 18400667 NR Description: unknown protein; protein id: At2g24880.1 thaliana] >gi|20197877|gb|AAD23024.2| unknown protein
  misc_feature (1)..(79): Homolog of NCBI NO: 25412260 NR Description: hypothetical protein At2g24880 [imported] -

SEQ ID NO: 93077 - protein, 99 aa, Arabidopsis thaliana; identical to SEQ ID NO: 89321
  peptide (1)..(99): Ceres Seq. ID no. 12717911
  misc_feature (1)..(98): Pfam Name: Plant self-incompatibility protein S1 Pfam Description: Plant self-incompatibility protein S1
  misc_feature (1)..(99): Homolog of NCBI NO: 25405865 NR Description: protein F9C16.21 [imported] - Arabidopsis >gi|8778659|gb|AAF79667.1|AC022314_8 F9C16.21 [Arabidopsis
  misc_feature (1)..(98): Homolog of NCBI NO: 15232231 NR Description: hypothetical protein; protein id: At3g27680.1 thaliana] >gi|9294473|dbj|BAB02692.1|
  misc_feature (1)..(87): Homolog of NCBI NO: 15231635 NR Description: putative self-incompatibility protein; protein At3g26860.1 [Arabidopsis thaliana] >gi|9279676|dbj|BAB01233.1| similarity to Drosophila pumilio protein~gene_id:MDJ14.20
  misc_feature (1)..(93): Homolog of NCBI NO: 18400665 NR Description: unknown protein; protein id: At2g24870.1 thaliana] >gi|20197878|gb|AAD23025.2| unknown protein
  misc_feature (1)..(93): Homolog of NCBI NO: 25412258 NR Description: hypothetical protein At2g24870 [imported] -
  misc_feature (1)..(98): Homolog of NCBI NO: 9279785 NR Description: gb|AAC28191.1~gene_id:F21A17.7~similar to unknown
  misc_feature (1)..(98): Homolog of NCBI NO: 15231636 NR Description: putative self-incompatibility protein; protein At3g26870.1 [Arabidopsis thaliana] >gi|9279677|dbj|BAB01234.1| similarity to Drosophila pumilio protein~gene_id:MDJ14.21
  misc_feature (1)..(57): Homolog of NCBI NO: 15236527 NR Description: putative self-incompatability RNA-binding protein id: At4g08560.1 [Arabidopsis thaliana]
  misc_feature (1)..(63): Homolog of NCBI NO: 18400667 NR Description: unknown protein; protein id: At2g24880.1 thaliana] >gi|20197877|gb|AAD23024.2| unknown protein
  misc_feature (1)..(56): Homolog of NCBI NO: 25412260 NR Description: hypothetical protein At2g24880 [imported] -

SEQ ID NO: 93078 - DNA, 1173 bp, Arabidopsis thaliana; identical to SEQ ID NO: 89322
  misc_feature (1)..(1173): Ceres Seq. ID no. 12717958
  misc_feature: MA Experiment ID: 20000315 Result: Down-regulated in Transcription
  misc_feature: MA Experiment 20000315 PARAMETER Experiment Name: At_14day_Shoots-Roots_Sub_P Parameter: Age (day) Value: 14
  misc_feature: MA Experiment 20000315 PARAMETER Experiment Name: At_14day_Shoots-Roots_Sub_P Parameter: Organism Value: A. thaliana
  misc_feature: MA Experiment 20000315 PARAMETER Experiment Name: At_14day_Shoots-Roots_Sub_P Parameter: Plant Line Value: WS
  misc_feature: MA Experiment 20000315 PARAMETER Experiment Name: At_14day_Shoots-Roots_Sub_P Parameter: Tissue Value: Shoots vs. Whole Plant
  misc_feature: MA Experiment ID: 20000328 Result: Down-regulated in Transcription
  misc_feature: MA Experiment 20000328 PARAMETER Experiment Name: At_42deg_Heat_Sub_P Parameter: Age (day) Value: 14
  misc_feature: MA Experiment 20000328 PARAMETER Experiment Name: At_42deg_Heat_Sub_P Parameter: Organism Value: A. thaliana
  misc_feature: MA Experiment 20000328 PARAMETER Experiment Name: At_42deg_Heat_Sub_P Parameter: Plant Line Value: WS
  misc_feature: MA Experiment 20000328 PARAMETER Experiment Name: At_42deg_Heat_Sub_P Parameter: Temperature (deg C) Value: 42 vs. 22
  misc_feature: MA Experiment 20000328 PARAMETER Experiment Name: At_42deg_Heat_Sub_P Parameter: Timepoint (hr) Value: 6
  misc_feature: MA Experiment 20000328 PARAMETER Experiment Name: At_42deg_Heat_Sub_P Parameter: Tissue Value: Aerial
  misc_feature: MA Experiment ID: 20000347 Result: Up-regulated in Transcription
  misc_feature: MA Experiment 20000347 PARAMETER Experiment Name: At_2mM_SA_Sub_P Parameter: Age (day) Value: 14
  misc_feature: MA Experiment 20000347 PARAMETER Experiment Name: At_2mM_SA_Sub_P Parameter: Organism Value: A. thaliana
  misc_feature: MA Experiment 20000347 PARAMETER Experiment Name: At_2mM_SA_Sub_P Parameter: Plant Line Value: WS
  misc_feature: MA Experiment 20000347 PARAMETER Experiment Name: At_2mM_SA_Sub_P Parameter: Timepoint (hr) Value: 6
  misc_feature: MA Experiment 20000347 PARAMETER Experiment Name: At_2mM_SA_Sub_P Parameter: Tissue Value: Aerial
  misc_feature: MA Experiment 20000347 PARAMETER Experiment Name: At_2mM_SA_Sub_P Parameter: Treatment Value: 2mM SA vs. No Treatment

SEQ ID NO: 93079 - protein, 390 aa, Arabidopsis thaliana; identical to SEQ ID NO: 89323
  peptide (1)..(390): Ceres Seq. ID no. 12717959
  misc_feature (1)..(390): Homolog of NCBI NO: 9294466 NR Description: gb|AAD14522.1~gene_id:MGF10.2~similar to unknown
  misc_feature (1)..(390): Homolog of NCBI NO: 15232221 NR Description: unknown protein; protein id: At3g27610.1
  misc_feature (1)..(387): Homolog of NCBI NO: 30677893 NR Description: expressed protein [Arabidopsis thaliana]
  misc_feature (1)..(387): Homolog of NCBI NO: 26451899 NR Description: unknown protein [Arabidopsis thaliana]
  misc_feature (1)..(387): Homolog of NCBI NO: 30677890 NR Description: expressed protein [Arabidopsis thaliana]
  misc_feature (1)..(387): Homolog of NCBI NO: 21537099 NR Description: unknown [Arabidopsis thaliana]
  misc_feature (151)..(273): Homolog of NCBI NO: 34911372 NR Description: P0034C09.17 [Oryza sativa (japonica
  misc_feature (3)..(96): Homolog of NCBI NO: 34911372 NR Description: P0034C09.17 [Oryza sativa (japonica
  misc_feature (313)..(386): Homolog of NCBI NO: 34911372 NR Description: P0034C09.17 [Oryza sativa (japonica
  misc_feature (1)..(153): Homolog of NCBI NO: 25371182 NR Description: hypothetical protein At2g01220 [imported] - thaliana >gi|4262229|gb|AAD14522.1| unknown protein [Arabidopsis

SEQ ID NO: 93080 - protein, 355 aa, Arabidopsis thaliana; identical to SEQ ID NO: 89324
  peptide (1)..(355): Ceres Seq. ID no. 12717960
  misc_feature (1)..(355): Homolog of NCBI NO: 9294466 NR Description: gb|AAD14522.1~gene_id:MGF10.2~similar to unknown
  misc_feature (1)..(355): Homolog of NCBI NO: 15232221 NR Description: unknown protein; protein id: At3g27610.1
  misc_feature (1)..(352): Homolog of NCBI NO: 30677893 NR Description: expressed protein [Arabidopsis thaliana]
  misc_feature (1)..(352): Homolog of NCBI NO: 26451899 NR Description: unknown protein [Arabidopsis thaliana]
  misc_feature (1)..(352): Homolog of NCBI NO: 30677890 NR Description: expressed protein [Arabidopsis thaliana]
  misc_feature (1)..(352): Homolog of NCBI NO: 21537099 NR Description: unknown [Arabidopsis thaliana]
  misc_feature (116)..(238): Homolog of NCBI NO: 34911372 NR Description: P0034C09.17 [Oryza sativa (japonica
  misc_feature (1)..(61): Homolog of NCBI NO: 34911372 NR Description: P0034C09.17 [Oryza sativa (japonica
  misc_feature (278)..(351): Homolog of NCBI NO: 34911372 NR Description: P0034C09.17 [Oryza sativa (japonica
  misc_feature (1)..(118): Homolog of NCBI NO: 25371182 NR Description: hypothetical protein At2g01220 [imported] - thaliana >gi|4262229|gb|AAD14522.1| unknown protein [Arabidopsis

SEQ ID NO: 93081 - protein, 337 aa, Arabidopsis thaliana; identical to SEQ ID NO: 89325
  peptide (1)..(337): Ceres Seq. ID no. 12717961
  misc_feature (1)..(337): Homolog of NCBI NO: 9294466 NR Description: gb|AAD14522.1~gene_id:MGF10.2~similar to unknown
  misc_feature (1)..(337): Homolog of NCBI NO: 15232221 NR Description: unknown protein; protein id: At3g27610.1
  misc_feature (1)..(334): Homolog of NCBI NO: 30677893 NR Description: expressed protein [Arabidopsis thaliana]
  misc_feature (1)..(334): Homolog of NCBI NO: 26451899 NR Description: unknown protein [Arabidopsis thaliana]
  misc_feature (1)..(334): Homolog of NCBI NO: 30677890 NR Description: expressed protein [Arabidopsis thaliana]
  misc_feature (1)..(334): Homolog of NCBI NO: 21537099 NR Description: unknown [Arabidopsis thaliana]
  misc_feature (98)..(220): Homolog of NCBI NO: 34911372 NR Description: P0034C09.17 [Oryza sativa (japonica
  misc_feature (1)..(43): Homolog of NCBI NO: 34911372 NR Description: P0034C09.17 [Oryza sativa (japonica
  misc_feature (260)..(333): Homolog of NCBI NO: 34911372 NR Description: P0034C09.17 [Oryza sativa (japonica
  misc_feature (1)..(100): Homolog of NCBI NO: 25371182 NR Description: hypothetical protein At2g01220 [imported] - thaliana >gi|4262229|gb|AAD14522.1| unknown protein [Arabidopsis

SEQ ID NO: 93082 - DNA, 924 bp, Arabidopsis thaliana; identical to SEQ ID NO: 89326
  misc_feature (1)..(924): Ceres Seq. ID no. 12717974
  misc_feature: MA Experiment ID: 108462 Result: Up-regulated in Transcription
  misc_feature: MA Experiment 108462 PARAMETER Experiment Name: At_Germinating_Seeds_cDNA_P Parameter: Age (day) Value: 2 vs. 0
  misc_feature: MA Experiment 108462 PARAMETER Experiment Name: At_Germinating_Seeds_cDNA_P Parameter: Tissue Value: Germinating Seeds
  misc_feature: MA Experiment ID: 108463 Result: Up-regulated in Transcription
  misc_feature: MA Experiment 108463 PARAMETER Experiment Name: At_Germinating_Seeds_cDNA_P Parameter: Age (day) Value: 3 vs. 0
  misc_feature: MA Experiment 108463 PARAMETER Experiment Name: At_Germinating_Seeds_cDNA_P Parameter: Tissue Value: Germinating Seeds
  misc_feature: MA Experiment ID: 108609 Result: Down-regulated in Transcription
  misc_feature: MA Experiment 108609 PARAMETER Experiment Name: At_100uM_ABA_cDNA_P Parameter: Timepoint (hr) Value: 24
  misc_feature: MA Experiment 108609 PARAMETER Experiment Name: At_100uM_ABA_cDNA_P Parameter: Tissue Value: Aerial
  misc_feature: MA Experiment 108609 PARAMETER Experiment Name: At_100uM_ABA_cDNA_P Parameter: Treatment Value: 100uM ABA vs. No Treatment
  misc_feature: MA Experiment ID: 20000069 Result: Down-regulated in Transcription
  misc_feature: MA Experiment 20000069 PARAMETER Experiment Name: At_100uM_ABA_Mutants_cDNA_P Parameter: Plant Line Value: CS23
  misc_feature: MA Experiment 20000069 PARAMETER Experiment Name: At_100uM_ABA_Mutants_cDNA_P Parameter: Timepoint (hr) Value: 6
  misc_feature: MA Experiment 20000069 PARAMETER Experiment Name: At_100uM_ABA_Mutants_cDNA_P Parameter: Tissue Value: Aerial
  misc_feature: MA Experiment 20000069 PARAMETER Experiment Name: At_100uM_ABA_Mutants_cDNA_P Parameter: Treatment Value: 100uM ABA vs. No Treatment
  misc_feature: MA Experiment ID: 20000070 Result: Down-regulated in Transcription
  misc_feature: MA Experiment 20000070 PARAMETER Experiment Name: At_100uM_ABA_Mutants_cDNA_P Parameter: Plant Line Value: CS24
  misc_feature: MA Experiment 20000070 PARAMETER Experiment Name: At_100uM_ABA_Mutants_cDNA_P Parameter: Timepoint (hr) Value: 6
  misc_feature: MA Experiment 20000070 PARAMETER Experiment Name: At_100uM_ABA_Mutants_cDNA_P Parameter: Tissue Value: Aerial
  misc_feature: MA Experiment 20000070 PARAMETER Experiment Name: At_100uM_ABA_Mutants_cDNA_P Parameter: Treatment Value: 100uM ABA vs. No Treatment
  misc_feature: MA Experiment ID: 20000071 Result: Down-regulated in Transcription
  misc_feature: MA Experiment 20000071 PARAMETER Experiment Name: At_100uM_ABA_Mutants_cDNA_P Parameter: Plant Line Value: CS8104
  misc_feature: MA Experiment 20000071 PARAMETER Experiment Name: At_100uM_ABA_Mutants_cDNA_P Parameter: Timepoint (hr) Value: 6
  misc_feature: MA Experiment 20000071 PARAMETER Experiment Name: At_100uM_ABA_Mutants_cDNA_P Parameter: Tissue Value: Aerial
  misc_feature: MA Experiment 20000071 PARAMETER Experiment Name: At_100uM_ABA_Mutants_cDNA_P Parameter: Treatment Value: 100uM ABA vs. No Treatment
  misc_feature: MA Experiment ID: 20000086 Result: Down-regulated in Transcription
  misc_feature: MA Experiment 20000086 PARAMETER Experiment Name: At_100uM_ABA_Mutants_cDNA_P Parameter: Plant Line Value: CS22
  misc_feature: MA Experiment 20000086 PARAMETER Experiment Name: At_100uM_ABA_Mutants_cDNA_P Parameter: Timepoint (hr) Value: 6
  misc_feature: MA Experiment 20000086 PARAMETER Experiment Name: At_100uM_ABA_Mutants_cDNA_P Parameter: Tissue Value: Aerial
  misc_feature: MA Experiment 20000086 PARAMETER Experiment Name: At_100uM_ABA_Mutants_cDNA_P Parameter: Treatment Value: 100uM ABA vs. No Treatment
  misc_feature: MA Experiment ID: 20000087 Result: Down-regulated in Transcription
  misc_feature: MA Experiment 20000087 PARAMETER Experiment Name: At_100uM_ABA_Mutants_cDNA_P Parameter: Plant Line Value: WS
  misc_feature: MA Experiment 20000087 PARAMETER Experiment Name: At_100uM_ABA_Mutants_cDNA_P Parameter: Timepoint (hr) Value: 6
  misc_feature: MA Experiment 20000087 PARAMETER Experiment Name: At_100uM_ABA_Mutants_cDNA_P Parameter: Tissue Value: Aerial
  misc_feature: MA Experiment 20000087 PARAMETER Experiment Name: At_100uM_ABA_Mutants_cDNA_P Parameter: Treatment Value: 100uM ABA vs. No Treatment
  misc_feature: MA Experiment ID: 20000307 Result: Up-regulated in Transcription
  misc_feature: MA Experiment 20000307 PARAMETER Experiment Name: At_Germinating_Seeds_Sub_P Parameter: Age (hr) Value: 24 vs. 0
  misc_feature: MA Experiment 20000307 PARAMETER Experiment Name: At_Germinating_Seeds_Sub_P Parameter: Organism Value: A. thaliana
  misc_feature: MA Experiment 20000307 PARAMETER Experiment Name: At_Germinating_Seeds_Sub_P Parameter: Plant Line Value: WS
  misc_feature: MA Experiment 20000307 PARAMETER Experiment Name: At_Germinating_Seeds_Sub_P Parameter: Tissue Value: Germinating Seeds
  misc_feature: MA Experiment ID: 20000314 Result: Down-regulated in Transcription
  misc_feature: MA Experiment 20000314 PARAMETER Experiment Name: At_14day_Shoots-Roots_Sub_P Parameter: Age (day) Value: 14
  misc_feature: MA Experiment 20000314 PARAMETER Experiment Name: At_14day_Shoots-Roots_Sub_P Parameter: Organism Value: A. thaliana
  misc_feature: MA Experiment 20000314 PARAMETER Experiment Name: At_14day_Shoots-Roots_Sub_P Parameter: Plant Line Value: WS
  misc_feature: MA Experiment 20000314 PARAMETER Experiment Name: At_14day_Shoots-Roots_Sub_P Parameter: Tissue Value: Roots vs. Whole Plant
  misc_feature: MA Experiment ID: 20000315 Result: Up-regulated in Transcription
  misc_feature: MA Experiment 20000315 PARAMETER Experiment Name: At_14day_Shoots-Roots_Sub_P Parameter: Age (day) Value: 14
  misc_feature: MA Experiment 20000315 PARAMETER Experiment Name: At_14day_Shoots-Roots_Sub_P Parameter: Organism Value: A. thaliana
  misc_feature: MA Experiment 20000315 PARAMETER Experiment Name: At_14day_Shoots-Roots_Sub_P Parameter: Plant Line Value: WS
  misc_feature: MA Experiment 20000315 PARAMETER Experiment Name: At_14day_Shoots-Roots_Sub_P Parameter: Tissue Value: Shoots vs. Whole Plant
  misc_feature: MA Experiment ID: 20000329 Result: Up-regulated in Transcription
  misc_feature: MA Experiment 20000329 PARAMETER Experiment Name: At_4deg_Cold_Sub_P Parameter: Age (day) Value: 14
  misc_feature: MA Experiment 20000329 PARAMETER Experiment Name: At_4deg_Cold_Sub_P Parameter: Organism Value: A. thaliana
  misc_feature: MA Experiment 20000329 PARAMETER Experiment Name: At_4deg_Cold_Sub_P Parameter: Plant Line Value: WS
  misc_feature: MA Experiment 20000329 PARAMETER Experiment Name: At_4deg_Cold_Sub_P Parameter: Temperature (deg C) Value: 4 vs. 22
  misc_feature: MA Experiment 20000329 PARAMETER Experiment Name: At_4deg_Cold_Sub_P Parameter: Timepoint (hr) Value: 6
  misc_feature: MA Experiment 20000329 PARAMETER Experiment Name: At_4deg_Cold_Sub_P Parameter: Tissue Value: Aerial
  misc_feature: MA Experiment ID: 20000347 Result: Down-regulated in Transcription
  misc_feature: MA Experiment 20000347 PARAMETER Experiment Name: At_2mM_SA_Sub_P Parameter: Age (day) Value: 14
  misc_feature: MA Experiment 20000347 PARAMETER Experiment Name: At_2mM_SA_Sub_P Parameter: Organism Value: A. thaliana
  misc_feature: MA Experiment 20000347 PARAMETER Experiment Name: At_2mM_SA_Sub_P Parameter: Plant Line Value: WS
  misc_feature: MA Experiment 20000347 PARAMETER Experiment Name: At_2mM_SA_Sub_P Parameter: Timepoint (hr) Value: 6
  misc_feature: MA Experiment 20000347 PARAMETER Experiment Name: At_2mM_SA_Sub_P Parameter: Tissue Value: Aerial
  misc_feature: MA Experiment 20000347 PARAMETER Experiment Name: At_2mM_SA_Sub_P Parameter: Treatment Value: 2mM SA vs. No Treatment
  misc_feature: MA Experiment ID: 20000355 Result: Up-regulated in Transcription
  misc_feature: MA Experiment 20000355 PARAMETER Experiment Name: At_Siliques_Sub_P Parameter: Age (day) Value: 21
  misc_feature: MA Experiment 20000355 PARAMETER Experiment Name: At_Siliques_Sub_P Parameter: Organism Value: A. thaliana
  misc_feature: MA Experiment 20000355 PARAMETER Experiment Name: At_Siliques_Sub_P Parameter: Plant Line Value: WS
  misc_feature: MA Experiment 20000355 PARAMETER Experiment Name: At_Siliques_Sub_P Parameter: Tissue Value: Less Than 5mm Siliques vs. Whole Plant
  misc_feature: MA Experiment ID: 20000634 Result: Down-regulated in Transcription
  misc_feature: MA Experiment 20000634 PARAMETER Experiment Name: At_10percent_PEG_Sub_P Parameter: Age (day) Value: 12
  misc_feature: MA Experiment 20000634 PARAMETER Experiment Name: At_10percent_PEG_Sub_P Parameter: Organism Value: A. thaliana
  misc_feature: MA Experiment 20000634 PARAMETER Experiment Name: At_10percent_PEG_Sub_P Parameter: Plant Line Value: WS
  misc_feature: MA Experiment 20000634 PARAMETER Experiment Name: At_10percent_PEG_Sub_P Parameter: Timepoint (day) Value: 12
  misc_feature: MA Experiment 20000634 PARAMETER Experiment Name: At_10percent_PEG_Sub_P Parameter: Tissue Value: Whole Plant
  misc_feature: MA Experiment 20000634 PARAMETER Experiment Name: At_10percent_PEG_Sub_P Parameter: Treatment Value: 10% PEG vs. No Treatment

SEQ ID NO: 93083 - protein, 282 aa, Arabidopsis thaliana; identical to SEQ ID NO: 89327
  peptide (1)..(282): Ceres Seq. ID no. 12717975
  misc_feature (81)..(249): Pfam Name: Chlorophyll A-B binding protein Pfam Description: Chlorophyll A-B binding protein
  misc_feature (17)..(282): Homolog of NCBI NO: 15232249 NR Description: light harvesting chlorophyll A/B binding protein, protein id: At3g27690.1, supported by cDNA: 7700., supported by
  misc_feature (17)..(282): Homolog of NCBI NO: 25299029 NR Description: chlorophyll a/b-binding protein Lhcb2 [imported] Arabidopsis thaliana >gi|4741948|gb|AAD28771.1|AF134124_1 Lhcb2
  misc_feature (17)..(282): Homolog of NCBI NO: 25299022 NR Description: chlorophyll a/b-binding protein Lhcb2 [imported] Arabidopsis thaliana >gi|4741944|gb|AAD28769.1|AF134122_1 Lhcb2
  misc_feature (17)..(281): Homolog of NCBI NO: 15224471 NR Description: light-harvesting chlorophyll a/b binding protein; id: At2g05100.1, supported by cDNA: gi_15450348, supported by gi_15450493, supported by cDNA: gi_4741943, supported by cDNA:
  misc_feature (17)..(282): Homolog of NCBI NO: 15224465 NR Description: light-harvesting chlorophyll a/b binding protein; id: At2g05070.1, supported by cDNA: gi_15809900, supported by
  misc_feature (17)..(282): Homolog of NCBI NO: 3560529 NR Description: light harvesting chlorophyll A/B binding protein
  misc_feature (17)..(282): Homolog of NCBI NO: 1345698 NR Description: Chlorophyll A-B binding protein 151, chloroplast
  misc_feature (17)..(282): Homolog of NCBI NO: 5714656 NR Description: chlorophyll a/b binding protein [Rumex palustris]
  misc_feature (17)..(282): Homolog of NCBI NO: 99600 NR Description: chlorophyll a/b-binding protein - upland cotton

SEQ ID NO: 93084 - protein, 266 aa, Arabidopsis thaliana; identical to SEQ ID NO: 89328
  peptide (1)..(266): Ceres Seq. ID no. 12717976
  misc_feature (65)..(233): Pfam Name: Chlorophyll A-B binding protein Pfam Description: Chlorophyll A-B binding protein
  misc_feature (1)..(266): Homolog of NCBI NO: 15232249 NR Description: light harvesting chlorophyll A/B binding protein, protein id: At3g27690.1, supported by cDNA: 7700., supported by
  misc_feature (1)..(266): Homolog of NCBI NO: 25299029 NR Description: chlorophyll a/b-binding protein Lhcb2 [imported] Arabidopsis thaliana >gi|4741948|gb|AAD28771.1|AF134124_1 Lhcb2
  misc_feature (1)..(266): Homolog of NCBI NO: 25299022 NR Description: chlorophyll a/b-binding protein Lhcb2 [imported] Arabidopsis thaliana >gi|4741944|gb|AAD28769.1|AF134122_1 Lhcb2
  misc_feature (1)..(265): Homolog of NCBI NO: 15224471 NR Description: light-harvesting chlorophyll a/b binding protein; id: At2g05100.1, supported by cDNA: gi_15450348, supported by gi_15450493, supported by cDNA: gi_4741943, supported by cDNA:
  misc_feature (1)..(266): Homolog of NCBI NO: 15224465 NR Description: light-harvesting chlorophyll a/b binding protein; id: At2g05070.1, supported by cDNA: gi_15809900, supported by
  misc_feature (1)..(266): Homolog of NCBI NO: 3560529 NR Description: light harvesting chlorophyll A/B binding protein
  misc_feature (1)..(266): Homolog of NCBI NO: 1345698 NR Description: Chlorophyll A-B binding protein 151, chloroplast
  misc_feature (1)..(266): Homolog of NCBI NO: 5714656 NR Description: chlorophyll a/b binding protein [Rumex palustris]
  misc_feature (1)..(266): Homolog of NCBI NO: 99600 NR Description: chlorophyll a/b-binding protein - upland cotton

SEQ ID NO: 93085 - protein, 229 aa, Arabidopsis thaliana; identical to SEQ ID NO: 89329
  peptide (1)..(229): Ceres Seq. ID no. 12717977
  misc_feature (28)..(196): Pfam Name: Chlorophyll A-B binding protein Pfam Description: Chlorophyll A-B binding protein
  misc_feature (1)..(229): Homolog of NCBI NO: 15232249 NR Description: light harvesting chlorophyll A/B binding protein, protein id: At3g27690.1, supported by cDNA: 7700., supported by
  misc_feature (1)..(229): Homolog of NCBI NO: 25299029 NR Description: chlorophyll a/b-binding protein Lhcb2 [imported] Arabidopsis thaliana >gi|4741948|gb|AAD28771.1|AF134124_1 Lhcb2
  misc_feature (1)..(229): Homolog of NCBI NO: 25299022 NR Description: chlorophyll a/b-binding protein Lhcb2 [imported] Arabidopsis thaliana >gi|4741944|gb|AAD28769.1|AF134122_1 Lhcb2
  misc_feature (1)..(228): Homolog of NCBI NO: 15224471 NR Description: light-harvesting chlorophyll a/b binding protein; id: At2g05100.1, supported by cDNA: gi_15450348, supported by gi_15450493, supported by cDNA: gi_4741943, supported by cDNA:
  misc_feature (1)..(229): Homolog of NCBI NO: 15224465 NR Description: light-harvesting chlorophyll a/b binding protein; id: At2g05070.1, supported by cDNA: gi_15809900, supported by
  misc_feature (1)..(229): Homolog of NCBI NO: 3560529 NR Description: light harvesting chlorophyll A/B binding protein
  misc_feature (1)..(229): Homolog of NCBI NO: 1345698 NR Description: Chlorophyll A-B binding protein 151, chloroplast
  misc_feature (1)..(229): Homolog of NCBI NO: 5714656 NR Description: chlorophyll a/b binding protein [Rumex palustris]
  misc_feature (1)..(229): Homolog of NCBI NO: 99600 NR Description: chlorophyll a/b-binding protein - upland cotton

SEQ ID NO: 93086 - DNA, 886 bp, Arabidopsis thaliana; identical to SEQ ID NO: 89330
  misc_feature (1)..(886): Ceres Seq. ID no. 12718005
  misc_feature: MA Experiment ID: 108461 Result: Up-regulated in Transcription
  misc_feature: MA Experiment 108461 PARAMETER Experiment Name: At_Germinating_Seeds_cDNA_P Parameter: Age (day) Value: 1 vs. 0
  misc_feature: MA Experiment 108461 PARAMETER Experiment Name: At_Germinating_Seeds_cDNA_P Parameter: Tissue Value: Germinating Seeds
  misc_feature: MA Experiment ID: 108462 Result: Up-regulated in Transcription
  misc_feature: MA Experiment 108462 PARAMETER Experiment Name: At_Germinating_Seeds_cDNA_P Parameter: Age (day) Value: 2 vs. 0
  misc_feature: MA Experiment 108462 PARAMETER Experiment Name: At_Germinating_Seeds_cDNA_P Parameter: Tissue Value: Germinating Seeds
  misc_feature: MA Experiment ID: 108488 Result: Up-regulated in Transcription
  misc_feature: MA Experiment ID: 108595 Result: Down-regulated in Transcription
  misc_feature: MA Experiment 108595 PARAMETER Experiment Name: At_Ler-pi_Ovule_cDNA_P Parameter: Plant Line Value: null
  misc_feature: MA Experiment ID: 20000070 Result: Down-regulated in Transcription
  misc_feature: MA Experiment 20000070 PARAMETER Experiment Name: At_100uM_ABA_Mutants_cDNA_P Parameter: Plant Line Value: CS24
  misc_feature: MA Experiment 20000070 PARAMETER Experiment Name: At_100uM_ABA_Mutants_cDNA_P Parameter: Timepoint (hr) Value: 6
  misc_feature: MA Experiment 20000070 PARAMETER Experiment Name: At_100uM_ABA_Mutants_cDNA_P Parameter: Tissue Value: Aerial
  misc_feature: MA Experiment 20000070 PARAMETER Experiment Name: At_100uM_ABA_Mutants_cDNA_P Parameter: Treatment Value: 100uM ABA vs. No Treatment
  misc_feature: MA Experiment ID: 20000071 Result: Down-regulated in Transcription
  misc_feature: MA Experiment 20000071 PARAMETER Experiment Name: At_100uM_ABA_Mutants_cDNA_P Parameter: Plant Line Value: CS8104
  misc_feature: MA Experiment 20000071 PARAMETER Experiment Name: At_100uM_ABA_Mutants_cDNA_P Parameter: Timepoint (hr) Value: 6
  misc_feature: MA Experiment 20000071 PARAMETER Experiment Name: At_100uM_ABA_Mutants_cDNA_P Parameter: Tissue Value: Aerial
  misc_feature: MA Experiment 20000071 PARAMETER Experiment Name: At_100uM_ABA_Mutants_cDNA_P Parameter: Treatment Value: 100uM ABA vs. No Treatment
  misc_feature: MA Experiment ID: 20000072 Result: Down-regulated in Transcription
  misc_feature: MA Experiment 20000072 PARAMETER Experiment Name: At_100uM_ABA_Mutants_cDNA_P Parameter: Plant Line Value: CS8105
  misc_feature: MA Experiment 20000072 PARAMETER Experiment Name: At_100uM_ABA_Mutants_cDNA_P Parameter: Timepoint (hr) Value: 6
  misc_feature: MA Experiment 20000072 PARAMETER Experiment Name: At_100uM_ABA_Mutants_cDNA_P Parameter: Tissue Value: Aerial
  misc_feature: MA Experiment 20000072 PARAMETER Experiment Name: At_100uM_ABA_Mutants_cDNA_P Parameter: Treatment Value: 100uM ABA vs. No Treatment
  misc_feature: MA Experiment ID: 20000086 Result: Down-regulated in Transcription
  misc_feature: MA Experiment 20000086 PARAMETER Experiment Name: At_100uM_ABA_Mutants_cDNA_P Parameter: Plant Line Value: CS22
  misc_feature: MA Experiment 20000086 PARAMETER Experiment Name: At_100uM_ABA_Mutants_cDNA_P Parameter: Timepoint (hr) Value: 6
  misc_feature: MA Experiment 20000086 PARAMETER Experiment Name: At_100uM_ABA_Mutants_cDNA_P Parameter: Tissue Value: Aerial
  misc_feature: MA Experiment 20000086 PARAMETER Experiment Name: At_100uM_ABA_Mutants_cDNA_P Parameter: Treatment Value: 100uM ABA vs. No Treatment
  misc_feature: MA Experiment ID: 20000117 Result: Down-regulated in Transcription
  misc_feature: MA Experiment 20000117 PARAMETER Experiment Name: At_100uM_ABA_Mutants_cDNA_P Parameter: Plant Line Value: Columbia
  misc_feature: MA Experiment 20000117 PARAMETER Experiment Name: At_100uM_ABA_Mutants_cDNA_P Parameter: Timepoint (hr) Value: 6
  misc_feature: MA Experiment 20000117 PARAMETER Experiment Name: At_100uM_ABA_Mutants_cDNA_P Parameter: Tissue Value: Aerial
  misc_feature: MA Experiment 20000117 PARAMETER Experiment Name: At_100uM_ABA_Mutants_cDNA_P Parameter: Treatment Value: 100uM ABA vs. No Treatment
  misc_feature: MA Experiment ID: 20000180 Result: Up-regulated in Transcription
  misc_feature: MA Experiment 20000180 PARAMETER Experiment Name: At_Germinating_Seeds_P Parameter: Age (hr) Value: 24 vs. 0
  misc_feature: MA Experiment 20000180 PARAMETER Experiment Name: At_Germinating_Seeds_P Parameter: Tissue Value: Germinating Seeds
  misc_feature: MA Experiment ID: 20000185 Result: Down-regulated in Transcription
  misc_feature: MA Experiment 20000185 PARAMETER Experiment Name: At_Roots__P Parameter: Age (day) Value: 7 vs. 21
  misc_feature: MA Experiment 20000185 PARAMETER Experiment Name: At_Roots__P Parameter: Organism Value: A. thaliana
  misc_feature: MA Experiment 20000185 PARAMETER Experiment Name: At_Roots__P Parameter: Tissue Value: Roots vs. Whole Plant
  misc_feature: MA Experiment ID: 20000437 Result: Down-regulated in Transcription
  misc_feature: MA Experiment 20000437 PARAMETER Experiment Name: At_Drought_P Parameter: Age (day) Value: 8
  misc_feature: MA Experiment 20000437 PARAMETER Experiment Name: At_Drought_P Parameter: Organism Value: A. thaliana
  misc_feature: MA Experiment 20000437 PARAMETER Experiment Name: At_Drought_P Parameter: Plant Line Value: WS
  misc_feature: MA Experiment 20000437 PARAMETER Experiment Name: At_Drought_P Parameter: Timepoint (hr) Value: 24
  misc_feature: MA Experiment 20000437 PARAMETER Experiment Name: At_Drought_P Parameter: Tissue Value: Whole Plant
  misc_feature: MA Experiment 20000437 PARAMETER Experiment Name: At_Drought_P Parameter: Treatment Value: Drought vs. No Drought
  misc_feature: MA Experiment ID: 20000438 Result: Up-regulated in Transcription
  misc_feature: MA Experiment 20000438 PARAMETER Experiment Name: At_Shoots__P Parameter: Age (day) Value: 14
  misc_feature: MA Experiment 20000438 PARAMETER Experiment Name: At_Shoots__P Parameter: Tissue Value: Shoots vs. Whole Plant
  misc_feature: MA Experiment ID: 20000439 Result: Down-regulated in Transcription
  misc_feature: MA Experiment 20000439 PARAMETER Experiment Name: At_Roots__P Parameter: Age (day) Value: 14 vs. 21
  misc_feature: MA Experiment 20000439 PARAMETER Experiment Name: At_Roots__P Parameter: Organism Value: A. thaliana
  misc_feature: MA Experiment 20000439 PARAMETER Experiment Name: At_Roots__P Parameter: Tissue Value: Roots vs. Whole Plant
  misc_feature: MA Experiment ID: 20001248 Result: Down-regulated in Transcription
  misc_feature: MA Experiment 20001248 PARAMETER Experiment Name: At_Far-red-induction_P Parameter: Age (day) Value: 7
  misc_feature: MA Experiment 20001248 PARAMETER Experiment Name: At_Far-red-induction_P Parameter: Light Value: Far-red vs. White
  misc_feature: MA Experiment 20001248 PARAMETER Experiment Name: At_Far-red-induction_P Parameter: Organism Value: A. thaliana
  misc_feature: MA Experiment 20001248 PARAMETER Experiment Name: At_Far-red-induction_P Parameter: Plant Line Value: Columbia
  misc_feature: MA Experiment 20001248 PARAMETER Experiment Name: At_Far-red-induction_P Parameter: Timepoint (hr) Value: 4
  misc_feature: MA Experiment 20001248 PARAMETER Experiment Name: At_Far-red-induction_P Parameter: Tissue Value: Whole Plant
  misc_feature: MA Experiment ID: 20001450 Result: Down-regulated in Transcription
  misc_feature: MA Experiment 20001450 PARAMETER Experiment Name: At_Far-red-induction_P Parameter: Age (day) Value: 7
  misc_feature: MA Experiment 20001450 PARAMETER Experiment Name: At_Far-red-induction_P Parameter: Light Value: Far-red vs. White
  misc_feature: MA Experiment 20001450 PARAMETER Experiment Name: At_Far-red-induction_P Parameter: Organism Value: A. thaliana
  misc_feature: MA Experiment 20001450 PARAMETER Experiment Name: At_Far-red-induction_P Parameter: Plant Line Value: Columbia
  misc_feature: MA Experiment 20001450 PARAMETER Experiment Name: At_Far-red-induction_P Parameter: Timepoint (hr) Value: 8
  misc_feature: MA Experiment 20001450 PARAMETER Experiment Name: At_Far-red-induction_P Parameter: Tissue Value: Whole Plant
  misc_feature: MA Experiment ID: 20001757 Result: Up-regulated in Transcription
  misc_feature: MA Experiment 20001757 PARAMETER Experiment Name: At_50mM_NH4NO3_L-to-H_P Parameter: Timepoint (hr) Value: 6
  misc_feature: MA Experiment 20001757 PARAMETER Experiment Name: At_50mM_NH4NO3_L-to-H_P Parameter: Tissue Value: Leaf
  misc_feature: MA Experiment 20001757 PARAMETER Experiment Name: At_50mM_NH4NO3_L-to-H_P Parameter: Treatment Value: 50mM NH4NO3 vs 100mM Mannitol
  misc_feature: MA Experiment ID: 20001905 Result: Down-regulated in Transcription
  misc_feature: MA Experiment 20001905 PARAMETER Experiment Name: At_Drought_Reproduction_P Parameter: Age (day) Value: 40
  misc_feature: MA Experiment 20001905 PARAMETER Experiment Name: At_Drought_Reproduction_P Parameter: Organism Value: A. thaliana
  misc_feature: MA Experiment 20001905 PARAMETER Experiment Name: At_Drought_Reproduction_P Parameter: Plant Line Value: WS
  misc_feature: MA Experiment 20001905 PARAMETER Experiment Name: At_Drought_Reproduction_P Parameter: Timepoint (day) Value: 10
  misc_feature: MA Experiment 20001905 PARAMETER Experiment Name: At_Drought_Reproduction_P Parameter: Tissue Value: Rosettes
  misc_feature: MA Experiment 20001905 PARAMETER Experiment Name: At_Drought_Reproduction_P Parameter: Treatment Value: Drought vs. No Drought

SEQ ID NO: 93087 - protein, 214 aa, Arabidopsis thaliana; identical to SEQ ID NO: 29117
  peptide (1)..(214): Ceres Seq. ID no. 12718006
  misc_feature (146)..(214): Pfam Name: Ribosomal protein L7/L12 C-terminal domain Pfam Description: Ribosomal protein L7/L12 C-terminal domain
  misc_feature (24)..(214): Homolog of NCBI NO: 15232274 NR Description: 50S ribosomal protein L12-A; protein id: supported by cDNA: gi_15450973, supported by cDNA: gi_15810118
  misc_feature (24)..(214): Homolog of NCBI NO: 541897 NR Description: ribosomal protein L12.C precursor, chloroplast - thaliana >gi|468773|emb|CAA48183.1| ribosomal protein L12
  misc_feature (24)..(214): Homolog of NCBI NO: 15232276 NR Description: 50S ribosomal protein L12-C; protein id: supported by cDNA: 32422., supported by cDNA: gi_14335123 thaliana] >gi|21431811|sp|P36212|R123_ARATH 50S ribosomal protein
  misc_feature (24)..(214): Homolog of NCBI NO: 21592776 NR Description: 50S ribosomal protein L12-C [Arabidopsis thaliana]
  misc_feature (24)..(213): Homolog of NCBI NO: 15232275 NR Description: 50S ribosomal protein L12-B; protein id: [Arabidopsis thaliana] >gi|21431810|sp|P36211|R122_ARATH 50S
  misc_feature (24)..(213): Homolog of NCBI NO: 541896 NR Description: ribosomal protein L12.B precursor, chloroplast - thaliana >gi|468772|emb|CAA48182.1| ribosomal protein L12
  misc_feature (24)..(214): Homolog of NCBI NO: 20020 NR Description: ribosomal protein L12-1a [Nicotiana tabacum]
  misc_feature (24)..(214): Homolog of NCBI NO: 133088 NR Description: 50S RIBOSOMAL PROTEIN L12, CHLOROPLAST PRECURSOR
  misc_feature (24)..(214): Homolog of NCBI NO: 548746 NR Description: 50S RIBOSOMAL PROTEIN L12, CHLOROPLAST PRECURSOR
  misc_feature (24)..(213): Homolog of NCBI NO: 133085 NR Description: 50S RIBOSOMAL PROTEIN L12, CHLOROPLAST PRECURSOR

SEQ ID NO: 93088 - protein, 191 aa, Arabidopsis thaliana; identical to SEQ ID NO: 21067
  peptide (1)..(191): Ceres Seq. ID no. 12718007
  misc_feature (123)..(191): Pfam Name: Ribosomal protein L7/L12 C-terminal domain Pfam Description: Ribosomal protein L7/L12 C-terminal domain
  misc_feature (1)..(191): Homolog of NCBI NO: 15232274 NR Description: 50S ribosomal protein L12-A; protein id: supported by cDNA: gi_15450973, supported by cDNA: gi_15810118
  misc_feature (1)..(191): Homolog of NCBI NO: 541897 NR Description: ribosomal protein L12.C precursor, chloroplast - thaliana >gi|468773|emb|CAA48183.1| ribosomal protein L12
  misc_feature (1)..(191): Homolog of NCBI NO: 15232276 NR Description: 50S ribosomal protein L12-C; protein id: supported by cDNA: 32422., supported by cDNA: gi_14335123 thaliana] >gi|21431811|sp|P36212|R123_ARATH 50S ribosomal protein
  misc_feature (1)..(191): Homolog of NCBI NO: 21592776 NR Description: 50S ribosomal protein L12-C [Arabidopsis thaliana]
  misc_feature (1)..(190): Homolog of NCBI NO: 15232275 NR Description: 50S ribosomal protein L12-B; protein id: [Arabidopsis thaliana] >gi|21431810|sp|P36211|R122_ARATH 50S
  misc_feature (1)..(190): Homolog of NCBI NO: 541896 NR Description: ribosomal protein L12.B precursor, chloroplast - thaliana >gi|468772|emb|CAA48182.1| ribosomal protein L12
  misc_feature (1)..(191): Homolog of NCBI NO: 20020 NR Description: ribosomal protein L12-1a [Nicotiana tabacum]
  misc_feature (1)..(191): Homolog of NCBI NO: 133088 NR Description: 50S RIBOSOMAL PROTEIN L12, CHLOROPLAST PRECURSOR
  misc_feature (1)..(191): Homolog of NCBI NO: 548746 NR Description: 50S RIBOSOMAL PROTEIN L12, CHLOROPLAST PRECURSOR
  misc_feature (1)..(190): Homolog of NCBI NO: 133085 NR Description: 50S RIBOSOMAL PROTEIN L12, CHLOROPLAST PRECURSOR

SEQ ID NO: 93089 - DNA, 1410 bp, Arabidopsis thaliana; identical to SEQ ID NO: 89333
  misc_feature (1)..(1410): Ceres Seq. ID no. 12718139
  misc_feature: MA Experiment ID: 108501 Result: Down-regulated in Transcription
  misc_feature: MA Experiment 108501 PARAMETER Experiment Name: At_ap2_floral_buds_cDNA_P Parameter: Plant Line Value: ap2 (Ler.)
  misc_feature: MA Experiment 108501 PARAMETER Experiment Name: At_ap2_floral_buds_cDNA_P Parameter: Tissue Value: Closed Flower
  misc_feature: MA Experiment ID: 108579 Result: Down-regulated in Transcription
  misc_feature: MA Experiment 108579 PARAMETER Experiment Name: At_4deg_Cold_cDNA_P Parameter: Temperature (deg C) Value: 4 vs. 22
  misc_feature: MA Experiment 108579 PARAMETER Experiment Name: At_4deg_Cold_cDNA_P Parameter: Timepoint (hr) Value: 6
  misc_feature: MA Experiment 108579 PARAMETER Experiment Name: At_4deg_Cold_cDNA_P Parameter: Tissue Value: Aerial
  misc_feature: MA Experiment ID: 108595 Result: Up-regulated in Transcription
  misc_feature: MA Experiment 108595 PARAMETER Experiment Name: At_Ler-pi_Ovule_cDNA_P Parameter: Plant Line Value: null
  misc_feature: MA Experiment ID: 20000030 Result: Down-regulated in Transcription
  misc_feature: MA Experiment 20000030 PARAMETER Experiment Name: At_CS6630_Roots_cDNA_P Parameter: Plant Line Value: CS6630 vs. WS
  misc_feature: MA Experiment 20000030 PARAMETER Experiment Name: At_CS6630_Roots_cDNA_P Parameter: Tissue Value: Roots
  misc_feature: MA Experiment ID: 20000089 Result: Up-regulated in Transcription

SEQ ID NO: 93090 - protein, 469 aa, Arabidopsis thaliana; identical to SEQ ID NO: 89334
  peptide (1)..(469): Ceres Seq. ID no. 12718140
  misc_feature (6)..(139): Pfam Name: Integral membrane protein DUF6 Pfam Description: Integral membrane protein DUF6
  misc_feature (1)..(349): Homolog of NCBI NO: 18409794 NR Description: putative protein; protein id: At3g53210.1,
  misc_feature (1)..(349): Homolog of NCBI NO: 21593130 NR Description: nodulin-like protein [Arabidopsis thaliana]
  misc_feature (1)..(177): Homolog of NCBI NO: 11358354 NR Description: hypothetical protein T4D2.140 - Arabidopsis >gi|6630741|emb|CAB64224.1| putative protein [Arabidopsis
  misc_feature (212)..(349): Homolog of NCBI NO: 11358354 NR Description: hypothetical protein T4D2.140 - Arabidopsis >gi|6630741|emb|CAB64224.1| putative protein [Arabidopsis
  misc_feature (1)..(363): Homolog of NCBI NO: 18410867 NR Description: nodulin-like protein; protein id: At1g75500.1, by cDNA: gi_15028078, supported by cDNA: gi_20259306 [Arabidopsis >gi|15028079|gb|AAK76570.1| putative nodulin protein nodulin
  misc_feature (9)..(318): Homolog of NCBI NO: 34895316 NR Description: putative nodulin [Oryza sativa (japonica
  misc_feature (1)..(324): Homolog of NCBI NO: 9294076 NR Description: nodulin-like protein [Arabidopsis thaliana]
  misc_feature (1)..(324): Homolog of NCBI NO: 15229596 NR Description: integral membrane protein, putative; protein id:
  misc_feature (131)..(363): Homolog of NCBI NO: 25404978 NR Description: protein F10A5.28 [imported] - Arabidopsis >gi|9369372|gb|AAF87121.1|AC006434_17 F10A5.28 [Arabidopsis
  misc_feature (1)..(70): Homolog of NCBI NO: 25404978 NR Description: protein F10A5.28 [imported] - Arabidopsis >gi|9369372|gb|AAF87121.1|AC006434_17 F10A5.28 [Arabidopsis

SEQ ID NO: 93091 - protein, 455 aa, Arabidopsis thaliana; identical to SEQ ID NO: 89335
  peptide (1)..(455): Ceres Seq. ID no. 12718141
  misc_feature (1)..(125): Pfam Name: Integral membrane protein DUF6 Pfam Description: Integral membrane protein DUF6
  misc_feature (1)..(335): Homolog of NCBI NO: 18409794 NR Description: putative protein; protein id: At3g53210.1,
  misc_feature (1)..(335): Homolog of NCBI NO: 21593130 NR Description: nodulin-like protein [Arabidopsis thaliana]
  misc_feature (1)..(163): Homolog of NCBI NO: 11358354 NR Description: hypothetical protein T4D2.140 - Arabidopsis >gi|6630741|emb|CAB64224.1| putative protein [Arabidopsis
  misc_feature (198)..(335): Homolog of NCBI NO: 11358354 NR Description: hypothetical protein T4D2.140 - Arabidopsis >gi|6630741|emb|CAB64224.1| putative protein [Arabidopsis
  misc_feature (1)..(349): Homolog of NCBI NO: 18410867 NR Description: nodulin-like protein; protein id: At1g75500.1, by cDNA: gi_15028078, supported by cDNA: gi_20259306 [Arabidopsis >gi|15028079|gb|AAK76570.1| putative nodulin protein nodulin
  misc_feature (1)..(304): Homolog of NCBI NO: 34895316 NR Description: putative nodulin [Oryza sativa (japonica
  misc_feature (1)..(310): Homolog of NCBI NO: 9294076 NR Description: nodulin-like protein [Arabidopsis thaliana]
  misc_feature (1)..(310): Homolog of NCBI NO: 15229596 NR Description: integral membrane protein, putative; protein id:
  misc_feature (117)..(349): Homolog of NCBI NO: 25404978 NR Description: protein F10A5.28 [imported] - Arabidopsis >gi|9369372|gb|AAF87121.1|AC006434_17 F10A5.28 [Arabidopsis
  misc_feature (1)..(56): Homolog of NCBI NO: 25404978 NR Description: protein F10A5.28 [imported] - Arabidopsis >gi|9369372|gb|AAF87121.1|AC006434_17 F10A5.28 [Arabidopsis

SEQ ID NO: 93092 - protein, 415 aa, Arabidopsis thaliana; identical to SEQ ID NO: 89336
  peptide (1)..(415): Ceres Seq. ID no. 12718142
  misc_feature (1)..(85): Pfam Name: Integral membrane protein DUF6 Pfam Description: Integral membrane protein DUF6
  misc_feature (1)..(295): Homolog of NCBI NO: 18409794 NR Description: putative protein; protein id: At3g53210.1,
  misc_feature (1)..(295): Homolog of NCBI NO: 21593130 NR Description: nodulin-like protein [Arabidopsis thaliana]
  misc_feature (1)..(123): Homolog of NCBI NO: 11358354 NR Description: hypothetical protein T4D2.140 - Arabidopsis >gi|6630741|emb|CAB64224.1| putative protein [Arabidopsis
  misc_feature (158)..(295): Homolog of NCBI NO: 11358354 NR Description: hypothetical protein T4D2.140 - Arabidopsis >gi|6630741|emb|CAB64224.1| putative protein [Arabidopsis
  misc_feature (1)..(309): Homolog of NCBI NO: 18410867 NR Description: nodulin-like protein; protein id: At1g75500.1, by cDNA: gi_15028078, supported by cDNA: gi_20259306 [Arabidopsis >gi|15028079|gb|AAK76570.1| putative nodulin protein nodulin
  misc_feature (1)..(264): Homolog of NCBI NO: 34895316 NR Description: putative nodulin [Oryza sativa (japonica
  misc_feature (1)..(270): Homolog of NCBI NO: 9294076 NR Description: nodulin-like protein [Arabidopsis thaliana]
  misc_feature (1)..(270): Homolog of NCBI NO: 15229596 NR Description: integral membrane protein, putative; protein id:
  misc_feature (77)..(309): Homolog of NCBI NO: 25404978 NR Description: protein F10A5.28 [imported] - Arabidopsis >gi|9369372|gb|AAF87121.1|AC006434_17 F10A5.28 [Arabidopsis
  misc_feature (1)..(16): Homolog of NCBI NO: 25404978 NR Description: protein F10A5.28 [imported] - Arabidopsis >gi|9369372|gb|AAF87121.1|AC006434_17 F10A5.28 [Arabidopsis

SEQ ID NO: 93093 - DNA, 1269 bp, Arabidopsis thaliana; identical to SEQ ID NO: 89337
  misc_feature (1)..(1269): Ceres Seq. ID no. 12718151
  misc_feature: MA Experiment ID: 20000173 Result: Up-regulated in Transcription
  misc_feature: MA Experiment 20000173 PARAMETER Experiment Name: At_42deg_Heat_P Parameter: Age (day) Value: 14
  misc_feature: MA Experiment 20000173 PARAMETER Experiment Name: At_42deg_Heat_P Parameter: Organism Value: A. thaliana
  misc_feature: MA Experiment 20000173 PARAMETER Experiment Name: At_42deg_Heat_P Parameter: Plant Line Value: WS
  misc_feature: MA Experiment 20000173 PARAMETER Experiment Name: At_42deg_Heat_P Parameter: Temperature (deg C) Value: 42 vs. 22
  misc_feature: MA Experiment 20000173 PARAMETER Experiment Name: At_42deg_Heat_P Parameter: Timepoint (hr) Value: 6
  misc_feature: MA Experiment 20000173 PARAMETER Experiment Name: At_42deg_Heat_P Parameter: Tissue Value: Aerial
  misc_feature: MA Experiment ID: 20000234 Result: Down-regulated in Transcription
  misc_feature: MA Experiment 20000234 PARAMETER Experiment Name: At_Siliques_P Parameter: Age (day) Value: 21
  misc_feature: MA Experiment 20000234 PARAMETER Experiment Name: At_Siliques_P Parameter: Organism Value: A. thaliana
  misc_feature: MA Experiment 20000234 PARAMETER Experiment Name: At_Siliques_P Parameter: Plant Line Value: WS
  misc_feature: MA Experiment 20000234 PARAMETER Experiment Name: At_Siliques_P Parameter: Tissue Value: Less Than 5mm Siliques vs. Whole Plant
  misc_feature: MA Experiment ID: 20000235 Result: Down-regulated in Transcription
  misc_feature: MA Experiment 20000235 PARAMETER Experiment Name: At_Siliques_P Parameter: Age (day) Value: 21
  misc_feature: MA Experiment 20000235 PARAMETER Experiment Name: At_Siliques_P Parameter: Organism Value: A. thaliana
  misc_feature: MA Experiment 20000235 PARAMETER Experiment Name: At_Siliques_P Parameter: Plant Line Value: WS
  misc_feature: MA Experiment 20000235 PARAMETER Experiment Name: At_Siliques_P Parameter: Tissue Value: 5-10mm Siliques vs. Whole Plant
  misc_feature: MA Experiment ID: 20000452 Result: Down-regulated in Transcription
  misc_feature: MA Experiment 20000452 PARAMETER Experiment Name: At_CS6879_Shoots-Roots_P Parameter: Age (day) Value: 14
  misc_feature: MA Experiment 20000452 PARAMETER Experiment Name: At_CS6879_Shoots-Roots_P Parameter: Organism Value: A. thaliana
  misc_feature: MA Experiment 20000452 PARAMETER Experiment Name: At_CS6879_Shoots-Roots_P Parameter: Plant Line Value: CS6879 vs. WS
  misc_feature: MA Experiment 20000452 PARAMETER Experiment Name: At_CS6879_Shoots-Roots_P Parameter: Tissue Value: Shoots
  misc_feature: MA Experiment ID: 20000794 Result: Up-regulated in Transcription
  misc_feature: MA Experiment 20000794 PARAMETER Experiment Name: At_Petals_P Parameter: Age (day) Value: 23-25 days
  misc_feature: MA Experiment 20000794 PARAMETER Experiment Name: At_Petals_P Parameter: Plant Line Value: WS
  misc_feature: MA Experiment 20000794 PARAMETER Experiment Name: At_Petals_P Parameter: Tissue Value: Petals vs. Whole plant
  misc_feature: MA Experiment ID: 20001909 Result: Up-regulated in Transcription
  misc_feature: MA Experiment 20001909 PARAMETER Experiment Name: At_Drought_Reproduction_P Parameter: Age (day) Value: 35
  misc_feature: MA Experiment 20001909 PARAMETER Experiment Name: At_Drought_Reproduction_P Parameter: Organism Value: A. thaliana
  misc_feature: MA Experiment 20001909 PARAMETER Experiment Name: At_Drought_Reproduction_P Parameter: Plant Line Value: WS
  misc_feature: MA Experiment 20001909 PARAMETER Experiment Name: At_Drought_Reproduction_P Parameter: Timepoint (day) Value: 5
  misc_feature: MA Experiment 20001909 PARAMETER Experiment Name: At_Drought_Reproduction_P Parameter: Tissue Value: Flowers
  misc_feature: MA Experiment 20001909 PARAMETER Experiment Name: At_Drought_Reproduction_P Parameter: Treatment Value: Drought vs. No Drought

SEQ ID NO: 93094 - protein, 422 aa, Arabidopsis thaliana; identical to SEQ ID NO: 89338
  peptide (1)..(422): Ceres Seq. ID no. 12718152
  misc_feature (10)..(415): Pfam Name: Cytochrome P450 Pfam Description: Cytochrome P450
  misc_feature (1)..(422): Homolog of NCBI NO: 15231784 NR Description: cytochrome p450 family; protein id: At3g53290.1 thaliana] >gi|11249499|pir||T46175 probable cytochrome P450
  misc_feature (10)..(419): Homolog of NCBI NO: 13878369 NR Description: CYTOCHROME P450 71B8
  misc_feature (10)..(419): Homolog of NCBI NO: 22327366 NR Description: similar to cytochrome p450 family; protein id:
  misc_feature (8)..(419): Homolog of NCBI NO: 15231786 NR Description: cytochrome p450 family; protein id: At3g53300.1, by cDNA: gi_15810490 [Arabidopsis thaliana] Cytochrome P450 71B31 >gi|11249493|pir||T46176 probable
  misc_feature (10)..(421): Homolog of NCBI NO: 15231524 NR Description: cytochrome p450 family; protein id: At3g26190.1 thaliana] >gi|13878385|sp|Q9LTM2|C72L_ARATH Cytochrome P450 71B21
  misc_feature (8)..(419): Homolog of NCBI NO: 15810491 NR Description: putative cytochrome P450 protein [Arabidopsis
  misc_feature (10)..(420): Homolog of NCBI NO: 15231525 NR Description: cytochrome p450 family; protein id: At3g26200.1, by cDNA: gi_13430717 [Arabidopsis thaliana] Cytochrome P450 71B22 >gi|11994439|dbj|BAB02441.1| cytochrome
  misc_feature (11)..(420): Homolog of NCBI NO: 30923413 NR Description: Cytochrome P450 71B38
  misc_feature (11)..(420): Homolog of NCBI NO: 15229913 NR Description: cytochrome p450 family; protein id: At3g44250.1
  misc_feature (11)..(420): Homolog of NCBI NO: 15231782 NR Description: cytochrome P450 monooxygenase; protein id: supported by cDNA: gi_3164131 [Arabidopsis thaliana]

SEQ ID NO: 93095 - protein, 395 aa, Arabidopsis thaliana; identical to SEQ ID NO: 89339
  peptide (1)..(395): Ceres Seq. ID no. 12718153
  misc_feature (1)..(388): Pfam Name: Cytochrome P450 Pfam Description: Cytochrome P450
  misc_feature (1)..(395): Homolog of NCBI NO: 15231784 NR Description: cytochrome p450 family; protein id: At3g53290.1 thaliana] >gi|11249499|pir||T46175 probable cytochrome P450
  misc_feature (1)..(392): Homolog of NCBI NO: 13878369 NR Description: CYTOCHROME P450 71B8
  misc_feature (1)..(392): Homolog of NCBI NO: 22327366 NR Description: similar to cytochrome p450 family; protein id:
  misc_feature (1)..(392): Homolog of NCBI NO: 15231786 NR Description: cytochrome p450 family; protein id: At3g53300.1, by cDNA: gi_15810490 [Arabidopsis thaliana] Cytochrome P450 71B31 >gi|11249493|pir||T46176 probable
  misc_feature (1)..(394): Homolog of NCBI NO: 15231524 NR Description: cytochrome p450 family; protein id: At3g26190.1 thaliana] >gi|13878385|sp|Q9LTM2|C72L_ARATH Cytochrome P450 71B21
  misc_feature (1)..(392): Homolog of NCBI NO: 15810491 NR Description: putative cytochrome P450 protein [Arabidopsis
  misc_feature (1)..(393): Homolog of NCBI NO: 15231525 NR Description: cytochrome p450 family; protein id: At3g26200.1, by cDNA: gi_13430717 [Arabidopsis thaliana] Cytochrome P450 71B22 >gi|11994439|dbj|BAB02441.1| cytochrome
  misc_feature (1)..(393): Homolog of NCBI NO: 30923413 NR Description: Cytochrome P450 71B38
  misc_feature (1)..(393): Homolog of NCBI NO: 15229913 NR Description: cytochrome p450 family; protein id: At3g44250.1
  misc_feature (1)..(393): Homolog of NCBI NO: 15231782 NR Description: cytochrome P450 monooxygenase; protein id: supported by cDNA: gi_3164131 [Arabidopsis thaliana]

SEQ ID NO: 93096 - protein, 370 aa, Arabidopsis thaliana; identical to SEQ ID NO: 89340
  peptide (1)..(370): Ceres Seq. ID no. 12718154
  misc_feature (1)..(363): Pfam Name: Cytochrome P450 Pfam Description: Cytochrome P450
  misc_feature (1)..(370): Homolog of NCBI NO: 15231784 NR Description: cytochrome p450 family; protein id: At3g53290.1 thaliana] >gi|11249499|pir||T46175 probable cytochrome P450
  misc_feature (1)..(367): Homolog of NCBI NO: 13878369 NR Description: CYTOCHROME P450 71B8
  misc_feature (1)..(367): Homolog of NCBI NO: 22327366 NR Description: similar to cytochrome p450 family; protein id:
  misc_feature (1)..(367): Homolog of NCBI NO: 15231786 NR Description: cytochrome p450 family; protein id: At3g53300.1, by cDNA: gi_15810490 [Arabidopsis thaliana] Cytochrome P450 71B31 >gi|11249493|pir||T46176 probable
  misc_feature (1)..(369): Homolog of NCBI NO: 15231524 NR Description: cytochrome p450 family; protein id: At3g26190.1 thaliana] >gi|13878385|sp|Q9LTM2|C72L_ARATH Cytochrome P450 71B21
  misc_feature (1)..(367): Homolog of NCBI NO: 15810491 NR Description: putative cytochrome P450 protein [Arabidopsis
  misc_feature (1)..(368): Homolog of NCBI NO: 15231525 NR Description: cytochrome p450 family; protein id: At3g26200.1, by cDNA: gi_13430717 [Arabidopsis thaliana] Cytochrome P450 71B22 >gi|11994439|dbj|BAB02441.1| cytochrome
  misc_feature (1)..(368): Homolog of NCBI NO: 30923413 NR Description: Cytochrome P450 71B38
  misc_feature (1)..(368): Homolog of NCBI NO: 15229913 NR Description: cytochrome p450 family; protein id: At3g44250.1
  misc_feature (1)..(368): Homolog of NCBI NO: 15231782 NR Description: cytochrome P450 monooxygenase; protein id: supported by cDNA: gi_3164131 [Arabidopsis thaliana]

SEQ ID NO: 93097 - DNA, 1191 bp, Arabidopsis thaliana; identical to SEQ ID NO: 89341
  misc_feature (1)..(1191): Ceres Seq. ID no. 12718160
  misc_feature: MA Experiment ID: 20000171 Result: Down-regulated in Transcription
  misc_feature: MA Experiment 20000171 PARAMETER Experiment Name: At_42deg_Heat_P Parameter: Age (day) Value: 14
  misc_feature: MA Experiment 20000171 PARAMETER Experiment Name: At_42deg_Heat_P Parameter: Organism Value: A. thaliana
  misc_feature: MA Experiment 20000171 PARAMETER Experiment Name: At_42deg_Heat_P Parameter: Plant Line Value: WS
  misc_feature: MA Experiment 20000171 PARAMETER Experiment Name: At_42deg_Heat_P Parameter: Temperature (deg C) Value: 42 vs. 22
  misc_feature: MA Experiment 20000171 PARAMETER Experiment Name: At_42deg_Heat_P Parameter: Timepoint (hr) Value: 1
  misc_feature: MA Experiment 20000171 PARAMETER Experiment Name: At_42deg_Heat_P Parameter: Tissue Value: Aerial
  misc_feature: MA Experiment ID: 20000173 Result: Down-regulated in Transcription
  misc_feature: MA Experiment 20000173 PARAMETER Experiment Name: At_42deg_Heat_P Parameter: Age (day) Value: 14
  misc_feature: MA Experiment 20000173 PARAMETER Experiment Name: At_42deg_Heat_P Parameter: Organism Value: A. thaliana
  misc_feature: MA Experiment 20000173 PARAMETER Experiment Name: At_42deg_Heat_P Parameter: Plant Line Value: WS
  misc_feature: MA Experiment 20000173 PARAMETER Experiment Name: At_42deg_Heat_P Parameter: Temperature (deg C) Value: 42 vs. 22
  misc_feature: MA Experiment 20000173 PARAMETER Experiment Name: At_42deg_Heat_P Parameter: Timepoint (hr) Value: 6
  misc_feature: MA Experiment 20000173 PARAMETER Experiment Name: At_42deg_Heat_P Parameter: Tissue Value: Aerial
  misc_feature: MA Experiment ID: 20000180 Result: Up-regulated in Transcription
  misc_feature: MA Experiment 20000180 PARAMETER Experiment Name: At_Germinating_Seeds_P Parameter: Age (hr) Value: 24 vs. 0
  misc_feature: MA Experiment 20000180 PARAMETER Experiment Name: At_Germinating_Seeds_P Parameter: Tissue Value: Germinating Seeds
  misc_feature: MA Experiment ID: 20000184 Result: Down-regulated in Transcription
  misc_feature: MA Experiment 20000184 PARAMETER Experiment Name: At_Shoots__P Parameter: Age (day) Value: 7
  misc_feature: MA Experiment 20000184 PARAMETER Experiment Name: At_Shoots__P Parameter: Tissue Value: Shoots vs. Whole Plant
  misc_feature: MA Experiment ID: 20000185 Result: Up-regulated in Transcription
  misc_feature: MA Experiment 20000185 PARAMETER Experiment Name: At_Roots__P Parameter: Age (day) Value: 7 vs. 21
  misc_feature: MA Experiment 20000185 PARAMETER Experiment Name: At_Roots__P Parameter: Organism Value: A. thaliana
  misc_feature: MA Experiment 20000185 PARAMETER Experiment Name: At_Roots__P Parameter: Tissue Value: Roots vs. Whole Plant
  misc_feature: MA Experiment ID: 20000234 Result: Up-regulated in Transcription
  misc_feature: MA Experiment 20000234 PARAMETER Experiment Name: At_Siliques_P Parameter: Age (day) Value: 21
  misc_feature: MA Experiment 20000234 PARAMETER Experiment Name: At_Siliques_P Parameter: Organism Value: A. thaliana
  misc_feature: MA Experiment 20000234 PARAMETER Experiment Name: At_Siliques_P Parameter: Plant Line Value: WS
  misc_feature: MA Experiment 20000234 PARAMETER Experiment Name: At_Siliques_P Parameter: Tissue Value: Less Than 5mm Siliques vs. Whole Plant
  misc_feature: MA Experiment ID: 20000235 Result: Up-regulated in Transcription
  misc_feature: MA Experiment 20000235 PARAMETER Experiment Name: At_Siliques_P Parameter: Age (day) Value: 21
  misc_feature: MA Experiment 20000235 PARAMETER Experiment Name: At_Siliques_P Parameter: Organism Value: A. thaliana
  misc_feature: MA Experiment 20000235 PARAMETER Experiment Name: At_Siliques_P Parameter: Plant Line Value: WS
  misc_feature: MA Experiment 20000235 PARAMETER Experiment Name: At_Siliques_P Parameter: Tissue Value: 5-10mm Siliques vs. Whole Plant
  misc_feature: MA Experiment ID: 20000264 Result: Up-regulated in Transcription
  misc_feature: MA Experiment 20000264 PARAMETER Experiment Name: At_Open_Flower_P Parameter: Age (day) Value: 21
  misc_feature: MA Experiment 20000264 PARAMETER Experiment Name: At_Open_Flower_P Parameter: Plant Line Value: WS
  misc_feature: MA Experiment 20000264 PARAMETER Experiment Name: At_Open_Flower_P Parameter: Tissue Value: Open Flower vs. Whole Plant
  misc_feature: MA Experiment ID: 20000265 Result: Up-regulated in Transcription
  misc_feature: MA Experiment 20000265 PARAMETER Experiment Name: At_Open_Flower_P Parameter: Age (day) Value: 21
  misc_feature: MA Experiment 20000265 PARAMETER Experiment Name: At_Open_Flower_P Parameter: Plant Line Value: WS
  misc_feature: MA Experiment 20000265 PARAMETER Experiment Name: At_Open_Flower_P Parameter: Tissue Value: Closed Flower vs. Whole Plant
  misc_feature: MA Experiment ID: 20000286 Result: Up-regulated in Transcription
  misc_feature: MA Experiment 20000286 PARAMETER Experiment Name: At_Open_Flower_P Parameter: Age (day) Value: 21
  misc_feature: MA Experiment 20000286 PARAMETER Experiment Name: At_Open_Flower_P Parameter: Plant Line Value: WS
  misc_feature: MA Experiment 20000286 PARAMETER Experiment Name: At_Open_Flower_P Parameter: Tissue Value: Half Open vs. Whole Plant
  misc_feature: MA Experiment ID: 20000439 Result: Up-regulated in Transcription
  misc_feature: MA Experiment 20000439 PARAMETER Experiment Name: At_Roots__P Parameter: Age (day) Value: 14 vs. 21
  misc_feature: MA Experiment 20000439 PARAMETER Experiment Name: At_Roots__P Parameter: Organism Value: A. thaliana
  misc_feature: MA Experiment 20000439 PARAMETER Experiment Name: At_Roots__P Parameter: Tissue Value: Roots vs. Whole Plant
  misc_feature: MA Experiment ID: 20000794 Result: Up-regulated in Transcription
  misc_feature: MA Experiment 20000794 PARAMETER Experiment Name: At_Petals_P Parameter: Age (day) Value: 23-25 days
  misc_feature: MA Experiment 20000794 PARAMETER Experiment Name: At_Petals_P Parameter: Plant Line Value: WS
  misc_feature: MA Experiment 20000794 PARAMETER Experiment Name: At_Petals_P Parameter: Tissue Value: Petals vs. Whole plant
  misc_feature: MA Experiment ID: 20001757 Result: Down-regulated in Transcription
  misc_feature: MA Experiment 20001757 PARAMETER Experiment Name: At_50mM_NH4NO3_L-to-H_P Parameter: Timepoint (hr) Value: 6
  misc_feature: MA Experiment 20001757 PARAMETER Experiment Name: At_50mM_NH4NO3_L-to-H_P Parameter: Tissue Value: Leaf
  misc_feature: MA Experiment 20001757 PARAMETER Experiment Name: At_50mM_NH4NO3_L-to-H_P Parameter: Treatment Value: 50mM NH4NO3 vs 100mM Mannitol

SEQ ID NO: 93098 - protein, 396 aa, Arabidopsis thaliana; identical to SEQ ID NO: 49913
  peptide (1)..(396): Ceres Seq. ID no. 12718161
  misc_feature (11)..(369): Pfam Name: Myosin tail Pfam Description: Myosin tail
  misc_feature (1)..(396): Homolog of NCBI NO: 22331765 NR Description: putative protein; protein id: At3g53350.1,
  misc_feature (1)..(396): Homolog of NCBI NO: 17978993 NR Description: AT3g53350/F4P12_50 [Arabidopsis thaliana]
  misc_feature (1)..(396): Homolog of NCBI NO: 11357801 NR Description: hypothetical protein F4P12.50 - Arabidopsis >gi|6729486|emb|CAB67642.1| putative protein [Arabidopsis
  misc_feature (1)..(298): Homolog of NCBI NO: 15228082 NR Description: putative myosin heavy chain; protein id: [Arabidopsis thaliana] >gi|25408529|pir||C84788 probable myosin
  misc_feature (1)..(383): Homolog of NCBI NO: 18076679 NR Description: P70 protein [Nicotiana tabacum]
  misc_feature (12)..(396): Homolog of NCBI NO: 15228082 NR Description: putative myosin heavy chain; protein id: [Arabidopsis thaliana] >gi|25408529|pir||C84788 probable myosin
  misc_feature (1)..(396): Homolog of NCBI NO: 8885572 NR Description: myosin heavy chain-like [Arabidopsis thaliana]
  misc_feature (7)..(396): Homolog of NCBI NO: 30697347 NR Description: expressed protein [Arabidopsis thaliana]
  misc_feature (65)..(392): Homolog of NCBI NO: 34908020 NR Description: P0460C04.20 [Oryza sativa (japonica
  misc_feature (75)..(380): Homolog of NCBI NO: 34860755 NR Description: similar to hypothetical protein [Rattus

SEQ ID NO: 93099 - protein, 281 aa, Arabidopsis thaliana; identical to SEQ ID NO: 49914
  peptide (1)..(281): Ceres Seq. ID no. 12718162
  misc_feature (1)..(254): Pfam Name: Myosin tail Pfam Description: Myosin tail
  misc_feature (1)..(281): Homolog of NCBI NO: 22331765 NR Description: putative protein; protein id: At3g53350.1,
  misc_feature (1)..(281): Homolog of NCBI NO: 17978993 NR Description: AT3g53350/F4P12_50 [Arabidopsis thaliana]
  misc_feature (1)..(281): Homolog of NCBI NO: 11357801 NR Description: hypothetical protein F4P12.50 - Arabidopsis >gi|6729486|emb|CAB67642.1| putative protein [Arabidopsis
  misc_feature (1)..(183): Homolog of NCBI NO: 15228082 NR Description: putative myosin heavy chain; protein id: [Arabidopsis thaliana] >gi|25408529|pir||C84788 probable myosin
  misc_feature (1)..(268): Homolog of NCBI NO: 18076679 NR Description: P70 protein [Nicotiana tabacum]
  misc_feature (1)..(281): Homolog of NCBI NO: 15228082 NR Description: putative myosin heavy chain; protein id: [Arabidopsis thaliana] >gi|25408529|pir||C84788 probable myosin
  misc_feature (1)..(281): Homolog of NCBI NO: 8885572 NR Description: myosin heavy chain-like [Arabidopsis thaliana]
  misc_feature (1)..(281): Homolog of NCBI NO: 30697347 NR Description: expressed protein [Arabidopsis thaliana]
  misc_feature (1)..(277): Homolog of NCBI NO: 34908020 NR Description: P0460C04.20 [Oryza sativa (japonica
  misc_feature (1)..(265): Homolog of NCBI NO: 34860755 NR Description: similar to hypothetical protein [Rattus

SEQ ID NO: 93100 - protein, 250 aa, Arabidopsis thaliana; identical to SEQ ID NO: 49915
  peptide (1)..(250): Ceres Seq. ID no. 12718163
  misc_feature (1)..(223): Pfam Name: Myosin tail Pfam Description: Myosin tail
  misc_feature (1)..(250): Homolog of NCBI NO: 22331765 NR Description: putative protein; protein id: At3g53350.1,
  misc_feature (1)..(250): Homolog of NCBI NO: 17978993 NR Description: AT3g53350/F4P12_50 [Arabidopsis thaliana]
  misc_feature (1)..(250): Homolog of NCBI NO: 11357801 NR Description: hypothetical protein F4P12.50 - Arabidopsis >gi|6729486|emb|CAB67642.1| putative protein [Arabidopsis
  misc_feature (1)..(152): Homolog of NCBI NO: 15228082 NR Description: putative myosin heavy chain; protein id: [Arabidopsis thaliana] >gi|25408529|pir||C84788 probable myosin
  misc_feature (1)..(237): Homolog of NCBI NO: 18076679 NR Description: P70 protein [Nicotiana tabacum]
  misc_feature (1)..(250): Homolog of NCBI NO: 15228082 NR Description: putative myosin heavy chain; protein id: [Arabidopsis thaliana] >gi|25408529|pir||C84788 probable myosin
  misc_feature (1)..(250): Homolog of NCBI NO: 8885572 NR Description: myosin heavy chain-like [Arabidopsis thaliana]
  misc_feature (1)..(250): Homolog of NCBI NO: 30697347 NR Description: expressed protein [Arabidopsis thaliana]
  misc_feature (1)..(246): Homolog of NCBI NO: 34908020 NR Description: P0460C04.20 [Oryza sativa (japonica
  misc_feature (1)..(234): Homolog of NCBI NO: 34860755 NR Description: similar to hypothetical protein [Rattus

SEQ ID NO: 93101 - DNA, 1890 bp, Arabidopsis thaliana; identical to SEQ ID NO: 89345
  misc_feature (1)..(1890): Ceres Seq. ID no. 12718164
  misc_feature: MA Experiment ID: 20000180 Result: Up-regulated in Transcription
  misc_feature: MA Experiment 20000180 PARAMETER Experiment Name: At_Germinating_Seeds_P Parameter: Age (hr) Value: 24 vs. 0
  misc_feature: MA Experiment 20000180 PARAMETER Experiment Name: At_Germinating_Seeds_P Parameter: Tissue Value: Germinating Seeds
  misc_feature: MA Experiment ID: 20000184 Result: Up-regulated in Transcription
  misc_feature: MA Experiment 20000184 PARAMETER Experiment Name: At_Shoots__P Parameter: Age (day) Value: 7
  misc_feature: MA Experiment 20000184 PARAMETER Experiment Name: At_Shoots__P Parameter: Tissue Value: Shoots vs. Whole Plant
  misc_feature: MA Experiment ID: 20000265 Result: Up-regulated in Transcription
  misc_feature: MA Experiment 20000265 PARAMETER Experiment Name: At_Open_Flower_P Parameter: Age (day) Value: 21
  misc_feature: MA Experiment 20000265 PARAMETER Experiment Name: At_Open_Flower_P Parameter: Plant Line Value: WS
  misc_feature: MA Experiment 20000265 PARAMETER Experiment Name: At_Open_Flower_P Parameter: Tissue Value: Closed Flower vs. Whole Plant
  misc_feature: MA Experiment ID: 20000437 Result: Down-regulated in Transcription
  misc_feature: MA Experiment 20000437 PARAMETER Experiment Name: At_Drought_P Parameter: Age (day) Value: 8
  misc_feature: MA Experiment 20000437 PARAMETER Experiment Name: At_Drought_P Parameter: Organism Value: A. thaliana
  misc_feature: MA Experiment 20000437 PARAMETER Experiment Name: At_Drought_P Parameter: Plant Line Value: WS
  misc_feature: MA Experiment 20000437 PARAMETER Experiment Name: At_Drought_P Parameter: Timepoint (hr) Value: 24
  misc_feature: MA Experiment 20000437 PARAMETER Experiment Name: At_Drought_P Parameter: Tissue Value: Whole Plant
  misc_feature: MA Experiment 20000437 PARAMETER Experiment Name: At_Drought_P Parameter: Treatment Value: Drought vs. No Drought
  misc_feature: MA Experiment ID: 20000438 Result: Up-regulated in Transcription
  misc_feature: MA Experiment 20000438 PARAMETER Experiment Name: At_Shoots__P Parameter: Age (day) Value: 14
  misc_feature: MA Experiment 20000438 PARAMETER Experiment Name: At_Shoots__P Parameter: Tissue Value: Shoots vs. Whole Plant

SEQ ID NO: 93102 - protein, 629 aa, Arabidopsis thaliana; identical to SEQ ID NO: 89346
  peptide (1)..(629): Ceres Seq. ID no. 12718165
  misc_feature (290)..(489): Pfam Name: Protein kinase domain Pfam Description: Protein kinase domain
  misc_feature (275)..(625): Homolog of NCBI NO: 15242646 NR Description: receptor like protein kinase; protein id: supported by cDNA: gi_20260625 [Arabidopsis thaliana]
  misc_feature (22)..(279): Homolog of NCBI NO: 15242646 NR Description: receptor like protein kinase; protein id: supported by cDNA: gi_20260625 [Arabidopsis thaliana]
  misc_feature (280)..(598): Homolog of NCBI NO: 15241048 NR Description: serine/threonine-specific kinase like protein;
  misc_feature (16)..(249): Homolog of NCBI NO: 15241048 NR Description: serine/threonine-specific kinase like protein;
  misc_feature (282)..(581): Homolog of NCBI NO: 15238300 NR Description: receptor lectin kinase-like protein; protein id:
  misc_feature (13)..(252): Homolog of NCBI NO: 15238300 NR Description: receptor lectin kinase-like protein; protein id:
  misc_feature (280)..(572): Homolog of NCBI NO: 38112429 NR Description: lectin-like receptor kinase 7;3 [Medicago
  misc_feature (4)..(246): Homolog of NCBI NO: 38112429 NR Description: lectin-like receptor kinase 7;3 [Medicago
  misc_feature (280)..(583): Homolog of NCBI NO: 15289871 NR Description: putative receptor protein kinase-like protein
  misc_feature (21)..(249): Homolog of NCBI NO: 15289871 NR Description: putative receptor protein kinase-like protein

SEQ ID NO: 93103 - protein, 489 aa, Arabidopsis thaliana; identical to SEQ ID NO: 89347
  peptide (1)..(489): Ceres Seq. ID no. 12718166
  misc_feature (150)..(349): Pfam Name: Protein kinase domain Pfam Description: Protein kinase domain
  misc_feature (135)..(485): Homolog of NCBI NO: 15242646 NR Description: receptor like protein kinase; protein id: supported by cDNA: gi_20260625 [Arabidopsis thaliana]
  misc_feature (1)..(139): Homolog of NCBI NO: 15242646 NR Description: receptor like protein kinase; protein id: supported by cDNA: gi_20260625 [Arabidopsis thaliana]
  misc_feature (140)..(458): Homolog of NCBI NO: 15241048 NR Description: serine/threonine-specific kinase like protein;
  misc_feature (1)..(109): Homolog of NCBI NO: 15241048 NR Description: serine/threonine-specific kinase like protein;
  misc_feature (142)..(441): Homolog of NCBI NO: 15238300 NR Description: receptor lectin kinase-like protein; protein id:
  misc_feature (1)..(112): Homolog of NCBI NO: 15238300 NR Description: receptor lectin kinase-like protein; protein id:
  misc_feature (140)..(432): Homolog of NCBI NO: 38112429 NR Description: lectin-like receptor kinase 7;3 [Medicago
  misc_feature (1)..(106): Homolog of NCBI NO: 38112429 NR Description: lectin-like receptor kinase 7;3 [Medicago
  misc_feature (140)..(443): Homolog of NCBI NO: 15289871 NR Description: putative receptor protein kinase-like protein
  misc_feature (1)..(109): Homolog of NCBI NO: 15289871 NR Description: putative receptor protein kinase-like protein

SEQ ID NO: 93104 - protein, 406 aa, Arabidopsis thaliana; identical to SEQ ID NO: 89348
  peptide (1)..(406): Ceres Seq. ID no. 12718167
  misc_feature (67)..(266): Pfam Name: Protein kinase domain Pfam Description: Protein kinase domain
  misc_feature (52)..(402): Homolog of NCBI NO: 15242646 NR Description: receptor like protein kinase; protein id: supported by cDNA: gi_20260625 [Arabidopsis thaliana]
  misc_feature (1)..(56): Homolog of NCBI NO: 15242646 NR Description: receptor like protein kinase; protein id: supported by cDNA: gi_20260625 [Arabidopsis thaliana]
  misc_feature (57)..(375): Homolog of NCBI NO: 15241048 NR Description: serine/threonine-specific kinase like protein;
  misc_feature (1)..(26): Homolog of NCBI NO: 15241048 NR Description: serine/threonine-specific kinase like protein;
  misc_feature (59)..(358): Homolog of NCBI NO: 15238300 NR Description: receptor lectin kinase-like protein; protein id:
  misc_feature (1)..(29): Homolog of NCBI NO: 15238300 NR Description: receptor lectin kinase-like protein; protein id:
  misc_feature (57)..(349): Homolog of NCBI NO: 38112429 NR Description: lectin-like receptor kinase 7;3 [Medicago
  misc_feature (1)..(23): Homolog of NCBI NO: 38112429 NR Description: lectin-like receptor kinase 7;3 [Medicago
  misc_feature (57)..(360): Homolog of NCBI NO: 15289871 NR Description: putative receptor protein kinase-like protein
  misc_feature (1)..(26): Homolog of NCBI NO: 15289871 NR Description: putative receptor protein kinase-like protein

SEQ ID NO: 93105 - DNA, 1532 bp, Arabidopsis thaliana; identical to SEQ ID NO: 89349
  misc_feature (1)..(1532): Ceres Seq. ID no. 12718175
  misc_feature: MA Experiment ID: 108434 Result: Up-regulated in Transcription
  misc_feature: MA Experiment 108434 PARAMETER Experiment Name: At_Root_Tips_cDNA_P Parameter: Tissue Value: Root Tips
  misc_feature: MA Experiment ID: 108462 Result: Down-regulated in Transcription
  misc_feature: MA Experiment 108462 PARAMETER Experiment Name: At_Germinating_Seeds_cDNA_P Parameter: Age (day) Value: 2 vs. 0
  misc_feature: MA Experiment 108462 PARAMETER Experiment Name: At_Germinating_Seeds_cDNA_P Parameter: Tissue Value: Germinating Seeds
  misc_feature: MA Experiment ID: 108463 Result: Down-regulated in Transcription
  misc_feature: MA Experiment 108463 PARAMETER Experiment Name: At_Germinating_Seeds_cDNA_P Parameter: Age (day) Value: 3 vs. 0
  misc_feature: MA Experiment 108463 PARAMETER Experiment Name: At_Germinating_Seeds_cDNA_P Parameter: Tissue Value: Germinating Seeds
  misc_feature: MA Experiment ID: 108464 Result: Down-regulated in Transcription
  misc_feature: MA Experiment 108464 PARAMETER Experiment Name: At_Germinating_Seeds_cDNA_P Parameter: Age (day) Value: 4 vs. 0
  misc_feature: MA Experiment 108464 PARAMETER Experiment Name: At_Germinating_Seeds_cDNA_P Parameter: Tissue Value: Germinating Seeds
  misc_feature: MA Experiment ID: 108488 Result: Up-regulated in Transcription
  misc_feature: MA Experiment ID: 108489 Result: Up-regulated in Transcription
  misc_feature: MA Experiment ID: 108561 Result: Down-regulated in Transcription
  misc_feature: MA Experiment 108561 PARAMETER Experiment Name: At_100uM_ABA_cDNA_P Parameter: Timepoint (hr) Value: 6
  misc_feature: MA Experiment 108561 PARAMETER Experiment Name: At_100uM_ABA_cDNA_P Parameter: Tissue Value: Aerial
  misc_feature: MA Experiment 108561 PARAMETER Experiment Name: At_100uM_ABA_cDNA_P Parameter: Treatment Value: 100uM ABA vs. No Treatment
  misc_feature: MA Experiment ID: 108573 Result: Down-regulated in Transcription
  misc_feature: MA Experiment 108573 PARAMETER Experiment Name: At_Drought_cDNA_P Parameter: Timepoint (hr) Value: 6
  misc_feature: MA Experiment 108573 PARAMETER Experiment Name: At_Drought_cDNA_P Parameter: Tissue Value: Aerial
  misc_feature: MA Experiment 108573 PARAMETER Experiment Name: At_Drought_cDNA_P Parameter: Treatment Value: Drought vs. No Drought
  misc_feature: MA Experiment ID: 108577 Result: Down-regulated in Transcription
  misc_feature: MA Experiment 108577 PARAMETER Experiment Name: At_42deg_Heat_cDNA_P Parameter: Temperature (deg C) Value: 42 vs. 22
  misc_feature: MA Experiment 108577 PARAMETER Experiment Name: At_42deg_Heat_cDNA_P Parameter: Timepoint (hr) Value: 6
  misc_feature: MA Experiment 108577 PARAMETER Experiment Name: At_42deg_Heat_cDNA_P Parameter: Tissue Value: Aerial
  misc_feature: MA Experiment ID: 108595 Result: Down-regulated in Transcription
  misc_feature: MA Experiment 108595 PARAMETER Experiment Name: At_Ler-pi_Ovule_cDNA_P Parameter: Plant Line Value: null
  misc_feature: MA Experiment ID: 108605 Result: Down-regulated in Transcription
  misc_feature: MA Experiment 108605 PARAMETER Experiment Name: At_100uM_ABA_cDNA_P Parameter: Timepoint (hr) Value: 6
  misc_feature: MA Experiment 108605 PARAMETER Experiment Name: At_100uM_ABA_cDNA_P Parameter: Tissue Value: Aerial
  misc_feature: MA Experiment 108605 PARAMETER Experiment Name: At_100uM_ABA_cDNA_P Parameter: Treatment Value: 100uM ABA vs. No Treatment
  misc_feature: MA Experiment ID: 108607 Result: Down-regulated in Transcription
  misc_feature: MA Experiment 108607 PARAMETER Experiment Name: At_100uM_ABA_cDNA_P Parameter: Timepoint (hr) Value: 4
  misc_feature: MA Experiment 108607 PARAMETER Experiment Name: At_100uM_ABA_cDNA_P Parameter: Tissue Value: Aerial
  misc_feature: MA Experiment 108607 PARAMETER Experiment Name: At_100uM_ABA_cDNA_P Parameter: Treatment Value: 100uM ABA vs. No Treatment
  misc_feature: MA Experiment ID: 20000069 Result: Up-regulated in Transcription
  misc_feature: MA Experiment 20000069 PARAMETER Experiment Name: At_100uM_ABA_Mutants_cDNA_P Parameter: Plant Line Value: CS23
  misc_feature: MA Experiment 20000069 PARAMETER Experiment Name: At_100uM_ABA_Mutants_cDNA_P Parameter: Timepoint (hr) Value: 6
  misc_feature: MA Experiment 20000069 PARAMETER Experiment Name: At_100uM_ABA_Mutants_cDNA_P Parameter: Tissue Value: Aerial
  misc_feature: MA Experiment 20000069 PARAMETER Experiment Name: At_100uM_ABA_Mutants_cDNA_P Parameter: Treatment Value: 100uM ABA vs. No Treatment
  misc_feature: MA Experiment ID: 20000071 Result: Up-regulated in Transcription
  misc_feature: MA Experiment 20000071 PARAMETER Experiment Name: At_100uM_ABA_Mutants_cDNA_P Parameter: Plant Line Value: CS8104
  misc_feature: MA Experiment 20000071 PARAMETER Experiment Name: At_100uM_ABA_Mutants_cDNA_P Parameter: Timepoint (hr) Value: 6
  misc_feature: MA Experiment 20000071 PARAMETER Experiment Name: At_100uM_ABA_Mutants_cDNA_P Parameter: Tissue Value: Aerial
  misc_feature: MA Experiment 20000071 PARAMETER Experiment Name: At_100uM_ABA_Mutants_cDNA_P Parameter: Treatment Value: 100uM ABA vs. No Treatment
  misc_feature: MA Experiment ID: 20000072 Result: Up-regulated in Transcription
  misc_feature: MA Experiment 20000072 PARAMETER Experiment Name: At_100uM_ABA_Mutants_cDNA_P Parameter: Plant Line Value: CS8105
  misc_feature: MA Experiment 20000072 PARAMETER Experiment Name: At_100uM_ABA_Mutants_cDNA_P Parameter: Timepoint (hr) Value: 6
  misc_feature: MA Experiment 20000072 PARAMETER Experiment Name: At_100uM_ABA_Mutants_cDNA_P Parameter: Tissue Value: Aerial
  misc_feature: MA Experiment 20000072 PARAMETER Experiment Name: At_100uM_ABA_Mutants_cDNA_P Parameter: Treatment Value: 100uM ABA vs. No Treatment
  misc_feature: MA Experiment ID: 20000086 Result: Up-regulated in Transcription
  misc_feature: MA Experiment 20000086 PARAMETER Experiment Name: At_100uM_ABA_Mutants_cDNA_P Parameter: Plant Line Value: CS22
  misc_feature: MA Experiment 20000086 PARAMETER Experiment Name: At_100uM_ABA_Mutants_cDNA_P Parameter: Timepoint (hr) Value: 6
  misc_feature: MA Experiment 20000086 PARAMETER Experiment Name: At_100uM_ABA_Mutants_cDNA_P Parameter: Tissue Value: Aerial
  misc_feature: MA Experiment 20000086 PARAMETER Experiment Name: At_100uM_ABA_Mutants_cDNA_P Parameter: Treatment Value: 100uM ABA vs. No Treatment
  misc_feature: MA Experiment ID: 20000088 Result: Up-regulated in Transcription
  misc_feature: MA Experiment 20000088 PARAMETER Experiment Name: At_100uM_ABA_Mutants_cDNA_P Parameter: Plant Line Value: Landsberg
  misc_feature: MA Experiment 20000088 PARAMETER Experiment Name: At_100uM_ABA_Mutants_cDNA_P Parameter: Timepoint (hr) Value: 6
  misc_feature: MA Experiment 20000088 PARAMETER Experiment Name: At_100uM_ABA_Mutants_cDNA_P Parameter: Tissue Value: Aerial
  misc_feature: MA Experiment 20000088 PARAMETER Experiment Name: At_100uM_ABA_Mutants_cDNA_P Parameter: Treatment Value: 100uM ABA vs. No Treatment
  misc_feature: MA Experiment ID: 20000089 Result: Up-regulated in Transcription
  misc_feature: MA Experiment ID: 20000090 Result: Up-regulated in Transcription
  misc_feature: MA Experiment ID: 20000169 Result: Down-regulated in Transcription
  misc_feature: MA Experiment 20000169 PARAMETER Experiment Name: At_100uM_ABA_P Parameter: Age (day) Value: 14
  misc_feature: MA Experiment 20000169 PARAMETER Experiment Name: At_100uM_ABA_P Parameter: Organism Value: A. thaliana
  misc_feature: MA Experiment 20000169 PARAMETER Experiment Name: At_100uM_ABA_P Parameter: Plant Line Value: WS
  misc_feature: MA Experiment 20000169 PARAMETER Experiment Name: At_100uM_ABA_P Parameter: Timepoint (hr) Value: 6
  misc_feature: MA Experiment 20000169 PARAMETER Experiment Name: At_100uM_ABA_P Parameter: Tissue Value: Aerial
  misc_feature: MA Experiment 20000169 PARAMETER Experiment Name: At_100uM_ABA_P Parameter: Treatment Value: 100uM ABA vs. No Treatment
  misc_feature: MA Experiment ID: 20000182 Result: Down-regulated in Transcription
  misc_feature: MA Experiment 20000182 PARAMETER Experiment Name: At_2mM_SA_P Parameter: Age (day) Value: 14
  misc_feature: MA Experiment 20000182 PARAMETER Experiment Name: At_2mM_SA_P Parameter: Organism Value: A. thaliana
  misc_feature: MA Experiment 20000182 PARAMETER Experiment Name: At_2mM_SA_P Parameter: Plant Line Value: WS
  misc_feature: MA Experiment 20000182 PARAMETER Experiment Name: At_2mM_SA_P Parameter: Timepoint (hr) Value: 6
  misc_feature: MA Experiment 20000182 PARAMETER Experiment Name: At_2mM_SA_P Parameter: Tissue Value: Aerial
  misc_feature: MA Experiment 20000182 PARAMETER Experiment Name: At_2mM_SA_P Parameter: Treatment Value: 2mM SA vs. No Treatment
  misc_feature: MA Experiment ID: 20000185 Result: Down-regulated in Transcription
  misc_feature: MA Experiment 20000185 PARAMETER Experiment Name: At_Roots__P Parameter: Age (day) Value: 7 vs. 21
  misc_feature: MA Experiment 20000185 PARAMETER Experiment Name: At_Roots__P Parameter: Organism Value: A. thaliana
  misc_feature: MA Experiment 20000185 PARAMETER Experiment Name: At_Roots__P Parameter: Tissue Value: Roots vs. Whole Plant
  misc_feature: MA Experiment ID: 20000213 Result: Up-regulated in Transcription
  misc_feature: MA Experiment 20000213 PARAMETER Experiment Name: At_4deg_Cold_P Parameter: Timepoint (hr) Value: 2
  misc_feature: MA Experiment ID: 20000224 Result: Down-regulated in Transcription
  misc_feature: MA Experiment ID: 20000264 Result: Down-regulated in Transcription
  misc_feature: MA Experiment 20000264 PARAMETER Experiment Name: At_Open_Flower_P Parameter: Age (day) Value: 21
  misc_feature: MA Experiment 20000264 PARAMETER Experiment Name: At_Open_Flower_P Parameter: Plant Line Value: WS
  misc_feature: MA Experiment 20000264 PARAMETER Experiment Name: At_Open_Flower_P Parameter: Tissue Value: Open Flower vs. Whole Plant
  misc_feature: MA Experiment ID: 20000436 Result: Down-regulated in Transcription
  misc_feature: MA Experiment 20000436 PARAMETER Experiment Name: At_Drought_P Parameter: Age (day) Value: 7
  misc_feature: MA Experiment 20000436 PARAMETER Experiment Name: At_Drought_P Parameter: Organism Value: A. thaliana
  misc_feature: MA Experiment 20000436 PARAMETER Experiment Name: At_Drought_P Parameter: Plant Line Value: WS
  misc_feature: MA Experiment 20000436 PARAMETER Experiment Name: At_Drought_P Parameter: Timepoint (hr) Value: 12
  misc_feature: MA Experiment 20000436 PARAMETER Experiment Name: At_Drought_P Parameter: Tissue Value: Whole Plant
  misc_feature: MA Experiment 20000436 PARAMETER Experiment Name: At_Drought_P Parameter: Treatment Value: Drought vs. No Drought
  misc_feature: MA Experiment ID: 20000439 Result: Down-regulated in Transcription
  misc_feature: MA Experiment 20000439 PARAMETER Experiment Name: At_Roots__P Parameter: Age (day) Value: 14 vs. 21
  misc_feature: MA Experiment 20000439 PARAMETER Experiment Name: At_Roots__P Parameter: Organism Value: A. thaliana
  misc_feature: MA Experiment 20000439 PARAMETER Experiment Name: At_Roots__P Parameter: Tissue Value: Roots vs. Whole Plant
  misc_feature: MA Experiment ID: 20000527 Result: Up-regulated in Transcription
  misc_feature: MA Experiment 20000527 PARAMETER Experiment Name: At_10percent_PEG_P Parameter: Age (day) Value: 20
  misc_feature: MA Experiment 20000527 PARAMETER Experiment Name: At_10percent_PEG_P Parameter: Organism Value: A. thaliana
  misc_feature: MA Experiment 20000527 PARAMETER Experiment Name: At_10percent_PEG_P Parameter: Plant Line Value: WS
  misc_feature: MA Experiment 20000527 PARAMETER Experiment Name: At_10percent_PEG_P Parameter: Timepoint (day) Value: 20
  misc_feature: MA Experiment 20000527 PARAMETER Experiment Name: At_10percent_PEG_P Parameter: Tissue Value: Whole Plant
  misc_feature: MA Experiment 20000527 PARAMETER Experiment Name: At_10percent_PEG_P Parameter: Treatment Value: 10percent PEG vs. No Treatment
  misc_feature: MA Experiment ID: 20000709 Result: Up-regulated in Transcription
  misc_feature: MA Experiment 20000709 PARAMETER Experiment Name: At_15mM_NH4NO3_L-to-H_P Parameter: Age (hr) Value: 14
  misc_feature: MA Experiment 20000709 PARAMETER Experiment Name: At_15mM_NH4NO3_L-to-H_P Parameter: Organism Value: A. thaliana
  misc_feature: MA Experiment 20000709 PARAMETER Experiment Name: At_15mM_NH4NO3_L-to-H_P Parameter: Plant Line Value: WS
  misc_feature: MA Experiment 20000709 PARAMETER Experiment Name: At_15mM_NH4NO3_L-to-H_P Parameter: Timepoint (hr) Value: 4
  misc_feature: MA Experiment 20000709 PARAMETER Experiment Name: At_15mM_NH4NO3_L-to-H_P Parameter: Tissue Value: Aerial
  misc_feature: MA Experiment 20000709 PARAMETER Experiment Name: At_15mM_NH4NO3_L-to-H_P Parameter: Treatment Value: 15mM NH4NO3 vs. 30mM Mannitol
  misc_feature: MA Experiment ID: 20000794 Result: Down-regulated in Transcription
  misc_feature: MA Experiment 20000794 PARAMETER Experiment Name: At_Petals_P Parameter: Age (day) Value: 23-25 days
  misc_feature: MA Experiment 20000794 PARAMETER Experiment Name: At_Petals_P Parameter: Plant Line Value: WS
  misc_feature: MA Experiment 20000794 PARAMETER Experiment Name: At_Petals_P Parameter: Tissue Value: Petals vs. Whole plant
  misc_feature: MA Experiment ID: 20001248 Result: Up-regulated in Transcription
  misc_feature: MA Experiment 20001248 PARAMETER Experiment Name: At_Far-red-induction_P Parameter: Age (day) Value: 7
  misc_feature: MA Experiment 20001248 PARAMETER Experiment Name: At_Far-red-induction_P Parameter: Light Value: Far-red vs. White
  misc_feature: MA Experiment 20001248 PARAMETER Experiment Name: At_Far-red-induction_P Parameter: Organism Value: A. thaliana
  misc_feature: MA Experiment 20001248 PARAMETER Experiment Name: At_Far-red-induction_P Parameter: Plant Line Value: Columbia
  misc_feature: MA Experiment 20001248 PARAMETER Experiment Name: At_Far-red-induction_P Parameter: Timepoint (hr) Value: 4
  misc_feature: MA Experiment 20001248 PARAMETER Experiment Name: At_Far-red-induction_P Parameter: Tissue Value: Whole Plant
  misc_feature: MA Experiment ID: 20001458 Result: Up-regulated in Transcription
  misc_feature: MA Experiment 20001458 PARAMETER Experiment Name: At_50mM_NH4NO3_L-to-H_P Parameter: Age (day) Value: Undefined
  misc_feature: MA Experiment 20001458 PARAMETER Experiment Name: At_50mM_NH4NO3_L-to-H_P Parameter: Organism Value: Undefined
  misc_feature: MA Experiment 20001458 PARAMETER Experiment Name: At_50mM_NH4NO3_L-to-H_P Parameter: Plant Line Value: Undefined
  misc_feature: MA Experiment 20001458 PARAMETER Experiment Name: At_50mM_NH4NO3_L-to-H_P Parameter: Timepoint (hr) Value: 2
  misc_feature: MA Experiment 20001458 PARAMETER Experiment Name: At_50mM_NH4NO3_L-to-H_P Parameter: Tissue Value: Siliques
  misc_feature: MA Experiment 20001458 PARAMETER Experiment Name: At_50mM_NH4NO3_L-to-H_P Parameter: Treatment Value: 50mM NH4NO3 vs. 100mM Manitol
  misc_feature: MA Experiment ID: 20001556 Result: Up-regulated in Transcription
  misc_feature: MA Experiment 20001556 PARAMETER Experiment Name: At_Drought_Soil_Dry_P Parameter: Age (day) Value: 26
  misc_feature: MA Experiment 20001556 PARAMETER Experiment Name: At_Drought_Soil_Dry_P Parameter: Organism Value: A. thaliana
  misc_feature: MA Experiment 20001556 PARAMETER Experiment Name: At_Drought_Soil_Dry_P Parameter: Plant Line Value: WS
  misc_feature: MA Experiment 20001556 PARAMETER Experiment Name: At_Drought_Soil_Dry_P Parameter: Post Timepoint (hr) Value: None
  misc_feature: MA Experiment 20001556 PARAMETER Experiment Name: At_Drought_Soil_Dry_P Parameter: Post-Treatment Value: None
  misc_feature: MA Experiment 20001556 PARAMETER Experiment Name: At_Drought_Soil_Dry_P Parameter: Timepoint (day) Value: 12
  misc_feature: MA Experiment 20001556 PARAMETER Experiment Name: At_Drought_Soil_Dry_P Parameter: Treatment Value: Drought vs. No Drought
  misc_feature: MA Experiment ID: 20001557 Result: Up-regulated in Transcription
  misc_feature: MA Experiment 20001557 PARAMETER Experiment Name: At_Drought_Soil_Dry_P Parameter: Age (day) Value: 27
  misc_feature: MA Experiment 20001557 PARAMETER Experiment Name: At_Drought_Soil_Dry_P Parameter: Organism Value: A. thaliana
  misc_feature: MA Experiment 20001557 PARAMETER Experiment Name: At_Drought_Soil_Dry_P Parameter: Plant Line Value: WS
  misc_feature: MA Experiment 20001557 PARAMETER Experiment Name: At_Drought_Soil_Dry_P Parameter: Post Timepoint (hr) Value: 3
  misc_feature: MA Experiment 20001557 PARAMETER Experiment Name: At_Drought_Soil_Dry_P Parameter: Post-Treatment Value: Re-Water vs. No Drought
  misc_feature: MA Experiment 20001557 PARAMETER Experiment Name: At_Drought_Soil_Dry_P Parameter: Timepoint (day) Value: 13
  misc_feature: MA Experiment 20001557 PARAMETER Experiment Name: At_Drought_Soil_Dry_P Parameter: Treatment Value: Drought vs. No Drought
  misc_feature: MA Experiment ID: 20001558 Result: Up-regulated in Transcription
  misc_feature: MA Experiment 20001558 PARAMETER Experiment Name: At_Drought_Soil_Dry_P Parameter: Age (day) Value: 27
  misc_feature: MA Experiment 20001558 PARAMETER Experiment Name: At_Drought_Soil_Dry_P Parameter: Organism Value: A. thaliana
  misc_feature: MA Experiment 20001558 PARAMETER Experiment Name: At_Drought_Soil_Dry_P Parameter: Plant Line Value: WS
  misc_feature: MA Experiment 20001558 PARAMETER Experiment Name: At_Drought_Soil_Dry_P Parameter: Post Timepoint (hr) Value: 6
  misc_feature: MA Experiment 20001558 PARAMETER Experiment Name: At_Drought_Soil_Dry_P Parameter: Post-Treatment Value: Re-Water vs. No Drought
  misc_feature: MA Experiment 20001558 PARAMETER Experiment Name: At_Drought_Soil_Dry_P Parameter: Timepoint (day) Value: 13
  misc_feature: MA Experiment 20001558 PARAMETER Experiment Name: At_Drought_Soil_Dry_P Parameter: Treatment Value: Drought vs. No Drought
  misc_feature: MA Experiment ID: 20001560 Result: Up-regulated in Transcription
  misc_feature: MA Experiment 20001560 PARAMETER Experiment Name: At_Drought_Soil_Dry_P Parameter: Age (day) Value: 28
  misc_feature: MA Experiment 20001560 PARAMETER Experiment Name: At_Drought_Soil_Dry_P Parameter: Organism Value: A. thaliana
  misc_feature: MA Experiment 20001560 PARAMETER Experiment Name: At_Drought_Soil_Dry_P Parameter: Plant Line Value: WS
  misc_feature: MA Experiment 20001560 PARAMETER Experiment Name: At_Drought_Soil_Dry_P Parameter: Post Timepoint (hr) Value: None
  misc_feature: MA Experiment 20001560 PARAMETER Experiment Name: At_Drought_Soil_Dry_P Parameter: Post-Treatment Value: None
  misc_feature: MA Experiment 20001560 PARAMETER Experiment Name: At_Drought_Soil_Dry_P Parameter: Timepoint (day) Value: 14
  misc_feature: MA Experiment 20001560 PARAMETER Experiment Name: At_Drought_Soil_Dry_P Parameter: Treatment Value: Drought vs. No Drought
  misc_feature: MA Experiment ID: 20001757 Result: Up-regulated in Transcription
  misc_feature: MA Experiment 20001757 PARAMETER Experiment Name: At_50mM_NH4NO3_L-to-H_P Parameter: Timepoint (hr) Value: 6
  misc_feature: MA Experiment 20001757 PARAMETER Experiment Name: At_50mM_NH4NO3_L-to-H_P Parameter: Tissue Value: Leaf
  misc_feature: MA Experiment 20001757 PARAMETER Experiment Name: At_50mM_NH4NO3_L-to-H_P Parameter: Treatment Value: 50mM NH4NO3 vs 100mM Mannitol
  misc_feature: MA Experiment ID: 20001905 Result: Down-regulated in Transcription
  misc_feature: MA Experiment 20001905 PARAMETER Experiment Name: At_Drought_Reproduction_P Parameter: Age (day) Value: 40
  misc_feature: MA Experiment 20001905 PARAMETER Experiment Name: At_Drought_Reproduction_P Parameter: Organism Value: A. thaliana
  misc_feature: MA Experiment 20001905 PARAMETER Experiment Name: At_Drought_Reproduction_P Parameter: Plant Line Value: WS
  misc_feature: MA Experiment 20001905 PARAMETER Experiment Name: At_Drought_Reproduction_P Parameter: Timepoint (day) Value: 10
  misc_feature: MA Experiment 20001905 PARAMETER Experiment Name: At_Drought_Reproduction_P Parameter: Tissue Value: Rosettes
  misc_feature: MA Experiment 20001905 PARAMETER Experiment Name: At_Drought_Reproduction_P Parameter: Treatment Value: Drought vs. No Drought

SEQ ID NO: 93106 - protein, 342 aa, Arabidopsis thaliana; identical to SEQ ID NO: 24722
  peptide (1)..(342): Ceres Seq. ID no. 12718176
  misc_feature (193)..(263): Pfam Name: Dec-1 protein, C terminal region Pfam Description: Dec-1 protein, C terminal region
  misc_feature (1)..(342): Homolog of NCBI NO: 15231817 NR Description: 29 kDa ribonucleoprotein, chloroplast precursor protein cp29); protein id: At3g53460.1, supported by cDNA: supported by cDNA: gi_14532569, supported by cDNA: gi_18655392
  misc_feature (1)..(342): Homolog of NCBI NO: 30693824 NR Description: 29 kDa ribonucleoprotein, chloroplast
  misc_feature (9)..(342): Homolog of NCBI NO: 681904 NR Description: cp29 [Arabidopsis thaliana]
  misc_feature (1)..(212): Homolog of NCBI NO: 21617920 NR Description: putative RNA-binding protein [Arabidopsis
  misc_feature (234)..(342): Homolog of NCBI NO: 21617920 NR Description: putative RNA-binding protein [Arabidopsis
  misc_feature (1)..(212): Homolog of NCBI NO: 15228102 NR Description: chloroplast RNA-binding protein cp29, putative; id: At2g37220.1, supported by cDNA: 8849., supported by cDNA: supported by cDNA: gi_15081716, supported by cDNA: gi_16323481
  misc_feature (234)..(342): Homolog of NCBI NO: 15228102 NR Description: chloroplast RNA-binding protein cp29, putative; id: At2g37220.1, supported by cDNA: 8849., supported by cDNA: supported by cDNA: gi_15081716, supported by cDNA: gi_16323481
  misc_feature (1)..(201): Homolog of NCBI NO: 1350820 NR Description: 30 kDa ribonucleoprotein, chloroplast precursor
  misc_feature (239)..(342): Homolog of NCBI NO: 1350820 NR Description: 30 kDa ribonucleoprotein, chloroplast precursor
  misc_feature (8)..(208): Homolog of NCBI NO: 12230585 NR Description: 29 kDa ribonucleoprotein B, chloroplast precursor

SEQ ID NO: 93107 - protein, 263 aa, Arabidopsis thaliana; identical to SEQ ID NO: 24723
  peptide (1)..(263): Ceres Seq. ID no. 12718177
  misc_feature (114)..(184): Pfam Name: Dec-1 protein, C terminal region Pfam Description: Dec-1 protein, C terminal region
  misc_feature (1)..(263): Homolog of NCBI NO: 15231817 NR Description: 29 kDa ribonucleoprotein, chloroplast precursor protein cp29); protein id: At3g53460.1, supported by cDNA: supported by cDNA: gi_14532569, supported by cDNA: gi_18655392
  misc_feature (1)..(263): Homolog of NCBI NO: 30693824 NR Description: 29 kDa ribonucleoprotein, chloroplast
  misc_feature (1)..(263): Homolog of NCBI NO: 681904 NR Description: cp29 [Arabidopsis thaliana]
  misc_feature (1)..(133): Homolog of NCBI NO: 21617920 NR Description: putative RNA-binding protein [Arabidopsis
  misc_feature (155)..(263): Homolog of NCBI NO: 21617920 NR Description: putative RNA-binding protein [Arabidopsis
  misc_feature (1)..(133): Homolog of NCBI NO: 15228102 NR Description: chloroplast RNA-binding protein cp29, putative; id: At2g37220.1, supported by cDNA: 8849., supported by cDNA: supported by cDNA: gi_15081716, supported by cDNA: gi_16323481
  misc_feature (155)..(263): Homolog of NCBI NO: 15228102 NR Description: chloroplast RNA-binding protein cp29, putative; id: At2g37220.1, supported by cDNA: 8849., supported by cDNA: supported by cDNA: gi_15081716, supported by cDNA: gi_16323481
  misc_feature (1)..(122): Homolog of NCBI NO: 1350820 NR Description: 30 kDa ribonucleoprotein, chloroplast precursor
  misc_feature (160)..(263): Homolog of NCBI NO: 1350820 NR Description: 30 kDa ribonucleoprotein, chloroplast precursor
  misc_feature (1)..(129): Homolog of NCBI NO: 12230585 NR Description: 29 kDa ribonucleoprotein B, chloroplast precursor

SEQ ID NO: 93108 - protein, 216 aa, Arabidopsis thaliana; identical to SEQ ID NO: 24724
  peptide (1)..(216): Ceres Seq. ID no. 12718178
  misc_feature (67)..(137): Pfam Name: Dec-1 protein, C terminal region Pfam Description: Dec-1 protein, C terminal region
  misc_feature (1)..(216): Homolog of NCBI NO: 15231817 NR Description: 29 kDa ribonucleoprotein, chloroplast precursor protein cp29); protein id: At3g53460.1, supported by cDNA: supported by cDNA: gi_14532569, supported by cDNA: gi_18655392
  misc_feature (1)..(216): Homolog of NCBI NO: 30693824 NR Description: 29 kDa ribonucleoprotein, chloroplast
  misc_feature (1)..(216): Homolog of NCBI NO: 681904 NR Description: cp29 [Arabidopsis thaliana]
  misc_feature (1)..(86): Homolog of NCBI NO: 21617920 NR Description: putative RNA-binding protein [Arabidopsis
  misc_feature (108)..(216): Homolog of NCBI NO: 21617920 NR Description: putative RNA-binding protein [Arabidopsis
  misc_feature (1)..(86): Homolog of NCBI NO: 15228102 NR Description: chloroplast RNA-binding protein cp29, putative; id: At2g37220.1, supported by cDNA: 8849., supported by cDNA: supported by cDNA: gi_15081716, supported by cDNA: gi_16323481
  misc_feature (108)..(216): Homolog of NCBI NO: 15228102 NR Description: chloroplast RNA-binding protein cp29, putative; id: At2g37220.1, supported by cDNA: 8849., supported by cDNA: supported by cDNA: gi_15081716, supported by cDNA: gi_16323481
  misc_feature (1)..(75): Homolog of NCBI NO: 1350820 NR Description: 30 kDa ribonucleoprotein, chloroplast precursor
  misc_feature (113)..(216): Homolog of NCBI NO: 1350820 NR Description: 30 kDa ribonucleoprotein, chloroplast precursor
  misc_feature (1)..(82): Homolog of NCBI NO: 12230585 NR Description: 29 kDa ribonucleoprotein B, chloroplast precursor

SEQ ID NO: 93109 - DNA, 968 bp, Arabidopsis thaliana; identical to SEQ ID NO: 89353
  misc_feature (1)..(968): Ceres Seq. ID no. 12718223
  misc_feature: MA Experiment ID: 108595 Result: Down-regulated in Transcription
  misc_feature: MA Experiment 108595 PARAMETER Experiment Name: At_Ler-pi_Ovule_cDNA_P Parameter: Plant Line Value: null
  misc_feature: MA Experiment ID: 20000071 Result: Down-regulated in Transcription
  misc_feature: MA Experiment 20000071 PARAMETER Experiment Name: At_100uM_ABA_Mutants_cDNA_P Parameter: Plant Line Value: CS8104
  misc_feature: MA Experiment 20000071 PARAMETER Experiment Name: At_100uM_ABA_Mutants_cDNA_P Parameter: Timepoint (hr) Value: 6
  misc_feature: MA Experiment 20000071 PARAMETER Experiment Name: At_100uM_ABA_Mutants_cDNA_P Parameter: Tissue Value: Aerial
  misc_feature: MA Experiment 20000071 PARAMETER Experiment Name: At_100uM_ABA_Mutants_cDNA_P Parameter: Treatment Value: 100uM ABA vs. No Treatment
  misc_feature: MA Experiment ID: 20000180 Result: Down-regulated in Transcription
  misc_feature: MA Experiment 20000180 PARAMETER Experiment Name: At_Germinating_Seeds_P Parameter: Age (hr) Value: 24 vs. 0
  misc_feature: MA Experiment 20000180 PARAMETER Experiment Name: At_Germinating_Seeds_P Parameter: Tissue Value: Germinating Seeds
  misc_feature: MA Experiment ID: 20000184 Result: Up-regulated in Transcription
  misc_feature: MA Experiment 20000184 PARAMETER Experiment Name: At_Shoots__P Parameter: Age (day) Value: 7
  misc_feature: MA Experiment 20000184 PARAMETER Experiment Name: At_Shoots__P Parameter: Tissue Value: Shoots vs. Whole Plant
  misc_feature: MA Experiment ID: 20000234 Result: Up-regulated in Transcription
  misc_feature: MA Experiment 20000234 PARAMETER Experiment Name: At_Siliques_P Parameter: Age (day) Value: 21
  misc_feature: MA Experiment 20000234 PARAMETER Experiment Name: At_Siliques_P Parameter: Organism Value: A. thaliana
  misc_feature: MA Experiment 20000234 PARAMETER Experiment Name: At_Siliques_P Parameter: Plant Line Value: WS
  misc_feature: MA Experiment 20000234 PARAMETER Experiment Name: At_Siliques_P Parameter: Tissue Value: Less Than 5mm Siliques vs. Whole Plant
  misc_feature: MA Experiment ID: 20001451 Result: Down-regulated in Transcription
  misc_feature: MA Experiment 20001451 PARAMETER Experiment Name: At_Far-red-induction_P Parameter: Age (day) Value: 7
  misc_feature: MA Experiment 20001451 PARAMETER Experiment Name: At_Far-red-induction_P Parameter: Light Value: Far-red vs. White
  misc_feature: MA Experiment 20001451 PARAMETER Experiment Name: At_Far-red-induction_P Parameter: Organism Value: A. thaliana
  misc_feature: MA Experiment 20001451 PARAMETER Experiment Name: At_Far-red-induction_P Parameter: Plant Line Value: Columbia
  misc_feature: MA Experiment 20001451 PARAMETER Experiment Name: At_Far-red-induction_P Parameter: Timepoint (hr) Value: 24
  misc_feature: MA Experiment 20001451 PARAMETER Experiment Name: At_Far-red-induction_P Parameter: Tissue Value: Whole Plant
  misc_feature: MA Experiment ID: 20001557 Result: Up-regulated in Transcription
  misc_feature: MA Experiment 20001557 PARAMETER Experiment Name: At_Drought_Soil_Dry_P Parameter: Age (day) Value: 27
  misc_feature: MA Experiment 20001557 PARAMETER Experiment Name: At_Drought_Soil_Dry_P Parameter: Organism Value: A. thaliana
  misc_feature: MA Experiment 20001557 PARAMETER Experiment Name: At_Drought_Soil_Dry_P Parameter: Plant Line Value: WS
  misc_feature: MA Experiment 20001557 PARAMETER Experiment Name: At_Drought_Soil_Dry_P Parameter: Post Timepoint (hr) Value: 3
  misc_feature: MA Experiment 20001557 PARAMETER Experiment Name: At_Drought_Soil_Dry_P Parameter: Post-Treatment Value: Re-Water vs. No Drought
  misc_feature: MA Experiment 20001557 PARAMETER Experiment Name: At_Drought_Soil_Dry_P Parameter: Timepoint (day) Value: 13
  misc_feature: MA Experiment 20001557 PARAMETER Experiment Name: At_Drought_Soil_Dry_P Parameter: Treatment Value: Drought vs. No Drought
  misc_feature: MA Experiment ID: 20001558 Result: Up-regulated in Transcription
  misc_feature: MA Experiment 20001558 PARAMETER Experiment Name: At_Drought_Soil_Dry_P Parameter: Age (day) Value: 27
  misc_feature: MA Experiment 20001558 PARAMETER Experiment Name: At_Drought_Soil_Dry_P Parameter: Organism Value: A. thaliana
  misc_feature: MA Experiment 20001558 PARAMETER Experiment Name: At_Drought_Soil_Dry_P Parameter: Plant Line Value: WS
  misc_feature: MA Experiment 20001558 PARAMETER Experiment Name: At_Drought_Soil_Dry_P Parameter: Post Timepoint (hr) Value: 6
  misc_feature: MA Experiment 20001558 PARAMETER Experiment Name: At_Drought_Soil_Dry_P Parameter: Post-Treatment Value: Re-Water vs. No Drought
  misc_feature: MA Experiment 20001558 PARAMETER Experiment Name: At_Drought_Soil_Dry_P Parameter: Timepoint (day) Value: 13
  misc_feature: MA Experiment 20001558 PARAMETER Experiment Name: At_Drought_Soil_Dry_P Parameter: Treatment Value: Drought vs. No Drought
  misc_feature: MA Experiment ID: 20001757 Result: Up-regulated in Transcription
  misc_feature: MA Experiment 20001757 PARAMETER Experiment Name: At_50mM_NH4NO3_L-to-H_P Parameter: Timepoint (hr) Value: 6
  misc_feature: MA Experiment 20001757 PARAMETER Experiment Name: At_50mM_NH4NO3_L-to-H_P Parameter: Tissue Value: Leaf
  misc_feature: MA Experiment 20001757 PARAMETER Experiment Name: At_50mM_NH4NO3_L-to-H_P Parameter: Treatment Value: 50mM NH4NO3 vs 100mM Mannitol

SEQ ID NO: 93110 - protein, 249 aa, Arabidopsis thaliana; identical to SEQ ID NO: 28293
  peptide (1)..(249): Ceres Seq. ID no. 12718224
  misc_feature (104)..(188): Pfam Name: Ribosomal protein S3, C-terminal domain Pfam Description: Ribosomal protein S3, C-terminal domain
  misc_feature (1)..(249): Homolog of NCBI NO: 15232352 NR Description: 40S ribosomal protein S3, putative; protein id: supported by cDNA: 9568., supported by cDNA: gi_14334697, by cDNA: gi_16226457, supported by cDNA: gi_16323403 [Arabidopsis
  misc_feature (1)..(247): Homolog of NCBI NO: 15225107 NR Description: 40S ribosomal protein S3, putative; protein id: supported by cDNA: gi_14190418, supported by cDNA: gi_15028252, by cDNA: gi_15450570, supported by cDNA: gi_15451083, protein
  misc_feature (1)..(249): Homolog of NCBI NO: 15238533 NR Description: 40S ribosomal protein S3; protein id: supported by cDNA: 10394., supported by cDNA: gi_16604317, by cDNA: gi_20466074 [Arabidopsis thaliana]
  misc_feature (3)..(230): Homolog of NCBI NO: 14192875 NR Description: Putative 40S ribosomal protein; contains
  misc_feature (1)..(225): Homolog of NCBI NO: 22204124 NR Description: putative 40S ribosomal protein S3 [Triticum
  misc_feature (1)..(249): Homolog of NCBI NO: 38512247 NR Description: Ribosomal protein S3 [Silurana tropicalis]
  misc_feature (1)..(216): Homolog of NCBI NO: 12847921 NR Description: unnamed protein product [Mus musculus]
  misc_feature (1)..(249): Homolog of NCBI NO: 133940 NR Description: 40S ribosomal protein S3A (S1A)
  misc_feature (1)..(216): Homolog of NCBI NO: 6755372 NR Description: ribosomal protein S3 [Mus musculus] similar to ribosomal protein S3 [Mus musculus] [Rattus >gi|1173253|sp|P17073|RS3_MOUSE 40S ribosomal protein S3
  misc_feature (1)..(216): Homolog of NCBI NO: 27735393 NR Description: Similar to ribosomal protein S3 [Xenopus laevis]

SEQ ID NO: 93111 - protein, 206 aa, Arabidopsis thaliana; identical to SEQ ID NO: 28294
  peptide (1)..(206): Ceres Seq. ID no. 12718225
  misc_feature (61)..(145): Pfam Name: Ribosomal protein S3, C-terminal domain Pfam Description: Ribosomal protein S3, C-terminal domain
  misc_feature (1)..(206): Homolog of NCBI NO: 15232352 NR Description: 40S ribosomal protein S3, putative; protein id: supported by cDNA: 9568., supported by cDNA: gi_14334697, by cDNA: gi_16226457, supported by cDNA: gi_16323403 [Arabidopsis
  misc_feature (1)..(204): Homolog of NCBI NO: 15225107 NR Description: 40S ribosomal protein S3, putative; protein id: supported by cDNA: gi_14190418, supported by cDNA: gi_15028252, by cDNA: gi_15450570, supported by cDNA: gi_15451083, protein
  misc_feature (1)..(206): Homolog of NCBI NO: 15238533 NR Description: 40S ribosomal protein S3; protein id: supported by cDNA: 10394., supported by cDNA: gi_16604317, by cDNA: gi_20466074 [Arabidopsis thaliana]
  misc_feature (1)..(187): Homolog of NCBI NO: 14192875 NR Description: Putative 40S ribosomal protein; contains
  misc_feature (1)..(182): Homolog of NCBI NO: 22204124 NR Description: putative 40S ribosomal protein S3 [Triticum
  misc_feature (1)..(206): Homolog of NCBI NO: 38512247 NR Description: Ribosomal protein S3 [Silurana tropicalis]
  misc_feature (1)..(173): Homolog of NCBI NO: 12847921 NR Description: unnamed protein product [Mus musculus]
  misc_feature (1)..(206): Homolog of NCBI NO: 133940 NR Description: 40S ribosomal protein S3A (S1A)
  misc_feature (1)..(173): Homolog of NCBI NO: 6755372 NR Description: ribosomal protein S3 [Mus musculus] similar to ribosomal protein S3 [Mus musculus] [Rattus >gi|1173253|sp|P17073|RS3_MOUSE 40S ribosomal protein S3
  misc_feature (1)..(173): Homolog of NCBI NO: 27735393 NR Description: Similar to ribosomal protein S3 [Xenopus laevis]

SEQ ID NO: 93112 - DNA, 1258 bp, Arabidopsis thaliana; identical to SEQ ID NO: 89356
  misc_feature (1)..(1258): Ceres Seq. ID no. 12718251
  misc_feature: MA Experiment ID: 20000179 Result: Up-regulated in Transcription
  misc_feature: MA Experiment 20000179 PARAMETER Experiment Name: At_Germinating_Seeds_P Parameter: Age (hr) Value: 6 vs. 0
  misc_feature: MA Experiment 20000179 PARAMETER Experiment Name: At_Germinating_Seeds_P Parameter: Tissue Value: Germinating Seeds

SEQ ID NO: 93113 - protein, 306 aa, Arabidopsis thaliana; identical to SEQ ID NO: 41422
  peptide (1)..(306): Ceres Seq. ID no. 12718252
  misc_feature (1)..(306): Homolog of NCBI NO: 15232420 NR Description: uncoupling protein (ucp/PUMP); protein id: supported by cDNA: gi_15810466, supported by cDNA: gi_20259562, by cDNA: gi_7673022 [Arabidopsis thaliana]
  misc_feature (1)..(306): Homolog of NCBI NO: 25295878 NR Description: uncoupling protein [imported] - Arabidopsis >gi|3115108|emb|CAA11757.1| plant uncoupling mitochondrial
  misc_feature (5)..(302): Homolog of NCBI NO: 7489287 NR Description: uncoupling protein (clone StUCP7), mitochonrial - >gi|2398829|emb|CAA72107.1| mitochondrial uncoupling protein
  misc_feature (5)..(302): Homolog of NCBI NO: 18921040 NR Description: putative uncoupling protein [Lycopersicon
  misc_feature (4)..(299): Homolog of NCBI NO: 22002462 NR Description: mitochondrial uncoupling protein [Helicodiceros
  misc_feature (18)..(300): Homolog of NCBI NO: 7106157 NR Description: SfUCPa [Symplocarpus foetidus]
  misc_feature (6)..(299): Homolog of NCBI NO: 19401698 NR Description: uncoupling protein [Zea mays]
  misc_feature (6)..(299): Homolog of NCBI NO: 13537347 NR Description: uncoupling protein [Oryza sativa (japonica
  misc_feature (8)..(300): Homolog of NCBI NO: 18424178 NR Description: uncoupling protein (AtUCP2); protein id: supported by cDNA: 42926., supported by cDNA: gi_4063006 thaliana] >gi|4063007|dbj|BAA36222.1| uncoupling protein
  misc_feature (38)..(279): Homolog of NCBI NO: 14599482 NR Description: putative mitochondrial uncoupling protein

SEQ ID NO: 93114 - protein, 212 aa, Arabidopsis thaliana; identical to SEQ ID NO: 41423
  peptide (1)..(212): Ceres Seq. ID no. 12718253
  misc_feature (1)..(212): Homolog of NCBI NO: 15232420 NR Description: uncoupling protein (ucp/PUMP); protein id: supported by cDNA: gi_15810466, supported by cDNA: gi_20259562, by cDNA: gi_7673022 [Arabidopsis thaliana]
  misc_feature (1)..(212): Homolog of NCBI NO: 25295878 NR Description: uncoupling protein [imported] - Arabidopsis >gi|3115108|emb|CAA11757.1| plant uncoupling mitochondrial
  misc_feature (1)..(208): Homolog of NCBI NO: 7489287 NR Description: uncoupling protein (clone StUCP7), mitochonrial - >gi|2398829|emb|CAA72107.1| mitochondrial uncoupling protein
  misc_feature (1)..(208): Homolog of NCBI NO: 18921040 NR Description: putative uncoupling protein [Lycopersicon
  misc_feature (1)..(205): Homolog of NCBI NO: 22002462 NR Description: mitochondrial uncoupling protein [Helicodiceros
  misc_feature (1)..(206): Homolog of NCBI NO: 7106157 NR Description: SfUCPa [Symplocarpus foetidus]
  misc_feature (1)..(205): Homolog of NCBI NO: 19401698 NR Description: uncoupling protein [Zea mays]
  misc_feature (1)..(205): Homolog of NCBI NO: 13537347 NR Description: uncoupling protein [Oryza sativa (japonica
  misc_feature (1)..(206): Homolog of NCBI NO: 18424178 NR Description: uncoupling protein (AtUCP2); protein id: supported by cDNA: 42926., supported by cDNA: gi_4063006 thaliana] >gi|4063007|dbj|BAA36222.1| uncoupling protein
  misc_feature (1)..(185): Homolog of NCBI NO: 14599482 NR Description: putative mitochondrial uncoupling protein

SEQ ID NO: 93115 - protein, 177 aa, Arabidopsis thaliana; identical to SEQ ID NO: 41424
  peptide (1)..(177): Ceres Seq. ID no. 12718254
  misc_feature (1)..(177): Homolog of NCBI NO: 15232420 NR Description: uncoupling protein (ucp/PUMP); protein id: supported by cDNA: gi_15810466, supported by cDNA: gi_20259562, by cDNA: gi_7673022 [Arabidopsis thaliana]
  misc_feature (1)..(177): Homolog of NCBI NO: 25295878 NR Description: uncoupling protein [imported] - Arabidopsis >gi|3115108|emb|CAA11757.1| plant uncoupling mitochondrial
  misc_feature (1)..(173): Homolog of NCBI NO: 7489287 NR Description: uncoupling protein (clone StUCP7), mitochonrial - >gi|2398829|emb|CAA72107.1| mitochondrial uncoupling protein
  misc_feature (1)..(173): Homolog of NCBI NO: 18921040 NR Description: putative uncoupling protein [Lycopersicon
  misc_feature (1)..(170): Homolog of NCBI NO: 22002462 NR Description: mitochondrial uncoupling protein [Helicodiceros
  misc_feature (1)..(171): Homolog of NCBI NO: 7106157 NR Description: SfUCPa [Symplocarpus foetidus]
  misc_feature (1)..(170): Homolog of NCBI NO: 19401698 NR Description: uncoupling protein [Zea mays]
  misc_feature (1)..(170): Homolog of NCBI NO: 13537347 NR Description: uncoupling protein [Oryza sativa (japonica
  misc_feature (1)..(171): Homolog of NCBI NO: 18424178 NR Description: uncoupling protein (AtUCP2); protein id: supported by cDNA: 42926., supported by cDNA: gi_4063006 thaliana] >gi|4063007|dbj|BAA36222.1| uncoupling protein
  misc_feature (1)..(150): Homolog of NCBI NO: 14599482 NR Description: putative mitochondrial uncoupling protein

SEQ ID NO: 93116 - DNA, 1809 bp, Arabidopsis thaliana; identical to SEQ ID NO: 89360
  misc_feature (1)..(1809): Ceres Seq. ID no. 12718263
  misc_feature: MA Experiment ID: 20000314 Result: Up-regulated in Transcription
  misc_feature: MA Experiment 20000314 PARAMETER Experiment Name: At_14day_Shoots-Roots_Sub_P Parameter: Age (day) Value: 14
  misc_feature: MA Experiment 20000314 PARAMETER Experiment Name: At_14day_Shoots-Roots_Sub_P Parameter: Organism Value: A. thaliana
  misc_feature: MA Experiment 20000314 PARAMETER Experiment Name: At_14day_Shoots-Roots_Sub_P Parameter: Plant Line Value: WS
  misc_feature: MA Experiment 20000314 PARAMETER Experiment Name: At_14day_Shoots-Roots_Sub_P Parameter: Tissue Value: Roots vs. Whole Plant
  misc_feature: MA Experiment ID: 20000315 Result: Down-regulated in Transcription
  misc_feature: MA Experiment 20000315 PARAMETER Experiment Name: At_14day_Shoots-Roots_Sub_P Parameter: Age (day) Value: 14
  misc_feature: MA Experiment 20000315 PARAMETER Experiment Name: At_14day_Shoots-Roots_Sub_P Parameter: Organism Value: A. thaliana
  misc_feature: MA Experiment 20000315 PARAMETER Experiment Name: At_14day_Shoots-Roots_Sub_P Parameter: Plant Line Value: WS
  misc_feature: MA Experiment 20000315 PARAMETER Experiment Name: At_14day_Shoots-Roots_Sub_P Parameter: Tissue Value: Shoots vs. Whole Plant
  misc_feature: MA Experiment ID: 20000328 Result: Down-regulated in Transcription
  misc_feature: MA Experiment 20000328 PARAMETER Experiment Name: At_42deg_Heat_Sub_P Parameter: Age (day) Value: 14
  misc_feature: MA Experiment 20000328 PARAMETER Experiment Name: At_42deg_Heat_Sub_P Parameter: Organism Value: A. thaliana
  misc_feature: MA Experiment 20000328 PARAMETER Experiment Name: At_42deg_Heat_Sub_P Parameter: Plant Line Value: WS
  misc_feature: MA Experiment 20000328 PARAMETER Experiment Name: At_42deg_Heat_Sub_P Parameter: Temperature (deg C) Value: 42 vs. 22
  misc_feature: MA Experiment 20000328 PARAMETER Experiment Name: At_42deg_Heat_Sub_P Parameter: Timepoint (hr) Value: 6
  misc_feature: MA Experiment 20000328 PARAMETER Experiment Name: At_42deg_Heat_Sub_P Parameter: Tissue Value: Aerial
  misc_feature: MA Experiment ID: 20000355 Result: Down-regulated in Transcription
  misc_feature: MA Experiment 20000355 PARAMETER Experiment Name: At_Siliques_Sub_P Parameter: Age (day) Value: 21
  misc_feature: MA Experiment 20000355 PARAMETER Experiment Name: At_Siliques_Sub_P Parameter: Organism Value: A. thaliana
  misc_feature: MA Experiment 20000355 PARAMETER Experiment Name: At_Siliques_Sub_P Parameter: Plant Line Value: WS
  misc_feature: MA Experiment 20000355 PARAMETER Experiment Name: At_Siliques_Sub_P Parameter: Tissue Value: Less Than 5mm Siliques vs. Whole Plant
  misc_feature: MA Experiment ID: 20000440 Result: Down-regulated in Transcription
  misc_feature: MA Experiment 20000440 PARAMETER Experiment Name: At_Closed-Flower__Sub_P Parameter: Tissue Value: Closed Flower vs. Whole Plant

SEQ ID NO: 93117 - protein, 602 aa, Arabidopsis thaliana; identical to SEQ ID NO: 89361
  peptide (1)..(602): Ceres Seq. ID no. 12718264
  misc_feature (10)..(94): Pfam Name: C2 domain Pfam Description: C2 domain
  misc_feature (3)..(602): Homolog of NCBI NO: 15219742 NR Description: hypothetical protein; protein id: At1g04540.1
  misc_feature (3)..(551): Homolog of NCBI NO: 25372827 NR Description: hypothetical protein [imported] - Arabidopsis >gi|2494130|gb|AAB80639.1| Contains similarity to Glycine SRC2
  misc_feature (379)..(584): Homolog of NCBI NO: 15225023 NR Description: hypothetical protein; protein id: At2g13350.1
  misc_feature (1)..(162): Homolog of NCBI NO: 15225023 NR Description: hypothetical protein; protein id: At2g13350.1
  misc_feature (9)..(202): Homolog of NCBI NO: 21618096 NR Description: unknown [Arabidopsis thaliana]
  misc_feature (446)..(598): Homolog of NCBI NO: 21618096 NR Description: unknown [Arabidopsis thaliana]
  misc_feature (9)..(202): Homolog of NCBI NO: 18396861 NR Description: expressed protein; protein id: At3g04360.1 thaliana] >gi|6721150|gb|AAF26778.1|AC016829_2 hypothetical
  misc_feature (8)..(151): Homolog of NCBI NO: 15234097 NR Description: hypothetical protein; protein id: At4g01200.1, by cDNA: gi_19424080, supported by cDNA: gi_21281234 [Arabidopsis >gi|25407092|pir||G85015 hypothetical protein AT4g01200
  misc_feature (8)..(209): Homolog of NCBI NO: 34912020 NR Description: P0684E06.19 [Oryza sativa (japonica
  misc_feature (10)..(141): Homolog of NCBI NO: 15228227 NR Description: unknown protein; protein id: At3g16510.1 thaliana] >gi|9279650|dbj|BAB01150.1| contains similarity to SRC2

SEQ ID NO: 93118 - protein, 576 aa, Arabidopsis thaliana; identical to SEQ ID NO: 89362
  peptide (1)..(576): Ceres Seq. ID no. 12718265
  misc_feature (1)..(68): Pfam Name: C2 domain Pfam Description: C2 domain
  misc_feature (1)..(576): Homolog of NCBI NO: 15219742 NR Description: hypothetical protein; protein id: At1g04540.1
  misc_feature (1)..(525): Homolog of NCBI NO: 25372827 NR Description: hypothetical protein [imported] - Arabidopsis >gi|2494130|gb|AAB80639.1| Contains similarity to Glycine SRC2
  misc_feature (353)..(558): Homolog of NCBI NO: 15225023 NR Description: hypothetical protein; protein id: At2g13350.1
  misc_feature (1)..(136): Homolog of NCBI NO: 15225023 NR Description: hypothetical protein; protein id: At2g13350.1
  misc_feature (1)..(176): Homolog of NCBI NO: 21618096 NR Description: unknown [Arabidopsis thaliana]
  misc_feature (420)..(572): Homolog of NCBI NO: 21618096 NR Description: unknown [Arabidopsis thaliana]
  misc_feature (1)..(176): Homolog of NCBI NO: 18396861 NR Description: expressed protein; protein id: At3g04360.1 thaliana] >gi|6721150|gb|AAF26778.1|AC016829_2 hypothetical
  misc_feature (1)..(125): Homolog of NCBI NO: 15234097 NR Description: hypothetical protein; protein id: At4g01200.1, by cDNA: gi_19424080, supported by cDNA: gi_21281234 [Arabidopsis >gi|25407092|pir||G85015 hypothetical protein AT4g01200
  misc_feature (1)..(183): Homolog of NCBI NO: 34912020 NR Description: P0684E06.19 [Oryza sativa (japonica
  misc_feature (1)..(115): Homolog of NCBI NO: 15228227 NR Description: unknown protein; protein id: At3g16510.1 thaliana] >gi|9279650|dbj|BAB01150.1| contains similarity to SRC2

SEQ ID NO: 93119 - protein, 480 aa, Arabidopsis thaliana; identical to SEQ ID NO: 89363
  peptide (1)..(480): Ceres Seq. ID no. 12718266
  misc_feature (1)..(480): Homolog of NCBI NO: 15219742 NR Description: hypothetical protein; protein id: At1g04540.1
  misc_feature (1)..(429): Homolog of NCBI NO: 25372827 NR Description: hypothetical protein [imported] - Arabidopsis >gi|2494130|gb|AAB80639.1| Contains similarity to Glycine SRC2
  misc_feature (257)..(462): Homolog of NCBI NO: 15225023 NR Description: hypothetical protein; protein id: At2g13350.1
  misc_feature (1)..(40): Homolog of NCBI NO: 15225023 NR Description: hypothetical protein; protein id: At2g13350.1
  misc_feature (1)..(80): Homolog of NCBI NO: 21618096 NR Description: unknown [Arabidopsis thaliana]
  misc_feature (324)..(476): Homolog of NCBI NO: 21618096 NR Description: unknown [Arabidopsis thaliana]
  misc_feature (1)..(80): Homolog of NCBI NO: 18396861 NR Description: expressed protein; protein id: At3g04360.1 thaliana] >gi|6721150|gb|AAF26778.1|AC016829_2 hypothetical
  misc_feature (1)..(29): Homolog of NCBI NO: 15234097 NR Description: hypothetical protein; protein id: At4g01200.1, by cDNA: gi_19424080, supported by cDNA: gi_21281234 [Arabidopsis >gi|25407092|pir||G85015 hypothetical protein AT4g01200
  misc_feature (1)..(87): Homolog of NCBI NO: 34912020 NR Description: P0684E06.19 [Oryza sativa (japonica
  misc_feature (1)..(19): Homolog of NCBI NO: 15228227 NR Description: unknown protein; protein id: At3g16510.1 thaliana] >gi|9279650|dbj|BAB01150.1| contains similarity to SRC2

SEQ ID NO: 93120 - DNA, 1015 bp, Arabidopsis thaliana; identical to SEQ ID NO: 89364
  misc_feature (1)..(1015): Ceres Seq. ID no. 12718277
  misc_feature: MA Experiment ID: 20000185 Result: Down-regulated in Transcription
  misc_feature: MA Experiment 20000185 PARAMETER Experiment Name: At_Roots__P Parameter: Age (day) Value: 7 vs. 21
  misc_feature: MA Experiment 20000185 PARAMETER Experiment Name: At_Roots__P Parameter: Organism Value: A. thaliana
  misc_feature: MA Experiment 20000185 PARAMETER Experiment Name: At_Roots__P Parameter: Tissue Value: Roots vs. Whole Plant
  misc_feature: MA Experiment ID: 20000437 Result: Down-regulated in Transcription
  misc_feature: MA Experiment 20000437 PARAMETER Experiment Name: At_Drought_P Parameter: Age (day) Value: 8
  misc_feature: MA Experiment 20000437 PARAMETER Experiment Name: At_Drought_P Parameter: Organism Value: A. thaliana
  misc_feature: MA Experiment 20000437 PARAMETER Experiment Name: At_Drought_P Parameter: Plant Line Value: WS
  misc_feature: MA Experiment 20000437 PARAMETER Experiment Name: At_Drought_P Parameter: Timepoint (hr) Value: 24
  misc_feature: MA Experiment 20000437 PARAMETER Experiment Name: At_Drought_P Parameter: Tissue Value: Whole Plant
  misc_feature: MA Experiment 20000437 PARAMETER Experiment Name: At_Drought_P Parameter: Treatment Value: Drought vs. No Drought
  misc_feature: MA Experiment ID: 20000439 Result: Down-regulated in Transcription
  misc_feature: MA Experiment 20000439 PARAMETER Experiment Name: At_Roots__P Parameter: Age (day) Value: 14 vs. 21
  misc_feature: MA Experiment 20000439 PARAMETER Experiment Name: At_Roots__P Parameter: Organism Value: A. thaliana
  misc_feature: MA Experiment 20000439 PARAMETER Experiment Name: At_Roots__P Parameter: Tissue Value: Roots vs. Whole Plant
  misc_feature: MA Experiment ID: 20000496 Result: Up-regulated in Transcription
  misc_feature: MA Experiment 20000496 PARAMETER Experiment Name: At_Guard_Cells_P Parameter: Harvest Date Value: 7/19/2002
  misc_feature: MA Experiment 20000496 PARAMETER Experiment Name: At_Guard_Cells_P Parameter: Organism Value: Canola
  misc_feature: MA Experiment 20000496 PARAMETER Experiment Name: At_Guard_Cells_P Parameter: Tissue Value: Guard Cells vs. Leaves
  misc_feature: MA Experiment ID: 20000794 Result: Down-regulated in Transcription
  misc_feature: MA Experiment 20000794 PARAMETER Experiment Name: At_Petals_P Parameter: Age (day) Value: 23-25 days
  misc_feature: MA Experiment 20000794 PARAMETER Experiment Name: At_Petals_P Parameter: Plant Line Value: WS
  misc_feature: MA Experiment 20000794 PARAMETER Experiment Name: At_Petals_P Parameter: Tissue Value: Petals vs. Whole plant
  misc_feature: MA Experiment ID: 20001458 Result: Up-regulated in Transcription
  misc_feature: MA Experiment 20001458 PARAMETER Experiment Name: At_50mM_NH4NO3_L-to-H_P Parameter: Age (day) Value: Undefined
  misc_feature: MA Experiment 20001458 PARAMETER Experiment Name: At_50mM_NH4NO3_L-to-H_P Parameter: Organism Value: Undefined
  misc_feature: MA Experiment 20001458 PARAMETER Experiment Name: At_50mM_NH4NO3_L-to-H_P Parameter: Plant Line Value: Undefined
  misc_feature: MA Experiment 20001458 PARAMETER Experiment Name: At_50mM_NH4NO3_L-to-H_P Parameter: Timepoint (hr) Value: 2
  misc_feature: MA Experiment 20001458 PARAMETER Experiment Name: At_50mM_NH4NO3_L-to-H_P Parameter: Tissue Value: Siliques
  misc_feature: MA Experiment 20001458 PARAMETER Experiment Name: At_50mM_NH4NO3_L-to-H_P Parameter: Treatment Value: 50mM NH4NO3 vs. 100mM Manitol
  misc_feature: MA Experiment ID: 20001556 Result: Up-regulated in Transcription
  misc_feature: MA Experiment 20001556 PARAMETER Experiment Name: At_Drought_Soil_Dry_P Parameter: Age (day) Value: 26
  misc_feature: MA Experiment 20001556 PARAMETER Experiment Name: At_Drought_Soil_Dry_P Parameter: Organism Value: A. thaliana
  misc_feature: MA Experiment 20001556 PARAMETER Experiment Name: At_Drought_Soil_Dry_P Parameter: Plant Line Value: WS
  misc_feature: MA Experiment 20001556 PARAMETER Experiment Name: At_Drought_Soil_Dry_P Parameter: Post Timepoint (hr) Value: None
  misc_feature: MA Experiment 20001556 PARAMETER Experiment Name: At_Drought_Soil_Dry_P Parameter: Post-Treatment Value: None
  misc_feature: MA Experiment 20001556 PARAMETER Experiment Name: At_Drought_Soil_Dry_P Parameter: Timepoint (day) Value: 12
  misc_feature: MA Experiment 20001556 PARAMETER Experiment Name: At_Drought_Soil_Dry_P Parameter: Treatment Value: Drought vs. No Drought
  misc_feature: MA Experiment ID: 20001558 Result: Up-regulated in Transcription
  misc_feature: MA Experiment 20001558 PARAMETER Experiment Name: At_Drought_Soil_Dry_P Parameter: Age (day) Value: 27
  misc_feature: MA Experiment 20001558 PARAMETER Experiment Name: At_Drought_Soil_Dry_P Parameter: Organism Value: A. thaliana
  misc_feature: MA Experiment 20001558 PARAMETER Experiment Name: At_Drought_Soil_Dry_P Parameter: Plant Line Value: WS
  misc_feature: MA Experiment 20001558 PARAMETER Experiment Name: At_Drought_Soil_Dry_P Parameter: Post Timepoint (hr) Value: 6
  misc_feature: MA Experiment 20001558 PARAMETER Experiment Name: At_Drought_Soil_Dry_P Parameter: Post-Treatment Value: Re-Water vs. No Drought
  misc_feature: MA Experiment 20001558 PARAMETER Experiment Name: At_Drought_Soil_Dry_P Parameter: Timepoint (day) Value: 13
  misc_feature: MA Experiment 20001558 PARAMETER Experiment Name: At_Drought_Soil_Dry_P Parameter: Treatment Value: Drought vs. No Drought
  misc_feature: MA Experiment ID: 20001757 Result: Up-regulated in Transcription
  misc_feature: MA Experiment 20001757 PARAMETER Experiment Name: At_50mM_NH4NO3_L-to-H_P Parameter: Timepoint (hr) Value: 6
  misc_feature: MA Experiment 20001757 PARAMETER Experiment Name: At_50mM_NH4NO3_L-to-H_P Parameter: Tissue Value: Leaf
  misc_feature: MA Experiment 20001757 PARAMETER Experiment Name: At_50mM_NH4NO3_L-to-H_P Parameter: Treatment Value: 50mM NH4NO3 vs 100mM Mannitol

SEQ ID NO: 93121 - protein, 233 aa, Arabidopsis thaliana; identical to SEQ ID NO: 89365
  peptide (1)..(233): Ceres Seq. ID no. 12718278
  misc_feature (15)..(233): Homolog of NCBI NO: 15226108 NR Description: plastid protein; protein id: At2g33430.1, by cDNA: 8717., supported by cDNA: gi_17933284, supported by
  misc_feature (15)..(233): Homolog of NCBI NO: 21617909 NR Description: plastid protein [Arabidopsis thaliana]
  misc_feature (15)..(233): Homolog of NCBI NO: 2440029 NR Description: DAL1 protein [Arabidopsis thaliana]
  misc_feature (36)..(233): Homolog of NCBI NO: 25370552 NR Description: DAG protein homolog [imported] - Arabidopsis >gi|2246378|emb|CAB06698.1| plastid protein [Arabidopsis
  misc_feature (60)..(231): Homolog of NCBI NO: 38344141 NR Description: OSJNBa0041A02.8 [Oryza sativa (japonica
  misc_feature (57)..(233): Homolog of NCBI NO: 15223247 NR Description: plastid protein, putative; protein id: supported by cDNA: gi_17381077, supported by cDNA: gi_20465720
  misc_feature (50)..(233): Homolog of NCBI NO: 34897972 NR Description: putative plastid protein [Oryza sativa (japonica group)] >gi|24413962|dbj|BAC22214.1| putative plastid protein
  misc_feature (42)..(233): Homolog of NCBI NO: 15226934 NR Description: unknown protein; protein id: At2g35240.1, by cDNA: gi_18253008 [Arabidopsis thaliana]
  misc_feature (11)..(233): Homolog of NCBI NO: 27754695 NR Description: putative DAG protein [Arabidopsis thaliana]
  misc_feature (11)..(233): Homolog of NCBI NO: 15230785 NR Description: DAG protein, putative; protein id: At3g06790.1 thaliana] >gi|7549634|gb|AAF63819.1| DAG protein, putative

SEQ ID NO: 93122 - protein, 219 aa, Arabidopsis thaliana; identical to SEQ ID NO: 28131
  peptide (1)..(219): Ceres Seq. ID no. 12718279
  misc_feature (1)..(219): Homolog of NCBI NO: 15226108 NR Description: plastid protein; protein id: At2g33430.1, by cDNA: 8717., supported by cDNA: gi_17933284, supported by
  misc_feature (1)..(219): Homolog of NCBI NO: 21617909 NR Description: plastid protein [Arabidopsis thaliana]
  misc_feature (1)..(219): Homolog of NCBI NO: 2440029 NR Description: DAL1 protein [Arabidopsis thaliana]
  misc_feature (22)..(219): Homolog of NCBI NO: 25370552 NR Description: DAG protein homolog [imported] - Arabidopsis >gi|2246378|emb|CAB06698.1| plastid protein [Arabidopsis
  misc_feature (46)..(217): Homolog of NCBI NO: 38344141 NR Description: OSJNBa0041A02.8 [Oryza sativa (japonica
  misc_feature (43)..(219): Homolog of NCBI NO: 15223247 NR Description: plastid protein, putative; protein id: supported by cDNA: gi_17381077, supported by cDNA: gi_20465720
  misc_feature (36)..(219): Homolog of NCBI NO: 34897972 NR Description: putative plastid protein [Oryza sativa (japonica group)] >gi|24413962|dbj|BAC22214.1| putative plastid protein
  misc_feature (28)..(219): Homolog of NCBI NO: 15226934 NR Description: unknown protein; protein id: At2g35240.1, by cDNA: gi_18253008 [Arabidopsis thaliana]
  misc_feature (1)..(219): Homolog of NCBI NO: 27754695 NR Description: putative DAG protein [Arabidopsis thaliana]
  misc_feature (1)..(219): Homolog of NCBI NO: 15230785 NR Description: DAG protein, putative; protein id: At3g06790.1 thaliana] >gi|7549634|gb|AAF63819.1| DAG protein, putative

SEQ ID NO: 93123 - protein, 198 aa, Arabidopsis thaliana; identical to SEQ ID NO: 28132
  peptide (1)..(198): Ceres Seq. ID no. 12718280
  misc_feature (1)..(198): Homolog of NCBI NO: 15226108 NR Description: plastid protein; protein id: At2g33430.1, by cDNA: 8717., supported by cDNA: gi_17933284, supported by
  misc_feature (1)..(198): Homolog of NCBI NO: 21617909 NR Description: plastid protein [Arabidopsis thaliana]
  misc_feature (1)..(198): Homolog of NCBI NO: 2440029 NR Description: DAL1 protein [Arabidopsis thaliana]
  misc_feature (1)..(198): Homolog of NCBI NO: 25370552 NR Description: DAG protein homolog [imported] - Arabidopsis >gi|2246378|emb|CAB06698.1| plastid protein [Arabidopsis
  misc_feature (25)..(196): Homolog of NCBI NO: 38344141 NR Description: OSJNBa0041A02.8 [Oryza sativa (japonica
  misc_feature (22)..(198): Homolog of NCBI NO: 15223247 NR Description: plastid protein, putative; protein id: supported by cDNA: gi_17381077, supported by cDNA: gi_20465720
  misc_feature (15)..(198): Homolog of NCBI NO: 34897972 NR Description: putative plastid protein [Oryza sativa (japonica group)] >gi|24413962|dbj|BAC22214.1| putative plastid protein
  misc_feature (7)..(198): Homolog of NCBI NO: 15226934 NR Description: unknown protein; protein id: At2g35240.1, by cDNA: gi_18253008 [Arabidopsis thaliana]
  misc_feature (1)..(198): Homolog of NCBI NO: 27754695 NR Description: putative DAG protein [Arabidopsis thaliana]
  misc_feature (1)..(198): Homolog of NCBI NO: 15230785 NR Description: DAG protein, putative; protein id: At3g06790.1 thaliana] >gi|7549634|gb|AAF63819.1| DAG protein, putative

SEQ ID NO: 93124 - DNA, 1666 bp, Arabidopsis thaliana; identical to SEQ ID NO: 89368
  misc_feature (1)..(1666): Ceres Seq. ID no. 12718299
  misc_feature: MA Experiment ID: 20000794 Result: Up-regulated in Transcription
  misc_feature: MA Experiment 20000794 PARAMETER Experiment Name: At_Petals_P Parameter: Age (day) Value: 23-25 days
  misc_feature: MA Experiment 20000794 PARAMETER Experiment Name: At_Petals_P Parameter: Plant Line Value: WS
  misc_feature: MA Experiment 20000794 PARAMETER Experiment Name: At_Petals_P Parameter: Tissue Value: Petals vs. Whole plant
  misc_feature: MA Experiment ID: 20001910 Result: Up-regulated in Transcription
  misc_feature: MA Experiment 20001910 PARAMETER Experiment Name: At_Drought_Reproduction_P Parameter: Age (day) Value: 37
  misc_feature: MA Experiment 20001910 PARAMETER Experiment Name: At_Drought_Reproduction_P Parameter: Organism Value: A. thaliana
  misc_feature: MA Experiment 20001910 PARAMETER Experiment Name: At_Drought_Reproduction_P Parameter: Plant Line Value: WS
  misc_feature: MA Experiment 20001910 PARAMETER Experiment Name: At_Drought_Reproduction_P Parameter: Timepoint (day) Value: 7
  misc_feature: MA Experiment 20001910 PARAMETER Experiment Name: At_Drought_Reproduction_P Parameter: Tissue Value: Flowers
  misc_feature: MA Experiment 20001910 PARAMETER Experiment Name: At_Drought_Reproduction_P Parameter: Treatment Value: Drought vs. No Drought

SEQ ID NO: 93125 - protein, 501 aa, Arabidopsis thaliana; identical to SEQ ID NO: 89369
  peptide (1)..(501): Ceres Seq. ID no. 12718300
  misc_feature (13)..(484): Pfam Name: Mlo family Pfam Description: Mlo family
  misc_feature (1)..(501): Homolog of NCBI NO: 15226140 NR Description: similar to Mlo proteins from H. vulgare; protein At2g33670.1, supported by cDNA: gi_14091579 [Arabidopsis
  misc_feature (1)..(501): Homolog of NCBI NO: 14091580 NR Description: membrane protein Mlo5 [Arabidopsis thaliana]
  misc_feature (1)..(452): Homolog of NCBI NO: 15217453 NR Description: Mlo-like protein; protein id: At1g42560.1
  misc_feature (1)..(452): Homolog of NCBI NO: 33112390 NR Description: MLO-like protein 9 (AtMlo9)
  misc_feature (1)..(452): Homolog of NCBI NO: 25346293 NR Description: hypothetical protein F8D11.2 [imported] - thaliana >gi|12322423|gb|AAG51234.1|AC035249_9 disease resistance
  misc_feature (121)..(452): Homolog of NCBI NO: 14091588 NR Description: membrane protein Mlo9 [Arabidopsis thaliana]
  misc_feature (3)..(501): Homolog of NCBI NO: 37536520 NR Description: putative Mlo (pathogen resistance) protein [Oryza
  misc_feature (124)..(455): Homolog of NCBI NO: 13784985 NR Description: seven transmembrane protein Mlo6 [Zea mays]
  misc_feature (1)..(136): Homolog of NCBI NO: 13784985 NR Description: seven transmembrane protein Mlo6 [Zea mays]
  misc_feature (11)..(450): Homolog of NCBI NO: 13784977 NR Description: seven transmembrane protein Mlo2 [Zea mays]

SEQ ID NO: 93126 - protein, 460 aa, Arabidopsis thaliana; identical to SEQ ID NO: 89370
  peptide (1)..(460): Ceres Seq. ID no. 12718301
  misc_feature (1)..(443): Pfam Name: Mlo family Pfam Description: Mlo family
  misc_feature (1)..(460): Homolog of NCBI NO: 15226140 NR Description: similar to Mlo proteins from H. vulgare; protein At2g33670.1, supported by cDNA: gi_14091579 [Arabidopsis
  misc_feature (1)..(460): Homolog of NCBI NO: 14091580 NR Description: membrane protein Mlo5 [Arabidopsis thaliana]
  misc_feature (1)..(411): Homolog of NCBI NO: 15217453 NR Description: Mlo-like protein; protein id: At1g42560.1
  misc_feature (1)..(411): Homolog of NCBI NO: 33112390 NR Description: MLO-like protein 9 (AtMlo9)
  misc_feature (1)..(411): Homolog of NCBI NO: 25346293 NR Description: hypothetical protein F8D11.2 [imported] - thaliana >gi|12322423|gb|AAG51234.1|AC035249_9 disease resistance
  misc_feature (80)..(411): Homolog of NCBI NO: 14091588 NR Description: membrane protein Mlo9 [Arabidopsis thaliana]
  misc_feature (1)..(460): Homolog of NCBI NO: 37536520 NR Description: putative Mlo (pathogen resistance) protein [Oryza
  misc_feature (83)..(414): Homolog of NCBI NO: 13784985 NR Description: seven transmembrane protein Mlo6 [Zea mays]
  misc_feature (1)..(95): Homolog of NCBI NO: 13784985 NR Description: seven transmembrane protein Mlo6 [Zea mays]
  misc_feature (1)..(409): Homolog of NCBI NO: 13784977 NR Description: seven transmembrane protein Mlo2 [Zea mays]

SEQ ID NO: 93127 - protein, 432 aa, Arabidopsis thaliana; identical to SEQ ID NO: 89371
  peptide (1)..(432): Ceres Seq. ID no. 12718302
  misc_feature (1)..(415): Pfam Name: Mlo family Pfam Description: Mlo family
  misc_feature (1)..(432): Homolog of NCBI NO: 15226140 NR Description: similar to Mlo proteins from H. vulgare; protein At2g33670.1, supported by cDNA: gi_14091579 [Arabidopsis
  misc_feature (1)..(432): Homolog of NCBI NO: 14091580 NR Description: membrane protein Mlo5 [Arabidopsis thaliana]
  misc_feature (1)..(383): Homolog of NCBI NO: 15217453 NR Description: Mlo-like protein; protein id: At1g42560.1
  misc_feature (1)..(383): Homolog of NCBI NO: 33112390 NR Description: MLO-like protein 9 (AtMlo9)
  misc_feature (1)..(383): Homolog of NCBI NO: 25346293 NR Description: hypothetical protein F8D11.2 [imported] - thaliana >gi|12322423|gb|AAG51234.1|AC035249_9 disease resistance
  misc_feature (52)..(383): Homolog of NCBI NO: 14091588 NR Description: membrane protein Mlo9 [Arabidopsis thaliana]
  misc_feature (1)..(432): Homolog of NCBI NO: 37536520 NR Description: putative Mlo (pathogen resistance) protein [Oryza
  misc_feature (55)..(386): Homolog of NCBI NO: 13784985 NR Description: seven transmembrane protein Mlo6 [Zea mays]
  misc_feature (1)..(67): Homolog of NCBI NO: 13784985 NR Description: seven transmembrane protein Mlo6 [Zea mays]
  misc_feature (1)..(381): Homolog of NCBI NO: 13784977 NR Description: seven transmembrane protein Mlo2 [Zea mays]

SEQ ID NO: 93128 - DNA, 2099 bp, Arabidopsis thaliana; identical to SEQ ID NO: 89372
  misc_feature (1)..(2099): Ceres Seq. ID no. 12718303
  misc_feature: MA Experiment ID: 20000171 Result: Up-regulated in Transcription
  misc_feature: MA Experiment 20000171 PARAMETER Experiment Name: At_42deg_Heat_P Parameter: Age (day) Value: 14
  misc_feature: MA Experiment 20000171 PARAMETER Experiment Name: At_42deg_Heat_P Parameter: Organism Value: A. thaliana
  misc_feature: MA Experiment 20000171 PARAMETER Experiment Name: At_42deg_Heat_P Parameter: Plant Line Value: WS
  misc_feature: MA Experiment 20000171 PARAMETER Experiment Name: At_42deg_Heat_P Parameter: Temperature (deg C) Value: 42 vs. 22
  misc_feature: MA Experiment 20000171 PARAMETER Experiment Name: At_42deg_Heat_P Parameter: Timepoint (hr) Value: 1
  misc_feature: MA Experiment 20000171 PARAMETER Experiment Name: At_42deg_Heat_P Parameter: Tissue Value: Aerial
  misc_feature: MA Experiment ID: 20000173 Result: Up-regulated in Transcription
  misc_feature: MA Experiment 20000173 PARAMETER Experiment Name: At_42deg_Heat_P Parameter: Age (day) Value: 14
  misc_feature: MA Experiment 20000173 PARAMETER Experiment Name: At_42deg_Heat_P Parameter: Organism Value: A. thaliana
  misc_feature: MA Experiment 20000173 PARAMETER Experiment Name: At_42deg_Heat_P Parameter: Plant Line Value: WS
  misc_feature: MA Experiment 20000173 PARAMETER Experiment Name: At_42deg_Heat_P Parameter: Temperature (deg C) Value: 42 vs. 22
  misc_feature: MA Experiment 20000173 PARAMETER Experiment Name: At_42deg_Heat_P Parameter: Timepoint (hr) Value: 6
  misc_feature: MA Experiment 20000173 PARAMETER Experiment Name: At_42deg_Heat_P Parameter: Tissue Value: Aerial
  misc_feature: MA Experiment ID: 20000437 Result: Up-regulated in Transcription
  misc_feature: MA Experiment 20000437 PARAMETER Experiment Name: At_Drought_P Parameter: Age (day) Value: 8
  misc_feature: MA Experiment 20000437 PARAMETER Experiment Name: At_Drought_P Parameter: Organism Value: A. thaliana
  misc_feature: MA Experiment 20000437 PARAMETER Experiment Name: At_Drought_P Parameter: Plant Line Value: WS
  misc_feature: MA Experiment 20000437 PARAMETER Experiment Name: At_Drought_P Parameter: Timepoint (hr) Value: 24
  misc_feature: MA Experiment 20000437 PARAMETER Experiment Name: At_Drought_P Parameter: Tissue Value: Whole Plant
  misc_feature: MA Experiment 20000437 PARAMETER Experiment Name: At_Drought_P Parameter: Treatment Value: Drought vs. No Drought
  misc_feature: MA Experiment ID: 20001904 Result: Up-regulated in Transcription
  misc_feature: MA Experiment 20001904 PARAMETER Experiment Name: At_Drought_Reproduction_P Parameter: Age (day) Value: 37
  misc_feature: MA Experiment 20001904 PARAMETER Experiment Name: At_Drought_Reproduction_P Parameter: Organism Value: A. thaliana
  misc_feature: MA Experiment 20001904 PARAMETER Experiment Name: At_Drought_Reproduction_P Parameter: Plant Line Value: WS
  misc_feature: MA Experiment 20001904 PARAMETER Experiment Name: At_Drought_Reproduction_P Parameter: Timepoint (day) Value: 7
  misc_feature: MA Experiment 20001904 PARAMETER Experiment Name: At_Drought_Reproduction_P Parameter: Tissue Value: Rosettes
  misc_feature: MA Experiment 20001904 PARAMETER Experiment Name: At_Drought_Reproduction_P Parameter: Treatment Value: Drought vs. No Drought
  misc_feature: MA Experiment ID: 20001911 Result: Up-regulated in Transcription
  misc_feature: MA Experiment 20001911 PARAMETER Experiment Name: At_Drought_Reproduction_P Parameter: Age (day) Value: 40
  misc_feature: MA Experiment 20001911 PARAMETER Experiment Name: At_Drought_Reproduction_P Parameter: Organism Value: A. thaliana
  misc_feature: MA Experiment 20001911 PARAMETER Experiment Name: At_Drought_Reproduction_P Parameter: Plant Line Value: WS
  misc_feature: MA Experiment 20001911 PARAMETER Experiment Name: At_Drought_Reproduction_P Parameter: Timepoint (day) Value: 10
  misc_feature: MA Experiment 20001911 PARAMETER Experiment Name: At_Drought_Reproduction_P Parameter: Tissue Value: Flowers
  misc_feature: MA Experiment 20001911 PARAMETER Experiment Name: At_Drought_Reproduction_P Parameter: Treatment Value: Drought vs. No Drought

SEQ ID NO: 93129 - protein, 380 aa, Arabidopsis thaliana; identical to SEQ ID NO: 89373
  peptide (1)..(380): Ceres Seq. ID no. 12718304
  misc_feature (83)..(337): Pfam Name: Protein phosphatase 2C Pfam Description: Protein phosphatase 2C
  misc_feature (1)..(380): Homolog of NCBI NO: 15226152 NR Description: protein phosphatase 2C (PP2C); protein id: supported by cDNA: gi_17979441, supported by cDNA: gi_20259092
  misc_feature (42)..(377): Homolog of NCBI NO: 37536524 NR Description: putative protein phosphatase-2C [Oryza sativa
  misc_feature (74)..(377): Homolog of NCBI NO: 10140768 NR Description: putative protein phosphatase-2C [Oryza sativa]
  misc_feature (21)..(377): Homolog of NCBI NO: 15230495 NR Description: protein phosphatase 2C (PP2C); protein id:
  misc_feature (74)..(378): Homolog of NCBI NO: 20146108 NR Description: protein phosphatase 2C [Mesembryanthemum
  misc_feature (78)..(378): Homolog of NCBI NO: 25352221 NR Description: phosphoprotein phosphatase (EC 3.1.3.16) 2C
  misc_feature (56)..(373): Homolog of NCBI NO: 34894410 NR Description: putative protein phosphatase [Oryza sativa
  misc_feature (16)..(378): Homolog of NCBI NO: 15224766 NR Description: protein phosphatase 2C (PP2C); protein id: supported by cDNA: gi_12642917, supported by cDNA: gi_14517519, by cDNA: gi_16323271 [Arabidopsis thaliana]
  misc_feature (77)..(378): Homolog of NCBI NO: 21693562 NR Description: DNA-binding protein phosphatase 2C [Nicotiana
  misc_feature (75)..(376): Homolog of NCBI NO: 24413992 NR Description: putative DNA-binding protein phosphatase 2C

SEQ ID NO: 93130 - protein, 378 aa, Arabidopsis thaliana; identical to SEQ ID NO: 89374
  peptide (1)..(378): Ceres Seq. ID no. 12718305
  misc_feature (81)..(335): Pfam Name: Protein phosphatase 2C Pfam Description: Protein phosphatase 2C
  misc_feature (1)..(378): Homolog of NCBI NO: 15226152 NR Description: protein phosphatase 2C (PP2C); protein id: supported by cDNA: gi_17979441, supported by cDNA: gi_20259092
  misc_feature (40)..(375): Homolog of NCBI NO: 37536524 NR Description: putative protein phosphatase-2C [Oryza sativa
  misc_feature (72)..(375): Homolog of NCBI NO: 10140768 NR Description: putative protein phosphatase-2C [Oryza sativa]
  misc_feature (19)..(375): Homolog of NCBI NO: 15230495 NR Description: protein phosphatase 2C (PP2C); protein id:
  misc_feature (72)..(376): Homolog of NCBI NO: 20146108 NR Description: protein phosphatase 2C [Mesembryanthemum
  misc_feature (76)..(376): Homolog of NCBI NO: 25352221 NR Description: phosphoprotein phosphatase (EC 3.1.3.16) 2C
  misc_feature (54)..(371): Homolog of NCBI NO: 34894410 NR Description: putative protein phosphatase [Oryza sativa
  misc_feature (14)..(376): Homolog of NCBI NO: 15224766 NR Description: protein phosphatase 2C (PP2C); protein id: supported by cDNA: gi_12642917, supported by cDNA: gi_14517519, by cDNA: gi_16323271 [Arabidopsis thaliana]
  misc_feature (75)..(376): Homolog of NCBI NO: 21693562 NR Description: DNA-binding protein phosphatase 2C [Nicotiana
  misc_feature (73)..(374): Homolog of NCBI NO: 24413992 NR Description: putative DNA-binding protein phosphatase 2C

SEQ ID NO: 93131 - protein, 311 aa, Arabidopsis thaliana; identical to SEQ ID NO: 89375
  peptide (1)..(311): Ceres Seq. ID no. 12718306
  misc_feature (14)..(268): Pfam Name: Protein phosphatase 2C Pfam Description: Protein phosphatase 2C
  misc_feature (1)..(311): Homolog of NCBI NO: 15226152 NR Description: protein phosphatase 2C (PP2C); protein id: supported by cDNA: gi_17979441, supported by cDNA: gi_20259092
  misc_feature (1)..(308): Homolog of NCBI NO: 37536524 NR Description: putative protein phosphatase-2C [Oryza sativa
  misc_feature (5)..(308): Homolog of NCBI NO: 10140768 NR Description: putative protein phosphatase-2C [Oryza sativa]
  misc_feature (1)..(308): Homolog of NCBI NO: 15230495 NR Description: protein phosphatase 2C (PP2C); protein id:
  misc_feature (5)..(309): Homolog of NCBI NO: 20146108 NR Description: protein phosphatase 2C [Mesembryanthemum
  misc_feature (9)..(309): Homolog of NCBI NO: 25352221 NR Description: phosphoprotein phosphatase (EC 3.1.3.16) 2C
  misc_feature (1)..(304): Homolog of NCBI NO: 34894410 NR Description: putative protein phosphatase [Oryza sativa
  misc_feature (1)..(309): Homolog of NCBI NO: 15224766 NR Description: protein phosphatase 2C (PP2C); protein id: supported by cDNA: gi_12642917, supported by cDNA: gi_14517519, by cDNA: gi_16323271 [Arabidopsis thaliana]
  misc_feature (8)..(309): Homolog of NCBI NO: 21693562 NR Description: DNA-binding protein phosphatase 2C [Nicotiana
  misc_feature (6)..(307): Homolog of NCBI NO: 24413992 NR Description: putative DNA-binding protein phosphatase 2C

SEQ ID NO: 93132 - DNA, 2523 bp, Arabidopsis thaliana; identical to SEQ ID NO: 89376
  misc_feature (1)..(2523): Ceres Seq. ID no. 12718314
  misc_feature: MA Experiment ID: 20000179 Result: Down-regulated in Transcription
  misc_feature: MA Experiment 20000179 PARAMETER Experiment Name: At_Germinating_Seeds_P Parameter: Age (hr) Value: 6 vs. 0
  misc_feature: MA Experiment 20000179 PARAMETER Experiment Name: At_Germinating_Seeds_P Parameter: Tissue Value: Germinating Seeds
  misc_feature: MA Experiment ID: 20000180 Result: Down-regulated in Transcription
  misc_feature: MA Experiment 20000180 PARAMETER Experiment Name: At_Germinating_Seeds_P Parameter: Age (hr) Value: 24 vs. 0
  misc_feature: MA Experiment 20000180 PARAMETER Experiment Name: At_Germinating_Seeds_P Parameter: Tissue Value: Germinating Seeds
  misc_feature: MA Experiment ID: 20001911 Result: Up-regulated in Transcription
  misc_feature: MA Experiment 20001911 PARAMETER Experiment Name: At_Drought_Reproduction_P Parameter: Age (day) Value: 40
  misc_feature: MA Experiment 20001911 PARAMETER Experiment Name: At_Drought_Reproduction_P Parameter: Organism Value: A. thaliana
  misc_feature: MA Experiment 20001911 PARAMETER Experiment Name: At_Drought_Reproduction_P Parameter: Plant Line Value: WS
  misc_feature: MA Experiment 20001911 PARAMETER Experiment Name: At_Drought_Reproduction_P Parameter: Timepoint (day) Value: 10
  misc_feature: MA Experiment 20001911 PARAMETER Experiment Name: At_Drought_Reproduction_P Parameter: Tissue Value: Flowers
  misc_feature: MA Experiment 20001911 PARAMETER Experiment Name: At_Drought_Reproduction_P Parameter: Treatment Value: Drought vs. No Drought

SEQ ID NO: 93133 - protein, 733 aa, Arabidopsis thaliana; identical to SEQ ID NO: 89377
  peptide (1)..(733): Ceres Seq. ID no. 12718315
  misc_feature (326)..(554): Pfam Name: DEAD/DEAH box helicase Pfam Description: DEAD/DEAH box helicase
  misc_feature (23)..(731): Homolog of NCBI NO: 13702821 NR Description: putative snRNP protein [Oryza sativa]
  misc_feature (275)..(722): Homolog of NCBI NO: 25518723 NR Description: hypothetical protein F3H9.16 [imported] - thaliana >gi|9795619|gb|AAF98437.1|AC021044_16 Similar to RNA
  misc_feature (80)..(254): Homolog of NCBI NO: 25518723 NR Description: hypothetical protein F3H9.16 [imported] - thaliana >gi|9795619|gb|AAF98437.1|AC021044_16 Similar to RNA
  misc_feature (24)..(732): Homolog of NCBI NO: 39584962 NR Description: Hypothetical protein CBG09074 [Caenorhabditis
  misc_feature (119)..(725): Homolog of NCBI NO: 24584994 NR Description: CG10333-PA [Drosophila melanogaster]
  misc_feature (47)..(118): Homolog of NCBI NO: 24584994 NR Description: CG10333-PA [Drosophila melanogaster]
  misc_feature (27)..(731): Homolog of NCBI NO: 12803125 NR Description: prp28, U5 snRNP 100 kd protein [Homo sapiens]
  misc_feature (24)..(162): Homolog of NCBI NO: 24584994 NR Description: CG10333-PA [Drosophila melanogaster]
  misc_feature (27)..(731): Homolog of NCBI NO: 4759278 NR Description: prp28, U5 snRNP 100 kd protein [Homo sapiens]
  misc_feature (30)..(731): Homolog of NCBI NO: 38014376 NR Description: Unknown (protein for MGC:63742) [Danio rerio]

SEQ ID NO: 93134 - protein, 534 aa, Arabidopsis thaliana; identical to SEQ ID NO: 89378
  peptide (1)..(534): Ceres Seq. ID no. 12718316
  misc_feature (127)..(355): Pfam Name: DEAD/DEAH box helicase Pfam Description: DEAD/DEAH box helicase
  misc_feature (1)..(532): Homolog of NCBI NO: 13702821 NR Description: putative snRNP protein [Oryza sativa]
  misc_feature (76)..(523): Homolog of NCBI NO: 25518723 NR Description: hypothetical protein F3H9.16 [imported] - thaliana >gi|9795619|gb|AAF98437.1|AC021044_16 Similar to RNA
  misc_feature (1)..(55): Homolog of NCBI NO: 25518723 NR Description: hypothetical protein F3H9.16 [imported] - thaliana >gi|9795619|gb|AAF98437.1|AC021044_16 Similar to RNA
  misc_feature (1)..(533): Homolog of NCBI NO: 39584962 NR Description: Hypothetical protein CBG09074 [Caenorhabditis
  misc_feature (1)..(526): Homolog of NCBI NO: 24584994 NR Description: CG10333-PA [Drosophila melanogaster]
  misc_feature (1)..(532): Homolog of NCBI NO: 12803125 NR Description: prp28, U5 snRNP 100 kd protein [Homo sapiens]
  misc_feature (1)..(532): Homolog of NCBI NO: 4759278 NR Description: prp28, U5 snRNP 100 kd protein [Homo sapiens]
  misc_feature (1)..(532): Homolog of NCBI NO: 38014376 NR Description: Unknown (protein for MGC:63742) [Danio rerio]
  misc_feature (1)..(499): Homolog of NCBI NO: 39584962 NR Description: Hypothetical protein CBG09074 [Caenorhabditis
  misc_feature (77)..(534): Homolog of NCBI NO: 23613207 NR Description: snrnp protein, putative [Plasmodium falciparum >gi|23504671|emb|CAD51549.1| snrnp protein, putative [Plasmodium

SEQ ID NO: 93135 - protein, 512 aa, Arabidopsis thaliana; identical to SEQ ID NO: 89379
  peptide (1)..(512): Ceres Seq. ID no. 12718317
  misc_feature (105)..(333): Pfam Name: DEAD/DEAH box helicase Pfam Description: DEAD/DEAH box helicase
  misc_feature (1)..(510): Homolog of NCBI NO: 13702821 NR Description: putative snRNP protein [Oryza sativa]
  misc_feature (54)..(501): Homolog of NCBI NO: 25518723 NR Description: hypothetical protein F3H9.16 [imported] - thaliana >gi|9795619|gb|AAF98437.1|AC021044_16 Similar to RNA
  misc_feature (1)..(33): Homolog of NCBI NO: 25518723 NR Description: hypothetical protein F3H9.16 [imported] - thaliana >gi|9795619|gb|AAF98437.1|AC021044_16 Similar to RNA
  misc_feature (1)..(511): Homolog of NCBI NO: 39584962 NR Description: Hypothetical protein CBG09074 [Caenorhabditis
  misc_feature (1)..(504): Homolog of NCBI NO: 24584994 NR Description: CG10333-PA [Drosophila melanogaster]
  misc_feature (1)..(510): Homolog of NCBI NO: 12803125 NR Description: prp28, U5 snRNP 100 kd protein [Homo sapiens]
  misc_feature (1)..(510): Homolog of NCBI NO: 4759278 NR Description: prp28, U5 snRNP 100 kd protein [Homo sapiens]
  misc_feature (1)..(510): Homolog of NCBI NO: 38014376 NR Description: Unknown (protein for MGC:63742) [Danio rerio]
  misc_feature (1)..(477): Homolog of NCBI NO: 39584962 NR Description: Hypothetical protein CBG09074 [Caenorhabditis
  misc_feature (55)..(512): Homolog of NCBI NO: 23613207 NR Description: snrnp protein, putative [Plasmodium falciparum >gi|23504671|emb|CAD51549.1| snrnp protein, putative [Plasmodium

SEQ ID NO: 93136 - DNA, 1214 bp, Arabidopsis thaliana; identical to SEQ ID NO: 89380
  misc_feature (1)..(1214): Ceres Seq. ID no. 12718325
  misc_feature: MA Experiment ID: 20000182 Result: Up-regulated in Transcription
  misc_feature: MA Experiment 20000182 PARAMETER Experiment Name: At_2mM_SA_P Parameter: Age (day) Value: 14
  misc_feature: MA Experiment 20000182 PARAMETER Experiment Name: At_2mM_SA_P Parameter: Organism Value: A. thaliana
  misc_feature: MA Experiment 20000182 PARAMETER Experiment Name: At_2mM_SA_P Parameter: Plant Line Value: WS
  misc_feature: MA Experiment 20000182 PARAMETER Experiment Name: At_2mM_SA_P Parameter: Timepoint (hr) Value: 6
  misc_feature: MA Experiment 20000182 PARAMETER Experiment Name: At_2mM_SA_P Parameter: Tissue Value: Aerial
  misc_feature: MA Experiment 20000182 PARAMETER Experiment Name: At_2mM_SA_P Parameter: Treatment Value: 2mM SA vs. No Treatment
  misc_feature: MA Experiment ID: 20000184 Result: Down-regulated in Transcription
  misc_feature: MA Experiment 20000184 PARAMETER Experiment Name: At_Shoots__P Parameter: Age (day) Value: 7
  misc_feature: MA Experiment 20000184 PARAMETER Experiment Name: At_Shoots__P Parameter: Tissue Value: Shoots vs. Whole Plant
  misc_feature: MA Experiment ID: 20000265 Result: Down-regulated in Transcription
  misc_feature: MA Experiment 20000265 PARAMETER Experiment Name: At_Open_Flower_P Parameter: Age (day) Value: 21
  misc_feature: MA Experiment 20000265 PARAMETER Experiment Name: At_Open_Flower_P Parameter: Plant Line Value: WS
  misc_feature: MA Experiment 20000265 PARAMETER Experiment Name: At_Open_Flower_P Parameter: Tissue Value: Closed Flower vs. Whole Plant
  misc_feature: MA Experiment ID: 20000438 Result: Down-regulated in Transcription
  misc_feature: MA Experiment 20000438 PARAMETER Experiment Name: At_Shoots__P Parameter: Age (day) Value: 14
  misc_feature: MA Experiment 20000438 PARAMETER Experiment Name: At_Shoots__P Parameter: Tissue Value: Shoots vs. Whole Plant
  misc_feature: MA Experiment ID: 20000794 Result: Down-regulated in Transcription
  misc_feature: MA Experiment 20000794 PARAMETER Experiment Name: At_Petals_P Parameter: Age (day) Value: 23-25 days
  misc_feature: MA Experiment 20000794 PARAMETER Experiment Name: At_Petals_P Parameter: Plant Line Value: WS
  misc_feature: MA Experiment 20000794 PARAMETER Experiment Name: At_Petals_P Parameter: Tissue Value: Petals vs. Whole plant
  misc_feature: MA Experiment ID: 20001451 Result: Down-regulated in Transcription
  misc_feature: MA Experiment 20001451 PARAMETER Experiment Name: At_Far-red-induction_P Parameter: Age (day) Value: 7
  misc_feature: MA Experiment 20001451 PARAMETER Experiment Name: At_Far-red-induction_P Parameter: Light Value: Far-red vs. White
  misc_feature: MA Experiment 20001451 PARAMETER Experiment Name: At_Far-red-induction_P Parameter: Organism Value: A. thaliana
  misc_feature: MA Experiment 20001451 PARAMETER Experiment Name: At_Far-red-induction_P Parameter: Plant Line Value: Columbia
  misc_feature: MA Experiment 20001451 PARAMETER Experiment Name: At_Far-red-induction_P Parameter: Timepoint (hr) Value: 24
  misc_feature: MA Experiment 20001451 PARAMETER Experiment Name: At_Far-red-induction_P Parameter: Tissue Value: Whole Plant

SEQ ID NO: 93137 - protein, 279 aa, Arabidopsis thaliana; identical to SEQ ID NO: 89381
  peptide (1)..(279): Ceres Seq. ID no. 12718326
  misc_feature (101)..(145): Pfam Name: AN1-like Zinc finger Pfam Description: AN1-like Zinc finger
  misc_feature (1)..(279): Homolog of NCBI NO: 30688811 NR Description: zinc finger protein (PMZ) -related [Arabidopsis >gi|17529076|gb|AAL38748.1| unknown protein [Arabidopsis >gi|20465575|gb|AAM20270.1| unknown protein [Arabidopsis
  misc_feature (1)..(279): Homolog of NCBI NO: 33146779 NR Description: putative arsenite inducible RNA associated
  misc_feature (1)..(241): Homolog of NCBI NO: 15230311 NR Description: putative protein; protein id: At3g57480.1
  misc_feature (2)..(177): Homolog of NCBI NO: 15232930 NR Description: zinc finger protein (PMZ), putative; protein id:
  misc_feature (5)..(217): Homolog of NCBI NO: 21312112 NR Description: RIKEN cDNA 1110060O18 [Mus musculus]
  misc_feature (5)..(217): Homolog of NCBI NO: 15079311 NR Description: RIKEN cDNA 1110060O18 gene [Mus musculus]
  misc_feature (5)..(174): Homolog of NCBI NO: 33416395 NR Description: Unknown (protein for MGC:66295) [Danio rerio]
  misc_feature (5)..(169): Homolog of NCBI NO: 19111158 NR Description: arsenite inducible RNA associated protein [Mus >gi|9651711|gb|AAF91234.1|AF224494_1 arsenite inducible RNA
  misc_feature (5)..(217): Homolog of NCBI NO: 34876869 NR Description: similar to RIKEN cDNA 1110060O18 [Rattus
  misc_feature (5)..(255): Homolog of NCBI NO: 20270357 NR Description: hypothetical protein BC018415 [Homo sapiens]

SEQ ID NO: 93138 - protein, 237 aa, Arabidopsis thaliana; identical to SEQ ID NO: 89382
  peptide (1)..(237): Ceres Seq. ID no. 12718327
  misc_feature (59)..(103): Pfam Name: AN1-like Zinc finger Pfam Description: AN1-like Zinc finger
  misc_feature (1)..(237): Homolog of NCBI NO: 30688811 NR Description: zinc finger protein (PMZ) -related [Arabidopsis >gi|17529076|gb|AAL38748.1| unknown protein [Arabidopsis >gi|20465575|gb|AAM20270.1| unknown protein [Arabidopsis
  misc_feature (1)..(237): Homolog of NCBI NO: 33146779 NR Description: putative arsenite inducible RNA associated
  misc_feature (1)..(199): Homolog of NCBI NO: 15230311 NR Description: putative protein; protein id: At3g57480.1
  misc_feature (1)..(135): Homolog of NCBI NO: 15232930 NR Description: zinc finger protein (PMZ), putative; protein id:
  misc_feature (1)..(175): Homolog of NCBI NO: 21312112 NR Description: RIKEN cDNA 1110060O18 [Mus musculus]
  misc_feature (1)..(175): Homolog of NCBI NO: 15079311 NR Description: RIKEN cDNA 1110060O18 gene [Mus musculus]
  misc_feature (1)..(132): Homolog of NCBI NO: 33416395 NR Description: Unknown (protein for MGC:66295) [Danio rerio]
  misc_feature (1)..(127): Homolog of NCBI NO: 19111158 NR Description: arsenite inducible RNA associated protein [Mus >gi|9651711|gb|AAF91234.1|AF224494_1 arsenite inducible RNA
  misc_feature (1)..(175): Homolog of NCBI NO: 34876869 NR Description: similar to RIKEN cDNA 1110060O18 [Rattus
  misc_feature (1)..(213): Homolog of NCBI NO: 20270357 NR Description: hypothetical protein BC018415 [Homo sapiens]

SEQ ID NO: 93139 - DNA, 1593 bp, Arabidopsis thaliana; identical to SEQ ID NO: 89383
  misc_feature (1)..(1593): Ceres Seq. ID no. 12718332
  misc_feature: MA Experiment ID: 20000184 Result: Down-regulated in Transcription
  misc_feature: MA Experiment 20000184 PARAMETER Experiment Name: At_Shoots__P Parameter: Age (day) Value: 7
  misc_feature: MA Experiment 20000184 PARAMETER Experiment Name: At_Shoots__P Parameter: Tissue Value: Shoots vs. Whole Plant
  misc_feature: MA Experiment ID: 20000264 Result: Up-regulated in Transcription
  misc_feature: MA Experiment 20000264 PARAMETER Experiment Name: At_Open_Flower_P Parameter: Age (day) Value: 21
  misc_feature: MA Experiment 20000264 PARAMETER Experiment Name: At_Open_Flower_P Parameter: Plant Line Value: WS
  misc_feature: MA Experiment 20000264 PARAMETER Experiment Name: At_Open_Flower_P Parameter: Tissue Value: Open Flower vs. Whole Plant
  misc_feature: MA Experiment ID: 20000265 Result: Up-regulated in Transcription
  misc_feature: MA Experiment 20000265 PARAMETER Experiment Name: At_Open_Flower_P Parameter: Age (day) Value: 21
  misc_feature: MA Experiment 20000265 PARAMETER Experiment Name: At_Open_Flower_P Parameter: Plant Line Value: WS
  misc_feature: MA Experiment 20000265 PARAMETER Experiment Name: At_Open_Flower_P Parameter: Tissue Value: Closed Flower vs. Whole Plant
  misc_feature: MA Experiment ID: 20000286 Result: Up-regulated in Transcription
  misc_feature: MA Experiment 20000286 PARAMETER Experiment Name: At_Open_Flower_P Parameter: Age (day) Value: 21
  misc_feature: MA Experiment 20000286 PARAMETER Experiment Name: At_Open_Flower_P Parameter: Plant Line Value: WS
  misc_feature: MA Experiment 20000286 PARAMETER Experiment Name: At_Open_Flower_P Parameter: Tissue Value: Half Open vs. Whole Plant
  misc_feature: MA Experiment ID: 20000794 Result: Up-regulated in Transcription
  misc_feature: MA Experiment 20000794 PARAMETER Experiment Name: At_Petals_P Parameter: Age (day) Value: 23-25 days
  misc_feature: MA Experiment 20000794 PARAMETER Experiment Name: At_Petals_P Parameter: Plant Line Value: WS
  misc_feature: MA Experiment 20000794 PARAMETER Experiment Name: At_Petals_P Parameter: Tissue Value: Petals vs. Whole plant
  misc_feature: MA Experiment ID: 20001910 Result: Up-regulated in Transcription
  misc_feature: MA Experiment 20001910 PARAMETER Experiment Name: At_Drought_Reproduction_P Parameter: Age (day) Value: 37
  misc_feature: MA Experiment 20001910 PARAMETER Experiment Name: At_Drought_Reproduction_P Parameter: Organism Value: A. thaliana
  misc_feature: MA Experiment 20001910 PARAMETER Experiment Name: At_Drought_Reproduction_P Parameter: Plant Line Value: WS
  misc_feature: MA Experiment 20001910 PARAMETER Experiment Name: At_Drought_Reproduction_P Parameter: Timepoint (day) Value: 7
  misc_feature: MA Experiment 20001910 PARAMETER Experiment Name: At_Drought_Reproduction_P Parameter: Tissue Value: Flowers
  misc_feature: MA Experiment 20001910 PARAMETER Experiment Name: At_Drought_Reproduction_P Parameter: Treatment Value: Drought vs. No Drought

SEQ ID NO: 93140 - protein, 530 aa, Arabidopsis thaliana; identical to SEQ ID NO: 89384
  peptide (1)..(530): Ceres Seq. ID no. 12718333
  misc_feature (54)..(312): Pfam Name: Protein kinase domain Pfam Description: Protein kinase domain
  misc_feature (1)..(530): Homolog of NCBI NO: 15227452 NR Description: putative calcium-dependent protein kinase; id: At2g41860.1 [Arabidopsis thaliana] >gi|25287680|pir||A84847
  misc_feature (1)..(530): Homolog of NCBI NO: 30694663 NR Description: calcium-dependent protein kinase, putative (CDPK)
  misc_feature (1)..(525): Homolog of NCBI NO: 11259874 NR Description: calcium-dependent protein kinase - Arabidopsis
  misc_feature (1)..(530): Homolog of NCBI NO: 2665890 NR Description: calcium-dependent protein kinase [Fragaria x
  misc_feature (1)..(529): Homolog of NCBI NO: 18416872 NR Description: calcium-dependent protein kinase-like protein; id: At5g12480.1, supported by cDNA: gi_13605616, supported by gi_1399276 [Arabidopsis thaliana] >gi|1399277|gb|AAB03247.1|
  misc_feature (1)..(528): Homolog of NCBI NO: 15239742 NR Description: calcium-dependent protein kinase; protein id: supported by cDNA: gi_836941 [Arabidopsis thaliana]
  misc_feature (13)..(524): Homolog of NCBI NO: 34899838 NR Description: putative calcium-dependent protein kinase [Oryza
  misc_feature (1)..(523): Homolog of NCBI NO: 30699042 NR Description: calcium-dependent protein kinase, putative (CDPK)
  misc_feature (15)..(523): Homolog of NCBI NO: 14484895 NR Description: calcium-dependent protein kinase [Funaria
  misc_feature (1)..(523): Homolog of NCBI NO: 28416563 NR Description: At1g18890 [Arabidopsis thaliana]

SEQ ID NO: 93141 - protein, 425 aa, Arabidopsis thaliana; identical to SEQ ID NO: 89385
  peptide (1)..(425): Ceres Seq. ID no. 12718334
  misc_feature (1)..(207): Pfam Name: Protein kinase domain Pfam Description: Protein kinase domain
  misc_feature (1)..(425): Homolog of NCBI NO: 15227452 NR Description: putative calcium-dependent protein kinase; id: At2g41860.1 [Arabidopsis thaliana] >gi|25287680|pir||A84847
  misc_feature (1)..(425): Homolog of NCBI NO: 30694663 NR Description: calcium-dependent protein kinase, putative (CDPK)
  misc_feature (1)..(420): Homolog of NCBI NO: 11259874 NR Description: calcium-dependent protein kinase - Arabidopsis
  misc_feature (1)..(425): Homolog of NCBI NO: 2665890 NR Description: calcium-dependent protein kinase [Fragaria x
  misc_feature (1)..(424): Homolog of NCBI NO: 18416872 NR Description: calcium-dependent protein kinase-like protein; id: At5g12480.1, supported by cDNA: gi_13605616, supported by gi_1399276 [Arabidopsis thaliana] >gi|1399277|gb|AAB03247.1|
  misc_feature (1)..(423): Homolog of NCBI NO: 15239742 NR Description: calcium-dependent protein kinase; protein id: supported by cDNA: gi_836941 [Arabidopsis thaliana]
  misc_feature (1)..(419): Homolog of NCBI NO: 34899838 NR Description: putative calcium-dependent protein kinase [Oryza
  misc_feature (1)..(418): Homolog of NCBI NO: 30699042 NR Description: calcium-dependent protein kinase, putative (CDPK)
  misc_feature (1)..(418): Homolog of NCBI NO: 14484895 NR Description: calcium-dependent protein kinase [Funaria
  misc_feature (1)..(418): Homolog of NCBI NO: 28416563 NR Description: At1g18890 [Arabidopsis thaliana]

SEQ ID NO: 93142 - protein, 422 aa, Arabidopsis thaliana; identical to SEQ ID NO: 89386
  peptide (1)..(422): Ceres Seq. ID no. 12718335
  misc_feature (1)..(204): Pfam Name: Protein kinase domain Pfam Description: Protein kinase domain
  misc_feature (1)..(422): Homolog of NCBI NO: 15227452 NR Description: putative calcium-dependent protein kinase; id: At2g41860.1 [Arabidopsis thaliana] >gi|25287680|pir||A84847
  misc_feature (1)..(422): Homolog of NCBI NO: 30694663 NR Description: calcium-dependent protein kinase, putative (CDPK)
  misc_feature (1)..(417): Homolog of NCBI NO: 11259874 NR Description: calcium-dependent protein kinase - Arabidopsis
  misc_feature (1)..(422): Homolog of NCBI NO: 2665890 NR Description: calcium-dependent protein kinase [Fragaria x
  misc_feature (1)..(421): Homolog of NCBI NO: 18416872 NR Description: calcium-dependent protein kinase-like protein; id: At5g12480.1, supported by cDNA: gi_13605616, supported by gi_1399276 [Arabidopsis thaliana] >gi|1399277|gb|AAB03247.1|
  misc_feature (1)..(420): Homolog of NCBI NO: 15239742 NR Description: calcium-dependent protein kinase; protein id: supported by cDNA: gi_836941 [Arabidopsis thaliana]
  misc_feature (1)..(416): Homolog of NCBI NO: 34899838 NR Description: putative calcium-dependent protein kinase [Oryza
  misc_feature (1)..(415): Homolog of NCBI NO: 30699042 NR Description: calcium-dependent protein kinase, putative (CDPK)
  misc_feature (1)..(415): Homolog of NCBI NO: 14484895 NR Description: calcium-dependent protein kinase [Funaria
  misc_feature (1)..(415): Homolog of NCBI NO: 28416563 NR Description: At1g18890 [Arabidopsis thaliana]

SEQ ID NO: 93143 - DNA, 1098 bp, Arabidopsis thaliana; identical to SEQ ID NO: 89387
  misc_feature (1)..(1098): Ceres Seq. ID no. 12718356
  misc_feature: MA Experiment ID: 20000307 Result: Up-regulated in Transcription
  misc_feature: MA Experiment 20000307 PARAMETER Experiment Name: At_Germinating_Seeds_Sub_P Parameter: Age (hr) Value: 24 vs. 0
  misc_feature: MA Experiment 20000307 PARAMETER Experiment Name: At_Germinating_Seeds_Sub_P Parameter: Organism Value: A. thaliana
  misc_feature: MA Experiment 20000307 PARAMETER Experiment Name: At_Germinating_Seeds_Sub_P Parameter: Plant Line Value: WS
  misc_feature: MA Experiment 20000307 PARAMETER Experiment Name: At_Germinating_Seeds_Sub_P Parameter: Tissue Value: Germinating Seeds
  misc_feature: MA Experiment ID: 20000314 Result: Up-regulated in Transcription
  misc_feature: MA Experiment 20000314 PARAMETER Experiment Name: At_14day_Shoots-Roots_Sub_P Parameter: Age (day) Value: 14
  misc_feature: MA Experiment 20000314 PARAMETER Experiment Name: At_14day_Shoots-Roots_Sub_P Parameter: Organism Value: A. thaliana
  misc_feature: MA Experiment 20000314 PARAMETER Experiment Name: At_14day_Shoots-Roots_Sub_P Parameter: Plant Line Value: WS
  misc_feature: MA Experiment 20000314 PARAMETER Experiment Name: At_14day_Shoots-Roots_Sub_P Parameter: Tissue Value: Roots vs. Whole Plant
  misc_feature: MA Experiment ID: 20000440 Result: Up-regulated in Transcription
  misc_feature: MA Experiment 20000440 PARAMETER Experiment Name: At_Closed-Flower__Sub_P Parameter: Tissue Value: Closed Flower vs. Whole Plant

SEQ ID NO: 93144 - protein, 365 aa, Arabidopsis thaliana; identical to SEQ ID NO: 89388
  peptide (1)..(365): Ceres Seq. ID no. 12718357
  misc_feature (1)..(365): Homolog of NCBI NO: 15227478 NR Description: putative protein kinase; protein id: At2g41970.1
  misc_feature (1)..(363): Homolog of NCBI NO: 38488409 NR Description: protein kinase 2 [Nicotiana tabacum]
  misc_feature (1)..(365): Homolog of NCBI NO: 38488407 NR Description: protein kinase 1 [Nicotiana tabacum]
  misc_feature (1)..(360): Homolog of NCBI NO: 34902310 NR Description: Putative protein kinase [Oryza sativa (japonica group)] >gi|24308632|gb|AAN52755.1| Putative protein kinase

SEQ ID NO: 93145 - protein, 297 aa, Arabidopsis thaliana; identical to SEQ ID NO: 89389
  peptide (1)..(297): Ceres Seq. ID no. 12718358
  misc_feature (1)..(297): Homolog of NCBI NO: 15227478 NR Description: putative protein kinase; protein id: At2g41970.1
  misc_feature (1)..(295): Homolog of NCBI NO: 38488409 NR Description: protein kinase 2 [Nicotiana tabacum]
  misc_feature (1)..(297): Homolog of NCBI NO: 38488407 NR Description: protein kinase 1 [Nicotiana tabacum]
  misc_feature (1)..(292): Homolog of NCBI NO: 34902310 NR Description: Putative protein kinase [Oryza sativa (japonica group)] >gi|24308632|gb|AAN52755.1| Putative protein kinase

SEQ ID NO: 93146 - DNA, 1143 bp, Arabidopsis thaliana; identical to SEQ ID NO: 89390
  misc_feature (1)..(1143): Ceres Seq. ID no. 12718425
  misc_feature: MA Experiment ID: 20000180 Result: Down-regulated in Transcription
  misc_feature: MA Experiment 20000180 PARAMETER Experiment Name: At_Germinating_Seeds_P Parameter: Age (hr) Value: 24 vs. 0
  misc_feature: MA Experiment 20000180 PARAMETER Experiment Name: At_Germinating_Seeds_P Parameter: Tissue Value: Germinating Seeds
  misc_feature: MA Experiment ID: 20000184 Result: Down-regulated in Transcription
  misc_feature: MA Experiment 20000184 PARAMETER Experiment Name: At_Shoots__P Parameter: Age (day) Value: 7
  misc_feature: MA Experiment 20000184 PARAMETER Experiment Name: At_Shoots__P Parameter: Tissue Value: Shoots vs. Whole Plant
  misc_feature: MA Experiment ID: 20000264 Result: Down-regulated in Transcription
  misc_feature: MA Experiment 20000264 PARAMETER Experiment Name: At_Open_Flower_P Parameter: Age (day) Value: 21
  misc_feature: MA Experiment 20000264 PARAMETER Experiment Name: At_Open_Flower_P Parameter: Plant Line Value: WS
  misc_feature: MA Experiment 20000264 PARAMETER Experiment Name: At_Open_Flower_P Parameter: Tissue Value: Open Flower vs. Whole Plant
  misc_feature: MA Experiment ID: 20000265 Result: Down-regulated in Transcription
  misc_feature: MA Experiment 20000265 PARAMETER Experiment Name: At_Open_Flower_P Parameter: Age (day) Value: 21
  misc_feature: MA Experiment 20000265 PARAMETER Experiment Name: At_Open_Flower_P Parameter: Plant Line Value: WS
  misc_feature: MA Experiment 20000265 PARAMETER Experiment Name: At_Open_Flower_P Parameter: Tissue Value: Closed Flower vs. Whole Plant
  misc_feature: MA Experiment ID: 20000267 Result: Down-regulated in Transcription
  misc_feature: MA Experiment 20000267 PARAMETER Experiment Name: At_Drought_P Parameter: Age (day) Value: 7
  misc_feature: MA Experiment 20000267 PARAMETER Experiment Name: At_Drought_P Parameter: Organism Value: A. thaliana
  misc_feature: MA Experiment 20000267 PARAMETER Experiment Name: At_Drought_P Parameter: Plant Line Value: WS
  misc_feature: MA Experiment 20000267 PARAMETER Experiment Name: At_Drought_P Parameter: Timepoint (hr) Value: 6
  misc_feature: MA Experiment 20000267 PARAMETER Experiment Name: At_Drought_P Parameter: Tissue Value: Whole Plant
  misc_feature: MA Experiment 20000267 PARAMETER Experiment Name: At_Drought_P Parameter: Treatment Value: Drought vs. No Drought
  misc_feature: MA Experiment ID: 20000286 Result: Down-regulated in Transcription
  misc_feature: MA Experiment 20000286 PARAMETER Experiment Name: At_Open_Flower_P Parameter: Age (day) Value: 21
  misc_feature: MA Experiment 20000286 PARAMETER Experiment Name: At_Open_Flower_P Parameter: Plant Line Value: WS
  misc_feature: MA Experiment 20000286 PARAMETER Experiment Name: At_Open_Flower_P Parameter: Tissue Value: Half Open vs. Whole Plant
  misc_feature: MA Experiment ID: 20000436 Result: Down-regulated in Transcription
  misc_feature: MA Experiment 20000436 PARAMETER Experiment Name: At_Drought_P Parameter: Age (day) Value: 7
  misc_feature: MA Experiment 20000436 PARAMETER Experiment Name: At_Drought_P Parameter: Organism Value: A. thaliana
  misc_feature: MA Experiment 20000436 PARAMETER Experiment Name: At_Drought_P Parameter: Plant Line Value: WS
  misc_feature: MA Experiment 20000436 PARAMETER Experiment Name: At_Drought_P Parameter: Timepoint (hr) Value: 12
  misc_feature: MA Experiment 20000436 PARAMETER Experiment Name: At_Drought_P Parameter: Tissue Value: Whole Plant
  misc_feature: MA Experiment 20000436 PARAMETER Experiment Name: At_Drought_P Parameter: Treatment Value: Drought vs. No Drought
  misc_feature: MA Experiment ID: 20000437 Result: Down-regulated in Transcription
  misc_feature: MA Experiment 20000437 PARAMETER Experiment Name: At_Drought_P Parameter: Age (day) Value: 8
  misc_feature: MA Experiment 20000437 PARAMETER Experiment Name: At_Drought_P Parameter: Organism Value: A. thaliana
  misc_feature: MA Experiment 20000437 PARAMETER Experiment Name: At_Drought_P Parameter: Plant Line Value: WS
  misc_feature: MA Experiment 20000437 PARAMETER Experiment Name: At_Drought_P Parameter: Timepoint (hr) Value: 24
  misc_feature: MA Experiment 20000437 PARAMETER Experiment Name: At_Drought_P Parameter: Tissue Value: Whole Plant
  misc_feature: MA Experiment 20000437 PARAMETER Experiment Name: At_Drought_P Parameter: Treatment Value: Drought vs. No Drought
  misc_feature: MA Experiment ID: 20001248 Result: Up-regulated in Transcription
  misc_feature: MA Experiment 20001248 PARAMETER Experiment Name: At_Far-red-induction_P Parameter: Age (day) Value: 7
  misc_feature: MA Experiment 20001248 PARAMETER Experiment Name: At_Far-red-induction_P Parameter: Light Value: Far-red vs. White
  misc_feature: MA Experiment 20001248 PARAMETER Experiment Name: At_Far-red-induction_P Parameter: Organism Value: A. thaliana
  misc_feature: MA Experiment 20001248 PARAMETER Experiment Name: At_Far-red-induction_P Parameter: Plant Line Value: Columbia
  misc_feature: MA Experiment 20001248 PARAMETER Experiment Name: At_Far-red-induction_P Parameter: Timepoint (hr) Value: 4
  misc_feature: MA Experiment 20001248 PARAMETER Experiment Name: At_Far-red-induction_P Parameter: Tissue Value: Whole Plant
  misc_feature: MA Experiment ID: 20001451 Result: Down-regulated in Transcription
  misc_feature: MA Experiment 20001451 PARAMETER Experiment Name: At_Far-red-induction_P Parameter: Age (day) Value: 7
  misc_feature: MA Experiment 20001451 PARAMETER Experiment Name: At_Far-red-induction_P Parameter: Light Value: Far-red vs. White
  misc_feature: MA Experiment 20001451 PARAMETER Experiment Name: At_Far-red-induction_P Parameter: Organism Value: A. thaliana
  misc_feature: MA Experiment 20001451 PARAMETER Experiment Name: At_Far-red-induction_P Parameter: Plant Line Value: Columbia
  misc_feature: MA Experiment 20001451 PARAMETER Experiment Name: At_Far-red-induction_P Parameter: Timepoint (hr) Value: 24
  misc_feature: MA Experiment 20001451 PARAMETER Experiment Name: At_Far-red-induction_P Parameter: Tissue Value: Whole Plant

SEQ ID NO: 93147 - protein, 380 aa, Arabidopsis thaliana; identical to SEQ ID NO: 89391
  peptide (1)..(380): Ceres Seq. ID no. 12718426
  misc_feature (309)..(357): Pfam Name: Helix-loop-helix DNA-binding domain Pfam Description: Helix-loop-helix DNA-binding domain
  misc_feature (1)..(380): Homolog of NCBI NO: 15227914 NR Description: bHLH protein; protein id: At2g42280.1
  misc_feature (226)..(378): Homolog of NCBI NO: 19401700 NR Description: transcription factor RAU1 [Oryza sativa]
  misc_feature (171)..(372): Homolog of NCBI NO: 18403381 NR Description: expressed protein; protein id: At1g51140.1, by cDNA: gi_14334499, supported by cDNA: gi_17104810 [Arabidopsis
  misc_feature (221)..(372): Homolog of NCBI NO: 6166283 NR Description: helix-loop-helix protein 1A [Pinus taeda]
  misc_feature (222)..(375): Homolog of NCBI NO: 34907702 NR Description: P0035F12.11 [Oryza sativa (japonica
  misc_feature (106)..(379): Homolog of NCBI NO: 18390573 NR Description: bHLH protein; protein id: At1g05805.1, supported cDNA: 21406. [Arabidopsis thaliana] >gi|24030386|gb|AAN41354.1|
  misc_feature (106)..(379): Homolog of NCBI NO: 21554238 NR Description: Contains similarity to bHLH transcription factor
  misc_feature (246)..(376): Homolog of NCBI NO: 38345229 NR Description: OSJNBa0084K20.3 [Oryza sativa (japonica
  misc_feature (129)..(378): Homolog of NCBI NO: 15219606 NR Description: bHLH protein; protein id: At1g35460.1, supported cDNA: gi_15724177, supported by cDNA: gi_20127087, supported by
  misc_feature (129)..(378): Homolog of NCBI NO: 15233768 NR Description: putative protein; protein id: At4g09180.1

SEQ ID NO: 93148 - protein, 273 aa, Arabidopsis thaliana; identical to SEQ ID NO: 89392
  peptide (1)..(273): Ceres Seq. ID no. 12718427
  misc_feature (202)..(250): Pfam Name: Helix-loop-helix DNA-binding domain Pfam Description: Helix-loop-helix DNA-binding domain
  misc_feature (1)..(273): Homolog of NCBI NO: 15227914 NR Description: bHLH protein; protein id: At2g42280.1
  misc_feature (119)..(271): Homolog of NCBI NO: 19401700 NR Description: transcription factor RAU1 [Oryza sativa]
  misc_feature (64)..(265): Homolog of NCBI NO: 18403381 NR Description: expressed protein; protein id: At1g51140.1, by cDNA: gi_14334499, supported by cDNA: gi_17104810 [Arabidopsis
  misc_feature (114)..(265): Homolog of NCBI NO: 6166283 NR Description: helix-loop-helix protein 1A [Pinus taeda]
  misc_feature (115)..(268): Homolog of NCBI NO: 34907702 NR Description: P0035F12.11 [Oryza sativa (japonica
  misc_feature (1)..(272): Homolog of NCBI NO: 18390573 NR Description: bHLH protein; protein id: At1g05805.1, supported cDNA: 21406. [Arabidopsis thaliana] >gi|24030386|gb|AAN41354.1|
  misc_feature (1)..(272): Homolog of NCBI NO: 21554238 NR Description: Contains similarity to bHLH transcription factor
  misc_feature (139)..(269): Homolog of NCBI NO: 38345229 NR Description: OSJNBa0084K20.3 [Oryza sativa (japonica
  misc_feature (22)..(271): Homolog of NCBI NO: 15219606 NR Description: bHLH protein; protein id: At1g35460.1, supported cDNA: gi_15724177, supported by cDNA: gi_20127087, supported by
  misc_feature (22)..(271): Homolog of NCBI NO: 15233768 NR Description: putative protein; protein id: At4g09180.1

SEQ ID NO: 93149 - protein, 240 aa, Arabidopsis thaliana; identical to SEQ ID NO: 89393
  peptide (1)..(240): Ceres Seq. ID no. 12718428
  misc_feature (169)..(217): Pfam Name: Helix-loop-helix DNA-binding domain Pfam Description: Helix-loop-helix DNA-binding domain
  misc_feature (1)..(240): Homolog of NCBI NO: 15227914 NR Description: bHLH protein; protein id: At2g42280.1
  misc_feature (86)..(238): Homolog of NCBI NO: 19401700 NR Description: transcription factor RAU1 [Oryza sativa]
  misc_feature (31)..(232): Homolog of NCBI NO: 18403381 NR Description: expressed protein; protein id: At1g51140.1, by cDNA: gi_14334499, supported by cDNA: gi_17104810 [Arabidopsis
  misc_feature (81)..(232): Homolog of NCBI NO: 6166283 NR Description: helix-loop-helix protein 1A [Pinus taeda]
  misc_feature (82)..(235): Homolog of NCBI NO: 34907702 NR Description: P0035F12.11 [Oryza sativa (japonica
  misc_feature (1)..(239): Homolog of NCBI NO: 18390573 NR Description: bHLH protein; protein id: At1g05805.1, supported cDNA: 21406. [Arabidopsis thaliana] >gi|24030386|gb|AAN41354.1|
  misc_feature (1)..(239): Homolog of NCBI NO: 21554238 NR Description: Contains similarity to bHLH transcription factor
  misc_feature (106)..(236): Homolog of NCBI NO: 38345229 NR Description: OSJNBa0084K20.3 [Oryza sativa (japonica
  misc_feature (1)..(238): Homolog of NCBI NO: 15219606 NR Description: bHLH protein; protein id: At1g35460.1, supported cDNA: gi_15724177, supported by cDNA: gi_20127087, supported by
  misc_feature (1)..(238): Homolog of NCBI NO: 15233768 NR Description: putative protein; protein id: At4g09180.1

SEQ ID NO: 93150 - DNA, 1458 bp, Arabidopsis thaliana; identical to SEQ ID NO: 89394
  misc_feature (1)..(1458): Ceres Seq. ID no. 12718491
  misc_feature: MA Experiment ID: 20000180 Result: Up-regulated in Transcription
  misc_feature: MA Experiment 20000180 PARAMETER Experiment Name: At_Germinating_Seeds_P Parameter: Age (hr) Value: 24 vs. 0
  misc_feature: MA Experiment 20000180 PARAMETER Experiment Name: At_Germinating_Seeds_P Parameter: Tissue Value: Germinating Seeds
  misc_feature: MA Experiment ID: 20000184 Result: Up-regulated in Transcription
  misc_feature: MA Experiment 20000184 PARAMETER Experiment Name: At_Shoots__P Parameter: Age (day) Value: 7
  misc_feature: MA Experiment 20000184 PARAMETER Experiment Name: At_Shoots__P Parameter: Tissue Value: Shoots vs. Whole Plant
  misc_feature: MA Experiment ID: 20000185 Result: Up-regulated in Transcription
  misc_feature: MA Experiment 20000185 PARAMETER Experiment Name: At_Roots__P Parameter: Age (day) Value: 7 vs. 21
  misc_feature: MA Experiment 20000185 PARAMETER Experiment Name: At_Roots__P Parameter: Organism Value: A. thaliana
  misc_feature: MA Experiment 20000185 PARAMETER Experiment Name: At_Roots__P Parameter: Tissue Value: Roots vs. Whole Plant
  misc_feature: MA Experiment ID: 20000227 Result: Up-regulated in Transcription
  misc_feature: MA Experiment 20000227 PARAMETER Experiment Name: At_Root-Tips-vs-Tops_P Parameter: Tissue Value: Root Tips vs. Root Tops
  misc_feature: MA Experiment ID: 20000439 Result: Up-regulated in Transcription
  misc_feature: MA Experiment 20000439 PARAMETER Experiment Name: At_Roots__P Parameter: Age (day) Value: 14 vs. 21
  misc_feature: MA Experiment 20000439 PARAMETER Experiment Name: At_Roots__P Parameter: Organism Value: A. thaliana
  misc_feature: MA Experiment 20000439 PARAMETER Experiment Name: At_Roots__P Parameter: Tissue Value: Roots vs. Whole Plant
  misc_feature: MA Experiment ID: 20001558 Result: Up-regulated in Transcription
  misc_feature: MA Experiment 20001558 PARAMETER Experiment Name: At_Drought_Soil_Dry_P Parameter: Age (day) Value: 27
  misc_feature: MA Experiment 20001558 PARAMETER Experiment Name: At_Drought_Soil_Dry_P Parameter: Organism Value: A. thaliana
  misc_feature: MA Experiment 20001558 PARAMETER Experiment Name: At_Drought_Soil_Dry_P Parameter: Plant Line Value: WS
  misc_feature: MA Experiment 20001558 PARAMETER Experiment Name: At_Drought_Soil_Dry_P Parameter: Post Timepoint (hr) Value: 6
  misc_feature: MA Experiment 20001558 PARAMETER Experiment Name: At_Drought_Soil_Dry_P Parameter: Post-Treatment Value: Re-Water vs. No Drought
  misc_feature: MA Experiment 20001558 PARAMETER Experiment Name: At_Drought_Soil_Dry_P Parameter: Timepoint (day) Value: 13
  misc_feature: MA Experiment 20001558 PARAMETER Experiment Name: At_Drought_Soil_Dry_P Parameter: Treatment Value: Drought vs. No Drought

SEQ ID NO: 93151 - protein, 485 aa, Arabidopsis thaliana; identical to SEQ ID NO: 89395
  peptide (1)..(485): Ceres Seq. ID no. 12718492
  misc_feature (233)..(484): Pfam Name: Cytochrome P450 Pfam Description: Cytochrome P450
  misc_feature (1)..(485): Homolog of NCBI NO: 15228011 NR Description: taxane 13 alpha-hydroxylase(cytochrome P450
  misc_feature (10)..(480): Homolog of NCBI NO: 28380196 NR Description: Taxane 13-alpha-hydroxylase
  misc_feature (34)..(483): Homolog of NCBI NO: 30350220 NR Description: taxane 14b-hydroxylase [Taxus cuspidata]
  misc_feature (8)..(483): Homolog of NCBI NO: 28380205 NR Description: Taxane 10-beta-hydroxylase
  misc_feature (44)..(483): Homolog of NCBI NO: 24266823 NR Description: 5-alpha-taxadienol-10-beta-hydroxylase [Taxus
  misc_feature (12)..(483): Homolog of NCBI NO: 15239304 NR Description: cytochrome p450 family; protein id: At5g36110.1
  misc_feature (42)..(480): Homolog of NCBI NO: 33146520 NR Description: putative 5-alpha-taxadienol-10-beta-hydroxylase
  misc_feature (33)..(485): Homolog of NCBI NO: 34395222 NR Description: putative taxane 14b-hydroxylase [Oryza sativa
  misc_feature (33)..(485): Homolog of NCBI NO: 34901920 NR Description: putative Cytochrome P450 [Oryza sativa (japonica
  misc_feature (10)..(483): Homolog of NCBI NO: 30694740 NR Description: cytochrome P450 family [Arabidopsis thaliana] cytochrome P450 [Arabidopsis thaliana] AT5g45340/K9E15_12 [Arabidopsis thaliana]

SEQ ID NO: 93152 - protein, 436 aa, Arabidopsis thaliana; identical to SEQ ID NO: 89396
  peptide (1)..(436): Ceres Seq. ID no. 12718493
  misc_feature (184)..(435): Pfam Name: Cytochrome P450 Pfam Description: Cytochrome P450
  misc_feature (1)..(436): Homolog of NCBI NO: 15228011 NR Description: taxane 13 alpha-hydroxylase(cytochrome P450
  misc_feature (1)..(431): Homolog of NCBI NO: 28380196 NR Description: Taxane 13-alpha-hydroxylase
  misc_feature (1)..(434): Homolog of NCBI NO: 30350220 NR Description: taxane 14b-hydroxylase [Taxus cuspidata]
  misc_feature (1)..(434): Homolog of NCBI NO: 28380205 NR Description: Taxane 10-beta-hydroxylase
  misc_feature (1)..(434): Homolog of NCBI NO: 24266823 NR Description: 5-alpha-taxadienol-10-beta-hydroxylase [Taxus
  misc_feature (1)..(434): Homolog of NCBI NO: 15239304 NR Description: cytochrome p450 family; protein id: At5g36110.1
  misc_feature (1)..(431): Homolog of NCBI NO: 33146520 NR Description: putative 5-alpha-taxadienol-10-beta-hydroxylase
  misc_feature (1)..(436): Homolog of NCBI NO: 34395222 NR Description: putative taxane 14b-hydroxylase [Oryza sativa
  misc_feature (1)..(436): Homolog of NCBI NO: 34901920 NR Description: putative Cytochrome P450 [Oryza sativa (japonica
  misc_feature (1)..(434): Homolog of NCBI NO: 30694740 NR Description: cytochrome P450 family [Arabidopsis thaliana] cytochrome P450 [Arabidopsis thaliana] AT5g45340/K9E15_12 [Arabidopsis thaliana]

SEQ ID NO: 93153 - protein, 427 aa, Arabidopsis thaliana; identical to SEQ ID NO: 89397
  peptide (1)..(427): Ceres Seq. ID no. 12718494
  misc_feature (175)..(426): Pfam Name: Cytochrome P450 Pfam Description: Cytochrome P450
  misc_feature (1)..(427): Homolog of NCBI NO: 15228011 NR Description: taxane 13 alpha-hydroxylase(cytochrome P450
  misc_feature (1)..(422): Homolog of NCBI NO: 28380196 NR Description: Taxane 13-alpha-hydroxylase
  misc_feature (1)..(425): Homolog of NCBI NO: 30350220 NR Description: taxane 14b-hydroxylase [Taxus cuspidata]
  misc_feature (1)..(425): Homolog of NCBI NO: 28380205 NR Description: Taxane 10-beta-hydroxylase
  misc_feature (1)..(425): Homolog of NCBI NO: 24266823 NR Description: 5-alpha-taxadienol-10-beta-hydroxylase [Taxus
  misc_feature (1)..(425): Homolog of NCBI NO: 15239304 NR Description: cytochrome p450 family; protein id: At5g36110.1
  misc_feature (1)..(422): Homolog of NCBI NO: 33146520 NR Description: putative 5-alpha-taxadienol-10-beta-hydroxylase
  misc_feature (1)..(427): Homolog of NCBI NO: 34395222 NR Description: putative taxane 14b-hydroxylase [Oryza sativa
  misc_feature (1)..(427): Homolog of NCBI NO: 34901920 NR Description: putative Cytochrome P450 [Oryza sativa (japonica
  misc_feature (1)..(425): Homolog of NCBI NO: 30694740 NR Description: cytochrome P450 family [Arabidopsis thaliana] cytochrome P450 [Arabidopsis thaliana] AT5g45340/K9E15_12 [Arabidopsis thaliana]

SEQ ID NO: 93154 - DNA, 1680 bp, Arabidopsis thaliana; identical to SEQ ID NO: 89398
  misc_feature (1)..(1680): Ceres Seq. ID no. 12718499
  misc_feature: MA Experiment ID: 20000264 Result: Up-regulated in Transcription
  misc_feature: MA Experiment 20000264 PARAMETER Experiment Name: At_Open_Flower_P Parameter: Age (day) Value: 21
  misc_feature: MA Experiment 20000264 PARAMETER Experiment Name: At_Open_Flower_P Parameter: Plant Line Value: WS
  misc_feature: MA Experiment 20000264 PARAMETER Experiment Name: At_Open_Flower_P Parameter: Tissue Value: Open Flower vs. Whole Plant
  misc_feature: MA Experiment ID: 20000265 Result: Up-regulated in Transcription
  misc_feature: MA Experiment 20000265 PARAMETER Experiment Name: At_Open_Flower_P Parameter: Age (day) Value: 21
  misc_feature: MA Experiment 20000265 PARAMETER Experiment Name: At_Open_Flower_P Parameter: Plant Line Value: WS
  misc_feature: MA Experiment 20000265 PARAMETER Experiment Name: At_Open_Flower_P Parameter: Tissue Value: Closed Flower vs. Whole Plant
  misc_feature: MA Experiment ID: 20000286 Result: Up-regulated in Transcription
  misc_feature: MA Experiment 20000286 PARAMETER Experiment Name: At_Open_Flower_P Parameter: Age (day) Value: 21
  misc_feature: MA Experiment 20000286 PARAMETER Experiment Name: At_Open_Flower_P Parameter: Plant Line Value: WS
  misc_feature: MA Experiment 20000286 PARAMETER Experiment Name: At_Open_Flower_P Parameter: Tissue Value: Half Open vs. Whole Plant
  misc_feature: MA Experiment ID: 20000495 Result: Down-regulated in Transcription
  misc_feature: MA Experiment 20000495 PARAMETER Experiment Name: At_Guard_Cells_P Parameter: Harvest Date Value: 8/2/2002
  misc_feature: MA Experiment 20000495 PARAMETER Experiment Name: At_Guard_Cells_P Parameter: Organism Value: A. thaliana
  misc_feature: MA Experiment 20000495 PARAMETER Experiment Name: At_Guard_Cells_P Parameter: Tissue Value: Guard Cells vs. Leaves

SEQ ID NO: 93155 - protein, 559 aa, Arabidopsis thaliana; identical to SEQ ID NO: 89399
  peptide (1)..(559): Ceres Seq. ID no. 12718500
  misc_feature (162)..(196): Pfam Name: PPR repeat Pfam Description: PPR repeat
  misc_feature (1)..(559): Homolog of NCBI NO: 15228028 NR Description: hypothetical protein; protein id: At2g42920.1
  misc_feature (73)..(527): Homolog of NCBI NO: 15239745 NR Description: selenium-binding protein-like; protein id:
  misc_feature (19)..(525): Homolog of NCBI NO: 15239979 NR Description: selenium-binding protein-like; protein id:
  misc_feature (35)..(527): Homolog of NCBI NO: 37534112 NR Description: putative selenium-binding protein-like [Oryza
  misc_feature (28)..(523): Homolog of NCBI NO: 15240085 NR Description: selenium-binding protein-like; protein id:
  misc_feature (44)..(528): Homolog of NCBI NO: 34910298 NR Description: P0013F10.8 [Oryza sativa (japonica
  misc_feature (32)..(543): Homolog of NCBI NO: 15227199 NR Description: hypothetical protein; protein id: At2g22410.1, by cDNA: gi_18086348 [Arabidopsis thaliana]
  misc_feature (191)..(528): Homolog of NCBI NO: 34906110 NR Description: P0020E09.15 [Oryza sativa (japonica
  misc_feature (74)..(211): Homolog of NCBI NO: 34906110 NR Description: P0020E09.15 [Oryza sativa (japonica
  misc_feature (76)..(559): Homolog of NCBI NO: 15229340 NR Description: putative protein; protein id: At3g62890.1

SEQ ID NO: 93156 - protein, 544 aa, Arabidopsis thaliana; identical to SEQ ID NO: 89400
  peptide (1)..(544): Ceres Seq. ID no. 12718501
  misc_feature (147)..(181): Pfam Name: PPR repeat Pfam Description: PPR repeat
  misc_feature (1)..(544): Homolog of NCBI NO: 15228028 NR Description: hypothetical protein; protein id: At2g42920.1
  misc_feature (58)..(512): Homolog of NCBI NO: 15239745 NR Description: selenium-binding protein-like; protein id:
  misc_feature (4)..(510): Homolog of NCBI NO: 15239979 NR Description: selenium-binding protein-like; protein id:
  misc_feature (20)..(512): Homolog of NCBI NO: 37534112 NR Description: putative selenium-binding protein-like [Oryza
  misc_feature (13)..(508): Homolog of NCBI NO: 15240085 NR Description: selenium-binding protein-like; protein id:
  misc_feature (29)..(513): Homolog of NCBI NO: 34910298 NR Description: P0013F10.8 [Oryza sativa (japonica
  misc_feature (17)..(528): Homolog of NCBI NO: 15227199 NR Description: hypothetical protein; protein id: At2g22410.1, by cDNA: gi_18086348 [Arabidopsis thaliana]
  misc_feature (176)..(513): Homolog of NCBI NO: 34906110 NR Description: P0020E09.15 [Oryza sativa (japonica
  misc_feature (59)..(196): Homolog of NCBI NO: 34906110 NR Description: P0020E09.15 [Oryza sativa (japonica
  misc_feature (61)..(544): Homolog of NCBI NO: 15229340 NR Description: putative protein; protein id: At3g62890.1

SEQ ID NO: 93157 - protein, 522 aa, Arabidopsis thaliana; identical to SEQ ID NO: 89401
  peptide (1)..(522): Ceres Seq. ID no. 12718502
  misc_feature (125)..(159): Pfam Name: PPR repeat Pfam Description: PPR repeat
  misc_feature (1)..(522): Homolog of NCBI NO: 15228028 NR Description: hypothetical protein; protein id: At2g42920.1
  misc_feature (36)..(490): Homolog of NCBI NO: 15239745 NR Description: selenium-binding protein-like; protein id:
  misc_feature (1)..(488): Homolog of NCBI NO: 15239979 NR Description: selenium-binding protein-like; protein id:
  misc_feature (1)..(490): Homolog of NCBI NO: 37534112 NR Description: putative selenium-binding protein-like [Oryza
  misc_feature (1)..(486): Homolog of NCBI NO: 15240085 NR Description: selenium-binding protein-like; protein id:
  misc_feature (7)..(491): Homolog of NCBI NO: 34910298 NR Description: P0013F10.8 [Oryza sativa (japonica
  misc_feature (1)..(506): Homolog of NCBI NO: 15227199 NR Description: hypothetical protein; protein id: At2g22410.1, by cDNA: gi_18086348 [Arabidopsis thaliana]
  misc_feature (154)..(491): Homolog of NCBI NO: 34906110 NR Description: P0020E09.15 [Oryza sativa (japonica
  misc_feature (37)..(174): Homolog of NCBI NO: 34906110 NR Description: P0020E09.15 [Oryza sativa (japonica
  misc_feature (39)..(522): Homolog of NCBI NO: 15229340 NR Description: putative protein; protein id: At3g62890.1

SEQ ID NO: 93158 - DNA, 1485 bp, Arabidopsis thaliana; identical to SEQ ID NO: 89402
  misc_feature (1)..(1485): Ceres Seq. ID no. 12718507
  misc_feature: MA Experiment ID: 20000440 Result: Up-regulated in Transcription
  misc_feature: MA Experiment 20000440 PARAMETER Experiment Name: At_Closed-Flower__Sub_P Parameter: Tissue Value: Closed Flower vs. Whole Plant

SEQ ID NO: 93159 - protein, 494 aa, Arabidopsis thaliana; identical to SEQ ID NO: 89403
  peptide (1)..(494): Ceres Seq. ID no. 12718508
  misc_feature (183)..(454): Pfam Name: Protein kinase domain Pfam Description: Protein kinase domain
  misc_feature (1)..(494): Homolog of NCBI NO: 15228043 NR Description: putative protein kinase; protein id: At2g42960.1
  misc_feature (1)..(494): Homolog of NCBI NO: 15231637 NR Description: receptor-like protein kinase; protein id:
  misc_feature (1)..(484): Homolog of NCBI NO: 37535714 NR Description: putative kinase [Oryza sativa (japonica
  misc_feature (2)..(484): Homolog of NCBI NO: 34894708 NR Description: Putative protein kinase [Oryza sativa (japonica group)] >gi|12328581|dbj|BAB21240.1| Putative protein kinase
  misc_feature (7)..(493): Homolog of NCBI NO: 18405946 NR Description: expressed protein; protein id: At1g56720.1,
  misc_feature (7)..(493): Homolog of NCBI NO: 21593085 NR Description: Putative protein kinase [Arabidopsis thaliana]
  misc_feature (7)..(493): Homolog of NCBI NO: 25404144 NR Description: probable protein kinase F25P12.84 [imported] - thaliana >gi|9954741|gb|AAG09092.1|AC009323_3 Putative protein
  misc_feature (20)..(465): Homolog of NCBI NO: 15217511 NR Description: putative ser/thr protein kinase; protein id: [Arabidopsis thaliana] >gi|25402546|pir||G86227 hypothetical
  misc_feature (5)..(471): Homolog of NCBI NO: 15238840 NR Description: Ser/Thr specific protein kinase - like protein;
  misc_feature (154)..(473): Homolog of NCBI NO: 22331140 NR Description: serine/threonine protein kinase, putative; id: At3g17420.1, supported by cDNA: gi_17529287, supported by gi_20465832 [Arabidopsis thaliana] >gi|11994680|dbj|BAB02918.1|

SEQ ID NO: 93160 - protein, 484 aa, Arabidopsis thaliana; identical to SEQ ID NO: 89404
  peptide (1)..(484): Ceres Seq. ID no. 12718509
  misc_feature (173)..(444): Pfam Name: Protein kinase domain Pfam Description: Protein kinase domain
  misc_feature (1)..(484): Homolog of NCBI NO: 15228043 NR Description: putative protein kinase; protein id: At2g42960.1
  misc_feature (1)..(484): Homolog of NCBI NO: 15231637 NR Description: receptor-like protein kinase; protein id:
  misc_feature (1)..(474): Homolog of NCBI NO: 37535714 NR Description: putative kinase [Oryza sativa (japonica
  misc_feature (1)..(474): Homolog of NCBI NO: 34894708 NR Description: Putative protein kinase [Oryza sativa (japonica group)] >gi|12328581|dbj|BAB21240.1| Putative protein kinase
  misc_feature (1)..(483): Homolog of NCBI NO: 18405946 NR Description: expressed protein; protein id: At1g56720.1,
  misc_feature (1)..(483): Homolog of NCBI NO: 21593085 NR Description: Putative protein kinase [Arabidopsis thaliana]
  misc_feature (1)..(483): Homolog of NCBI NO: 25404144 NR Description: probable protein kinase F25P12.84 [imported] - thaliana >gi|9954741|gb|AAG09092.1|AC009323_3 Putative protein
  misc_feature (10)..(455): Homolog of NCBI NO: 15217511 NR Description: putative ser/thr protein kinase; protein id: [Arabidopsis thaliana] >gi|25402546|pir||G86227 hypothetical
  misc_feature (1)..(461): Homolog of NCBI NO: 15238840 NR Description: Ser/Thr specific protein kinase - like protein;
  misc_feature (144)..(463): Homolog of NCBI NO: 22331140 NR Description: serine/threonine protein kinase, putative; id: At3g17420.1, supported by cDNA: gi_17529287, supported by gi_20465832 [Arabidopsis thaliana] >gi|11994680|dbj|BAB02918.1|

SEQ ID NO: 93161 - protein, 456 aa, Arabidopsis thaliana; identical to SEQ ID NO: 89405
  peptide (1)..(456): Ceres Seq. ID no. 12718510
  misc_feature (145)..(416): Pfam Name: Protein kinase domain Pfam Description: Protein kinase domain
  misc_feature (1)..(456): Homolog of NCBI NO: 15228043 NR Description: putative protein kinase; protein id: At2g42960.1
  misc_feature (1)..(456): Homolog of NCBI NO: 15231637 NR Description: receptor-like protein kinase; protein id:
  misc_feature (1)..(446): Homolog of NCBI NO: 37535714 NR Description: putative kinase [Oryza sativa (japonica
  misc_feature (1)..(446): Homolog of NCBI NO: 34894708 NR Description: Putative protein kinase [Oryza sativa (japonica group)] >gi|12328581|dbj|BAB21240.1| Putative protein kinase
  misc_feature (1)..(455): Homolog of NCBI NO: 18405946 NR Description: expressed protein; protein id: At1g56720.1,
  misc_feature (1)..(455): Homolog of NCBI NO: 21593085 NR Description: Putative protein kinase [Arabidopsis thaliana]
  misc_feature (1)..(455): Homolog of NCBI NO: 25404144 NR Description: probable protein kinase F25P12.84 [imported] - thaliana >gi|9954741|gb|AAG09092.1|AC009323_3 Putative protein
  misc_feature (1)..(427): Homolog of NCBI NO: 15217511 NR Description: putative ser/thr protein kinase; protein id: [Arabidopsis thaliana] >gi|25402546|pir||G86227 hypothetical
  misc_feature (1)..(433): Homolog of NCBI NO: 15238840 NR Description: Ser/Thr specific protein kinase - like protein;
  misc_feature (116)..(435): Homolog of NCBI NO: 22331140 NR Description: serine/threonine protein kinase, putative; id: At3g17420.1, supported by cDNA: gi_17529287, supported by gi_20465832 [Arabidopsis thaliana] >gi|11994680|dbj|BAB02918.1|

SEQ ID NO: 93162 - DNA, 1584 bp, Arabidopsis thaliana; identical to SEQ ID NO: 89406
  misc_feature (1)..(1584): Ceres Seq. ID no. 12718514
  misc_feature: MA Experiment ID: 20000315 Result: Down-regulated in Transcription
  misc_feature: MA Experiment 20000315 PARAMETER Experiment Name: At_14day_Shoots-Roots_Sub_P Parameter: Age (day) Value: 14
  misc_feature: MA Experiment 20000315 PARAMETER Experiment Name: At_14day_Shoots-Roots_Sub_P Parameter: Organism Value: A. thaliana
  misc_feature: MA Experiment 20000315 PARAMETER Experiment Name: At_14day_Shoots-Roots_Sub_P Parameter: Plant Line Value: WS
  misc_feature: MA Experiment 20000315 PARAMETER Experiment Name: At_14day_Shoots-Roots_Sub_P Parameter: Tissue Value: Shoots vs. Whole Plant
  misc_feature: MA Experiment ID: 20000355 Result: Down-regulated in Transcription
  misc_feature: MA Experiment 20000355 PARAMETER Experiment Name: At_Siliques_Sub_P Parameter: Age (day) Value: 21
  misc_feature: MA Experiment 20000355 PARAMETER Experiment Name: At_Siliques_Sub_P Parameter: Organism Value: A. thaliana
  misc_feature: MA Experiment 20000355 PARAMETER Experiment Name: At_Siliques_Sub_P Parameter: Plant Line Value: WS
  misc_feature: MA Experiment 20000355 PARAMETER Experiment Name: At_Siliques_Sub_P Parameter: Tissue Value: Less Than 5mm Siliques vs. Whole Plant
  misc_feature: MA Experiment ID: 20000440 Result: Down-regulated in Transcription
  misc_feature: MA Experiment 20000440 PARAMETER Experiment Name: At_Closed-Flower__Sub_P Parameter: Tissue Value: Closed Flower vs. Whole Plant
  misc_feature: MA Experiment ID: 20000634 Result: Up-regulated in Transcription
  misc_feature: MA Experiment 20000634 PARAMETER Experiment Name: At_10percent_PEG_Sub_P Parameter: Age (day) Value: 12
  misc_feature: MA Experiment 20000634 PARAMETER Experiment Name: At_10percent_PEG_Sub_P Parameter: Organism Value: A. thaliana
  misc_feature: MA Experiment 20000634 PARAMETER Experiment Name: At_10percent_PEG_Sub_P Parameter: Plant Line Value: WS
  misc_feature: MA Experiment 20000634 PARAMETER Experiment Name: At_10percent_PEG_Sub_P Parameter: Timepoint (day) Value: 12
  misc_feature: MA Experiment 20000634 PARAMETER Experiment Name: At_10percent_PEG_Sub_P Parameter: Tissue Value: Whole Plant
  misc_feature: MA Experiment 20000634 PARAMETER Experiment Name: At_10percent_PEG_Sub_P Parameter: Treatment Value: 10% PEG vs. No Treatment

SEQ ID NO: 93163 - protein, 527 aa, Arabidopsis thaliana; identical to SEQ ID NO: 89407
  peptide (1)..(527): Ceres Seq. ID no. 12718515
  misc_feature (107)..(522): Pfam Name: Eukaryotic aspartyl protease Pfam Description: Eukaryotic aspartyl protease
  misc_feature (1)..(527): Homolog of NCBI NO: 15228044 NR Description: putative chloroplast nucleoid DNA binding protein id: At2g42980.1 [Arabidopsis thaliana] putative chloroplast nucleoid DNA binding protein [Arabidopsis
  misc_feature (47)..(527): Homolog of NCBI NO: 25408826 NR Description: hypothetical protein At2g42980 [imported] -
  misc_feature (1)..(527): Homolog of NCBI NO: 15231625 NR Description: putative protein; protein id: At3g59080.1, by cDNA: gi_15983375, supported by cDNA: gi_20466703 [Arabidopsis
  misc_feature (151)..(525): Homolog of NCBI NO: 15230868 NR Description: hypothetical protein; protein id: At3g25700.1
  misc_feature (146)..(524): Homolog of NCBI NO: 15290061 NR Description: nucleoid DNA-binding protein cnd41-like protein
  misc_feature (76)..(524): Homolog of NCBI NO: 15228618 NR Description: putative protein; protein id: At3g61820.1, by cDNA: gi_14532549 [Arabidopsis thaliana]
  misc_feature (156)..(527): Homolog of NCBI NO: 30678047 NR Description: chloroplast nucleoid DNA binding protein -related
  misc_feature (162)..(527): Homolog of NCBI NO: 20197342 NR Description: putative chloroplast nucleoid DNA binding protein
  misc_feature (121)..(525): Homolog of NCBI NO: 11358588 NR Description: nucleoid DNA-binding protein cnd41-like protein -
  misc_feature (121)..(525): Homolog of NCBI NO: 22326716 NR Description: nucleoid DNA-binding protein cnd41 - like protein id: At5g10770.1, supported by cDNA: gi_18700102 thaliana] >gi|18700103|gb|AAL77663.1| AT5g10770/T30N20_40

SEQ ID NO: 93164 - protein, 488 aa, Arabidopsis thaliana; identical to SEQ ID NO: 89408
  peptide (1)..(488): Ceres Seq. ID no. 12718516
  misc_feature (68)..(483): Pfam Name: Eukaryotic aspartyl protease Pfam Description: Eukaryotic aspartyl protease
  misc_feature (1)..(488): Homolog of NCBI NO: 15228044 NR Description: putative chloroplast nucleoid DNA binding protein id: At2g42980.1 [Arabidopsis thaliana] putative chloroplast nucleoid DNA binding protein [Arabidopsis
  misc_feature (8)..(488): Homolog of NCBI NO: 25408826 NR Description: hypothetical protein At2g42980 [imported] -
  misc_feature (1)..(488): Homolog of NCBI NO: 15231625 NR Description: putative protein; protein id: At3g59080.1, by cDNA: gi_15983375, supported by cDNA: gi_20466703 [Arabidopsis
  misc_feature (112)..(486): Homolog of NCBI NO: 15230868 NR Description: hypothetical protein; protein id: At3g25700.1
  misc_feature (107)..(485): Homolog of NCBI NO: 15290061 NR Description: nucleoid DNA-binding protein cnd41-like protein
  misc_feature (37)..(485): Homolog of NCBI NO: 15228618 NR Description: putative protein; protein id: At3g61820.1, by cDNA: gi_14532549 [Arabidopsis thaliana]
  misc_feature (117)..(488): Homolog of NCBI NO: 30678047 NR Description: chloroplast nucleoid DNA binding protein -related
  misc_feature (123)..(488): Homolog of NCBI NO: 20197342 NR Description: putative chloroplast nucleoid DNA binding protein
  misc_feature (82)..(486): Homolog of NCBI NO: 11358588 NR Description: nucleoid DNA-binding protein cnd41-like protein -
  misc_feature (82)..(486): Homolog of NCBI NO: 22326716 NR Description: nucleoid DNA-binding protein cnd41 - like protein id: At5g10770.1, supported by cDNA: gi_18700102 thaliana] >gi|18700103|gb|AAL77663.1| AT5g10770/T30N20_40

SEQ ID NO: 93165 - protein, 481 aa, Arabidopsis thaliana; identical to SEQ ID NO: 89409
  peptide (1)..(481): Ceres Seq. ID no. 12718517
  misc_feature (61)..(476): Pfam Name: Eukaryotic aspartyl protease Pfam Description: Eukaryotic aspartyl protease
  misc_feature (1)..(481): Homolog of NCBI NO: 15228044 NR Description: putative chloroplast nucleoid DNA binding protein id: At2g42980.1 [Arabidopsis thaliana] putative chloroplast nucleoid DNA binding protein [Arabidopsis
  misc_feature (1)..(481): Homolog of NCBI NO: 25408826 NR Description: hypothetical protein At2g42980 [imported] -
  misc_feature (1)..(481): Homolog of NCBI NO: 15231625 NR Description: putative protein; protein id: At3g59080.1, by cDNA: gi_15983375, supported by cDNA: gi_20466703 [Arabidopsis
  misc_feature (105)..(479): Homolog of NCBI NO: 15230868 NR Description: hypothetical protein; protein id: At3g25700.1
  misc_feature (100)..(478): Homolog of NCBI NO: 15290061 NR Description: nucleoid DNA-binding protein cnd41-like protein
  misc_feature (30)..(478): Homolog of NCBI NO: 15228618 NR Description: putative protein; protein id: At3g61820.1, by cDNA: gi_14532549 [Arabidopsis thaliana]
  misc_feature (110)..(481): Homolog of NCBI NO: 30678047 NR Description: chloroplast nucleoid DNA binding protein -related
  misc_feature (116)..(481): Homolog of NCBI NO: 20197342 NR Description: putative chloroplast nucleoid DNA binding protein
  misc_feature (75)..(479): Homolog of NCBI NO: 11358588 NR Description: nucleoid DNA-binding protein cnd41-like protein -
  misc_feature (75)..(479): Homolog of NCBI NO: 22326716 NR Description: nucleoid DNA-binding protein cnd41 - like protein id: At5g10770.1, supported by cDNA: gi_18700102 thaliana] >gi|18700103|gb|AAL77663.1| AT5g10770/T30N20_40

SEQ ID NO: 93166 - DNA, 1014 bp, Arabidopsis thaliana; identical to SEQ ID NO: 89410
  misc_feature (1)..(1014): Ceres Seq. ID no. 12718529
  misc_feature: MA Experiment ID: 20001807 Result: Up-regulated in Transcription
  misc_feature: MA Experiment 20001807 PARAMETER Experiment Name: At_50mM_NH4NO3_L-to-H_Sub_P Parameter: Timepoint (hr) Value: 6
  misc_feature: MA Experiment 20001807 PARAMETER Experiment Name: At_50mM_NH4NO3_L-to-H_Sub_P Parameter: Tissue Value: Leaf
  misc_feature: MA Experiment 20001807 PARAMETER Experiment Name: At_50mM_NH4NO3_L-to-H_Sub_P Parameter: Treatment Value: 50mM NH4NO3 vs 100mM Mannitol

SEQ ID NO: 93167 - protein, 263 aa, Arabidopsis thaliana; identical to SEQ ID NO: 89411
  peptide (1)..(263): Ceres Seq. ID no. 12718530
  misc_feature (8)..(263): Homolog of NCBI NO: 15224222 NR Description: 3-isopropylmalate dehydratase, small subunit; id: At2g43100.1, supported by cDNA: gi_16974632, supported by
  misc_feature (13)..(261): Homolog of NCBI NO: 15231608 NR Description: 3-isopropylmalate dehydratase-like protein (small protein id: At3g58990.1, supported by cDNA: gi_17529161
  misc_feature (13)..(263): Homolog of NCBI NO: 15224221 NR Description: 3-isopropylmalate dehydratase, small subunit; id: At2g43090.1, supported by cDNA: 31507., supported by cDNA:
  misc_feature (59)..(261): Homolog of NCBI NO: 14140144 NR Description: putative protein [Oryza sativa]
  misc_feature (85)..(259): Homolog of NCBI NO: 23041579 NR Description: hypothetical protein [Trichodesmium erythraeum
  misc_feature (80)..(261): Homolog of NCBI NO: 21673448 NR Description: 3-isopropylmalate dehydratase, small subunit,
  misc_feature (85)..(254): Homolog of NCBI NO: 14521550 NR Description: 3-isopropylmalate dehydratase, small subunit
  misc_feature (85)..(254): Homolog of NCBI NO: 18977311 NR Description: putative 3-isopropylmalate dehydratase small
  misc_feature (89)..(239): Homolog of NCBI NO: 15896420 NR Description: 3-isopropylmalate dehydratase, small subunit
  misc_feature (85)..(252): Homolog of NCBI NO: 15643321 NR Description: 3-isopropylmalate dehydratase, small subunit

SEQ ID NO: 93168 - protein, 256 aa, Arabidopsis thaliana; identical to SEQ ID NO: 89412
  peptide (1)..(256): Ceres Seq. ID no. 12718531
  misc_feature (1)..(256): Homolog of NCBI NO: 15224222 NR Description: 3-isopropylmalate dehydratase, small subunit; id: At2g43100.1, supported by cDNA: gi_16974632, supported by
  misc_feature (6)..(254): Homolog of NCBI NO: 15231608 NR Description: 3-isopropylmalate dehydratase-like protein (small protein id: At3g58990.1, supported by cDNA: gi_17529161
  misc_feature (6)..(256): Homolog of NCBI NO: 15224221 NR Description: 3-isopropylmalate dehydratase, small subunit; id: At2g43090.1, supported by cDNA: 31507., supported by cDNA:
  misc_feature (52)..(254): Homolog of NCBI NO: 14140144 NR Description: putative protein [Oryza sativa]
  misc_feature (78)..(252): Homolog of NCBI NO: 23041579 NR Description: hypothetical protein [Trichodesmium erythraeum
  misc_feature (73)..(254): Homolog of NCBI NO: 21673448 NR Description: 3-isopropylmalate dehydratase, small subunit,
  misc_feature (78)..(247): Homolog of NCBI NO: 14521550 NR Description: 3-isopropylmalate dehydratase, small subunit
  misc_feature (78)..(247): Homolog of NCBI NO: 18977311 NR Description: putative 3-isopropylmalate dehydratase small
  misc_feature (82)..(232): Homolog of NCBI NO: 15896420 NR Description: 3-isopropylmalate dehydratase, small subunit
  misc_feature (78)..(245): Homolog of NCBI NO: 15643321 NR Description: 3-isopropylmalate dehydratase, small subunit

SEQ ID NO: 93169 - DNA, 639 bp, Arabidopsis thaliana; identical to SEQ ID NO: 89413
  misc_feature (1)..(639): Ceres Seq. ID no. 12718536
  misc_feature: MA Experiment ID: 20000184 Result: Up-regulated in Transcription
  misc_feature: MA Experiment 20000184 PARAMETER Experiment Name: At_Shoots__P Parameter: Age (day) Value: 7
  misc_feature: MA Experiment 20000184 PARAMETER Experiment Name: At_Shoots__P Parameter: Tissue Value: Shoots vs. Whole Plant
  misc_feature: MA Experiment ID: 20000185 Result: Up-regulated in Transcription
  misc_feature: MA Experiment 20000185 PARAMETER Experiment Name: At_Roots__P Parameter: Age (day) Value: 7 vs. 21
  misc_feature: MA Experiment 20000185 PARAMETER Experiment Name: At_Roots__P Parameter: Organism Value: A. thaliana
  misc_feature: MA Experiment 20000185 PARAMETER Experiment Name: At_Roots__P Parameter: Tissue Value: Roots vs. Whole Plant
  misc_feature: MA Experiment ID: 20000439 Result: Up-regulated in Transcription
  misc_feature: MA Experiment 20000439 PARAMETER Experiment Name: At_Roots__P Parameter: Age (day) Value: 14 vs. 21
  misc_feature: MA Experiment 20000439 PARAMETER Experiment Name: At_Roots__P Parameter: Organism Value: A. thaliana
  misc_feature: MA Experiment 20000439 PARAMETER Experiment Name: At_Roots__P Parameter: Tissue Value: Roots vs. Whole Plant

SEQ ID NO: 93170 - protein, 212 aa, Arabidopsis thaliana; identical to SEQ ID NO: 89414
  peptide (1)..(212): Ceres Seq. ID no. 12718537
  misc_feature (43)..(209): Pfam Name: Formin Homology 2 Domain Pfam Description: Formin Homology 2 Domain
  misc_feature (1)..(212): Homolog of NCBI NO: 15224236 NR Description: putative extensin; protein id: At2g43150.1
  misc_feature (1)..(209): Homolog of NCBI NO: 227927 NR Description: extensin
  misc_feature (10)..(209): Homolog of NCBI NO: 227927 NR Description: extensin
  misc_feature (30)..(206): Homolog of NCBI NO: 7211797 NR Description: CRANTZ hydroxyproline-rich glycoprotein [Manihot
  misc_feature (30)..(209): Homolog of NCBI NO: 7211797 NR Description: CRANTZ hydroxyproline-rich glycoprotein [Manihot
  misc_feature (19)..(209): Homolog of NCBI NO: 7211797 NR Description: CRANTZ hydroxyproline-rich glycoprotein [Manihot
  misc_feature (30)..(209): Homolog of NCBI NO: 227927 NR Description: extensin
  misc_feature (30)..(209): Homolog of NCBI NO: 227927 NR Description: extensin
  misc_feature (30)..(209): Homolog of NCBI NO: 227927 NR Description: extensin
  misc_feature (35)..(209): Homolog of NCBI NO: 227927 NR Description: extensin

SEQ ID NO: 93171 - protein, 196 aa, Arabidopsis thaliana; identical to SEQ ID NO: 89415
  peptide (1)..(196): Ceres Seq. ID no. 12718538
  misc_feature (27)..(193): Pfam Name: Formin Homology 2 Domain Pfam Description: Formin Homology 2 Domain
  misc_feature (1)..(196): Homolog of NCBI NO: 15224236 NR Description: putative extensin; protein id: At2g43150.1
  misc_feature (1)..(193): Homolog of NCBI NO: 227927 NR Description: extensin
  misc_feature (1)..(193): Homolog of NCBI NO: 227927 NR Description: extensin
  misc_feature (14)..(190): Homolog of NCBI NO: 7211797 NR Description: CRANTZ hydroxyproline-rich glycoprotein [Manihot
  misc_feature (14)..(193): Homolog of NCBI NO: 7211797 NR Description: CRANTZ hydroxyproline-rich glycoprotein [Manihot
  misc_feature (3)..(193): Homolog of NCBI NO: 7211797 NR Description: CRANTZ hydroxyproline-rich glycoprotein [Manihot
  misc_feature (14)..(193): Homolog of NCBI NO: 227927 NR Description: extensin
  misc_feature (14)..(193): Homolog of NCBI NO: 227927 NR Description: extensin
  misc_feature (14)..(193): Homolog of NCBI NO: 227927 NR Description: extensin
  misc_feature (19)..(193): Homolog of NCBI NO: 227927 NR Description: extensin

SEQ ID NO: 93172 - protein, 187 aa, Arabidopsis thaliana; identical to SEQ ID NO: 89416
  peptide (1)..(187): Ceres Seq. ID no. 12718539
  misc_feature (18)..(184): Pfam Name: Formin Homology 2 Domain Pfam Description: Formin Homology 2 Domain
  misc_feature (1)..(187): Homolog of NCBI NO: 15224236 NR Description: putative extensin; protein id: At2g43150.1
  misc_feature (1)..(184): Homolog of NCBI NO: 227927 NR Description: extensin
  misc_feature (1)..(184): Homolog of NCBI NO: 227927 NR Description: extensin
  misc_feature (5)..(181): Homolog of NCBI NO: 7211797 NR Description: CRANTZ hydroxyproline-rich glycoprotein [Manihot
  misc_feature (5)..(184): Homolog of NCBI NO: 7211797 NR Description: CRANTZ hydroxyproline-rich glycoprotein [Manihot
  misc_feature (1)..(184): Homolog of NCBI NO: 7211797 NR Description: CRANTZ hydroxyproline-rich glycoprotein [Manihot
  misc_feature (5)..(184): Homolog of NCBI NO: 227927 NR Description: extensin
  misc_feature (5)..(184): Homolog of NCBI NO: 227927 NR Description: extensin
  misc_feature (5)..(184): Homolog of NCBI NO: 227927 NR Description: extensin
  misc_feature (10)..(184): Homolog of NCBI NO: 227927 NR Description: extensin

SEQ ID NO: 93173 - DNA, 1479 bp, Arabidopsis thaliana; identical to SEQ ID NO: 89417
  misc_feature (1)..(1479): Ceres Seq. ID no. 12718544
  misc_feature: MA Experiment ID: 20000184 Result: Down-regulated in Transcription
  misc_feature: MA Experiment 20000184 PARAMETER Experiment Name: At_Shoots__P Parameter: Age (day) Value: 7
  misc_feature: MA Experiment 20000184 PARAMETER Experiment Name: At_Shoots__P Parameter: Tissue Value: Shoots vs. Whole Plant
  misc_feature: MA Experiment ID: 20000495 Result: Down-regulated in Transcription
  misc_feature: MA Experiment 20000495 PARAMETER Experiment Name: At_Guard_Cells_P Parameter: Harvest Date Value: 8/2/2002
  misc_feature: MA Experiment 20000495 PARAMETER Experiment Name: At_Guard_Cells_P Parameter: Organism Value: A. thaliana
  misc_feature: MA Experiment 20000495 PARAMETER Experiment Name: At_Guard_Cells_P Parameter: Tissue Value: Guard Cells vs. Leaves
  misc_feature: MA Experiment ID: 20000794 Result: Up-regulated in Transcription
  misc_feature: MA Experiment 20000794 PARAMETER Experiment Name: At_Petals_P Parameter: Age (day) Value: 23-25 days
  misc_feature: MA Experiment 20000794 PARAMETER Experiment Name: At_Petals_P Parameter: Plant Line Value: WS
  misc_feature: MA Experiment 20000794 PARAMETER Experiment Name: At_Petals_P Parameter: Tissue Value: Petals vs. Whole plant

SEQ ID NO: 93174 - protein, 492 aa, Arabidopsis thaliana; identical to SEQ ID NO: 89418
  peptide (1)..(492): Ceres Seq. ID no. 12718545
  misc_feature (55)..(304): Pfam Name: Isocitrate lyase family Pfam Description: Isocitrate lyase family
  misc_feature (1)..(492): Homolog of NCBI NO: 25408843 NR Description: probable carboxyphosphonoenolpyruvate mutase - Arabidopsis thaliana >gi|3763927|gb|AAC64307.1| putative
  misc_feature (1)..(395): Homolog of NCBI NO: 30689278 NR Description: carboxyphosphonoenolpyruvate mutase -related thaliana] >gi|26450281|dbj|BAC42257.1| putative mutase [Arabidopsis thaliana] >gi|28827730|gb|AAO50709.1|
  misc_feature (1)..(395): Homolog of NCBI NO: 30689282 NR Description: carboxyphosphonoenolpyruvate mutase -related
  misc_feature (43)..(376): Homolog of NCBI NO: 32490267 NR Description: OSJNBb0116K07.9 [Oryza sativa (japonica
  misc_feature (397)..(450): Homolog of NCBI NO: 32490267 NR Description: OSJNBb0116K07.9 [Oryza sativa (japonica
  misc_feature (53)..(351): Homolog of NCBI NO: 38347227 NR Description: OSJNBa0044M19.9 [Oryza sativa (japonica
  misc_feature (211)..(488): Homolog of NCBI NO: 30689282 NR Description: carboxyphosphonoenolpyruvate mutase -related
  misc_feature (57)..(342): Homolog of NCBI NO: 40747280 NR Description: hypothetical protein AN9369.2 [Aspergillus
  misc_feature (71)..(350): Homolog of NCBI NO: 23043034 NR Description: hypothetical protein [Trichodesmium erythraeum
  misc_feature (40)..(348): Homolog of NCBI NO: 40739091 NR Description: hypothetical protein AN6882.2 [Aspergillus

SEQ ID NO: 93175 - protein, 413 aa, Arabidopsis thaliana; identical to SEQ ID NO: 89419
  peptide (1)..(413): Ceres Seq. ID no. 12718546
  misc_feature (1)..(225): Pfam Name: Isocitrate lyase family Pfam Description: Isocitrate lyase family
  misc_feature (1)..(413): Homolog of NCBI NO: 25408843 NR Description: probable carboxyphosphonoenolpyruvate mutase - Arabidopsis thaliana >gi|3763927|gb|AAC64307.1| putative
  misc_feature (1)..(316): Homolog of NCBI NO: 30689278 NR Description: carboxyphosphonoenolpyruvate mutase -related thaliana] >gi|26450281|dbj|BAC42257.1| putative mutase [Arabidopsis thaliana] >gi|28827730|gb|AAO50709.1|
  misc_feature (1)..(316): Homolog of NCBI NO: 30689282 NR Description: carboxyphosphonoenolpyruvate mutase -related
  misc_feature (1)..(297): Homolog of NCBI NO: 32490267 NR Description: OSJNBb0116K07.9 [Oryza sativa (japonica
  misc_feature (318)..(371): Homolog of NCBI NO: 32490267 NR Description: OSJNBb0116K07.9 [Oryza sativa (japonica
  misc_feature (1)..(272): Homolog of NCBI NO: 38347227 NR Description: OSJNBa0044M19.9 [Oryza sativa (japonica
  misc_feature (132)..(409): Homolog of NCBI NO: 30689282 NR Description: carboxyphosphonoenolpyruvate mutase -related
  misc_feature (1)..(263): Homolog of NCBI NO: 40747280 NR Description: hypothetical protein AN9369.2 [Aspergillus
  misc_feature (1)..(271): Homolog of NCBI NO: 23043034 NR Description: hypothetical protein [Trichodesmium erythraeum
  misc_feature (1)..(269): Homolog of NCBI NO: 40739091 NR Description: hypothetical protein AN6882.2 [Aspergillus

SEQ ID NO: 93176 - protein, 365 aa, Arabidopsis thaliana; identical to SEQ ID NO: 89420
  peptide (1)..(365): Ceres Seq. ID no. 12718547
  misc_feature (1)..(177): Pfam Name: Isocitrate lyase family Pfam Description: Isocitrate lyase family
  misc_feature (1)..(365): Homolog of NCBI NO: 25408843 NR Description: probable carboxyphosphonoenolpyruvate mutase - Arabidopsis thaliana >gi|3763927|gb|AAC64307.1| putative
  misc_feature (1)..(268): Homolog of NCBI NO: 30689278 NR Description: carboxyphosphonoenolpyruvate mutase -related thaliana] >gi|26450281|dbj|BAC42257.1| putative mutase [Arabidopsis thaliana] >gi|28827730|gb|AAO50709.1|
  misc_feature (1)..(268): Homolog of NCBI NO: 30689282 NR Description: carboxyphosphonoenolpyruvate mutase -related
  misc_feature (1)..(249): Homolog of NCBI NO: 32490267 NR Description: OSJNBb0116K07.9 [Oryza sativa (japonica
  misc_feature (270)..(323): Homolog of NCBI NO: 32490267 NR Description: OSJNBb0116K07.9 [Oryza sativa (japonica
  misc_feature (1)..(224): Homolog of NCBI NO: 38347227 NR Description: OSJNBa0044M19.9 [Oryza sativa (japonica
  misc_feature (84)..(361): Homolog of NCBI NO: 30689282 NR Description: carboxyphosphonoenolpyruvate mutase -related
  misc_feature (1)..(215): Homolog of NCBI NO: 40747280 NR Description: hypothetical protein AN9369.2 [Aspergillus
  misc_feature (1)..(223): Homolog of NCBI NO: 23043034 NR Description: hypothetical protein [Trichodesmium erythraeum
  misc_feature (1)..(221): Homolog of NCBI NO: 40739091 NR Description: hypothetical protein AN6882.2 [Aspergillus

SEQ ID NO: 93177 - DNA, 1836 bp, Arabidopsis thaliana; identical to SEQ ID NO: 89421
  misc_feature (1)..(1836): Ceres Seq. ID no. 12718548
  misc_feature: MA Experiment ID: 20000169 Result: Down-regulated in Transcription
  misc_feature: MA Experiment 20000169 PARAMETER Experiment Name: At_100uM_ABA_P Parameter: Age (day) Value: 14
  misc_feature: MA Experiment 20000169 PARAMETER Experiment Name: At_100uM_ABA_P Parameter: Organism Value: A. thaliana
  misc_feature: MA Experiment 20000169 PARAMETER Experiment Name: At_100uM_ABA_P Parameter: Plant Line Value: WS
  misc_feature: MA Experiment 20000169 PARAMETER Experiment Name: At_100uM_ABA_P Parameter: Timepoint (hr) Value: 6
  misc_feature: MA Experiment 20000169 PARAMETER Experiment Name: At_100uM_ABA_P Parameter: Tissue Value: Aerial
  misc_feature: MA Experiment 20000169 PARAMETER Experiment Name: At_100uM_ABA_P Parameter: Treatment Value: 100uM ABA vs. No Treatment
  misc_feature: MA Experiment ID: 20000439 Result: Up-regulated in Transcription
  misc_feature: MA Experiment 20000439 PARAMETER Experiment Name: At_Roots__P Parameter: Age (day) Value: 14 vs. 21
  misc_feature: MA Experiment 20000439 PARAMETER Experiment Name: At_Roots__P Parameter: Organism Value: A. thaliana
  misc_feature: MA Experiment 20000439 PARAMETER Experiment Name: At_Roots__P Parameter: Tissue Value: Roots vs. Whole Plant

SEQ ID NO: 93178 - protein, 611 aa, Arabidopsis thaliana; identical to SEQ ID NO: 89422
  peptide (1)..(611): Ceres Seq. ID no. 12718549
  misc_feature (100)..(608): Pfam Name: Putative methyltransferase Pfam Description: Putative methyltransferase
  misc_feature (91)..(605): Homolog of NCBI NO: 37535962 NR Description: unknown protein [Oryza sativa (japonica
  misc_feature (82)..(605): Homolog of NCBI NO: 24413975 NR Description: hypothetical protein~similar to Oryza sativa
  misc_feature (79)..(588): Homolog of NCBI NO: 15225560 NR Description: hypothetical protein; protein id: At2g45750.1
  misc_feature (80)..(606): Homolog of NCBI NO: 15236921 NR Description: hypothetical protein; protein id: At4g00750.1
  misc_feature (90)..(609): Homolog of NCBI NO: 18398763 NR Description: unknown protein; protein id: At1g33170.1
  misc_feature (289)..(609): Homolog of NCBI NO: 9665165 NR Description: Unknown Protein [Arabidopsis thaliana]
  misc_feature (90)..(290): Homolog of NCBI NO: 9665165 NR Description: Unknown Protein [Arabidopsis thaliana]
  misc_feature (2)..(605): Homolog of NCBI NO: 15235080 NR Description: putative protein; protein id: At4g10440.1
  misc_feature (82)..(606): Homolog of NCBI NO: 18396075 NR Description: expressed protein; protein id: At1g26850.1, by cDNA: gi_14335101 [Arabidopsis thaliana] At1g26850/T2P11_4 [Arabidopsis thaliana]
  misc_feature (84)..(606): Homolog of NCBI NO: 6752888 NR Description: unknown [Malus x domestica]

SEQ ID NO: 93179 - protein, 373 aa, Arabidopsis thaliana; identical to SEQ ID NO: 89423
  peptide (1)..(373): Ceres Seq. ID no. 12718550
  misc_feature (1)..(370): Pfam Name: Putative methyltransferase Pfam Description: Putative methyltransferase
  misc_feature (1)..(367): Homolog of NCBI NO: 37535962 NR Description: unknown protein [Oryza sativa (japonica
  misc_feature (1)..(367): Homolog of NCBI NO: 24413975 NR Description: hypothetical protein~similar to Oryza sativa
  misc_feature (1)..(350): Homolog of NCBI NO: 15225560 NR Description: hypothetical protein; protein id: At2g45750.1
  misc_feature (1)..(368): Homolog of NCBI NO: 15236921 NR Description: hypothetical protein; protein id: At4g00750.1
  misc_feature (1)..(371): Homolog of NCBI NO: 18398763 NR Description: unknown protein; protein id: At1g33170.1
  misc_feature (51)..(371): Homolog of NCBI NO: 9665165 NR Description: Unknown Protein [Arabidopsis thaliana]
  misc_feature (1)..(52): Homolog of NCBI NO: 9665165 NR Description: Unknown Protein [Arabidopsis thaliana]
  misc_feature (1)..(367): Homolog of NCBI NO: 15235080 NR Description: putative protein; protein id: At4g10440.1
  misc_feature (1)..(368): Homolog of NCBI NO: 18396075 NR Description: expressed protein; protein id: At1g26850.1, by cDNA: gi_14335101 [Arabidopsis thaliana] At1g26850/T2P11_4 [Arabidopsis thaliana]
  misc_feature (1)..(368): Homolog of NCBI NO: 6752888 NR Description: unknown [Malus x domestica]

SEQ ID NO: 93180 - protein, 350 aa, Arabidopsis thaliana; identical to SEQ ID NO: 89424
  peptide (1)..(350): Ceres Seq. ID no. 12718551
  misc_feature (1)..(347): Pfam Name: Putative methyltransferase Pfam Description: Putative methyltransferase
  misc_feature (1)..(344): Homolog of NCBI NO: 37535962 NR Description: unknown protein [Oryza sativa (japonica
  misc_feature (1)..(344): Homolog of NCBI NO: 24413975 NR Description: hypothetical protein~similar to Oryza sativa
  misc_feature (1)..(327): Homolog of NCBI NO: 15225560 NR Description: hypothetical protein; protein id: At2g45750.1
  misc_feature (1)..(345): Homolog of NCBI NO: 15236921 NR Description: hypothetical protein; protein id: At4g00750.1
  misc_feature (1)..(348): Homolog of NCBI NO: 18398763 NR Description: unknown protein; protein id: At1g33170.1
  misc_feature (28)..(348): Homolog of NCBI NO: 9665165 NR Description: Unknown Protein [Arabidopsis thaliana]
  misc_feature (1)..(29): Homolog of NCBI NO: 9665165 NR Description: Unknown Protein [Arabidopsis thaliana]
  misc_feature (1)..(344): Homolog of NCBI NO: 15235080 NR Description: putative protein; protein id: At4g10440.1
  misc_feature (1)..(345): Homolog of NCBI NO: 18396075 NR Description: expressed protein; protein id: At1g26850.1, by cDNA: gi_14335101 [Arabidopsis thaliana] At1g26850/T2P11_4 [Arabidopsis thaliana]
  misc_feature (1)..(345): Homolog of NCBI NO: 6752888 NR Description: unknown [Malus x domestica]

SEQ ID NO: 93181 - DNA, 1669 bp, Arabidopsis thaliana; identical to SEQ ID NO: 89425
  misc_feature (1)..(1669): Ceres Seq. ID no. 12718560
  misc_feature: MA Experiment ID: 20000184 Result: Down-regulated in Transcription
  misc_feature: MA Experiment 20000184 PARAMETER Experiment Name: At_Shoots__P Parameter: Age (day) Value: 7
  misc_feature: MA Experiment 20000184 PARAMETER Experiment Name: At_Shoots__P Parameter: Tissue Value: Shoots vs. Whole Plant
  misc_feature: MA Experiment ID: 20000234 Result: Up-regulated in Transcription
  misc_feature: MA Experiment 20000234 PARAMETER Experiment Name: At_Siliques_P Parameter: Age (day) Value: 21
  misc_feature: MA Experiment 20000234 PARAMETER Experiment Name: At_Siliques_P Parameter: Organism Value: A. thaliana
  misc_feature: MA Experiment 20000234 PARAMETER Experiment Name: At_Siliques_P Parameter: Plant Line Value: WS
  misc_feature: MA Experiment 20000234 PARAMETER Experiment Name: At_Siliques_P Parameter: Tissue Value: Less Than 5mm Siliques vs. Whole Plant
  misc_feature: MA Experiment ID: 20000264 Result: Up-regulated in Transcription
  misc_feature: MA Experiment 20000264 PARAMETER Experiment Name: At_Open_Flower_P Parameter: Age (day) Value: 21
  misc_feature: MA Experiment 20000264 PARAMETER Experiment Name: At_Open_Flower_P Parameter: Plant Line Value: WS
  misc_feature: MA Experiment 20000264 PARAMETER Experiment Name: At_Open_Flower_P Parameter: Tissue Value: Open Flower vs. Whole Plant
  misc_feature: MA Experiment ID: 20000265 Result: Up-regulated in Transcription
  misc_feature: MA Experiment 20000265 PARAMETER Experiment Name: At_Open_Flower_P Parameter: Age (day) Value: 21
  misc_feature: MA Experiment 20000265 PARAMETER Experiment Name: At_Open_Flower_P Parameter: Plant Line Value: WS
  misc_feature: MA Experiment 20000265 PARAMETER Experiment Name: At_Open_Flower_P Parameter: Tissue Value: Closed Flower vs. Whole Plant
  misc_feature: MA Experiment ID: 20000286 Result: Up-regulated in Transcription
  misc_feature: MA Experiment 20000286 PARAMETER Experiment Name: At_Open_Flower_P Parameter: Age (day) Value: 21
  misc_feature: MA Experiment 20000286 PARAMETER Experiment Name: At_Open_Flower_P Parameter: Plant Line Value: WS
  misc_feature: MA Experiment 20000286 PARAMETER Experiment Name: At_Open_Flower_P Parameter: Tissue Value: Half Open vs. Whole Plant
  misc_feature: MA Experiment ID: 20000438 Result: Down-regulated in Transcription
  misc_feature: MA Experiment 20000438 PARAMETER Experiment Name: At_Shoots__P Parameter: Age (day) Value: 14
  misc_feature: MA Experiment 20000438 PARAMETER Experiment Name: At_Shoots__P Parameter: Tissue Value: Shoots vs. Whole Plant
  misc_feature: MA Experiment ID: 20000794 Result: Up-regulated in Transcription
  misc_feature: MA Experiment 20000794 PARAMETER Experiment Name: At_Petals_P Parameter: Age (day) Value: 23-25 days
  misc_feature: MA Experiment 20000794 PARAMETER Experiment Name: At_Petals_P Parameter: Plant Line Value: WS
  misc_feature: MA Experiment 20000794 PARAMETER Experiment Name: At_Petals_P Parameter: Tissue Value: Petals vs. Whole plant
  misc_feature: MA Experiment ID: 20001757 Result: Down-regulated in Transcription
  misc_feature: MA Experiment 20001757 PARAMETER Experiment Name: At_50mM_NH4NO3_L-to-H_P Parameter: Timepoint (hr) Value: 6
  misc_feature: MA Experiment 20001757 PARAMETER Experiment Name: At_50mM_NH4NO3_L-to-H_P Parameter: Tissue Value: Leaf
  misc_feature: MA Experiment 20001757 PARAMETER Experiment Name: At_50mM_NH4NO3_L-to-H_P Parameter: Treatment Value: 50mM NH4NO3 vs 100mM Mannitol
  misc_feature: MA Experiment ID: 20001910 Result: Up-regulated in Transcription
  misc_feature: MA Experiment 20001910 PARAMETER Experiment Name: At_Drought_Reproduction_P Parameter: Age (day) Value: 37
  misc_feature: MA Experiment 20001910 PARAMETER Experiment Name: At_Drought_Reproduction_P Parameter: Organism Value: A. thaliana
  misc_feature: MA Experiment 20001910 PARAMETER Experiment Name: At_Drought_Reproduction_P Parameter: Plant Line Value: WS
  misc_feature: MA Experiment 20001910 PARAMETER Experiment Name: At_Drought_Reproduction_P Parameter: Timepoint (day) Value: 7
  misc_feature: MA Experiment 20001910 PARAMETER Experiment Name: At_Drought_Reproduction_P Parameter: Tissue Value: Flowers
  misc_feature: MA Experiment 20001910 PARAMETER Experiment Name: At_Drought_Reproduction_P Parameter: Treatment Value: Drought vs. No Drought

SEQ ID NO: 93182 - protein, 406 aa, Arabidopsis thaliana; identical to SEQ ID NO: 89426
  peptide (1)..(406): Ceres Seq. ID no. 12718561
  misc_feature (1)..(406): Homolog of NCBI NO: 18406188 NR Description: putative protein kinase; protein id: At2g43230.1, by cDNA: gi_15450905 [Arabidopsis thaliana] putative protein kinase [Arabidopsis thaliana]
  misc_feature (40)..(406): Homolog of NCBI NO: 25287594 NR Description: probable protein kinase [imported] - Arabidopsis
  misc_feature (1)..(405): Homolog of NCBI NO: 30694970 NR Description: serine/threonine protein kinase, putative
  misc_feature (12)..(405): Homolog of NCBI NO: 11259776 NR Description: protein kinase-like protein - Arabidopsis thaliana
  misc_feature (40)..(405): Homolog of NCBI NO: 30694972 NR Description: serine/threonine protein kinase, putative

SEQ ID NO: 93183 - protein, 367 aa, Arabidopsis thaliana; identical to SEQ ID NO: 89427
  peptide (1)..(367): Ceres Seq. ID no. 12718562
  misc_feature (1)..(367): Homolog of NCBI NO: 18406188 NR Description: putative protein kinase; protein id: At2g43230.1, by cDNA: gi_15450905 [Arabidopsis thaliana] putative protein kinase [Arabidopsis thaliana]
  misc_feature (1)..(367): Homolog of NCBI NO: 25287594 NR Description: probable protein kinase [imported] - Arabidopsis
  misc_feature (1)..(366): Homolog of NCBI NO: 30694970 NR Description: serine/threonine protein kinase, putative
  misc_feature (1)..(366): Homolog of NCBI NO: 11259776 NR Description: protein kinase-like protein - Arabidopsis thaliana
  misc_feature (1)..(366): Homolog of NCBI NO: 30694972 NR Description: serine/threonine protein kinase, putative

SEQ ID NO: 93184 - protein, 308 aa, Arabidopsis thaliana; identical to SEQ ID NO: 89428
  peptide (1)..(308): Ceres Seq. ID no. 12718563
  misc_feature (1)..(308): Homolog of NCBI NO: 18406188 NR Description: putative protein kinase; protein id: At2g43230.1, by cDNA: gi_15450905 [Arabidopsis thaliana] putative protein kinase [Arabidopsis thaliana]
  misc_feature (1)..(308): Homolog of NCBI NO: 25287594 NR Description: probable protein kinase [imported] - Arabidopsis
  misc_feature (1)..(307): Homolog of NCBI NO: 30694970 NR Description: serine/threonine protein kinase, putative
  misc_feature (1)..(307): Homolog of NCBI NO: 11259776 NR Description: protein kinase-like protein - Arabidopsis thaliana
  misc_feature (1)..(307): Homolog of NCBI NO: 30694972 NR Description: serine/threonine protein kinase, putative

SEQ ID NO: 93185 - DNA, 795 bp, Arabidopsis thaliana; identical to SEQ ID NO: 89429
  misc_feature (1)..(795): Ceres Seq. ID no. 12718586
  misc_feature: MA Experiment ID: 20000307 Result: Down-regulated in Transcription
  misc_feature: MA Experiment 20000307 PARAMETER Experiment Name: At_Germinating_Seeds_Sub_P Parameter: Age (hr) Value: 24 vs. 0
  misc_feature: MA Experiment 20000307 PARAMETER Experiment Name: At_Germinating_Seeds_Sub_P Parameter: Organism Value: A. thaliana
  misc_feature: MA Experiment 20000307 PARAMETER Experiment Name: At_Germinating_Seeds_Sub_P Parameter: Plant Line Value: WS
  misc_feature: MA Experiment 20000307 PARAMETER Experiment Name: At_Germinating_Seeds_Sub_P Parameter: Tissue Value: Germinating Seeds
  misc_feature: MA Experiment ID: 20000314 Result: Up-regulated in Transcription
  misc_feature: MA Experiment 20000314 PARAMETER Experiment Name: At_14day_Shoots-Roots_Sub_P Parameter: Age (day) Value: 14
  misc_feature: MA Experiment 20000314 PARAMETER Experiment Name: At_14day_Shoots-Roots_Sub_P Parameter: Organism Value: A. thaliana
  misc_feature: MA Experiment 20000314 PARAMETER Experiment Name: At_14day_Shoots-Roots_Sub_P Parameter: Plant Line Value: WS
  misc_feature: MA Experiment 20000314 PARAMETER Experiment Name: At_14day_Shoots-Roots_Sub_P Parameter: Tissue Value: Roots vs. Whole Plant
  misc_feature: MA Experiment ID: 20000315 Result: Up-regulated in Transcription
  misc_feature: MA Experiment 20000315 PARAMETER Experiment Name: At_14day_Shoots-Roots_Sub_P Parameter: Age (day) Value: 14
  misc_feature: MA Experiment 20000315 PARAMETER Experiment Name: At_14day_Shoots-Roots_Sub_P Parameter: Organism Value: A. thaliana
  misc_feature: MA Experiment 20000315 PARAMETER Experiment Name: At_14day_Shoots-Roots_Sub_P Parameter: Plant Line Value: WS
  misc_feature: MA Experiment 20000315 PARAMETER Experiment Name: At_14day_Shoots-Roots_Sub_P Parameter: Tissue Value: Shoots vs. Whole Plant
  misc_feature: MA Experiment ID: 20000328 Result: Down-regulated in Transcription
  misc_feature: MA Experiment 20000328 PARAMETER Experiment Name: At_42deg_Heat_Sub_P Parameter: Age (day) Value: 14
  misc_feature: MA Experiment 20000328 PARAMETER Experiment Name: At_42deg_Heat_Sub_P Parameter: Organism Value: A. thaliana
  misc_feature: MA Experiment 20000328 PARAMETER Experiment Name: At_42deg_Heat_Sub_P Parameter: Plant Line Value: WS
  misc_feature: MA Experiment 20000328 PARAMETER Experiment Name: At_42deg_Heat_Sub_P Parameter: Temperature (deg C) Value: 42 vs. 22
  misc_feature: MA Experiment 20000328 PARAMETER Experiment Name: At_42deg_Heat_Sub_P Parameter: Timepoint (hr) Value: 6
  misc_feature: MA Experiment 20000328 PARAMETER Experiment Name: At_42deg_Heat_Sub_P Parameter: Tissue Value: Aerial

SEQ ID NO: 93186 - protein, 264 aa, Arabidopsis thaliana; identical to SEQ ID NO: 89430
  peptide (1)..(264): Ceres Seq. ID no. 12718587
  misc_feature (71)..(264): Pfam Name: Chitinase class I Pfam Description: Chitinase class I
  misc_feature (1)..(264): Homolog of NCBI NO: 15224312 NR Description: glycosyl hydrolase family 19 (chitinase); protein At2g43590.1 [Arabidopsis thaliana] >gi|25289343|pir||A84868
  misc_feature (1)..(264): Homolog of NCBI NO: 584929 NR Description: Basic endochitinase CHB4 precursor
  misc_feature (1)..(264): Homolog of NCBI NO: 15224310 NR Description: glycosyl hydrolase family 19 (chitinase); protein At2g43580.1 [Arabidopsis thaliana] >gi|25289342|pir||H84867
  misc_feature (22)..(264): Homolog of NCBI NO: 33414046 NR Description: class IV chitinase [Galega orientalis]
  misc_feature (9)..(264): Homolog of NCBI NO: 33329392 NR Description: class IV chitinase [Vitis vinifera]
  misc_feature (9)..(264): Homolog of NCBI NO: 2306813 NR Description: class IV endochitinase [Vitis vinifera]
  misc_feature (6)..(264): Homolog of NCBI NO: 15232509 NR Description: glycosyl hydrolase family 19 (class IV protein id: At3g54420.1 [Arabidopsis thaliana]
  misc_feature (9)..(264): Homolog of NCBI NO: 2306811 NR Description: class IV endochitinase [Vitis vinifera]
  misc_feature (8)..(264): Homolog of NCBI NO: 15213852 NR Description: chitinase-B [Sorghum halepense]
  misc_feature (6)..(264): Homolog of NCBI NO: 2597826 NR Description: class IV chitinase [Arabidopsis thaliana]

SEQ ID NO: 93187 - protein, 144 aa, Arabidopsis thaliana; identical to SEQ ID NO: 89431
  peptide (1)..(144): Ceres Seq. ID no. 12718588
  misc_feature (1)..(144): Pfam Name: Chitinase class I Pfam Description: Chitinase class I
  misc_feature (1)..(144): Homolog of NCBI NO: 15224312 NR Description: glycosyl hydrolase family 19 (chitinase); protein At2g43590.1 [Arabidopsis thaliana] >gi|25289343|pir||A84868
  misc_feature (1)..(144): Homolog of NCBI NO: 584929 NR Description: Basic endochitinase CHB4 precursor
  misc_feature (1)..(144): Homolog of NCBI NO: 15224310 NR Description: glycosyl hydrolase family 19 (chitinase); protein At2g43580.1 [Arabidopsis thaliana] >gi|25289342|pir||H84867
  misc_feature (1)..(144): Homolog of NCBI NO: 33414046 NR Description: class IV chitinase [Galega orientalis]
  misc_feature (1)..(144): Homolog of NCBI NO: 33329392 NR Description: class IV chitinase [Vitis vinifera]
  misc_feature (1)..(144): Homolog of NCBI NO: 2306813 NR Description: class IV endochitinase [Vitis vinifera]
  misc_feature (1)..(144): Homolog of NCBI NO: 15232509 NR Description: glycosyl hydrolase family 19 (class IV protein id: At3g54420.1 [Arabidopsis thaliana]
  misc_feature (1)..(144): Homolog of NCBI NO: 2306811 NR Description: class IV endochitinase [Vitis vinifera]
  misc_feature (1)..(144): Homolog of NCBI NO: 15213852 NR Description: chitinase-B [Sorghum halepense]
  misc_feature (1)..(144): Homolog of NCBI NO: 2597826 NR Description: class IV chitinase [Arabidopsis thaliana]

SEQ ID NO: 93188 - DNA, 822 bp, Arabidopsis thaliana; identical to SEQ ID NO: 89432
  misc_feature (1)..(822): Ceres Seq. ID no. 12718589
  misc_feature: MA Experiment ID: 20000307 Result: Up-regulated in Transcription
  misc_feature: MA Experiment 20000307 PARAMETER Experiment Name: At_Germinating_Seeds_Sub_P Parameter: Age (hr) Value: 24 vs. 0
  misc_feature: MA Experiment 20000307 PARAMETER Experiment Name: At_Germinating_Seeds_Sub_P Parameter: Organism Value: A. thaliana
  misc_feature: MA Experiment 20000307 PARAMETER Experiment Name: At_Germinating_Seeds_Sub_P Parameter: Plant Line Value: WS
  misc_feature: MA Experiment 20000307 PARAMETER Experiment Name: At_Germinating_Seeds_Sub_P Parameter: Tissue Value: Germinating Seeds

SEQ ID NO: 93189 - protein, 273 aa, Arabidopsis thaliana; identical to SEQ ID NO: 89433
  peptide (1)..(273): Ceres Seq. ID no. 12718590
  misc_feature (83)..(273): Pfam Name: Chitinase class I Pfam Description: Chitinase class I
  misc_feature (1)..(273): Homolog of NCBI NO: 15224314 NR Description: glycosyl hydrolase family 19 (chitinase); protein At2g43600.1 [Arabidopsis thaliana] >gi|25289344|pir||B84868
  misc_feature (4)..(273): Homolog of NCBI NO: 15223591 NR Description: glycosyl hydrolase family 19 (chitinase); protein At1g56680.1 [Arabidopsis thaliana] >gi|25289340|pir||F96608
  misc_feature (4)..(273): Homolog of NCBI NO: 15224319 NR Description: glycosyl hydrolase family 19 (chitinase); protein At2g43610.1, supported by cDNA: gi_18252844 [Arabidopsis
  misc_feature (3)..(273): Homolog of NCBI NO: 15224321 NR Description: glycosyl hydrolase family 19 (chitinase); protein At2g43620.1 [Arabidopsis thaliana] >gi|25289346|pir||D84868
  misc_feature (1)..(273): Homolog of NCBI NO: 584929 NR Description: Basic endochitinase CHB4 precursor
  misc_feature (5)..(273): Homolog of NCBI NO: 15224312 NR Description: glycosyl hydrolase family 19 (chitinase); protein At2g43590.1 [Arabidopsis thaliana] >gi|25289343|pir||A84868
  misc_feature (6)..(273): Homolog of NCBI NO: 15224310 NR Description: glycosyl hydrolase family 19 (chitinase); protein At2g43580.1 [Arabidopsis thaliana] >gi|25289342|pir||H84867
  misc_feature (2)..(273): Homolog of NCBI NO: 38345417 NR Description: OSJNBb0091E11.8 [Oryza sativa (japonica
  misc_feature (2)..(273): Homolog of NCBI NO: 2570160 NR Description: chitinase [Chenopodium amaranticolor]
  misc_feature (7)..(273): Homolog of NCBI NO: 2570162 NR Description: chitinase [Chenopodium amaranticolor]

SEQ ID NO: 93190 - protein, 248 aa, Arabidopsis thaliana; identical to SEQ ID NO: 89434
  peptide (1)..(248): Ceres Seq. ID no. 12718591
  misc_feature (58)..(248): Pfam Name: Chitinase class I Pfam Description: Chitinase class I
  misc_feature (1)..(248): Homolog of NCBI NO: 15224314 NR Description: glycosyl hydrolase family 19 (chitinase); protein At2g43600.1 [Arabidopsis thaliana] >gi|25289344|pir||B84868
  misc_feature (1)..(248): Homolog of NCBI NO: 15223591 NR Description: glycosyl hydrolase family 19 (chitinase); protein At1g56680.1 [Arabidopsis thaliana] >gi|25289340|pir||F96608
  misc_feature (1)..(248): Homolog of NCBI NO: 15224319 NR Description: glycosyl hydrolase family 19 (chitinase); protein At2g43610.1, supported by cDNA: gi_18252844 [Arabidopsis
  misc_feature (1)..(248): Homolog of NCBI NO: 15224321 NR Description: glycosyl hydrolase family 19 (chitinase); protein At2g43620.1 [Arabidopsis thaliana] >gi|25289346|pir||D84868
  misc_feature (1)..(248): Homolog of NCBI NO: 584929 NR Description: Basic endochitinase CHB4 precursor
  misc_feature (1)..(248): Homolog of NCBI NO: 15224312 NR Description: glycosyl hydrolase family 19 (chitinase); protein At2g43590.1 [Arabidopsis thaliana] >gi|25289343|pir||A84868
  misc_feature (1)..(248): Homolog of NCBI NO: 15224310 NR Description: glycosyl hydrolase family 19 (chitinase); protein At2g43580.1 [Arabidopsis thaliana] >gi|25289342|pir||H84867
  misc_feature (1)..(248): Homolog of NCBI NO: 38345417 NR Description: OSJNBb0091E11.8 [Oryza sativa (japonica
  misc_feature (1)..(248): Homolog of NCBI NO: 2570160 NR Description: chitinase [Chenopodium amaranticolor]
  misc_feature (1)..(248): Homolog of NCBI NO: 2570162 NR Description: chitinase [Chenopodium amaranticolor]

SEQ ID NO: 93191 - protein, 181 aa, Arabidopsis thaliana; identical to SEQ ID NO: 89435
  peptide (1)..(181): Ceres Seq. ID no. 12718592
  misc_feature (1)..(181): Pfam Name: Chitinase class I Pfam Description: Chitinase class I
  misc_feature (1)..(181): Homolog of NCBI NO: 15224314 NR Description: glycosyl hydrolase family 19 (chitinase); protein At2g43600.1 [Arabidopsis thaliana] >gi|25289344|pir||B84868
  misc_feature (1)..(181): Homolog of NCBI NO: 15223591 NR Description: glycosyl hydrolase family 19 (chitinase); protein At1g56680.1 [Arabidopsis thaliana] >gi|25289340|pir||F96608
  misc_feature (1)..(181): Homolog of NCBI NO: 15224319 NR Description: glycosyl hydrolase family 19 (chitinase); protein At2g43610.1, supported by cDNA: gi_18252844 [Arabidopsis
  misc_feature (1)..(181): Homolog of NCBI NO: 15224321 NR Description: glycosyl hydrolase family 19 (chitinase); protein At2g43620.1 [Arabidopsis thaliana] >gi|25289346|pir||D84868
  misc_feature (1)..(181): Homolog of NCBI NO: 584929 NR Description: Basic endochitinase CHB4 precursor
  misc_feature (1)..(181): Homolog of NCBI NO: 15224312 NR Description: glycosyl hydrolase family 19 (chitinase); protein At2g43590.1 [Arabidopsis thaliana] >gi|25289343|pir||A84868
  misc_feature (1)..(181): Homolog of NCBI NO: 15224310 NR Description: glycosyl hydrolase family 19 (chitinase); protein At2g43580.1 [Arabidopsis thaliana] >gi|25289342|pir||H84867
  misc_feature (1)..(181): Homolog of NCBI NO: 38345417 NR Description: OSJNBb0091E11.8 [Oryza sativa (japonica
  misc_feature (1)..(181): Homolog of NCBI NO: 2570160 NR Description: chitinase [Chenopodium amaranticolor]
  misc_feature (1)..(181): Homolog of NCBI NO: 2570162 NR Description: chitinase [Chenopodium amaranticolor]

SEQ ID NO: 93192 - DNA, 852 bp, Arabidopsis thaliana; identical to SEQ ID NO: 89436
  misc_feature (1)..(852): Ceres Seq. ID no. 12718593
  misc_feature: MA Experiment ID: 20000314 Result: Up-regulated in Transcription
  misc_feature: MA Experiment 20000314 PARAMETER Experiment Name: At_14day_Shoots-Roots_Sub_P Parameter: Age (day) Value: 14
  misc_feature: MA Experiment 20000314 PARAMETER Experiment Name: At_14day_Shoots-Roots_Sub_P Parameter: Organism Value: A. thaliana
  misc_feature: MA Experiment 20000314 PARAMETER Experiment Name: At_14day_Shoots-Roots_Sub_P Parameter: Plant Line Value: WS
  misc_feature: MA Experiment 20000314 PARAMETER Experiment Name: At_14day_Shoots-Roots_Sub_P Parameter: Tissue Value: Roots vs. Whole Plant
  misc_feature: MA Experiment ID: 20000347 Result: Up-regulated in Transcription
  misc_feature: MA Experiment 20000347 PARAMETER Experiment Name: At_2mM_SA_Sub_P Parameter: Age (day) Value: 14
  misc_feature: MA Experiment 20000347 PARAMETER Experiment Name: At_2mM_SA_Sub_P Parameter: Organism Value: A. thaliana
  misc_feature: MA Experiment 20000347 PARAMETER Experiment Name: At_2mM_SA_Sub_P Parameter: Plant Line Value: WS
  misc_feature: MA Experiment 20000347 PARAMETER Experiment Name: At_2mM_SA_Sub_P Parameter: Timepoint (hr) Value: 6
  misc_feature: MA Experiment 20000347 PARAMETER Experiment Name: At_2mM_SA_Sub_P Parameter: Tissue Value: Aerial
  misc_feature: MA Experiment 20000347 PARAMETER Experiment Name: At_2mM_SA_Sub_P Parameter: Treatment Value: 2mM SA vs. No Treatment
  misc_feature: MA Experiment ID: 20000348 Result: Up-regulated in Transcription
  misc_feature: MA Experiment 20000348 PARAMETER Experiment Name: At_100uM_ABA_Sub_P Parameter: Age (day) Value: 14
  misc_feature: MA Experiment 20000348 PARAMETER Experiment Name: At_100uM_ABA_Sub_P Parameter: Organism Value: A. thaliana
  misc_feature: MA Experiment 20000348 PARAMETER Experiment Name: At_100uM_ABA_Sub_P Parameter: Plant Line Value: WS
  misc_feature: MA Experiment 20000348 PARAMETER Experiment Name: At_100uM_ABA_Sub_P Parameter: Timepoint (hr) Value: 1
  misc_feature: MA Experiment 20000348 PARAMETER Experiment Name: At_100uM_ABA_Sub_P Parameter: Tissue Value: Aerial
  misc_feature: MA Experiment 20000348 PARAMETER Experiment Name: At_100uM_ABA_Sub_P Parameter: Treatment Value: 100uM ABA vs. No Treatment
  misc_feature: MA Experiment ID: 20000355 Result: Up-regulated in Transcription
  misc_feature: MA Experiment 20000355 PARAMETER Experiment Name: At_Siliques_Sub_P Parameter: Age (day) Value: 21
  misc_feature: MA Experiment 20000355 PARAMETER Experiment Name: At_Siliques_Sub_P Parameter: Organism Value: A. thaliana
  misc_feature: MA Experiment 20000355 PARAMETER Experiment Name: At_Siliques_Sub_P Parameter: Plant Line Value: WS
  misc_feature: MA Experiment 20000355 PARAMETER Experiment Name: At_Siliques_Sub_P Parameter: Tissue Value: Less Than 5mm Siliques vs. Whole Plant

SEQ ID NO: 93193 - protein, 283 aa, Arabidopsis thaliana; identical to SEQ ID NO: 89437
  peptide (1)..(283): Ceres Seq. ID no. 12718594
  misc_feature (93)..(283): Pfam Name: Chitinase class I Pfam Description: Chitinase class I
  misc_feature (1)..(283): Homolog of NCBI NO: 15224321 NR Description: glycosyl hydrolase family 19 (chitinase); protein At2g43620.1 [Arabidopsis thaliana] >gi|25289346|pir||D84868
  misc_feature (1)..(283): Homolog of NCBI NO: 15224319 NR Description: glycosyl hydrolase family 19 (chitinase); protein At2g43610.1, supported by cDNA: gi_18252844 [Arabidopsis
  misc_feature (1)..(283): Homolog of NCBI NO: 15223591 NR Description: glycosyl hydrolase family 19 (chitinase); protein At1g56680.1 [Arabidopsis thaliana] >gi|25289340|pir||F96608
  misc_feature (8)..(283): Homolog of NCBI NO: 15224314 NR Description: glycosyl hydrolase family 19 (chitinase); protein At2g43600.1 [Arabidopsis thaliana] >gi|25289344|pir||B84868
  misc_feature (6)..(283): Homolog of NCBI NO: 584929 NR Description: Basic endochitinase CHB4 precursor
  misc_feature (6)..(283): Homolog of NCBI NO: 15224312 NR Description: glycosyl hydrolase family 19 (chitinase); protein At2g43590.1 [Arabidopsis thaliana] >gi|25289343|pir||A84868
  misc_feature (8)..(283): Homolog of NCBI NO: 2570160 NR Description: chitinase [Chenopodium amaranticolor]
  misc_feature (16)..(283): Homolog of NCBI NO: 2570162 NR Description: chitinase [Chenopodium amaranticolor]
  misc_feature (8)..(283): Homolog of NCBI NO: 2570166 NR Description: chitinase [Chenopodium amaranticolor]
  misc_feature (11)..(283): Homolog of NCBI NO: 38345417 NR Description: OSJNBb0091E11.8 [Oryza sativa (japonica

SEQ ID NO: 93194 - protein, 277 aa, Arabidopsis thaliana; identical to SEQ ID NO: 89438
  peptide (1)..(277): Ceres Seq. ID no. 12718595
  misc_feature (87)..(277): Pfam Name: Chitinase class I Pfam Description: Chitinase class I
  misc_feature (1)..(277): Homolog of NCBI NO: 15224321 NR Description: glycosyl hydrolase family 19 (chitinase); protein At2g43620.1 [Arabidopsis thaliana] >gi|25289346|pir||D84868
  misc_feature (1)..(277): Homolog of NCBI NO: 15224319 NR Description: glycosyl hydrolase family 19 (chitinase); protein At2g43610.1, supported by cDNA: gi_18252844 [Arabidopsis
  misc_feature (1)..(277): Homolog of NCBI NO: 15223591 NR Description: glycosyl hydrolase family 19 (chitinase); protein At1g56680.1 [Arabidopsis thaliana] >gi|25289340|pir||F96608
  misc_feature (2)..(277): Homolog of NCBI NO: 15224314 NR Description: glycosyl hydrolase family 19 (chitinase); protein At2g43600.1 [Arabidopsis thaliana] >gi|25289344|pir||B84868
  misc_feature (1)..(277): Homolog of NCBI NO: 584929 NR Description: Basic endochitinase CHB4 precursor
  misc_feature (1)..(277): Homolog of NCBI NO: 15224312 NR Description: glycosyl hydrolase family 19 (chitinase); protein At2g43590.1 [Arabidopsis thaliana] >gi|25289343|pir||A84868
  misc_feature (2)..(277): Homolog of NCBI NO: 2570160 NR Description: chitinase [Chenopodium amaranticolor]
  misc_feature (10)..(277): Homolog of NCBI NO: 2570162 NR Description: chitinase [Chenopodium amaranticolor]
  misc_feature (2)..(277): Homolog of NCBI NO: 2570166 NR Description: chitinase [Chenopodium amaranticolor]
  misc_feature (5)..(277): Homolog of NCBI NO: 38345417 NR Description: OSJNBb0091E11.8 [Oryza sativa (japonica

SEQ ID NO: 93195 - protein, 262 aa, Arabidopsis thaliana; identical to SEQ ID NO: 89439
  peptide (1)..(262): Ceres Seq. ID no. 12718596
  misc_feature (72)..(262): Pfam Name: Chitinase class I Pfam Description: Chitinase class I
  misc_feature (1)..(262): Homolog of NCBI NO: 15224321 NR Description: glycosyl hydrolase family 19 (chitinase); protein At2g43620.1 [Arabidopsis thaliana] >gi|25289346|pir||D84868
  misc_feature (1)..(262): Homolog of NCBI NO: 15224319 NR Description: glycosyl hydrolase family 19 (chitinase); protein At2g43610.1, supported by cDNA: gi_18252844 [Arabidopsis
  misc_feature (1)..(262): Homolog of NCBI NO: 15223591 NR Description: glycosyl hydrolase family 19 (chitinase); protein At1g56680.1 [Arabidopsis thaliana] >gi|25289340|pir||F96608
  misc_feature (1)..(262): Homolog of NCBI NO: 15224314 NR Description: glycosyl hydrolase family 19 (chitinase); protein At2g43600.1 [Arabidopsis thaliana] >gi|25289344|pir||B84868
  misc_feature (1)..(262): Homolog of NCBI NO: 584929 NR Description: Basic endochitinase CHB4 precursor
  misc_feature (1)..(262): Homolog of NCBI NO: 15224312 NR Description: glycosyl hydrolase family 19 (chitinase); protein At2g43590.1 [Arabidopsis thaliana] >gi|25289343|pir||A84868
  misc_feature (1)..(262): Homolog of NCBI NO: 2570160 NR Description: chitinase [Chenopodium amaranticolor]
  misc_feature (1)..(262): Homolog of NCBI NO: 2570162 NR Description: chitinase [Chenopodium amaranticolor]
  misc_feature (1)..(262): Homolog of NCBI NO: 2570166 NR Description: chitinase [Chenopodium amaranticolor]
  misc_feature (1)..(262): Homolog of NCBI NO: 38345417 NR Description: OSJNBb0091E11.8 [Oryza sativa (japonica

SEQ ID NO: 93196 - DNA, 2046 bp, Arabidopsis thaliana; identical to SEQ ID NO: 89440
  misc_feature (1)..(2046): Ceres Seq. ID no. 12718604
  misc_feature: MA Experiment ID: 20000171 Result: Up-regulated in Transcription
  misc_feature: MA Experiment 20000171 PARAMETER Experiment Name: At_42deg_Heat_P Parameter: Age (day) Value: 14
  misc_feature: MA Experiment 20000171 PARAMETER Experiment Name: At_42deg_Heat_P Parameter: Organism Value: A. thaliana
  misc_feature: MA Experiment 20000171 PARAMETER Experiment Name: At_42deg_Heat_P Parameter: Plant Line Value: WS
  misc_feature: MA Experiment 20000171 PARAMETER Experiment Name: At_42deg_Heat_P Parameter: Temperature (deg C) Value: 42 vs. 22
  misc_feature: MA Experiment 20000171 PARAMETER Experiment Name: At_42deg_Heat_P Parameter: Timepoint (hr) Value: 1
  misc_feature: MA Experiment 20000171 PARAMETER Experiment Name: At_42deg_Heat_P Parameter: Tissue Value: Aerial
  misc_feature: MA Experiment ID: 20000227 Result: Down-regulated in Transcription
  misc_feature: MA Experiment 20000227 PARAMETER Experiment Name: At_Root-Tips-vs-Tops_P Parameter: Tissue Value: Root Tips vs. Root Tops

SEQ ID NO: 93197 - protein, 658 aa, Arabidopsis thaliana; identical to SEQ ID NO: 89441
  peptide (1)..(658): Ceres Seq. ID no. 12718605
  misc_feature (1)..(658): Homolog of NCBI NO: 15224334 NR Description: putative receptor protein kinase; protein id: [Arabidopsis thaliana] >gi|25387039|pir||C84869 probable receptor
  misc_feature (9)..(658): Homolog of NCBI NO: 15231734 NR Description: serine/threonine-specific kinase lecRK1
  misc_feature (1)..(658): Homolog of NCBI NO: 15231745 NR Description: receptor lectin kinase 3; protein id: At3g59740.1
  misc_feature (1)..(658): Homolog of NCBI NO: 4100060 NR Description: receptor lectin kinase 3 [Arabidopsis thaliana]
  misc_feature (1)..(625): Homolog of NCBI NO: 11346429 NR Description: receptor lectin kinase 3 - Arabidopsis thaliana >gi|7019668|emb|CAB75793.1| receptor lectin kinase 3 [Arabidopsis
  misc_feature (134)..(658): Homolog of NCBI NO: 15231747 NR Description: receptor lectin kinase-like protein; protein id:
  misc_feature (9)..(149): Homolog of NCBI NO: 15231747 NR Description: receptor lectin kinase-like protein; protein id:
  misc_feature (92)..(658): Homolog of NCBI NO: 11346416 NR Description: receptor lectin kinase 3 - Arabidopsis thaliana
  misc_feature (14)..(513): Homolog of NCBI NO: 15231743 NR Description: receptor lectin kinase-like protein (fragment); id: At3g59730.1 [Arabidopsis thaliana] >gi|11358748|pir||T49314
  misc_feature (37)..(658): Homolog of NCBI NO: 15235547 NR Description: serine threonine-specific kinase like protein;

SEQ ID NO: 93198 - protein, 630 aa, Arabidopsis thaliana; identical to SEQ ID NO: 89442
  peptide (1)..(630): Ceres Seq. ID no. 12718606
  misc_feature (1)..(630): Homolog of NCBI NO: 15224334 NR Description: putative receptor protein kinase; protein id: [Arabidopsis thaliana] >gi|25387039|pir||C84869 probable receptor
  misc_feature (1)..(630): Homolog of NCBI NO: 15231734 NR Description: serine/threonine-specific kinase lecRK1
  misc_feature (1)..(630): Homolog of NCBI NO: 15231745 NR Description: receptor lectin kinase 3; protein id: At3g59740.1
  misc_feature (1)..(630): Homolog of NCBI NO: 4100060 NR Description: receptor lectin kinase 3 [Arabidopsis thaliana]
  misc_feature (1)..(597): Homolog of NCBI NO: 11346429 NR Description: receptor lectin kinase 3 - Arabidopsis thaliana >gi|7019668|emb|CAB75793.1| receptor lectin kinase 3 [Arabidopsis
  misc_feature (106)..(630): Homolog of NCBI NO: 15231747 NR Description: receptor lectin kinase-like protein; protein id:
  misc_feature (1)..(121): Homolog of NCBI NO: 15231747 NR Description: receptor lectin kinase-like protein; protein id:
  misc_feature (64)..(630): Homolog of NCBI NO: 11346416 NR Description: receptor lectin kinase 3 - Arabidopsis thaliana
  misc_feature (1)..(485): Homolog of NCBI NO: 15231743 NR Description: receptor lectin kinase-like protein (fragment); id: At3g59730.1 [Arabidopsis thaliana] >gi|11358748|pir||T49314
  misc_feature (9)..(630): Homolog of NCBI NO: 15235547 NR Description: serine threonine-specific kinase like protein;

SEQ ID NO: 93199 - protein, 567 aa, Arabidopsis thaliana; identical to SEQ ID NO: 89443
  peptide (1)..(567): Ceres Seq. ID no. 12718607
  misc_feature (1)..(567): Homolog of NCBI NO: 15224334 NR Description: putative receptor protein kinase; protein id: [Arabidopsis thaliana] >gi|25387039|pir||C84869 probable receptor
  misc_feature (1)..(567): Homolog of NCBI NO: 15231734 NR Description: serine/threonine-specific kinase lecRK1
  misc_feature (1)..(567): Homolog of NCBI NO: 15231745 NR Description: receptor lectin kinase 3; protein id: At3g59740.1
  misc_feature (1)..(567): Homolog of NCBI NO: 4100060 NR Description: receptor lectin kinase 3 [Arabidopsis thaliana]
  misc_feature (1)..(534): Homolog of NCBI NO: 11346429 NR Description: receptor lectin kinase 3 - Arabidopsis thaliana >gi|7019668|emb|CAB75793.1| receptor lectin kinase 3 [Arabidopsis
  misc_feature (43)..(567): Homolog of NCBI NO: 15231747 NR Description: receptor lectin kinase-like protein; protein id:
  misc_feature (1)..(58): Homolog of NCBI NO: 15231747 NR Description: receptor lectin kinase-like protein; protein id:
  misc_feature (1)..(567): Homolog of NCBI NO: 11346416 NR Description: receptor lectin kinase 3 - Arabidopsis thaliana
  misc_feature (1)..(422): Homolog of NCBI NO: 15231743 NR Description: receptor lectin kinase-like protein (fragment); id: At3g59730.1 [Arabidopsis thaliana] >gi|11358748|pir||T49314
  misc_feature (1)..(567): Homolog of NCBI NO: 15235547 NR Description: serine threonine-specific kinase like protein;

SEQ ID NO: 93200 - DNA, 509 bp, Arabidopsis thaliana; identical to SEQ ID NO: 89444
  misc_feature (1)..(509): Ceres Seq. ID no. 12718608
  misc_feature: MA Experiment ID: 20000180 Result: Down-regulated in Transcription
  misc_feature: MA Experiment 20000180 PARAMETER Experiment Name: At_Germinating_Seeds_P Parameter: Age (hr) Value: 24 vs. 0
  misc_feature: MA Experiment 20000180 PARAMETER Experiment Name: At_Germinating_Seeds_P Parameter: Tissue Value: Germinating Seeds

SEQ ID NO: 93201 - protein, 155 aa, Arabidopsis thaliana; identical to SEQ ID NO: 89445
  peptide (1)..(155): Ceres Seq. ID no. 12718609
  misc_feature (21)..(151): Pfam Name: Eukaryotic protein of unknown function (DUF842) Pfam Description: Eukaryotic protein of unknown function (DUF842)
  misc_feature (9)..(155): Homolog of NCBI NO: 15224344 NR Description: hypothetical protein; protein id: At2g43720.1, by cDNA: gi_18491242 [Arabidopsis thaliana]
  misc_feature (13)..(155): Homolog of NCBI NO: 18402744 NR Description: expressed protein; protein id: At2g31725.1, by cDNA: 25159. [Arabidopsis thaliana] expressed protein [Arabidopsis thaliana]
  misc_feature (13)..(155): Homolog of NCBI NO: 15221245 NR Description: hypothetical Protein; protein id: At1g05730.1
  misc_feature (9)..(130): Homolog of NCBI NO: 15221247 NR Description: hypothetical protein; protein id: At1g05740.1
  misc_feature (22)..(152): Homolog of NCBI NO: 20130125 NR Description: CG5323-PA [Drosophila melanogaster]
  misc_feature (29)..(152): Homolog of NCBI NO: 37589716 NR Description: Unknown (protein for MGC:73247) [Danio rerio]
  misc_feature (29)..(152): Homolog of NCBI NO: 13385042 NR Description: RIKEN cDNA 2010309E21 [Mus musculus] unnamed protein product [Mus musculus] unnamed protein product [Mus musculus]
  misc_feature (29)..(152): Homolog of NCBI NO: 15489002 NR Description: Unknown (protein for IMAGE:3493774) [Mus musculus]
  misc_feature (29)..(152): Homolog of NCBI NO: 28482029 NR Description: similar to RIKEN cDNA 2010309E21 [Mus musculus]
  misc_feature (29)..(151): Homolog of NCBI NO: 14249520 NR Description: hypothetical protein FLJ14668 [Homo sapiens]

SEQ ID NO: 93202 - protein, 147 aa, Arabidopsis thaliana; identical to SEQ ID NO: 89446
  peptide (1)..(147): Ceres Seq. ID no. 12718610
  misc_feature (13)..(143): Pfam Name: Eukaryotic protein of unknown function (DUF842) Pfam Description: Eukaryotic protein of unknown function (DUF842)
  misc_feature (1)..(147): Homolog of NCBI NO: 15224344 NR Description: hypothetical protein; protein id: At2g43720.1, by cDNA: gi_18491242 [Arabidopsis thaliana]
  misc_feature (5)..(147): Homolog of NCBI NO: 18402744 NR Description: expressed protein; protein id: At2g31725.1, by cDNA: 25159. [Arabidopsis thaliana] expressed protein [Arabidopsis thaliana]
  misc_feature (5)..(147): Homolog of NCBI NO: 15221245 NR Description: hypothetical Protein; protein id: At1g05730.1
  misc_feature (1)..(122): Homolog of NCBI NO: 15221247 NR Description: hypothetical protein; protein id: At1g05740.1
  misc_feature (14)..(144): Homolog of NCBI NO: 20130125 NR Description: CG5323-PA [Drosophila melanogaster]
  misc_feature (21)..(144): Homolog of NCBI NO: 37589716 NR Description: Unknown (protein for MGC:73247) [Danio rerio]
  misc_feature (21)..(144): Homolog of NCBI NO: 13385042 NR Description: RIKEN cDNA 2010309E21 [Mus musculus] unnamed protein product [Mus musculus] unnamed protein product [Mus musculus]
  misc_feature (21)..(144): Homolog of NCBI NO: 15489002 NR Description: Unknown (protein for IMAGE:3493774) [Mus musculus]
  misc_feature (21)..(144): Homolog of NCBI NO: 28482029 NR Description: similar to RIKEN cDNA 2010309E21 [Mus musculus]
  misc_feature (21)..(143): Homolog of NCBI NO: 14249520 NR Description: hypothetical protein FLJ14668 [Homo sapiens]

SEQ ID NO: 93203 - protein, 139 aa, Arabidopsis thaliana; identical to SEQ ID NO: 89447
  peptide (1)..(139): Ceres Seq. ID no. 12718611
  misc_feature (5)..(135): Pfam Name: Eukaryotic protein of unknown function (DUF842) Pfam Description: Eukaryotic protein of unknown function (DUF842)
  misc_feature (1)..(139): Homolog of NCBI NO: 15224344 NR Description: hypothetical protein; protein id: At2g43720.1, by cDNA: gi_18491242 [Arabidopsis thaliana]
  misc_feature (1)..(139): Homolog of NCBI NO: 18402744 NR Description: expressed protein; protein id: At2g31725.1, by cDNA: 25159. [Arabidopsis thaliana] expressed protein [Arabidopsis thaliana]
  misc_feature (1)..(139): Homolog of NCBI NO: 15221245 NR Description: hypothetical Protein; protein id: At1g05730.1
  misc_feature (1)..(114): Homolog of NCBI NO: 15221247 NR Description: hypothetical protein; protein id: At1g05740.1
  misc_feature (6)..(136): Homolog of NCBI NO: 20130125 NR Description: CG5323-PA [Drosophila melanogaster]
  misc_feature (13)..(136): Homolog of NCBI NO: 37589716 NR Description: Unknown (protein for MGC:73247) [Danio rerio]
  misc_feature (13)..(136): Homolog of NCBI NO: 13385042 NR Description: RIKEN cDNA 2010309E21 [Mus musculus] unnamed protein product [Mus musculus] unnamed protein product [Mus musculus]
  misc_feature (13)..(136): Homolog of NCBI NO: 15489002 NR Description: Unknown (protein for IMAGE:3493774) [Mus musculus]
  misc_feature (13)..(136): Homolog of NCBI NO: 28482029 NR Description: similar to RIKEN cDNA 2010309E21 [Mus musculus]
  misc_feature (13)..(135): Homolog of NCBI NO: 14249520 NR Description: hypothetical protein FLJ14668 [Homo sapiens]

SEQ ID NO: 93204 - DNA, 763 bp, Arabidopsis thaliana; identical to SEQ ID NO: 89448
  misc_feature (1)..(763): Ceres Seq. ID no. 12718640
  misc_feature: MA Experiment ID: 108462 Result: Down-regulated in Transcription
  misc_feature: MA Experiment 108462 PARAMETER Experiment Name: At_Germinating_Seeds_cDNA_P Parameter: Age (day) Value: 2 vs. 0
  misc_feature: MA Experiment 108462 PARAMETER Experiment Name: At_Germinating_Seeds_cDNA_P Parameter: Tissue Value: Germinating Seeds
  misc_feature: MA Experiment ID: 108463 Result: Down-regulated in Transcription
  misc_feature: MA Experiment 108463 PARAMETER Experiment Name: At_Germinating_Seeds_cDNA_P Parameter: Age (day) Value: 3 vs. 0
  misc_feature: MA Experiment 108463 PARAMETER Experiment Name: At_Germinating_Seeds_cDNA_P Parameter: Tissue Value: Germinating Seeds
  misc_feature: MA Experiment ID: 108464 Result: Down-regulated in Transcription
  misc_feature: MA Experiment 108464 PARAMETER Experiment Name: At_Germinating_Seeds_cDNA_P Parameter: Age (day) Value: 4 vs. 0
  misc_feature: MA Experiment 108464 PARAMETER Experiment Name: At_Germinating_Seeds_cDNA_P Parameter: Tissue Value: Germinating Seeds
  misc_feature: MA Experiment ID: 20000111 Result: Up-regulated in Transcription
  misc_feature: MA Experiment 20000111 PARAMETER Experiment Name: At_42deg_Heat_cDNA_P Parameter: Temperature (deg C) Value: 42 vs. 22
  misc_feature: MA Experiment 20000111 PARAMETER Experiment Name: At_42deg_Heat_cDNA_P Parameter: Timepoint (hr) Value: 6
  misc_feature: MA Experiment 20000111 PARAMETER Experiment Name: At_42deg_Heat_cDNA_P Parameter: Tissue Value: Aerial
  misc_feature: MA Experiment ID: 20000113 Result: Up-regulated in Transcription
  misc_feature: MA Experiment 20000113 PARAMETER Experiment Name: At_42deg_Heat_cDNA_P Parameter: Temperature (deg C) Value: 42 vs. 22
  misc_feature: MA Experiment 20000113 PARAMETER Experiment Name: At_42deg_Heat_cDNA_P Parameter: Timepoint (hr) Value: 8
  misc_feature: MA Experiment 20000113 PARAMETER Experiment Name: At_42deg_Heat_cDNA_P Parameter: Tissue Value: Aerial
  misc_feature: MA Experiment ID: 20000173 Result: Up-regulated in Transcription
  misc_feature: MA Experiment 20000173 PARAMETER Experiment Name: At_42deg_Heat_P Parameter: Age (day) Value: 14
  misc_feature: MA Experiment 20000173 PARAMETER Experiment Name: At_42deg_Heat_P Parameter: Organism Value: A. thaliana
  misc_feature: MA Experiment 20000173 PARAMETER Experiment Name: At_42deg_Heat_P Parameter: Plant Line Value: WS
  misc_feature: MA Experiment 20000173 PARAMETER Experiment Name: At_42deg_Heat_P Parameter: Temperature (deg C) Value: 42 vs. 22
  misc_feature: MA Experiment 20000173 PARAMETER Experiment Name: At_42deg_Heat_P Parameter: Timepoint (hr) Value: 6
  misc_feature: MA Experiment 20000173 PARAMETER Experiment Name: At_42deg_Heat_P Parameter: Tissue Value: Aerial
  misc_feature: MA Experiment ID: 20000328 Result: Up-regulated in Transcription
  misc_feature: MA Experiment 20000328 PARAMETER Experiment Name: At_42deg_Heat_Sub_P Parameter: Age (day) Value: 14
  misc_feature: MA Experiment 20000328 PARAMETER Experiment Name: At_42deg_Heat_Sub_P Parameter: Organism Value: A. thaliana
  misc_feature: MA Experiment 20000328 PARAMETER Experiment Name: At_42deg_Heat_Sub_P Parameter: Plant Line Value: WS
  misc_feature: MA Experiment 20000328 PARAMETER Experiment Name: At_42deg_Heat_Sub_P Parameter: Temperature (deg C) Value: 42 vs. 22
  misc_feature: MA Experiment 20000328 PARAMETER Experiment Name: At_42deg_Heat_Sub_P Parameter: Timepoint (hr) Value: 6
  misc_feature: MA Experiment 20000328 PARAMETER Experiment Name: At_42deg_Heat_Sub_P Parameter: Tissue Value: Aerial

SEQ ID NO: 93205 - protein, 162 aa, Arabidopsis thaliana; identical to SEQ ID NO: 23183
  peptide (1)..(162): Ceres Seq. ID no. 12718641
  misc_feature (20)..(162): Pfam Name: Mago nashi protein Pfam Description: Mago nashi protein
  misc_feature (13)..(162): Homolog of NCBI NO: 15217623 NR Description: Mago Nashi-like protein; protein id: At1g02140.1, by cDNA: 35733., supported by cDNA: gi_17473797 [Arabidopsis >gi|6016560|sp|O23676|MGN_ARATH Mago nashi protein homolog
  misc_feature (13)..(162): Homolog of NCBI NO: 6016561 NR Description: Mago nashi protein homolog
  misc_feature (12)..(162): Homolog of NCBI NO: 12802873 NR Description: mago nashi-like protein [Oryza sativa]
  misc_feature (15)..(162): Homolog of NCBI NO: 13195558 NR Description: mago nashi [Marsilea vestita]
  misc_feature (18)..(162): Homolog of NCBI NO: 8922331 NR Description: hypothetical protein FLJ10292 [Homo sapiens] unnamed protein product [Homo sapiens]
  misc_feature (18)..(162): Homolog of NCBI NO: 25990444 NR Description: MAGO protein [Gallus gallus]
  misc_feature (19)..(162): Homolog of NCBI NO: 4505087 NR Description: mago-nashi homolog [Homo sapiens]
  misc_feature (19)..(162): Homolog of NCBI NO: 13385002 NR Description: RIKEN cDNA 2010012C16 [Mus musculus] unnamed protein product [Mus musculus] unnamed protein product [Mus musculus]
  misc_feature (19)..(162): Homolog of NCBI NO: 26354182 NR Description: unnamed protein product [Mus musculus]
  misc_feature (19)..(162): Homolog of NCBI NO: 6016563 NR Description: Mago nashi protein homolog (Xl-mago)

SEQ ID NO: 93206 - protein, 150 aa, Arabidopsis thaliana; identical to SEQ ID NO: 23184
  peptide (1)..(150): Ceres Seq. ID no. 12718642
  misc_feature (8)..(150): Pfam Name: Mago nashi protein Pfam Description: Mago nashi protein
  misc_feature (1)..(150): Homolog of NCBI NO: 15217623 NR Description: Mago Nashi-like protein; protein id: At1g02140.1, by cDNA: 35733., supported by cDNA: gi_17473797 [Arabidopsis >gi|6016560|sp|O23676|MGN_ARATH Mago nashi protein homolog
  misc_feature (1)..(150): Homolog of NCBI NO: 6016561 NR Description: Mago nashi protein homolog
  misc_feature (1)..(150): Homolog of NCBI NO: 12802873 NR Description: mago nashi-like protein [Oryza sativa]
  misc_feature (3)..(150): Homolog of NCBI NO: 13195558 NR Description: mago nashi [Marsilea vestita]
  misc_feature (6)..(150): Homolog of NCBI NO: 8922331 NR Description: hypothetical protein FLJ10292 [Homo sapiens] unnamed protein product [Homo sapiens]
  misc_feature (6)..(150): Homolog of NCBI NO: 25990444 NR Description: MAGO protein [Gallus gallus]
  misc_feature (7)..(150): Homolog of NCBI NO: 4505087 NR Description: mago-nashi homolog [Homo sapiens]
  misc_feature (7)..(150): Homolog of NCBI NO: 13385002 NR Description: RIKEN cDNA 2010012C16 [Mus musculus] unnamed protein product [Mus musculus] unnamed protein product [Mus musculus]
  misc_feature (7)..(150): Homolog of NCBI NO: 26354182 NR Description: unnamed protein product [Mus musculus]
  misc_feature (7)..(150): Homolog of NCBI NO: 6016563 NR Description: Mago nashi protein homolog (Xl-mago)

SEQ ID NO: 93207 - DNA, 1875 bp, Arabidopsis thaliana; identical to SEQ ID NO: 89451
  misc_feature (1)..(1875): Ceres Seq. ID no. 12718643
  misc_feature: MA Experiment ID: 20000173 Result: Down-regulated in Transcription
  misc_feature: MA Experiment 20000173 PARAMETER Experiment Name: At_42deg_Heat_P Parameter: Age (day) Value: 14
  misc_feature: MA Experiment 20000173 PARAMETER Experiment Name: At_42deg_Heat_P Parameter: Organism Value: A. thaliana
  misc_feature: MA Experiment 20000173 PARAMETER Experiment Name: At_42deg_Heat_P Parameter: Plant Line Value: WS
  misc_feature: MA Experiment 20000173 PARAMETER Experiment Name: At_42deg_Heat_P Parameter: Temperature (deg C) Value: 42 vs. 22
  misc_feature: MA Experiment 20000173 PARAMETER Experiment Name: At_42deg_Heat_P Parameter: Timepoint (hr) Value: 6
  misc_feature: MA Experiment 20000173 PARAMETER Experiment Name: At_42deg_Heat_P Parameter: Tissue Value: Aerial
  misc_feature: MA Experiment ID: 20000264 Result: Up-regulated in Transcription
  misc_feature: MA Experiment 20000264 PARAMETER Experiment Name: At_Open_Flower_P Parameter: Age (day) Value: 21
  misc_feature: MA Experiment 20000264 PARAMETER Experiment Name: At_Open_Flower_P Parameter: Plant Line Value: WS
  misc_feature: MA Experiment 20000264 PARAMETER Experiment Name: At_Open_Flower_P Parameter: Tissue Value: Open Flower vs. Whole Plant
  misc_feature: MA Experiment ID: 20000265 Result: Up-regulated in Transcription
  misc_feature: MA Experiment 20000265 PARAMETER Experiment Name: At_Open_Flower_P Parameter: Age (day) Value: 21
  misc_feature: MA Experiment 20000265 PARAMETER Experiment Name: At_Open_Flower_P Parameter: Plant Line Value: WS
  misc_feature: MA Experiment 20000265 PARAMETER Experiment Name: At_Open_Flower_P Parameter: Tissue Value: Closed Flower vs. Whole Plant
  misc_feature: MA Experiment ID: 20000286 Result: Up-regulated in Transcription
  misc_feature: MA Experiment 20000286 PARAMETER Experiment Name: At_Open_Flower_P Parameter: Age (day) Value: 21
  misc_feature: MA Experiment 20000286 PARAMETER Experiment Name: At_Open_Flower_P Parameter: Plant Line Value: WS
  misc_feature: MA Experiment 20000286 PARAMETER Experiment Name: At_Open_Flower_P Parameter: Tissue Value: Half Open vs. Whole Plant
  misc_feature: MA Experiment ID: 20000794 Result: Up-regulated in Transcription
  misc_feature: MA Experiment 20000794 PARAMETER Experiment Name: At_Petals_P Parameter: Age (day) Value: 23-25 days
  misc_feature: MA Experiment 20000794 PARAMETER Experiment Name: At_Petals_P Parameter: Plant Line Value: WS
  misc_feature: MA Experiment 20000794 PARAMETER Experiment Name: At_Petals_P Parameter: Tissue Value: Petals vs. Whole plant
  misc_feature: MA Experiment ID: 20001451 Result: Up-regulated in Transcription
  misc_feature: MA Experiment 20001451 PARAMETER Experiment Name: At_Far-red-induction_P Parameter: Age (day) Value: 7
  misc_feature: MA Experiment 20001451 PARAMETER Experiment Name: At_Far-red-induction_P Parameter: Light Value: Far-red vs. White
  misc_feature: MA Experiment 20001451 PARAMETER Experiment Name: At_Far-red-induction_P Parameter: Organism Value: A. thaliana
  misc_feature: MA Experiment 20001451 PARAMETER Experiment Name: At_Far-red-induction_P Parameter: Plant Line Value: Columbia
  misc_feature: MA Experiment 20001451 PARAMETER Experiment Name: At_Far-red-induction_P Parameter: Timepoint (hr) Value: 24
  misc_feature: MA Experiment 20001451 PARAMETER Experiment Name: At_Far-red-induction_P Parameter: Tissue Value: Whole Plant

SEQ ID NO: 93208 - protein, 624 aa, Arabidopsis thaliana; identical to SEQ ID NO: 89452
  peptide (1)..(624): Ceres Seq. ID no. 12718644
  misc_feature (75)..(624): Homolog of NCBI NO: 18378910 NR Description: hypothetical protein; protein id: At1g02010.1
  misc_feature (1)..(106): Homolog of NCBI NO: 18378910 NR Description: hypothetical protein; protein id: At1g02010.1
  misc_feature (187)..(562): Homolog of NCBI NO: 2317901 NR Description: Similar to vesicle transport protein, PIR
  misc_feature (122)..(610): Homolog of NCBI NO: 18391384 NR Description: expressed protein; protein id: At1g12360.1,
  misc_feature (122)..(610): Homolog of NCBI NO: 28201820 NR Description: SNARE-interacting protein KEULE
  misc_feature (1)..(112): Homolog of NCBI NO: 18391384 NR Description: expressed protein; protein id: At1g12360.1,
  misc_feature (1)..(112): Homolog of NCBI NO: 28201820 NR Description: SNARE-interacting protein KEULE
  misc_feature (122)..(611): Homolog of NCBI NO: 38345989 NR Description: OSJNBa0032B23.7 [Oryza sativa (japonica
  misc_feature (76)..(177): Homolog of NCBI NO: 38345989 NR Description: OSJNBa0032B23.7 [Oryza sativa (japonica
  misc_feature (75)..(582): Homolog of NCBI NO: 25402721 NR Description: protein F5O11.8 [imported] - Arabidopsis thaliana

SEQ ID NO: 93209 - protein, 592 aa, Arabidopsis thaliana; identical to SEQ ID NO: 89453
  peptide (1)..(592): Ceres Seq. ID no. 12718645
  misc_feature (43)..(592): Homolog of NCBI NO: 18378910 NR Description: hypothetical protein; protein id: At1g02010.1
  misc_feature (1)..(74): Homolog of NCBI NO: 18378910 NR Description: hypothetical protein; protein id: At1g02010.1
  misc_feature (155)..(530): Homolog of NCBI NO: 2317901 NR Description: Similar to vesicle transport protein, PIR
  misc_feature (90)..(578): Homolog of NCBI NO: 18391384 NR Description: expressed protein; protein id: At1g12360.1,
  misc_feature (90)..(578): Homolog of NCBI NO: 28201820 NR Description: SNARE-interacting protein KEULE
  misc_feature (1)..(80): Homolog of NCBI NO: 18391384 NR Description: expressed protein; protein id: At1g12360.1,
  misc_feature (1)..(80): Homolog of NCBI NO: 28201820 NR Description: SNARE-interacting protein KEULE
  misc_feature (90)..(579): Homolog of NCBI NO: 38345989 NR Description: OSJNBa0032B23.7 [Oryza sativa (japonica
  misc_feature (44)..(145): Homolog of NCBI NO: 38345989 NR Description: OSJNBa0032B23.7 [Oryza sativa (japonica
  misc_feature (43)..(550): Homolog of NCBI NO: 25402721 NR Description: protein F5O11.8 [imported] - Arabidopsis thaliana

SEQ ID NO: 93210 - protein, 575 aa, Arabidopsis thaliana; identical to SEQ ID NO: 89454
  peptide (1)..(575): Ceres Seq. ID no. 12718646
  misc_feature (26)..(575): Homolog of NCBI NO: 18378910 NR Description: hypothetical protein; protein id: At1g02010.1
  misc_feature (1)..(57): Homolog of NCBI NO: 18378910 NR Description: hypothetical protein; protein id: At1g02010.1
  misc_feature (138)..(513): Homolog of NCBI NO: 2317901 NR Description: Similar to vesicle transport protein, PIR
  misc_feature (73)..(561): Homolog of NCBI NO: 18391384 NR Description: expressed protein; protein id: At1g12360.1,
  misc_feature (73)..(561): Homolog of NCBI NO: 28201820 NR Description: SNARE-interacting protein KEULE
  misc_feature (1)..(63): Homolog of NCBI NO: 18391384 NR Description: expressed protein; protein id: At1g12360.1,
  misc_feature (1)..(63): Homolog of NCBI NO: 28201820 NR Description: SNARE-interacting protein KEULE
  misc_feature (73)..(562): Homolog of NCBI NO: 38345989 NR Description: OSJNBa0032B23.7 [Oryza sativa (japonica
  misc_feature (27)..(128): Homolog of NCBI NO: 38345989 NR Description: OSJNBa0032B23.7 [Oryza sativa (japonica
  misc_feature (26)..(533): Homolog of NCBI NO: 25402721 NR Description: protein F5O11.8 [imported] - Arabidopsis thaliana

SEQ ID NO: 93211 - DNA, 1205 bp, Arabidopsis thaliana; identical to SEQ ID NO: 89455
  misc_feature (1)..(1205): Ceres Seq. ID no. 12718651
  misc_feature: MA Experiment ID: 20000314 Result: Up-regulated in Transcription
  misc_feature: MA Experiment 20000314 PARAMETER Experiment Name: At_14day_Shoots-Roots_Sub_P Parameter: Age (day) Value: 14
  misc_feature: MA Experiment 20000314 PARAMETER Experiment Name: At_14day_Shoots-Roots_Sub_P Parameter: Organism Value: A. thaliana
  misc_feature: MA Experiment 20000314 PARAMETER Experiment Name: At_14day_Shoots-Roots_Sub_P Parameter: Plant Line Value: WS
  misc_feature: MA Experiment 20000314 PARAMETER Experiment Name: At_14day_Shoots-Roots_Sub_P Parameter: Tissue Value: Roots vs. Whole Plant
  misc_feature: MA Experiment ID: 20000315 Result: Down-regulated in Transcription
  misc_feature: MA Experiment 20000315 PARAMETER Experiment Name: At_14day_Shoots-Roots_Sub_P Parameter: Age (day) Value: 14
  misc_feature: MA Experiment 20000315 PARAMETER Experiment Name: At_14day_Shoots-Roots_Sub_P Parameter: Organism Value: A. thaliana
  misc_feature: MA Experiment 20000315 PARAMETER Experiment Name: At_14day_Shoots-Roots_Sub_P Parameter: Plant Line Value: WS
  misc_feature: MA Experiment 20000315 PARAMETER Experiment Name: At_14day_Shoots-Roots_Sub_P Parameter: Tissue Value: Shoots vs. Whole Plant

SEQ ID NO: 93212 - protein, 197 aa, Arabidopsis thaliana; identical to SEQ ID NO: 89456
  peptide (1)..(197): Ceres Seq. ID no. 12718652
  misc_feature (8)..(102): Pfam Name: Thiamin pyrophosphokinase, catalytic domain Pfam Description: Thiamin pyrophosphokinase, catalytic domain
  misc_feature (8)..(197): Homolog of NCBI NO: 30678415 NR Description: thiamin pyrophosphokinase -related [Arabidopsis
  misc_feature (8)..(197): Homolog of NCBI NO: 18379026 NR Description: thiamin pyrophosphokinase, putative; protein id:
  misc_feature (1)..(197): Homolog of NCBI NO: 30689827 NR Description: thiamin pyrophosphokinase -related [Arabidopsis
  misc_feature (1)..(197): Homolog of NCBI NO: 7488367 NR Description: probable thiamin pyrophosphokinase At2g44750
  misc_feature (1)..(197): Homolog of NCBI NO: 18406621 NR Description: putative thiamin pyrophosphokinase; protein id: supported by cDNA: gi_14596220, supported by cDNA: gi_20148328 thaliana] >gi|14596221|gb|AAK68838.1| putative thiamin
  misc_feature (1)..(197): Homolog of NCBI NO: 30678410 NR Description: thiamin pyrophosphokinase -related [Arabidopsis >gi|16648736|gb|AAL25560.1| At1g02880/F22D16_33 [Arabidopsis >gi|20856331|gb|AAM26660.1| At1g02880/F22D16_33 [Arabidopsis
  misc_feature (33)..(186): Homolog of NCBI NO: 34915046 NR Description: putative thiamin pyrophosphokinase [Oryza sativa
  misc_feature (8)..(186): Homolog of NCBI NO: 34907130 NR Description: putative thiamine pyrophosphokinase [Oryza sativa
  misc_feature (9)..(186): Homolog of NCBI NO: 21362110 NR Description: thiamin pyrophosphokinase 1; mouse thiamin homolog; thiamine pyrophosphokinase [Homo sapiens] thiamin pyrophosphokinase [Homo sapiens]
  misc_feature (9)..(186): Homolog of NCBI NO: 39644700 NR Description: TPK1 protein [Homo sapiens]

SEQ ID NO: 93213 - protein, 180 aa, Arabidopsis thaliana; identical to SEQ ID NO: 43324
  peptide (1)..(180): Ceres Seq. ID no. 12718653
  misc_feature (1)..(85): Pfam Name: Thiamin pyrophosphokinase, catalytic domain Pfam Description: Thiamin pyrophosphokinase, catalytic domain
  misc_feature (1)..(180): Homolog of NCBI NO: 30678415 NR Description: thiamin pyrophosphokinase -related [Arabidopsis
  misc_feature (1)..(180): Homolog of NCBI NO: 18379026 NR Description: thiamin pyrophosphokinase, putative; protein id:
  misc_feature (1)..(180): Homolog of NCBI NO: 30689827 NR Description: thiamin pyrophosphokinase -related [Arabidopsis
  misc_feature (1)..(180): Homolog of NCBI NO: 7488367 NR Description: probable thiamin pyrophosphokinase At2g44750
  misc_feature (1)..(180): Homolog of NCBI NO: 18406621 NR Description: putative thiamin pyrophosphokinase; protein id: supported by cDNA: gi_14596220, supported by cDNA: gi_20148328 thaliana] >gi|14596221|gb|AAK68838.1| putative thiamin
  misc_feature (1)..(180): Homolog of NCBI NO: 30678410 NR Description: thiamin pyrophosphokinase -related [Arabidopsis >gi|16648736|gb|AAL25560.1| At1g02880/F22D16_33 [Arabidopsis >gi|20856331|gb|AAM26660.1| At1g02880/F22D16_33 [Arabidopsis
  misc_feature (16)..(169): Homolog of NCBI NO: 34915046 NR Description: putative thiamin pyrophosphokinase [Oryza sativa
  misc_feature (1)..(169): Homolog of NCBI NO: 34907130 NR Description: putative thiamine pyrophosphokinase [Oryza sativa
  misc_feature (1)..(169): Homolog of NCBI NO: 21362110 NR Description: thiamin pyrophosphokinase 1; mouse thiamin homolog; thiamine pyrophosphokinase [Homo sapiens] thiamin pyrophosphokinase [Homo sapiens]
  misc_feature (1)..(169): Homolog of NCBI NO: 39644700 NR Description: TPK1 protein [Homo sapiens]

SEQ ID NO: 93214 - protein, 121 aa, Arabidopsis thaliana; identical to SEQ ID NO: 89458
  peptide (1)..(121): Ceres Seq. ID no. 12718654
  misc_feature (13)..(90): Homolog of NCBI NO: 30678415 NR Description: thiamin pyrophosphokinase -related [Arabidopsis
  misc_feature (16)..(90): Homolog of NCBI NO: 18379026 NR Description: thiamin pyrophosphokinase, putative; protein id:
  misc_feature (13)..(90): Homolog of NCBI NO: 30689827 NR Description: thiamin pyrophosphokinase -related [Arabidopsis
  misc_feature (16)..(90): Homolog of NCBI NO: 7488367 NR Description: probable thiamin pyrophosphokinase At2g44750
  misc_feature (13)..(90): Homolog of NCBI NO: 18406621 NR Description: putative thiamin pyrophosphokinase; protein id: supported by cDNA: gi_14596220, supported by cDNA: gi_20148328 thaliana] >gi|14596221|gb|AAK68838.1| putative thiamin
  misc_feature (16)..(115): Homolog of NCBI NO: 34915046 NR Description: putative thiamin pyrophosphokinase [Oryza sativa
  misc_feature (19)..(114): Homolog of NCBI NO: 34907130 NR Description: putative thiamine pyrophosphokinase [Oryza sativa
  misc_feature (19)..(73): Homolog of NCBI NO: 21362110 NR Description: thiamin pyrophosphokinase 1; mouse thiamin homolog; thiamine pyrophosphokinase [Homo sapiens] thiamin pyrophosphokinase [Homo sapiens]
  misc_feature (33)..(73): Homolog of NCBI NO: 39644700 NR Description: TPK1 protein [Homo sapiens]
  misc_feature (19)..(73): Homolog of NCBI NO: 7305589 NR Description: thiamin pyrophosphokinase [Mus musculus] thiamin pyrophosphokinase [Mus musculus] Unknown (protein for MGC:18314) [Mus musculus]

SEQ ID NO: 93215 - DNA, 1434 bp, Arabidopsis thaliana; identical to SEQ ID NO: 89459
  misc_feature (1)..(1434): Ceres Seq. ID no. 12718658
  misc_feature: MA Experiment ID: 20000182 Result: Up-regulated in Transcription
  misc_feature: MA Experiment 20000182 PARAMETER Experiment Name: At_2mM_SA_P Parameter: Age (day) Value: 14
  misc_feature: MA Experiment 20000182 PARAMETER Experiment Name: At_2mM_SA_P Parameter: Organism Value: A. thaliana
  misc_feature: MA Experiment 20000182 PARAMETER Experiment Name: At_2mM_SA_P Parameter: Plant Line Value: WS
  misc_feature: MA Experiment 20000182 PARAMETER Experiment Name: At_2mM_SA_P Parameter: Timepoint (hr) Value: 6
  misc_feature: MA Experiment 20000182 PARAMETER Experiment Name: At_2mM_SA_P Parameter: Tissue Value: Aerial
  misc_feature: MA Experiment 20000182 PARAMETER Experiment Name: At_2mM_SA_P Parameter: Treatment Value: 2mM SA vs. No Treatment
  misc_feature: MA Experiment ID: 20000185 Result: Up-regulated in Transcription
  misc_feature: MA Experiment 20000185 PARAMETER Experiment Name: At_Roots__P Parameter: Age (day) Value: 7 vs. 21
  misc_feature: MA Experiment 20000185 PARAMETER Experiment Name: At_Roots__P Parameter: Organism Value: A. thaliana
  misc_feature: MA Experiment 20000185 PARAMETER Experiment Name: At_Roots__P Parameter: Tissue Value: Roots vs. Whole Plant
  misc_feature: MA Experiment ID: 20000439 Result: Up-regulated in Transcription
  misc_feature: MA Experiment 20000439 PARAMETER Experiment Name: At_Roots__P Parameter: Age (day) Value: 14 vs. 21
  misc_feature: MA Experiment 20000439 PARAMETER Experiment Name: At_Roots__P Parameter: Organism Value: A. thaliana
  misc_feature: MA Experiment 20000439 PARAMETER Experiment Name: At_Roots__P Parameter: Tissue Value: Roots vs. Whole Plant
  misc_feature: MA Experiment ID: 20000495 Result: Up-regulated in Transcription
  misc_feature: MA Experiment 20000495 PARAMETER Experiment Name: At_Guard_Cells_P Parameter: Harvest Date Value: 8/2/2002
  misc_feature: MA Experiment 20000495 PARAMETER Experiment Name: At_Guard_Cells_P Parameter: Organism Value: A. thaliana
  misc_feature: MA Experiment 20000495 PARAMETER Experiment Name: At_Guard_Cells_P Parameter: Tissue Value: Guard Cells vs. Leaves
  misc_feature: MA Experiment ID: 20001248 Result: Up-regulated in Transcription
  misc_feature: MA Experiment 20001248 PARAMETER Experiment Name: At_Far-red-induction_P Parameter: Age (day) Value: 7
  misc_feature: MA Experiment 20001248 PARAMETER Experiment Name: At_Far-red-induction_P Parameter: Light Value: Far-red vs. White
  misc_feature: MA Experiment 20001248 PARAMETER Experiment Name: At_Far-red-induction_P Parameter: Organism Value: A. thaliana
  misc_feature: MA Experiment 20001248 PARAMETER Experiment Name: At_Far-red-induction_P Parameter: Plant Line Value: Columbia
  misc_feature: MA Experiment 20001248 PARAMETER Experiment Name: At_Far-red-induction_P Parameter: Timepoint (hr) Value: 4
  misc_feature: MA Experiment 20001248 PARAMETER Experiment Name: At_Far-red-induction_P Parameter: Tissue Value: Whole Plant
  misc_feature: MA Experiment ID: 20001451 Result: Up-regulated in Transcription
  misc_feature: MA Experiment 20001451 PARAMETER Experiment Name: At_Far-red-induction_P Parameter: Age (day) Value: 7
  misc_feature: MA Experiment 20001451 PARAMETER Experiment Name: At_Far-red-induction_P Parameter: Light Value: Far-red vs. White
  misc_feature: MA Experiment 20001451 PARAMETER Experiment Name: At_Far-red-induction_P Parameter: Organism Value: A. thaliana
  misc_feature: MA Experiment 20001451 PARAMETER Experiment Name: At_Far-red-induction_P Parameter: Plant Line Value: Columbia
  misc_feature: MA Experiment 20001451 PARAMETER Experiment Name: At_Far-red-induction_P Parameter: Timepoint (hr) Value: 24
  misc_feature: MA Experiment 20001451 PARAMETER Experiment Name: At_Far-red-induction_P Parameter: Tissue Value: Whole Plant
  misc_feature: MA Experiment ID: 20001555 Result: Down-regulated in Transcription
  misc_feature: MA Experiment 20001555 PARAMETER Experiment Name: At_Drought_Soil_Dry_P Parameter: Age (day) Value: 24
  misc_feature: MA Experiment 20001555 PARAMETER Experiment Name: At_Drought_Soil_Dry_P Parameter: Organism Value: A. thaliana
  misc_feature: MA Experiment 20001555 PARAMETER Experiment Name: At_Drought_Soil_Dry_P Parameter: Plant Line Value: WS
  misc_feature: MA Experiment 20001555 PARAMETER Experiment Name: At_Drought_Soil_Dry_P Parameter: Post Timepoint (hr) Value: None
  misc_feature: MA Experiment 20001555 PARAMETER Experiment Name: At_Drought_Soil_Dry_P Parameter: Post-Treatment Value: None
  misc_feature: MA Experiment 20001555 PARAMETER Experiment Name: At_Drought_Soil_Dry_P Parameter: Timepoint (day) Value: 10
  misc_feature: MA Experiment 20001555 PARAMETER Experiment Name: At_Drought_Soil_Dry_P Parameter: Treatment Value: Drought vs. No Drought
  misc_feature: MA Experiment ID: 20001557 Result: Down-regulated in Transcription
  misc_feature: MA Experiment 20001557 PARAMETER Experiment Name: At_Drought_Soil_Dry_P Parameter: Age (day) Value: 27
  misc_feature: MA Experiment 20001557 PARAMETER Experiment Name: At_Drought_Soil_Dry_P Parameter: Organism Value: A. thaliana
  misc_feature: MA Experiment 20001557 PARAMETER Experiment Name: At_Drought_Soil_Dry_P Parameter: Plant Line Value: WS
  misc_feature: MA Experiment 20001557 PARAMETER Experiment Name: At_Drought_Soil_Dry_P Parameter: Post Timepoint (hr) Value: 3
  misc_feature: MA Experiment 20001557 PARAMETER Experiment Name: At_Drought_Soil_Dry_P Parameter: Post-Treatment Value: Re-Water vs. No Drought
  misc_feature: MA Experiment 20001557 PARAMETER Experiment Name: At_Drought_Soil_Dry_P Parameter: Timepoint (day) Value: 13
  misc_feature: MA Experiment 20001557 PARAMETER Experiment Name: At_Drought_Soil_Dry_P Parameter: Treatment Value: Drought vs. No Drought
  misc_feature: MA Experiment ID: 20001558 Result: Down-regulated in Transcription
  misc_feature: MA Experiment 20001558 PARAMETER Experiment Name: At_Drought_Soil_Dry_P Parameter: Age (day) Value: 27
  misc_feature: MA Experiment 20001558 PARAMETER Experiment Name: At_Drought_Soil_Dry_P Parameter: Organism Value: A. thaliana
  misc_feature: MA Experiment 20001558 PARAMETER Experiment Name: At_Drought_Soil_Dry_P Parameter: Plant Line Value: WS
  misc_feature: MA Experiment 20001558 PARAMETER Experiment Name: At_Drought_Soil_Dry_P Parameter: Post Timepoint (hr) Value: 6
  misc_feature: MA Experiment 20001558 PARAMETER Experiment Name: At_Drought_Soil_Dry_P Parameter: Post-Treatment Value: Re-Water vs. No Drought
  misc_feature: MA Experiment 20001558 PARAMETER Experiment Name: At_Drought_Soil_Dry_P Parameter: Timepoint (day) Value: 13
  misc_feature: MA Experiment 20001558 PARAMETER Experiment Name: At_Drought_Soil_Dry_P Parameter: Treatment Value: Drought vs. No Drought
  misc_feature: MA Experiment ID: 20001559 Result: Down-regulated in Transcription
  misc_feature: MA Experiment 20001559 PARAMETER Experiment Name: At_Drought_Soil_Dry_P Parameter: Age (day) Value: 28
  misc_feature: MA Experiment 20001559 PARAMETER Experiment Name: At_Drought_Soil_Dry_P Parameter: Organism Value: A. thaliana
  misc_feature: MA Experiment 20001559 PARAMETER Experiment Name: At_Drought_Soil_Dry_P Parameter: Plant Line Value: WS
  misc_feature: MA Experiment 20001559 PARAMETER Experiment Name: At_Drought_Soil_Dry_P Parameter: Post Timepoint (hr) Value: 29
  misc_feature: MA Experiment 20001559 PARAMETER Experiment Name: At_Drought_Soil_Dry_P Parameter: Post-Treatment Value: Re-Water vs. No Drought
  misc_feature: MA Experiment 20001559 PARAMETER Experiment Name: At_Drought_Soil_Dry_P Parameter: Timepoint (day) Value: 14
  misc_feature: MA Experiment 20001559 PARAMETER Experiment Name: At_Drought_Soil_Dry_P Parameter: Treatment Value: Drought vs. No Drought
  misc_feature: MA Experiment ID: 20001560 Result: Down-regulated in Transcription
  misc_feature: MA Experiment 20001560 PARAMETER Experiment Name: At_Drought_Soil_Dry_P Parameter: Age (day) Value: 28
  misc_feature: MA Experiment 20001560 PARAMETER Experiment Name: At_Drought_Soil_Dry_P Parameter: Organism Value: A. thaliana
  misc_feature: MA Experiment 20001560 PARAMETER Experiment Name: At_Drought_Soil_Dry_P Parameter: Plant Line Value: WS
  misc_feature: MA Experiment 20001560 PARAMETER Experiment Name: At_Drought_Soil_Dry_P Parameter: Post Timepoint (hr) Value: None
  misc_feature: MA Experiment 20001560 PARAMETER Experiment Name: At_Drought_Soil_Dry_P Parameter: Post-Treatment Value: None
  misc_feature: MA Experiment 20001560 PARAMETER Experiment Name: At_Drought_Soil_Dry_P Parameter: Timepoint (day) Value: 14
  misc_feature: MA Experiment 20001560 PARAMETER Experiment Name: At_Drought_Soil_Dry_P Parameter: Treatment Value: Drought vs. No Drought
  misc_feature: MA Experiment ID: 20001757 Result: Down-regulated in Transcription
  misc_feature: MA Experiment 20001757 PARAMETER Experiment Name: At_50mM_NH4NO3_L-to-H_P Parameter: Timepoint (hr) Value: 6
  misc_feature: MA Experiment 20001757 PARAMETER Experiment Name: At_50mM_NH4NO3_L-to-H_P Parameter: Tissue Value: Leaf
  misc_feature: MA Experiment 20001757 PARAMETER Experiment Name: At_50mM_NH4NO3_L-to-H_P Parameter: Treatment Value: 50mM NH4NO3 vs 100mM Mannitol
  misc_feature: MA Experiment ID: 20001906 Result: Up-regulated in Transcription
  misc_feature: MA Experiment 20001906 PARAMETER Experiment Name: At_Drought_Reproduction_P Parameter: Age (day) Value: 35
  misc_feature: MA Experiment 20001906 PARAMETER Experiment Name: At_Drought_Reproduction_P Parameter: Organism Value: A. thaliana
  misc_feature: MA Experiment 20001906 PARAMETER Experiment Name: At_Drought_Reproduction_P Parameter: Plant Line Value: WS
  misc_feature: MA Experiment 20001906 PARAMETER Experiment Name: At_Drought_Reproduction_P Parameter: Timepoint (day) Value: 5
  misc_feature: MA Experiment 20001906 PARAMETER Experiment Name: At_Drought_Reproduction_P Parameter: Tissue Value: Siliques
  misc_feature: MA Experiment 20001906 PARAMETER Experiment Name: At_Drought_Reproduction_P Parameter: Treatment Value: Drought vs. No Drought
  misc_feature: MA Experiment ID: 20001908 Result: Up-regulated in Transcription
  misc_feature: MA Experiment 20001908 PARAMETER Experiment Name: At_Drought_Reproduction_P Parameter: Age (day) Value: 40
  misc_feature: MA Experiment 20001908 PARAMETER Experiment Name: At_Drought_Reproduction_P Parameter: Organism Value: A. thaliana
  misc_feature: MA Experiment 20001908 PARAMETER Experiment Name: At_Drought_Reproduction_P Parameter: Plant Line Value: WS
  misc_feature: MA Experiment 20001908 PARAMETER Experiment Name: At_Drought_Reproduction_P Parameter: Timepoint (day) Value: 10
  misc_feature: MA Experiment 20001908 PARAMETER Experiment Name: At_Drought_Reproduction_P Parameter: Tissue Value: Siliques
  misc_feature: MA Experiment 20001908 PARAMETER Experiment Name: At_Drought_Reproduction_P Parameter: Treatment Value: Drought vs. No Drought

SEQ ID NO: 93216 - protein, 99 aa, Arabidopsis thaliana; identical to SEQ ID NO: 89460
  peptide (1)..(99): Ceres Seq. ID no. 12718659
  misc_feature (3)..(81): Homolog of NCBI NO: 15218739 NR Description: unknown protein; protein id: At1g03210.1,
  misc_feature (3)..(81): Homolog of NCBI NO: 15236203 NR Description: putative protein; protein id: At4g02860.1, by cDNA: gi_20466357 [Arabidopsis thaliana]
  misc_feature (3)..(81): Homolog of NCBI NO: 20466358 NR Description: putative protein [Arabidopsis thaliana]
  misc_feature (1)..(81): Homolog of NCBI NO: 15236201 NR Description: putative protein; protein id: At4g02850.1
  misc_feature (6)..(81): Homolog of NCBI NO: 34903112 NR Description: unnamed protein product [Oryza sativa (japonica group)] >gi|6630683|dbj|BAA88529.1| unnamed protein product
  misc_feature (14)..(81): Homolog of NCBI NO: 23028680 NR Description: hypothetical protein [Microbulbifer degradans
  misc_feature (10)..(81): Homolog of NCBI NO: 23017885 NR Description: hypothetical protein [Thermobifida fusca]
  misc_feature (14)..(79): Homolog of NCBI NO: 17229436 NR Description: hypothetical protein [Nostoc sp. PCC 7120]
  misc_feature (12)..(81): Homolog of NCBI NO: 15612846 NR Description: BH0283~unknown conserved protein [Bacillus
  misc_feature (12)..(79): Homolog of NCBI NO: 39585666 NR Description: Hypothetical protein CBG03344 [Caenorhabditis

SEQ ID NO: 93217 - protein, 97 aa, Arabidopsis thaliana; identical to SEQ ID NO: 36732
  peptide (1)..(97): Ceres Seq. ID no. 12718660
  misc_feature (1)..(79): Homolog of NCBI NO: 15218739 NR Description: unknown protein; protein id: At1g03210.1,
  misc_feature (1)..(79): Homolog of NCBI NO: 15236203 NR Description: putative protein; protein id: At4g02860.1, by cDNA: gi_20466357 [Arabidopsis thaliana]
  misc_feature (1)..(79): Homolog of NCBI NO: 20466358 NR Description: putative protein [Arabidopsis thaliana]
  misc_feature (1)..(79): Homolog of NCBI NO: 15236201 NR Description: putative protein; protein id: At4g02850.1
  misc_feature (4)..(79): Homolog of NCBI NO: 34903112 NR Description: unnamed protein product [Oryza sativa (japonica group)] >gi|6630683|dbj|BAA88529.1| unnamed protein product
  misc_feature (12)..(79): Homolog of NCBI NO: 23028680 NR Description: hypothetical protein [Microbulbifer degradans
  misc_feature (8)..(79): Homolog of NCBI NO: 23017885 NR Description: hypothetical protein [Thermobifida fusca]
  misc_feature (12)..(77): Homolog of NCBI NO: 17229436 NR Description: hypothetical protein [Nostoc sp. PCC 7120]
  misc_feature (10)..(79): Homolog of NCBI NO: 15612846 NR Description: BH0283~unknown conserved protein [Bacillus
  misc_feature (10)..(77): Homolog of NCBI NO: 39585666 NR Description: Hypothetical protein CBG03344 [Caenorhabditis

SEQ ID NO: 93218 - protein, 69 aa, Arabidopsis thaliana; identical to SEQ ID NO: 89462
  peptide (1)..(69): Ceres Seq. ID no. 12718661

SEQ ID NO: 93219 - DNA, 1194 bp, Arabidopsis thaliana; identical to SEQ ID NO: 89463
  misc_feature (1)..(1194): Ceres Seq. ID no. 12718662
  misc_feature: MA Experiment ID: 20000179 Result: Down-regulated in Transcription
  misc_feature: MA Experiment 20000179 PARAMETER Experiment Name: At_Germinating_Seeds_P Parameter: Age (hr) Value: 6 vs. 0
  misc_feature: MA Experiment 20000179 PARAMETER Experiment Name: At_Germinating_Seeds_P Parameter: Tissue Value: Germinating Seeds
  misc_feature: MA Experiment ID: 20000180 Result: Down-regulated in Transcription
  misc_feature: MA Experiment 20000180 PARAMETER Experiment Name: At_Germinating_Seeds_P Parameter: Age (hr) Value: 24 vs. 0
  misc_feature: MA Experiment 20000180 PARAMETER Experiment Name: At_Germinating_Seeds_P Parameter: Tissue Value: Germinating Seeds
  misc_feature: MA Experiment ID: 20000184 Result: Up-regulated in Transcription
  misc_feature: MA Experiment 20000184 PARAMETER Experiment Name: At_Shoots__P Parameter: Age (day) Value: 7
  misc_feature: MA Experiment 20000184 PARAMETER Experiment Name: At_Shoots__P Parameter: Tissue Value: Shoots vs. Whole Plant
  misc_feature: MA Experiment ID: 20000437 Result: Down-regulated in Transcription
  misc_feature: MA Experiment 20000437 PARAMETER Experiment Name: At_Drought_P Parameter: Age (day) Value: 8
  misc_feature: MA Experiment 20000437 PARAMETER Experiment Name: At_Drought_P Parameter: Organism Value: A. thaliana
  misc_feature: MA Experiment 20000437 PARAMETER Experiment Name: At_Drought_P Parameter: Plant Line Value: WS
  misc_feature: MA Experiment 20000437 PARAMETER Experiment Name: At_Drought_P Parameter: Timepoint (hr) Value: 24
  misc_feature: MA Experiment 20000437 PARAMETER Experiment Name: At_Drought_P Parameter: Tissue Value: Whole Plant
  misc_feature: MA Experiment 20000437 PARAMETER Experiment Name: At_Drought_P Parameter: Treatment Value: Drought vs. No Drought
  misc_feature: MA Experiment ID: 20000438 Result: Up-regulated in Transcription
  misc_feature: MA Experiment 20000438 PARAMETER Experiment Name: At_Shoots__P Parameter: Age (day) Value: 14
  misc_feature: MA Experiment 20000438 PARAMETER Experiment Name: At_Shoots__P Parameter: Tissue Value: Shoots vs. Whole Plant
  misc_feature: MA Experiment ID: 20001248 Result: Down-regulated in Transcription
  misc_feature: MA Experiment 20001248 PARAMETER Experiment Name: At_Far-red-induction_P Parameter: Age (day) Value: 7
  misc_feature: MA Experiment 20001248 PARAMETER Experiment Name: At_Far-red-induction_P Parameter: Light Value: Far-red vs. White
  misc_feature: MA Experiment 20001248 PARAMETER Experiment Name: At_Far-red-induction_P Parameter: Organism Value: A. thaliana
  misc_feature: MA Experiment 20001248 PARAMETER Experiment Name: At_Far-red-induction_P Parameter: Plant Line Value: Columbia
  misc_feature: MA Experiment 20001248 PARAMETER Experiment Name: At_Far-red-induction_P Parameter: Timepoint (hr) Value: 4
  misc_feature: MA Experiment 20001248 PARAMETER Experiment Name: At_Far-red-induction_P Parameter: Tissue Value: Whole Plant

SEQ ID NO: 93220 - protein, 397 aa, Arabidopsis thaliana; identical to SEQ ID NO: 89464
  peptide (1)..(397): Ceres Seq. ID no. 12718663
  misc_feature (241)..(264): Pfam Name: Leucine Rich Repeat Pfam Description: Leucine Rich Repeat
  misc_feature (1)..(397): Homolog of NCBI NO: 30678566 NR Description: leucine rich repeat protein family [Arabidopsis
  misc_feature (3)..(397): Homolog of NCBI NO: 25406734 NR Description: protein F21B7.6 [imported] - Arabidopsis thaliana F21B7.6 [Arabidopsis thaliana]
  misc_feature (3)..(397): Homolog of NCBI NO: 15236232 NR Description: leucine rich repeat protein family; protein id:
  misc_feature (13)..(395): Homolog of NCBI NO: 15229088 NR Description: leucine rich repeat protein family; protein id:
  misc_feature (9)..(393): Homolog of NCBI NO: 15231699 NR Description: leucine rich repeat protein family; protein id:
  misc_feature (33)..(373): Homolog of NCBI NO: 15241760 NR Description: putative protein; protein id: At5g62230.1
  misc_feature (34)..(352): Homolog of NCBI NO: 15225286 NR Description: putative receptor-like protein kinase, ERECTA; id: At2g26330.1, supported by cDNA: gi_1345131, supported by
  misc_feature (33)..(347): Homolog of NCBI NO: 8809636 NR Description: receptor-like protein kinase [Arabidopsis
  misc_feature (87)..(347): Homolog of NCBI NO: 3894385 NR Description: Hcr2-0A [Lycopersicon esculentum]
  misc_feature (12)..(297): Homolog of NCBI NO: 15217600 NR Description: leucine rich repeat protein family; protein id: [Arabidopsis thaliana] >gi|25511729|pir||A86460 99.9K

SEQ ID NO: 93221 - protein, 396 aa, Arabidopsis thaliana; identical to SEQ ID NO: 89465
  peptide (1)..(396): Ceres Seq. ID no. 12718664
  misc_feature (240)..(263): Pfam Name: Leucine Rich Repeat Pfam Description: Leucine Rich Repeat
  misc_feature (1)..(396): Homolog of NCBI NO: 30678566 NR Description: leucine rich repeat protein family [Arabidopsis
  misc_feature (2)..(396): Homolog of NCBI NO: 25406734 NR Description: protein F21B7.6 [imported] - Arabidopsis thaliana F21B7.6 [Arabidopsis thaliana]
  misc_feature (2)..(396): Homolog of NCBI NO: 15236232 NR Description: leucine rich repeat protein family; protein id:
  misc_feature (12)..(394): Homolog of NCBI NO: 15229088 NR Description: leucine rich repeat protein family; protein id:
  misc_feature (8)..(392): Homolog of NCBI NO: 15231699 NR Description: leucine rich repeat protein family; protein id:
  misc_feature (32)..(372): Homolog of NCBI NO: 15241760 NR Description: putative protein; protein id: At5g62230.1
  misc_feature (33)..(351): Homolog of NCBI NO: 15225286 NR Description: putative receptor-like protein kinase, ERECTA; id: At2g26330.1, supported by cDNA: gi_1345131, supported by
  misc_feature (32)..(346): Homolog of NCBI NO: 8809636 NR Description: receptor-like protein kinase [Arabidopsis
  misc_feature (86)..(346): Homolog of NCBI NO: 3894385 NR Description: Hcr2-0A [Lycopersicon esculentum]
  misc_feature (11)..(296): Homolog of NCBI NO: 15217600 NR Description: leucine rich repeat protein family; protein id: [Arabidopsis thaliana] >gi|25511729|pir||A86460 99.9K

SEQ ID NO: 93222 - protein, 395 aa, Arabidopsis thaliana; identical to SEQ ID NO: 80693
  peptide (1)..(395): Ceres Seq. ID no. 12718665
  misc_feature (239)..(262): Pfam Name: Leucine Rich Repeat Pfam Description: Leucine Rich Repeat
  misc_feature (1)..(395): Homolog of NCBI NO: 30678566 NR Description: leucine rich repeat protein family [Arabidopsis
  misc_feature (1)..(395): Homolog of NCBI NO: 25406734 NR Description: protein F21B7.6 [imported] - Arabidopsis thaliana F21B7.6 [Arabidopsis thaliana]
  misc_feature (1)..(395): Homolog of NCBI NO: 15236232 NR Description: leucine rich repeat protein family; protein id:
  misc_feature (11)..(393): Homolog of NCBI NO: 15229088 NR Description: leucine rich repeat protein family; protein id:
  misc_feature (7)..(391): Homolog of NCBI NO: 15231699 NR Description: leucine rich repeat protein family; protein id:
  misc_feature (31)..(371): Homolog of NCBI NO: 15241760 NR Description: putative protein; protein id: At5g62230.1
  misc_feature (32)..(350): Homolog of NCBI NO: 15225286 NR Description: putative receptor-like protein kinase, ERECTA; id: At2g26330.1, supported by cDNA: gi_1345131, supported by
  misc_feature (31)..(345): Homolog of NCBI NO: 8809636 NR Description: receptor-like protein kinase [Arabidopsis
  misc_feature (85)..(345): Homolog of NCBI NO: 3894385 NR Description: Hcr2-0A [Lycopersicon esculentum]
  misc_feature (10)..(295): Homolog of NCBI NO: 15217600 NR Description: leucine rich repeat protein family; protein id: [Arabidopsis thaliana] >gi|25511729|pir||A86460 99.9K

SEQ ID NO: 93223 - protein, 385 aa, Arabidopsis thaliana; identical to SEQ ID NO: 80694
  peptide (1)..(385): Ceres Seq. ID no. 12718666
  misc_feature (229)..(252): Pfam Name: Leucine Rich Repeat Pfam Description: Leucine Rich Repeat
  misc_feature (1)..(385): Homolog of NCBI NO: 30678566 NR Description: leucine rich repeat protein family [Arabidopsis
  misc_feature (1)..(385): Homolog of NCBI NO: 25406734 NR Description: protein F21B7.6 [imported] - Arabidopsis thaliana F21B7.6 [Arabidopsis thaliana]
  misc_feature (1)..(385): Homolog of NCBI NO: 15236232 NR Description: leucine rich repeat protein family; protein id:
  misc_feature (1)..(383): Homolog of NCBI NO: 15229088 NR Description: leucine rich repeat protein family; protein id:
  misc_feature (1)..(381): Homolog of NCBI NO: 15231699 NR Description: leucine rich repeat protein family; protein id:
  misc_feature (21)..(361): Homolog of NCBI NO: 15241760 NR Description: putative protein; protein id: At5g62230.1
  misc_feature (22)..(340): Homolog of NCBI NO: 15225286 NR Description: putative receptor-like protein kinase, ERECTA; id: At2g26330.1, supported by cDNA: gi_1345131, supported by
  misc_feature (21)..(335): Homolog of NCBI NO: 8809636 NR Description: receptor-like protein kinase [Arabidopsis
  misc_feature (75)..(335): Homolog of NCBI NO: 3894385 NR Description: Hcr2-0A [Lycopersicon esculentum]
  misc_feature (1)..(285): Homolog of NCBI NO: 15217600 NR Description: leucine rich repeat protein family; protein id: [Arabidopsis thaliana] >gi|25511729|pir||A86460 99.9K

SEQ ID NO: 93224 - DNA, 1023 bp, Arabidopsis thaliana; identical to SEQ ID NO: 89468
  misc_feature (1)..(1023): Ceres Seq. ID no. 12718950
  misc_feature: MA Experiment ID: 20000314 Result: Up-regulated in Transcription
  misc_feature: MA Experiment 20000314 PARAMETER Experiment Name: At_14day_Shoots-Roots_Sub_P Parameter: Age (day) Value: 14
  misc_feature: MA Experiment 20000314 PARAMETER Experiment Name: At_14day_Shoots-Roots_Sub_P Parameter: Organism Value: A. thaliana
  misc_feature: MA Experiment 20000314 PARAMETER Experiment Name: At_14day_Shoots-Roots_Sub_P Parameter: Plant Line Value: WS
  misc_feature: MA Experiment 20000314 PARAMETER Experiment Name: At_14day_Shoots-Roots_Sub_P Parameter: Tissue Value: Roots vs. Whole Plant

SEQ ID NO: 93225 - protein, 340 aa, Arabidopsis thaliana; identical to SEQ ID NO: 89469
  peptide (1)..(340): Ceres Seq. ID no. 12718951
  misc_feature (17)..(303): Pfam Name: Exostosin family Pfam Description: Exostosin family
  misc_feature (1)..(340): Homolog of NCBI NO: 11358246 NR Description: hypothetical protein T27B3.50 - Arabidopsis >gi|6735291|emb|CAB68119.1| putative protein [Arabidopsis
  misc_feature (1)..(340): Homolog of NCBI NO: 30690502 NR Description: Exostosin family [Arabidopsis thaliana]
  misc_feature (1)..(338): Homolog of NCBI NO: 15242798 NR Description: Exostosin family; protein id: At5g33290.1
  misc_feature (1)..(338): Homolog of NCBI NO: 15146187 NR Description: AT5g33290/F19N2_10 [Arabidopsis thaliana]
  misc_feature (2)..(339): Homolog of NCBI NO: 15241301 NR Description: Exostosin family; protein id: At5g20260.1
  misc_feature (2)..(339): Homolog of NCBI NO: 15238967 NR Description: Exostosin family; protein id: At5g11130.1 thaliana] >gi|8953375|emb|CAB96648.1| putative protein
  misc_feature (2)..(338): Homolog of NCBI NO: 9758008 NR Description: contains similarity to limonene
  misc_feature (2)..(338): Homolog of NCBI NO: 15237526 NR Description: putative protein; protein id: At5g03800.1
  misc_feature (2)..(338): Homolog of NCBI NO: 15231488 NR Description: Exostosin family; protein id: At3g07620.1 thaliana] >gi|6466945|gb|AAF13080.1|AC009176_7 hypothetical
  misc_feature (2)..(338): Homolog of NCBI NO: 34394611 NR Description: putative pectin-glucuronyltransferase [Oryza

SEQ ID NO: 93226 - protein, 301 aa, Arabidopsis thaliana; identical to SEQ ID NO: 89470
  peptide (1)..(301): Ceres Seq. ID no. 12718952
  misc_feature (1)..(264): Pfam Name: Exostosin family Pfam Description: Exostosin family
  misc_feature (1)..(301): Homolog of NCBI NO: 11358246 NR Description: hypothetical protein T27B3.50 - Arabidopsis >gi|6735291|emb|CAB68119.1| putative protein [Arabidopsis
  misc_feature (1)..(301): Homolog of NCBI NO: 30690502 NR Description: Exostosin family [Arabidopsis thaliana]
  misc_feature (1)..(299): Homolog of NCBI NO: 15242798 NR Description: Exostosin family; protein id: At5g33290.1
  misc_feature (1)..(299): Homolog of NCBI NO: 15146187 NR Description: AT5g33290/F19N2_10 [Arabidopsis thaliana]
  misc_feature (1)..(300): Homolog of NCBI NO: 15241301 NR Description: Exostosin family; protein id: At5g20260.1
  misc_feature (1)..(300): Homolog of NCBI NO: 15238967 NR Description: Exostosin family; protein id: At5g11130.1 thaliana] >gi|8953375|emb|CAB96648.1| putative protein
  misc_feature (1)..(299): Homolog of NCBI NO: 9758008 NR Description: contains similarity to limonene
  misc_feature (1)..(299): Homolog of NCBI NO: 15237526 NR Description: putative protein; protein id: At5g03800.1
  misc_feature (1)..(299): Homolog of NCBI NO: 15231488 NR Description: Exostosin family; protein id: At3g07620.1 thaliana] >gi|6466945|gb|AAF13080.1|AC009176_7 hypothetical
  misc_feature (1)..(299): Homolog of NCBI NO: 34394611 NR Description: putative pectin-glucuronyltransferase [Oryza

SEQ ID NO: 93227 - protein, 227 aa, Arabidopsis thaliana; identical to SEQ ID NO: 89471
  peptide (1)..(227): Ceres Seq. ID no. 12718953
  misc_feature (1)..(190): Pfam Name: Exostosin family Pfam Description: Exostosin family
  misc_feature (1)..(227): Homolog of NCBI NO: 11358246 NR Description: hypothetical protein T27B3.50 - Arabidopsis >gi|6735291|emb|CAB68119.1| putative protein [Arabidopsis
  misc_feature (1)..(227): Homolog of NCBI NO: 30690502 NR Description: Exostosin family [Arabidopsis thaliana]
  misc_feature (1)..(225): Homolog of NCBI NO: 15242798 NR Description: Exostosin family; protein id: At5g33290.1
  misc_feature (1)..(225): Homolog of NCBI NO: 15146187 NR Description: AT5g33290/F19N2_10 [Arabidopsis thaliana]
  misc_feature (1)..(226): Homolog of NCBI NO: 15241301 NR Description: Exostosin family; protein id: At5g20260.1
  misc_feature (1)..(226): Homolog of NCBI NO: 15238967 NR Description: Exostosin family; protein id: At5g11130.1 thaliana] >gi|8953375|emb|CAB96648.1| putative protein
  misc_feature (1)..(225): Homolog of NCBI NO: 9758008 NR Description: contains similarity to limonene
  misc_feature (1)..(225): Homolog of NCBI NO: 15237526 NR Description: putative protein; protein id: At5g03800.1
  misc_feature (1)..(225): Homolog of NCBI NO: 15231488 NR Description: Exostosin family; protein id: At3g07620.1 thaliana] >gi|6466945|gb|AAF13080.1|AC009176_7 hypothetical
  misc_feature (1)..(225): Homolog of NCBI NO: 34394611 NR Description: putative pectin-glucuronyltransferase [Oryza

SEQ ID NO: 93228 - DNA, 2008 bp, Arabidopsis thaliana; identical to SEQ ID NO: 89472
  misc_feature (1)..(2008): Ceres Seq. ID no. 12719052
  misc_feature: MA Experiment ID: 20000169 Result: Up-regulated in Transcription
  misc_feature: MA Experiment 20000169 PARAMETER Experiment Name: At_100uM_ABA_P Parameter: Age (day) Value: 14
  misc_feature: MA Experiment 20000169 PARAMETER Experiment Name: At_100uM_ABA_P Parameter: Organism Value: A. thaliana
  misc_feature: MA Experiment 20000169 PARAMETER Experiment Name: At_100uM_ABA_P Parameter: Plant Line Value: WS
  misc_feature: MA Experiment 20000169 PARAMETER Experiment Name: At_100uM_ABA_P Parameter: Timepoint (hr) Value: 6
  misc_feature: MA Experiment 20000169 PARAMETER Experiment Name: At_100uM_ABA_P Parameter: Tissue Value: Aerial
  misc_feature: MA Experiment 20000169 PARAMETER Experiment Name: At_100uM_ABA_P Parameter: Treatment Value: 100uM ABA vs. No Treatment
  misc_feature: MA Experiment ID: 20000171 Result: Up-regulated in Transcription
  misc_feature: MA Experiment 20000171 PARAMETER Experiment Name: At_42deg_Heat_P Parameter: Age (day) Value: 14
  misc_feature: MA Experiment 20000171 PARAMETER Experiment Name: At_42deg_Heat_P Parameter: Organism Value: A. thaliana
  misc_feature: MA Experiment 20000171 PARAMETER Experiment Name: At_42deg_Heat_P Parameter: Plant Line Value: WS
  misc_feature: MA Experiment 20000171 PARAMETER Experiment Name: At_42deg_Heat_P Parameter: Temperature (deg C) Value: 42 vs. 22
  misc_feature: MA Experiment 20000171 PARAMETER Experiment Name: At_42deg_Heat_P Parameter: Timepoint (hr) Value: 1
  misc_feature: MA Experiment 20000171 PARAMETER Experiment Name: At_42deg_Heat_P Parameter: Tissue Value: Aerial
  misc_feature: MA Experiment ID: 20000173 Result: Up-regulated in Transcription
  misc_feature: MA Experiment 20000173 PARAMETER Experiment Name: At_42deg_Heat_P Parameter: Age (day) Value: 14
  misc_feature: MA Experiment 20000173 PARAMETER Experiment Name: At_42deg_Heat_P Parameter: Organism Value: A. thaliana
  misc_feature: MA Experiment 20000173 PARAMETER Experiment Name: At_42deg_Heat_P Parameter: Plant Line Value: WS
  misc_feature: MA Experiment 20000173 PARAMETER Experiment Name: At_42deg_Heat_P Parameter: Temperature (deg C) Value: 42 vs. 22
  misc_feature: MA Experiment 20000173 PARAMETER Experiment Name: At_42deg_Heat_P Parameter: Timepoint (hr) Value: 6
  misc_feature: MA Experiment 20000173 PARAMETER Experiment Name: At_42deg_Heat_P Parameter: Tissue Value: Aerial
  misc_feature: MA Experiment ID: 20000180 Result: Up-regulated in Transcription
  misc_feature: MA Experiment 20000180 PARAMETER Experiment Name: At_Germinating_Seeds_P Parameter: Age (hr) Value: 24 vs. 0
  misc_feature: MA Experiment 20000180 PARAMETER Experiment Name: At_Germinating_Seeds_P Parameter: Tissue Value: Germinating Seeds
  misc_feature: MA Experiment ID: 20000184 Result: Up-regulated in Transcription
  misc_feature: MA Experiment 20000184 PARAMETER Experiment Name: At_Shoots__P Parameter: Age (day) Value: 7
  misc_feature: MA Experiment 20000184 PARAMETER Experiment Name: At_Shoots__P Parameter: Tissue Value: Shoots vs. Whole Plant
  misc_feature: MA Experiment ID: 20000234 Result: Down-regulated in Transcription
  misc_feature: MA Experiment 20000234 PARAMETER Experiment Name: At_Siliques_P Parameter: Age (day) Value: 21
  misc_feature: MA Experiment 20000234 PARAMETER Experiment Name: At_Siliques_P Parameter: Organism Value: A. thaliana
  misc_feature: MA Experiment 20000234 PARAMETER Experiment Name: At_Siliques_P Parameter: Plant Line Value: WS
  misc_feature: MA Experiment 20000234 PARAMETER Experiment Name: At_Siliques_P Parameter: Tissue Value: Less Than 5mm Siliques vs. Whole Plant
  misc_feature: MA Experiment ID: 20000265 Result: Down-regulated in Transcription
  misc_feature: MA Experiment 20000265 PARAMETER Experiment Name: At_Open_Flower_P Parameter: Age (day) Value: 21
  misc_feature: MA Experiment 20000265 PARAMETER Experiment Name: At_Open_Flower_P Parameter: Plant Line Value: WS
  misc_feature: MA Experiment 20000265 PARAMETER Experiment Name: At_Open_Flower_P Parameter: Tissue Value: Closed Flower vs. Whole Plant
  misc_feature: MA Experiment ID: 20000269 Result: Down-regulated in Transcription
  misc_feature: MA Experiment 20000269 PARAMETER Experiment Name: At_1mM_KNO3_L-vs-H_Roots_P Parameter: Age (day) Value: 7,10,12
  misc_feature: MA Experiment 20000269 PARAMETER Experiment Name: At_1mM_KNO3_L-vs-H_Roots_P Parameter: Organism Value: A. thaliana
  misc_feature: MA Experiment 20000269 PARAMETER Experiment Name: At_1mM_KNO3_L-vs-H_Roots_P Parameter: Plant Line Value: WS
  misc_feature: MA Experiment 20000269 PARAMETER Experiment Name: At_1mM_KNO3_L-vs-H_Roots_P Parameter: Timepoint (day) Value: 7,10,12
  misc_feature: MA Experiment 20000269 PARAMETER Experiment Name: At_1mM_KNO3_L-vs-H_Roots_P Parameter: Tissue Value: Roots
  misc_feature: MA Experiment 20000269 PARAMETER Experiment Name: At_1mM_KNO3_L-vs-H_Roots_P Parameter: Treatment Value: 1mM KNO3 vs. 50mM KNO3
  misc_feature: MA Experiment ID: 20000438 Result: Up-regulated in Transcription
  misc_feature: MA Experiment 20000438 PARAMETER Experiment Name: At_Shoots__P Parameter: Age (day) Value: 14
  misc_feature: MA Experiment 20000438 PARAMETER Experiment Name: At_Shoots__P Parameter: Tissue Value: Shoots vs. Whole Plant
  misc_feature: MA Experiment ID: 20000495 Result: Up-regulated in Transcription
  misc_feature: MA Experiment 20000495 PARAMETER Experiment Name: At_Guard_Cells_P Parameter: Harvest Date Value: 8/2/2002
  misc_feature: MA Experiment 20000495 PARAMETER Experiment Name: At_Guard_Cells_P Parameter: Organism Value: A. thaliana
  misc_feature: MA Experiment 20000495 PARAMETER Experiment Name: At_Guard_Cells_P Parameter: Tissue Value: Guard Cells vs. Leaves
  misc_feature: MA Experiment ID: 20000576 Result: Up-regulated in Transcription
  misc_feature: MA Experiment 20000576 PARAMETER Experiment Name: At_100uM_ABA_Mutants__P Parameter: Organism Value: A. thaliana
  misc_feature: MA Experiment 20000576 PARAMETER Experiment Name: At_100uM_ABA_Mutants__P Parameter: Plant Line Value: CS23
  misc_feature: MA Experiment 20000576 PARAMETER Experiment Name: At_100uM_ABA_Mutants__P Parameter: Timepoint (hr) Value: 6
  misc_feature: MA Experiment 20000576 PARAMETER Experiment Name: At_100uM_ABA_Mutants__P Parameter: Tissue Value: Whole Plant
  misc_feature: MA Experiment 20000576 PARAMETER Experiment Name: At_100uM_ABA_Mutants__P Parameter: Treatment Value: 1uM ABA vs. No Treatment
  misc_feature: MA Experiment ID: 20000794 Result: Up-regulated in Transcription
  misc_feature: MA Experiment 20000794 PARAMETER Experiment Name: At_Petals_P Parameter: Age (day) Value: 23-25 days
  misc_feature: MA Experiment 20000794 PARAMETER Experiment Name: At_Petals_P Parameter: Plant Line Value: WS
  misc_feature: MA Experiment 20000794 PARAMETER Experiment Name: At_Petals_P Parameter: Tissue Value: Petals vs. Whole plant
  misc_feature: MA Experiment ID: 20001248 Result: Down-regulated in Transcription
  misc_feature: MA Experiment 20001248 PARAMETER Experiment Name: At_Far-red-induction_P Parameter: Age (day) Value: 7
  misc_feature: MA Experiment 20001248 PARAMETER Experiment Name: At_Far-red-induction_P Parameter: Light Value: Far-red vs. White
  misc_feature: MA Experiment 20001248 PARAMETER Experiment Name: At_Far-red-induction_P Parameter: Organism Value: A. thaliana
  misc_feature: MA Experiment 20001248 PARAMETER Experiment Name: At_Far-red-induction_P Parameter: Plant Line Value: Columbia
  misc_feature: MA Experiment 20001248 PARAMETER Experiment Name: At_Far-red-induction_P Parameter: Timepoint (hr) Value: 4
  misc_feature: MA Experiment 20001248 PARAMETER Experiment Name: At_Far-red-induction_P Parameter: Tissue Value: Whole Plant
  misc_feature: MA Experiment ID: 20001450 Result: Up-regulated in Transcription
  misc_feature: MA Experiment 20001450 PARAMETER Experiment Name: At_Far-red-induction_P Parameter: Age (day) Value: 7
  misc_feature: MA Experiment 20001450 PARAMETER Experiment Name: At_Far-red-induction_P Parameter: Light Value: Far-red vs. White
  misc_feature: MA Experiment 20001450 PARAMETER Experiment Name: At_Far-red-induction_P Parameter: Organism Value: A. thaliana
  misc_feature: MA Experiment 20001450 PARAMETER Experiment Name: At_Far-red-induction_P Parameter: Plant Line Value: Columbia
  misc_feature: MA Experiment 20001450 PARAMETER Experiment Name: At_Far-red-induction_P Parameter: Timepoint (hr) Value: 8
  misc_feature: MA Experiment 20001450 PARAMETER Experiment Name: At_Far-red-induction_P Parameter: Tissue Value: Whole Plant
  misc_feature: MA Experiment ID: 20001457 Result: Down-regulated in Transcription
  misc_feature: MA Experiment 20001457 PARAMETER Experiment Name: At_50mM_NH4NO3_L-to-H_P Parameter: Age (day) Value: Undefined
  misc_feature: MA Experiment 20001457 PARAMETER Experiment Name: At_50mM_NH4NO3_L-to-H_P Parameter: Organism Value: Undefined
  misc_feature: MA Experiment 20001457 PARAMETER Experiment Name: At_50mM_NH4NO3_L-to-H_P Parameter: Plant Line Value: Undefined
  misc_feature: MA Experiment 20001457 PARAMETER Experiment Name: At_50mM_NH4NO3_L-to-H_P Parameter: Timepoint (hr) Value: 0.5
  misc_feature: MA Experiment 20001457 PARAMETER Experiment Name: At_50mM_NH4NO3_L-to-H_P Parameter: Tissue Value: Siliques
  misc_feature: MA Experiment 20001457 PARAMETER Experiment Name: At_50mM_NH4NO3_L-to-H_P Parameter: Treatment Value: 50mM NH4NO3 vs. 100mM Manitol
  misc_feature: MA Experiment ID: 20001557 Result: Down-regulated in Transcription
  misc_feature: MA Experiment 20001557 PARAMETER Experiment Name: At_Drought_Soil_Dry_P Parameter: Age (day) Value: 27
  misc_feature: MA Experiment 20001557 PARAMETER Experiment Name: At_Drought_Soil_Dry_P Parameter: Organism Value: A. thaliana
  misc_feature: MA Experiment 20001557 PARAMETER Experiment Name: At_Drought_Soil_Dry_P Parameter: Plant Line Value: WS
  misc_feature: MA Experiment 20001557 PARAMETER Experiment Name: At_Drought_Soil_Dry_P Parameter: Post Timepoint (hr) Value: 3
  misc_feature: MA Experiment 20001557 PARAMETER Experiment Name: At_Drought_Soil_Dry_P Parameter: Post-Treatment Value: Re-Water vs. No Drought
  misc_feature: MA Experiment 20001557 PARAMETER Experiment Name: At_Drought_Soil_Dry_P Parameter: Timepoint (day) Value: 13
  misc_feature: MA Experiment 20001557 PARAMETER Experiment Name: At_Drought_Soil_Dry_P Parameter: Treatment Value: Drought vs. No Drought
  misc_feature: MA Experiment ID: 20001904 Result: Up-regulated in Transcription
  misc_feature: MA Experiment 20001904 PARAMETER Experiment Name: At_Drought_Reproduction_P Parameter: Age (day) Value: 37
  misc_feature: MA Experiment 20001904 PARAMETER Experiment Name: At_Drought_Reproduction_P Parameter: Organism Value: A. thaliana
  misc_feature: MA Experiment 20001904 PARAMETER Experiment Name: At_Drought_Reproduction_P Parameter: Plant Line Value: WS
  misc_feature: MA Experiment 20001904 PARAMETER Experiment Name: At_Drought_Reproduction_P Parameter: Timepoint (day) Value: 7
  misc_feature: MA Experiment 20001904 PARAMETER Experiment Name: At_Drought_Reproduction_P Parameter: Tissue Value: Rosettes
  misc_feature: MA Experiment 20001904 PARAMETER Experiment Name: At_Drought_Reproduction_P Parameter: Treatment Value: Drought vs. No Drought

SEQ ID NO: 93229 - protein, 577 aa, Arabidopsis thaliana; identical to SEQ ID NO: 89473
  peptide (1)..(577): Ceres Seq. ID no. 12719053
  misc_feature (96)..(494): Pfam Name: POT family Pfam Description: POT family
  misc_feature (1)..(577): Homolog of NCBI NO: 30683214 NR Description: nitrate transporter -related [Arabidopsis
  misc_feature (1)..(577): Homolog of NCBI NO: 20466668 NR Description: putative nitrate transporter [Arabidopsis
  misc_feature (2)..(577): Homolog of NCBI NO: 25407841 NR Description: probable nitrate transporter [imported] - thaliana >gi|2760834|gb|AAB95302.1| putative nitrate transporter
  misc_feature (9)..(554): Homolog of NCBI NO: 34914014 NR Description: OJ1014_G12.22 [Oryza sativa (japonica
  misc_feature (2)..(570): Homolog of NCBI NO: 31075168 NR Description: dicarboxylate transporter [Alnus glutinosa]
  misc_feature (8)..(549): Homolog of NCBI NO: 28273096 NR Description: nitrate transporter [Nicotiana tabacum]
  misc_feature (8)..(549): Homolog of NCBI NO: 9581817 NR Description: putative low-affinity nitrate transporter
  misc_feature (6)..(549): Homolog of NCBI NO: 28273100 NR Description: nitrate transporter [Nicotiana tabacum]
  misc_feature (8)..(549): Homolog of NCBI NO: 28273094 NR Description: nitrate transporter [Nicotiana tabacum]
  misc_feature (6)..(549): Homolog of NCBI NO: 9581819 NR Description: putative low-affinity nitrate transporter

SEQ ID NO: 93230 - protein, 532 aa, Arabidopsis thaliana; identical to SEQ ID NO: 89474
  peptide (1)..(532): Ceres Seq. ID no. 12719054
  misc_feature (51)..(449): Pfam Name: POT family Pfam Description: POT family
  misc_feature (1)..(532): Homolog of NCBI NO: 30683214 NR Description: nitrate transporter -related [Arabidopsis
  misc_feature (1)..(532): Homolog of NCBI NO: 20466668 NR Description: putative nitrate transporter [Arabidopsis
  misc_feature (1)..(532): Homolog of NCBI NO: 25407841 NR Description: probable nitrate transporter [imported] - thaliana >gi|2760834|gb|AAB95302.1| putative nitrate transporter
  misc_feature (1)..(509): Homolog of NCBI NO: 34914014 NR Description: OJ1014_G12.22 [Oryza sativa (japonica
  misc_feature (1)..(525): Homolog of NCBI NO: 31075168 NR Description: dicarboxylate transporter [Alnus glutinosa]
  misc_feature (1)..(504): Homolog of NCBI NO: 28273096 NR Description: nitrate transporter [Nicotiana tabacum]
  misc_feature (1)..(504): Homolog of NCBI NO: 9581817 NR Description: putative low-affinity nitrate transporter
  misc_feature (1)..(504): Homolog of NCBI NO: 28273100 NR Description: nitrate transporter [Nicotiana tabacum]
  misc_feature (1)..(504): Homolog of NCBI NO: 28273094 NR Description: nitrate transporter [Nicotiana tabacum]
  misc_feature (1)..(504): Homolog of NCBI NO: 9581819 NR Description: putative low-affinity nitrate transporter

SEQ ID NO: 93231 - protein, 521 aa, Arabidopsis thaliana; identical to SEQ ID NO: 89475
  peptide (1)..(521): Ceres Seq. ID no. 12719055
  misc_feature (40)..(438): Pfam Name: POT family Pfam Description: POT family
  misc_feature (1)..(521): Homolog of NCBI NO: 30683214 NR Description: nitrate transporter -related [Arabidopsis
  misc_feature (1)..(521): Homolog of NCBI NO: 20466668 NR Description: putative nitrate transporter [Arabidopsis
  misc_feature (1)..(521): Homolog of NCBI NO: 25407841 NR Description: probable nitrate transporter [imported] - thaliana >gi|2760834|gb|AAB95302.1| putative nitrate transporter
  misc_feature (1)..(498): Homolog of NCBI NO: 34914014 NR Description: OJ1014_G12.22 [Oryza sativa (japonica
  misc_feature (1)..(514): Homolog of NCBI NO: 31075168 NR Description: dicarboxylate transporter [Alnus glutinosa]
  misc_feature (1)..(493): Homolog of NCBI NO: 28273096 NR Description: nitrate transporter [Nicotiana tabacum]
  misc_feature (1)..(493): Homolog of NCBI NO: 9581817 NR Description: putative low-affinity nitrate transporter
  misc_feature (1)..(493): Homolog of NCBI NO: 28273100 NR Description: nitrate transporter [Nicotiana tabacum]
  misc_feature (1)..(493): Homolog of NCBI NO: 28273094 NR Description: nitrate transporter [Nicotiana tabacum]
  misc_feature (1)..(493): Homolog of NCBI NO: 9581819 NR Description: putative low-affinity nitrate transporter

SEQ ID NO: 93232 - DNA, 2031 bp, Arabidopsis thaliana; identical to SEQ ID NO: 89476
  misc_feature (1)..(2031): Ceres Seq. ID no. 12719056
  misc_feature: MA Experiment ID: 20000184 Result: Up-regulated in Transcription
  misc_feature: MA Experiment 20000184 PARAMETER Experiment Name: At_Shoots__P Parameter: Age (day) Value: 7
  misc_feature: MA Experiment 20000184 PARAMETER Experiment Name: At_Shoots__P Parameter: Tissue Value: Shoots vs. Whole Plant

SEQ ID NO: 93233 - protein, 676 aa, Arabidopsis thaliana; identical to SEQ ID NO: 89477
  peptide (1)..(676): Ceres Seq. ID no. 12719057
  misc_feature (268)..(616): Pfam Name: Protein kinase domain Pfam Description: Protein kinase domain
  misc_feature (193)..(676): Homolog of NCBI NO: 34910268 NR Description: putative protein kinase [Oryza sativa (japonica group)] >gi|15128235|dbj|BAB62563.1| putative protein kinase
  misc_feature (176)..(634): Homolog of NCBI NO: 15241076 NR Description: serine threonine-specific protein kinase ATPK64
  misc_feature (156)..(634): Homolog of NCBI NO: 7446383 NR Description: probable protein kinase PK1 - potato
  misc_feature (176)..(634): Homolog of NCBI NO: 99749 NR Description: probable serine/threonine-specific protein kinase
  misc_feature (176)..(634): Homolog of NCBI NO: 15236802 NR Description: putative protein kinase; protein id: At4g26610.1, by cDNA: gi_17380933, supported by cDNA: gi_20258942 [Arabidopsis >gi|7488161|pir||T08927 probable protein kinase T15N24.60
  misc_feature (197)..(634): Homolog of NCBI NO: 1346057 NR Description: Protein kinase G11A >gi|100705|pir||B30311
  misc_feature (214)..(634): Homolog of NCBI NO: 15238798 NR Description: protein kinase (EC 2.7.1.37) 5 (pir||JN0505); id: At5g47750.1, supported by cDNA: gi_15809918, supported by gi_17064849, supported by cDNA: gi_20259909 [Arabidopsis
  misc_feature (214)..(634): Homolog of NCBI NO: 17064850 NR Description: protein kinase 5 [Arabidopsis thaliana]
  misc_feature (141)..(650): Homolog of NCBI NO: 125568 NR Description: Protein kinase PVPK-1 >gi|100013|pir||A30311
  misc_feature (204)..(642): Homolog of NCBI NO: 7488270 NR Description: protein kinase homolog T13E15.16 - Arabidopsis >gi|2344901|gb|AAC31841.1| putative protein kinase [Arabidopsis

SEQ ID NO: 93234 - protein, 629 aa, Arabidopsis thaliana; identical to SEQ ID NO: 89478
  peptide (1)..(629): Ceres Seq. ID no. 12719058
  misc_feature (221)..(569): Pfam Name: Protein kinase domain Pfam Description: Protein kinase domain
  misc_feature (146)..(629): Homolog of NCBI NO: 34910268 NR Description: putative protein kinase [Oryza sativa (japonica group)] >gi|15128235|dbj|BAB62563.1| putative protein kinase
  misc_feature (129)..(587): Homolog of NCBI NO: 15241076 NR Description: serine threonine-specific protein kinase ATPK64
  misc_feature (109)..(587): Homolog of NCBI NO: 7446383 NR Description: probable protein kinase PK1 - potato
  misc_feature (129)..(587): Homolog of NCBI NO: 99749 NR Description: probable serine/threonine-specific protein kinase
  misc_feature (129)..(587): Homolog of NCBI NO: 15236802 NR Description: putative protein kinase; protein id: At4g26610.1, by cDNA: gi_17380933, supported by cDNA: gi_20258942 [Arabidopsis >gi|7488161|pir||T08927 probable protein kinase T15N24.60
  misc_feature (150)..(587): Homolog of NCBI NO: 1346057 NR Description: Protein kinase G11A >gi|100705|pir||B30311
  misc_feature (167)..(587): Homolog of NCBI NO: 15238798 NR Description: protein kinase (EC 2.7.1.37) 5 (pir||JN0505); id: At5g47750.1, supported by cDNA: gi_15809918, supported by gi_17064849, supported by cDNA: gi_20259909 [Arabidopsis
  misc_feature (167)..(587): Homolog of NCBI NO: 17064850 NR Description: protein kinase 5 [Arabidopsis thaliana]
  misc_feature (94)..(603): Homolog of NCBI NO: 125568 NR Description: Protein kinase PVPK-1 >gi|100013|pir||A30311
  misc_feature (157)..(595): Homolog of NCBI NO: 7488270 NR Description: protein kinase homolog T13E15.16 - Arabidopsis >gi|2344901|gb|AAC31841.1| putative protein kinase [Arabidopsis

SEQ ID NO: 93235 - protein, 602 aa, Arabidopsis thaliana; identical to SEQ ID NO: 89479
  peptide (1)..(602): Ceres Seq. ID no. 12719059
  misc_feature (194)..(542): Pfam Name: Protein kinase domain Pfam Description: Protein kinase domain
  misc_feature (119)..(602): Homolog of NCBI NO: 34910268 NR Description: putative protein kinase [Oryza sativa (japonica group)] >gi|15128235|dbj|BAB62563.1| putative protein kinase
  misc_feature (102)..(560): Homolog of NCBI NO: 15241076 NR Description: serine threonine-specific protein kinase ATPK64
  misc_feature (82)..(560): Homolog of NCBI NO: 7446383 NR Description: probable protein kinase PK1 - potato
  misc_feature (102)..(560): Homolog of NCBI NO: 99749 NR Description: probable serine/threonine-specific protein kinase
  misc_feature (102)..(560): Homolog of NCBI NO: 15236802 NR Description: putative protein kinase; protein id: At4g26610.1, by cDNA: gi_17380933, supported by cDNA: gi_20258942 [Arabidopsis >gi|7488161|pir||T08927 probable protein kinase T15N24.60
  misc_feature (123)..(560): Homolog of NCBI NO: 1346057 NR Description: Protein kinase G11A >gi|100705|pir||B30311
  misc_feature (140)..(560): Homolog of NCBI NO: 15238798 NR Description: protein kinase (EC 2.7.1.37) 5 (pir||JN0505); id: At5g47750.1, supported by cDNA: gi_15809918, supported by gi_17064849, supported by cDNA: gi_20259909 [Arabidopsis
  misc_feature (140)..(560): Homolog of NCBI NO: 17064850 NR Description: protein kinase 5 [Arabidopsis thaliana]
  misc_feature (67)..(576): Homolog of NCBI NO: 125568 NR Description: Protein kinase PVPK-1 >gi|100013|pir||A30311
  misc_feature (130)..(568): Homolog of NCBI NO: 7488270 NR Description: protein kinase homolog T13E15.16 - Arabidopsis >gi|2344901|gb|AAC31841.1| putative protein kinase [Arabidopsis

SEQ ID NO: 93236 - DNA, 1569 bp, Arabidopsis thaliana; identical to SEQ ID NO: 89480
  misc_feature (1)..(1569): Ceres Seq. ID no. 12719096
  misc_feature: MA Experiment ID: 20000173 Result: Down-regulated in Transcription
  misc_feature: MA Experiment 20000173 PARAMETER Experiment Name: At_42deg_Heat_P Parameter: Age (day) Value: 14
  misc_feature: MA Experiment 20000173 PARAMETER Experiment Name: At_42deg_Heat_P Parameter: Organism Value: A. thaliana
  misc_feature: MA Experiment 20000173 PARAMETER Experiment Name: At_42deg_Heat_P Parameter: Plant Line Value: WS
  misc_feature: MA Experiment 20000173 PARAMETER Experiment Name: At_42deg_Heat_P Parameter: Temperature (deg C) Value: 42 vs. 22
  misc_feature: MA Experiment 20000173 PARAMETER Experiment Name: At_42deg_Heat_P Parameter: Timepoint (hr) Value: 6
  misc_feature: MA Experiment 20000173 PARAMETER Experiment Name: At_42deg_Heat_P Parameter: Tissue Value: Aerial
  misc_feature: MA Experiment ID: 20000180 Result: Down-regulated in Transcription
  misc_feature: MA Experiment 20000180 PARAMETER Experiment Name: At_Germinating_Seeds_P Parameter: Age (hr) Value: 24 vs. 0
  misc_feature: MA Experiment 20000180 PARAMETER Experiment Name: At_Germinating_Seeds_P Parameter: Tissue Value: Germinating Seeds
  misc_feature: MA Experiment ID: 20000184 Result: Down-regulated in Transcription
  misc_feature: MA Experiment 20000184 PARAMETER Experiment Name: At_Shoots__P Parameter: Age (day) Value: 7
  misc_feature: MA Experiment 20000184 PARAMETER Experiment Name: At_Shoots__P Parameter: Tissue Value: Shoots vs. Whole Plant
  misc_feature: MA Experiment ID: 20000234 Result: Down-regulated in Transcription
  misc_feature: MA Experiment 20000234 PARAMETER Experiment Name: At_Siliques_P Parameter: Age (day) Value: 21
  misc_feature: MA Experiment 20000234 PARAMETER Experiment Name: At_Siliques_P Parameter: Organism Value: A. thaliana
  misc_feature: MA Experiment 20000234 PARAMETER Experiment Name: At_Siliques_P Parameter: Plant Line Value: WS
  misc_feature: MA Experiment 20000234 PARAMETER Experiment Name: At_Siliques_P Parameter: Tissue Value: Less Than 5mm Siliques vs. Whole Plant
  misc_feature: MA Experiment ID: 20000264 Result: Down-regulated in Transcription
  misc_feature: MA Experiment 20000264 PARAMETER Experiment Name: At_Open_Flower_P Parameter: Age (day) Value: 21
  misc_feature: MA Experiment 20000264 PARAMETER Experiment Name: At_Open_Flower_P Parameter: Plant Line Value: WS
  misc_feature: MA Experiment 20000264 PARAMETER Experiment Name: At_Open_Flower_P Parameter: Tissue Value: Open Flower vs. Whole Plant
  misc_feature: MA Experiment ID: 20000286 Result: Down-regulated in Transcription
  misc_feature: MA Experiment 20000286 PARAMETER Experiment Name: At_Open_Flower_P Parameter: Age (day) Value: 21
  misc_feature: MA Experiment 20000286 PARAMETER Experiment Name: At_Open_Flower_P Parameter: Plant Line Value: WS
  misc_feature: MA Experiment 20000286 PARAMETER Experiment Name: At_Open_Flower_P Parameter: Tissue Value: Half Open vs. Whole Plant
  misc_feature: MA Experiment ID: 20000308 Result: Down-regulated in Transcription
  misc_feature: MA Experiment 20000308 PARAMETER Experiment Name: At_100mM_NaCl__P Parameter: Age (day) Value: 17
  misc_feature: MA Experiment 20000308 PARAMETER Experiment Name: At_100mM_NaCl__P Parameter: Organism Value: A. thaliana
  misc_feature: MA Experiment 20000308 PARAMETER Experiment Name: At_100mM_NaCl__P Parameter: Plant Line Value: WS
  misc_feature: MA Experiment 20000308 PARAMETER Experiment Name: At_100mM_NaCl__P Parameter: Timepoint (hr) Value: 72
  misc_feature: MA Experiment 20000308 PARAMETER Experiment Name: At_100mM_NaCl__P Parameter: Tissue Value: Whole Plant
  misc_feature: MA Experiment 20000308 PARAMETER Experiment Name: At_100mM_NaCl__P Parameter: Treatment Value: 100mM NaCl vs. No Treatment
  misc_feature: MA Experiment ID: 20000709 Result: Up-regulated in Transcription
  misc_feature: MA Experiment 20000709 PARAMETER Experiment Name: At_15mM_NH4NO3_L-to-H_P Parameter: Age (hr) Value: 14
  misc_feature: MA Experiment 20000709 PARAMETER Experiment Name: At_15mM_NH4NO3_L-to-H_P Parameter: Organism Value: A. thaliana
  misc_feature: MA Experiment 20000709 PARAMETER Experiment Name: At_15mM_NH4NO3_L-to-H_P Parameter: Plant Line Value: WS
  misc_feature: MA Experiment 20000709 PARAMETER Experiment Name: At_15mM_NH4NO3_L-to-H_P Parameter: Timepoint (hr) Value: 4
  misc_feature: MA Experiment 20000709 PARAMETER Experiment Name: At_15mM_NH4NO3_L-to-H_P Parameter: Tissue Value: Aerial
  misc_feature: MA Experiment 20000709 PARAMETER Experiment Name: At_15mM_NH4NO3_L-to-H_P Parameter: Treatment Value: 15mM NH4NO3 vs. 30mM Mannitol
  misc_feature: MA Experiment ID: 20001247 Result: Up-regulated in Transcription
  misc_feature: MA Experiment 20001247 PARAMETER Experiment Name: At_Far-red-induction_P Parameter: Age (day) Value: 7
  misc_feature: MA Experiment 20001247 PARAMETER Experiment Name: At_Far-red-induction_P Parameter: Light Value: Far-red vs. White
  misc_feature: MA Experiment 20001247 PARAMETER Experiment Name: At_Far-red-induction_P Parameter: Organism Value: A. thaliana
  misc_feature: MA Experiment 20001247 PARAMETER Experiment Name: At_Far-red-induction_P Parameter: Plant Line Value: Columbia
  misc_feature: MA Experiment 20001247 PARAMETER Experiment Name: At_Far-red-induction_P Parameter: Timepoint (hr) Value: 1
  misc_feature: MA Experiment 20001247 PARAMETER Experiment Name: At_Far-red-induction_P Parameter: Tissue Value: Whole Plant
  misc_feature: MA Experiment ID: 20001248 Result: Up-regulated in Transcription
  misc_feature: MA Experiment 20001248 PARAMETER Experiment Name: At_Far-red-induction_P Parameter: Age (day) Value: 7
  misc_feature: MA Experiment 20001248 PARAMETER Experiment Name: At_Far-red-induction_P Parameter: Light Value: Far-red vs. White
  misc_feature: MA Experiment 20001248 PARAMETER Experiment Name: At_Far-red-induction_P Parameter: Organism Value: A. thaliana
  misc_feature: MA Experiment 20001248 PARAMETER Experiment Name: At_Far-red-induction_P Parameter: Plant Line Value: Columbia
  misc_feature: MA Experiment 20001248 PARAMETER Experiment Name: At_Far-red-induction_P Parameter: Timepoint (hr) Value: 4
  misc_feature: MA Experiment 20001248 PARAMETER Experiment Name: At_Far-red-induction_P Parameter: Tissue Value: Whole Plant
  misc_feature: MA Experiment ID: 20001457 Result: Up-regulated in Transcription
  misc_feature: MA Experiment 20001457 PARAMETER Experiment Name: At_50mM_NH4NO3_L-to-H_P Parameter: Age (day) Value: Undefined
  misc_feature: MA Experiment 20001457 PARAMETER Experiment Name: At_50mM_NH4NO3_L-to-H_P Parameter: Organism Value: Undefined
  misc_feature: MA Experiment 20001457 PARAMETER Experiment Name: At_50mM_NH4NO3_L-to-H_P Parameter: Plant Line Value: Undefined
  misc_feature: MA Experiment 20001457 PARAMETER Experiment Name: At_50mM_NH4NO3_L-to-H_P Parameter: Timepoint (hr) Value: 0.5
  misc_feature: MA Experiment 20001457 PARAMETER Experiment Name: At_50mM_NH4NO3_L-to-H_P Parameter: Tissue Value: Siliques
  misc_feature: MA Experiment 20001457 PARAMETER Experiment Name: At_50mM_NH4NO3_L-to-H_P Parameter: Treatment Value: 50mM NH4NO3 vs. 100mM Manitol
  misc_feature: MA Experiment ID: 20001458 Result: Up-regulated in Transcription
  misc_feature: MA Experiment 20001458 PARAMETER Experiment Name: At_50mM_NH4NO3_L-to-H_P Parameter: Age (day) Value: Undefined
  misc_feature: MA Experiment 20001458 PARAMETER Experiment Name: At_50mM_NH4NO3_L-to-H_P Parameter: Organism Value: Undefined
  misc_feature: MA Experiment 20001458 PARAMETER Experiment Name: At_50mM_NH4NO3_L-to-H_P Parameter: Plant Line Value: Undefined
  misc_feature: MA Experiment 20001458 PARAMETER Experiment Name: At_50mM_NH4NO3_L-to-H_P Parameter: Timepoint (hr) Value: 2
  misc_feature: MA Experiment 20001458 PARAMETER Experiment Name: At_50mM_NH4NO3_L-to-H_P Parameter: Tissue Value: Siliques
  misc_feature: MA Experiment 20001458 PARAMETER Experiment Name: At_50mM_NH4NO3_L-to-H_P Parameter: Treatment Value: 50mM NH4NO3 vs. 100mM Manitol
  misc_feature: MA Experiment ID: 20001459 Result: Up-regulated in Transcription
  misc_feature: MA Experiment 20001459 PARAMETER Experiment Name: At_50mM_NH4NO3_L-to-H_P Parameter: Age (day) Value: Undefined
  misc_feature: MA Experiment 20001459 PARAMETER Experiment Name: At_50mM_NH4NO3_L-to-H_P Parameter: Organism Value: Undefined
  misc_feature: MA Experiment 20001459 PARAMETER Experiment Name: At_50mM_NH4NO3_L-to-H_P Parameter: Plant Line Value: Undefined
  misc_feature: MA Experiment 20001459 PARAMETER Experiment Name: At_50mM_NH4NO3_L-to-H_P Parameter: Timepoint (hr) Value: 4
  misc_feature: MA Experiment 20001459 PARAMETER Experiment Name: At_50mM_NH4NO3_L-to-H_P Parameter: Tissue Value: Siliques
  misc_feature: MA Experiment 20001459 PARAMETER Experiment Name: At_50mM_NH4NO3_L-to-H_P Parameter: Treatment Value: 50mM NH4NO3 vs. 100mM Manitol
  misc_feature: MA Experiment ID: 20001557 Result: Up-regulated in Transcription
  misc_feature: MA Experiment 20001557 PARAMETER Experiment Name: At_Drought_Soil_Dry_P Parameter: Age (day) Value: 27
  misc_feature: MA Experiment 20001557 PARAMETER Experiment Name: At_Drought_Soil_Dry_P Parameter: Organism Value: A. thaliana
  misc_feature: MA Experiment 20001557 PARAMETER Experiment Name: At_Drought_Soil_Dry_P Parameter: Plant Line Value: WS
  misc_feature: MA Experiment 20001557 PARAMETER Experiment Name: At_Drought_Soil_Dry_P Parameter: Post Timepoint (hr) Value: 3
  misc_feature: MA Experiment 20001557 PARAMETER Experiment Name: At_Drought_Soil_Dry_P Parameter: Post-Treatment Value: Re-Water vs. No Drought
  misc_feature: MA Experiment 20001557 PARAMETER Experiment Name: At_Drought_Soil_Dry_P Parameter: Timepoint (day) Value: 13
  misc_feature: MA Experiment 20001557 PARAMETER Experiment Name: At_Drought_Soil_Dry_P Parameter: Treatment Value: Drought vs. No Drought
  misc_feature: MA Experiment ID: 20001756 Result: Up-regulated in Transcription
  misc_feature: MA Experiment 20001756 PARAMETER Experiment Name: At_50mM_NH4NO3_L-to-H_P Parameter: Timepoint (hr) Value: 4
  misc_feature: MA Experiment 20001756 PARAMETER Experiment Name: At_50mM_NH4NO3_L-to-H_P Parameter: Tissue Value: Leaf
  misc_feature: MA Experiment 20001756 PARAMETER Experiment Name: At_50mM_NH4NO3_L-to-H_P Parameter: Treatment Value: 50mM NH4NO3 vs 100mM Mannitol
  misc_feature: MA Experiment ID: 20001759 Result: Up-regulated in Transcription
  misc_feature: MA Experiment 20001759 PARAMETER Experiment Name: At_50mM_NH4NO3_L-to-H_P Parameter: Timepoint (hr) Value: 1
  misc_feature: MA Experiment 20001759 PARAMETER Experiment Name: At_50mM_NH4NO3_L-to-H_P Parameter: Tissue Value: Siliques
  misc_feature: MA Experiment 20001759 PARAMETER Experiment Name: At_50mM_NH4NO3_L-to-H_P Parameter: Treatment Value: 50mM NH4NO3 vs 100mM Mannitol
  misc_feature: MA Experiment ID: 20001760 Result: Up-regulated in Transcription
  misc_feature: MA Experiment 20001760 PARAMETER Experiment Name: At_50mM_NH4NO3_L-to-H_P Parameter: Timepoint (hr) Value: 2
  misc_feature: MA Experiment 20001760 PARAMETER Experiment Name: At_50mM_NH4NO3_L-to-H_P Parameter: Tissue Value: Siliques
  misc_feature: MA Experiment 20001760 PARAMETER Experiment Name: At_50mM_NH4NO3_L-to-H_P Parameter: Treatment Value: 50mM NH4NO3 vs 100mM Mannitol

SEQ ID NO: 93237 - protein, 375 aa, Arabidopsis thaliana; identical to SEQ ID NO: 89481
  peptide (1)..(375): Ceres Seq. ID no. 12719097
  misc_feature (14)..(269): Pfam Name: Protein kinase domain Pfam Description: Protein kinase domain
  misc_feature (1)..(375): Homolog of NCBI NO: 30683336 NR Description: CBL-interacting protein kinase 3 [Arabidopsis
  misc_feature (1)..(375): Homolog of NCBI NO: 30688193 NR Description: NAF specific protein kinase family [Arabidopsis >gi|29294047|gb|AAO73884.1| NAF specific protein kinase family
  misc_feature (6)..(375): Homolog of NCBI NO: 7446371 NR Description: probable serine/threonine kinase (EC 2.7.1.-) - sorghum >gi|2632252|emb|CAA73067.1| serine/threonine kinase
  misc_feature (6)..(375): Homolog of NCBI NO: 7446372 NR Description: probable serine/threonine kinase (EC 2.7.1.-) - sorghum >gi|2632254|emb|CAA73068.1| serine/threonine kinase
  misc_feature (8)..(375): Homolog of NCBI NO: 18397430 NR Description: serine/threonine kinase, putative; protein id: supported by cDNA: gi_14486385, supported by cDNA: gi_15912282,
  misc_feature (8)..(375): Homolog of NCBI NO: 25387051 NR Description: probable serine/threonine kinase [imported] - thaliana >gi|12320856|gb|AAG50566.1|AC073506_8 serine/threonine
  misc_feature (8)..(375): Homolog of NCBI NO: 15223317 NR Description: serine threonine kinase, putative; protein id: supported by cDNA: gi_14423523, supported by cDNA: gi_20259787
  misc_feature (8)..(375): Homolog of NCBI NO: 14423524 NR Description: similar to wpk4 protein kinase [Arabidopsis >gi|20259788|gb|AAM13241.1| similar to wpk4 protein kinase
  misc_feature (8)..(375): Homolog of NCBI NO: 30677898 NR Description: CBL-interacting protein kinase 9 [Arabidopsis
  misc_feature (8)..(375): Homolog of NCBI NO: 30677901 NR Description: CBL-interacting protein kinase 9 [Arabidopsis

SEQ ID NO: 93238 - protein, 321 aa, Arabidopsis thaliana; identical to SEQ ID NO: 89482
  peptide (1)..(321): Ceres Seq. ID no. 12719098
  misc_feature (1)..(215): Pfam Name: Protein kinase domain Pfam Description: Protein kinase domain
  misc_feature (1)..(321): Homolog of NCBI NO: 30683336 NR Description: CBL-interacting protein kinase 3 [Arabidopsis
  misc_feature (1)..(321): Homolog of NCBI NO: 30688193 NR Description: NAF specific protein kinase family [Arabidopsis >gi|29294047|gb|AAO73884.1| NAF specific protein kinase family
  misc_feature (1)..(321): Homolog of NCBI NO: 7446371 NR Description: probable serine/threonine kinase (EC 2.7.1.-) - sorghum >gi|2632252|emb|CAA73067.1| serine/threonine kinase
  misc_feature (1)..(321): Homolog of NCBI NO: 7446372 NR Description: probable serine/threonine kinase (EC 2.7.1.-) - sorghum >gi|2632254|emb|CAA73068.1| serine/threonine kinase
  misc_feature (1)..(321): Homolog of NCBI NO: 18397430 NR Description: serine/threonine kinase, putative; protein id: supported by cDNA: gi_14486385, supported by cDNA: gi_15912282,
  misc_feature (1)..(321): Homolog of NCBI NO: 25387051 NR Description: probable serine/threonine kinase [imported] - thaliana >gi|12320856|gb|AAG50566.1|AC073506_8 serine/threonine
  misc_feature (1)..(321): Homolog of NCBI NO: 15223317 NR Description: serine threonine kinase, putative; protein id: supported by cDNA: gi_14423523, supported by cDNA: gi_20259787
  misc_feature (1)..(321): Homolog of NCBI NO: 14423524 NR Description: similar to wpk4 protein kinase [Arabidopsis >gi|20259788|gb|AAM13241.1| similar to wpk4 protein kinase
  misc_feature (1)..(321): Homolog of NCBI NO: 30677898 NR Description: CBL-interacting protein kinase 9 [Arabidopsis
  misc_feature (1)..(321): Homolog of NCBI NO: 30677901 NR Description: CBL-interacting protein kinase 9 [Arabidopsis

SEQ ID NO: 93239 - protein, 310 aa, Arabidopsis thaliana; identical to SEQ ID NO: 89483
  peptide (1)..(310): Ceres Seq. ID no. 12719099
  misc_feature (1)..(204): Pfam Name: Protein kinase domain Pfam Description: Protein kinase domain
  misc_feature (1)..(310): Homolog of NCBI NO: 30683336 NR Description: CBL-interacting protein kinase 3 [Arabidopsis
  misc_feature (1)..(310): Homolog of NCBI NO: 30688193 NR Description: NAF specific protein kinase family [Arabidopsis >gi|29294047|gb|AAO73884.1| NAF specific protein kinase family
  misc_feature (1)..(310): Homolog of NCBI NO: 7446371 NR Description: probable serine/threonine kinase (EC 2.7.1.-) - sorghum >gi|2632252|emb|CAA73067.1| serine/threonine kinase
  misc_feature (1)..(310): Homolog of NCBI NO: 7446372 NR Description: probable serine/threonine kinase (EC 2.7.1.-) - sorghum >gi|2632254|emb|CAA73068.1| serine/threonine kinase
  misc_feature (1)..(310): Homolog of NCBI NO: 18397430 NR Description: serine/threonine kinase, putative; protein id: supported by cDNA: gi_14486385, supported by cDNA: gi_15912282,
  misc_feature (1)..(310): Homolog of NCBI NO: 25387051 NR Description: probable serine/threonine kinase [imported] - thaliana >gi|12320856|gb|AAG50566.1|AC073506_8 serine/threonine
  misc_feature (1)..(310): Homolog of NCBI NO: 15223317 NR Description: serine threonine kinase, putative; protein id: supported by cDNA: gi_14423523, supported by cDNA: gi_20259787
  misc_feature (1)..(310): Homolog of NCBI NO: 14423524 NR Description: similar to wpk4 protein kinase [Arabidopsis >gi|20259788|gb|AAM13241.1| similar to wpk4 protein kinase
  misc_feature (1)..(310): Homolog of NCBI NO: 30677898 NR Description: CBL-interacting protein kinase 9 [Arabidopsis
  misc_feature (1)..(310): Homolog of NCBI NO: 30677901 NR Description: CBL-interacting protein kinase 9 [Arabidopsis

SEQ ID NO: 93240 - DNA, 1724 bp, Arabidopsis thaliana; identical to SEQ ID NO: 89484
  misc_feature (1)..(1724): Ceres Seq. ID no. 12719100
  misc_feature: MA Experiment ID: 20000173 Result: Down-regulated in Transcription
  misc_feature: MA Experiment 20000173 PARAMETER Experiment Name: At_42deg_Heat_P Parameter: Age (day) Value: 14
  misc_feature: MA Experiment 20000173 PARAMETER Experiment Name: At_42deg_Heat_P Parameter: Organism Value: A. thaliana
  misc_feature: MA Experiment 20000173 PARAMETER Experiment Name: At_42deg_Heat_P Parameter: Plant Line Value: WS
  misc_feature: MA Experiment 20000173 PARAMETER Experiment Name: At_42deg_Heat_P Parameter: Temperature (deg C) Value: 42 vs. 22
  misc_feature: MA Experiment 20000173 PARAMETER Experiment Name: At_42deg_Heat_P Parameter: Timepoint (hr) Value: 6
  misc_feature: MA Experiment 20000173 PARAMETER Experiment Name: At_42deg_Heat_P Parameter: Tissue Value: Aerial
  misc_feature: MA Experiment ID: 20000180 Result: Down-regulated in Transcription
  misc_feature: MA Experiment 20000180 PARAMETER Experiment Name: At_Germinating_Seeds_P Parameter: Age (hr) Value: 24 vs. 0
  misc_feature: MA Experiment 20000180 PARAMETER Experiment Name: At_Germinating_Seeds_P Parameter: Tissue Value: Germinating Seeds
  misc_feature: MA Experiment ID: 20000184 Result: Down-regulated in Transcription
  misc_feature: MA Experiment 20000184 PARAMETER Experiment Name: At_Shoots__P Parameter: Age (day) Value: 7
  misc_feature: MA Experiment 20000184 PARAMETER Experiment Name: At_Shoots__P Parameter: Tissue Value: Shoots vs. Whole Plant
  misc_feature: MA Experiment ID: 20000234 Result: Down-regulated in Transcription
  misc_feature: MA Experiment 20000234 PARAMETER Experiment Name: At_Siliques_P Parameter: Age (day) Value: 21
  misc_feature: MA Experiment 20000234 PARAMETER Experiment Name: At_Siliques_P Parameter: Organism Value: A. thaliana
  misc_feature: MA Experiment 20000234 PARAMETER Experiment Name: At_Siliques_P Parameter: Plant Line Value: WS
  misc_feature: MA Experiment 20000234 PARAMETER Experiment Name: At_Siliques_P Parameter: Tissue Value: Less Than 5mm Siliques vs. Whole Plant
  misc_feature: MA Experiment ID: 20000264 Result: Down-regulated in Transcription
  misc_feature: MA Experiment 20000264 PARAMETER Experiment Name: At_Open_Flower_P Parameter: Age (day) Value: 21
  misc_feature: MA Experiment 20000264 PARAMETER Experiment Name: At_Open_Flower_P Parameter: Plant Line Value: WS
  misc_feature: MA Experiment 20000264 PARAMETER Experiment Name: At_Open_Flower_P Parameter: Tissue Value: Open Flower vs. Whole Plant
  misc_feature: MA Experiment ID: 20000286 Result: Down-regulated in Transcription
  misc_feature: MA Experiment 20000286 PARAMETER Experiment Name: At_Open_Flower_P Parameter: Age (day) Value: 21
  misc_feature: MA Experiment 20000286 PARAMETER Experiment Name: At_Open_Flower_P Parameter: Plant Line Value: WS
  misc_feature: MA Experiment 20000286 PARAMETER Experiment Name: At_Open_Flower_P Parameter: Tissue Value: Half Open vs. Whole Plant
  misc_feature: MA Experiment ID: 20000308 Result: Down-regulated in Transcription
  misc_feature: MA Experiment 20000308 PARAMETER Experiment Name: At_100mM_NaCl__P Parameter: Age (day) Value: 17
  misc_feature: MA Experiment 20000308 PARAMETER Experiment Name: At_100mM_NaCl__P Parameter: Organism Value: A. thaliana
  misc_feature: MA Experiment 20000308 PARAMETER Experiment Name: At_100mM_NaCl__P Parameter: Plant Line Value: WS
  misc_feature: MA Experiment 20000308 PARAMETER Experiment Name: At_100mM_NaCl__P Parameter: Timepoint (hr) Value: 72
  misc_feature: MA Experiment 20000308 PARAMETER Experiment Name: At_100mM_NaCl__P Parameter: Tissue Value: Whole Plant
  misc_feature: MA Experiment 20000308 PARAMETER Experiment Name: At_100mM_NaCl__P Parameter: Treatment Value: 100mM NaCl vs. No Treatment
  misc_feature: MA Experiment ID: 20000709 Result: Up-regulated in Transcription
  misc_feature: MA Experiment 20000709 PARAMETER Experiment Name: At_15mM_NH4NO3_L-to-H_P Parameter: Age (hr) Value: 14
  misc_feature: MA Experiment 20000709 PARAMETER Experiment Name: At_15mM_NH4NO3_L-to-H_P Parameter: Organism Value: A. thaliana
  misc_feature: MA Experiment 20000709 PARAMETER Experiment Name: At_15mM_NH4NO3_L-to-H_P Parameter: Plant Line Value: WS
  misc_feature: MA Experiment 20000709 PARAMETER Experiment Name: At_15mM_NH4NO3_L-to-H_P Parameter: Timepoint (hr) Value: 4
  misc_feature: MA Experiment 20000709 PARAMETER Experiment Name: At_15mM_NH4NO3_L-to-H_P Parameter: Tissue Value: Aerial
  misc_feature: MA Experiment 20000709 PARAMETER Experiment Name: At_15mM_NH4NO3_L-to-H_P Parameter: Treatment Value: 15mM NH4NO3 vs. 30mM Mannitol
  misc_feature: MA Experiment ID: 20001247 Result: Up-regulated in Transcription
  misc_feature: MA Experiment 20001247 PARAMETER Experiment Name: At_Far-red-induction_P Parameter: Age (day) Value: 7
  misc_feature: MA Experiment 20001247 PARAMETER Experiment Name: At_Far-red-induction_P Parameter: Light Value: Far-red vs. White
  misc_feature: MA Experiment 20001247 PARAMETER Experiment Name: At_Far-red-induction_P Parameter: Organism Value: A. thaliana
  misc_feature: MA Experiment 20001247 PARAMETER Experiment Name: At_Far-red-induction_P Parameter: Plant Line Value: Columbia
  misc_feature: MA Experiment 20001247 PARAMETER Experiment Name: At_Far-red-induction_P Parameter: Timepoint (hr) Value: 1
  misc_feature: MA Experiment 20001247 PARAMETER Experiment Name: At_Far-red-induction_P Parameter: Tissue Value: Whole Plant
  misc_feature: MA Experiment ID: 20001248 Result: Up-regulated in Transcription
  misc_feature: MA Experiment 20001248 PARAMETER Experiment Name: At_Far-red-induction_P Parameter: Age (day) Value: 7
  misc_feature: MA Experiment 20001248 PARAMETER Experiment Name: At_Far-red-induction_P Parameter: Light Value: Far-red vs. White
  misc_feature: MA Experiment 20001248 PARAMETER Experiment Name: At_Far-red-induction_P Parameter: Organism Value: A. thaliana
  misc_feature: MA Experiment 20001248 PARAMETER Experiment Name: At_Far-red-induction_P Parameter: Plant Line Value: Columbia
  misc_feature: MA Experiment 20001248 PARAMETER Experiment Name: At_Far-red-induction_P Parameter: Timepoint (hr) Value: 4
  misc_feature: MA Experiment 20001248 PARAMETER Experiment Name: At_Far-red-induction_P Parameter: Tissue Value: Whole Plant
  misc_feature: MA Experiment ID: 20001457 Result: Up-regulated in Transcription
  misc_feature: MA Experiment 20001457 PARAMETER Experiment Name: At_50mM_NH4NO3_L-to-H_P Parameter: Age (day) Value: Undefined
  misc_feature: MA Experiment 20001457 PARAMETER Experiment Name: At_50mM_NH4NO3_L-to-H_P Parameter: Organism Value: Undefined
  misc_feature: MA Experiment 20001457 PARAMETER Experiment Name: At_50mM_NH4NO3_L-to-H_P Parameter: Plant Line Value: Undefined
  misc_feature: MA Experiment 20001457 PARAMETER Experiment Name: At_50mM_NH4NO3_L-to-H_P Parameter: Timepoint (hr) Value: 0.5
  misc_feature: MA Experiment 20001457 PARAMETER Experiment Name: At_50mM_NH4NO3_L-to-H_P Parameter: Tissue Value: Siliques
  misc_feature: MA Experiment 20001457 PARAMETER Experiment Name: At_50mM_NH4NO3_L-to-H_P Parameter: Treatment Value: 50mM NH4NO3 vs. 100mM Manitol
  misc_feature: MA Experiment ID: 20001458 Result: Up-regulated in Transcription
  misc_feature: MA Experiment 20001458 PARAMETER Experiment Name: At_50mM_NH4NO3_L-to-H_P Parameter: Age (day) Value: Undefined
  misc_feature: MA Experiment 20001458 PARAMETER Experiment Name: At_50mM_NH4NO3_L-to-H_P Parameter: Organism Value: Undefined
  misc_feature: MA Experiment 20001458 PARAMETER Experiment Name: At_50mM_NH4NO3_L-to-H_P Parameter: Plant Line Value: Undefined
  misc_feature: MA Experiment 20001458 PARAMETER Experiment Name: At_50mM_NH4NO3_L-to-H_P Parameter: Timepoint (hr) Value: 2
  misc_feature: MA Experiment 20001458 PARAMETER Experiment Name: At_50mM_NH4NO3_L-to-H_P Parameter: Tissue Value: Siliques
  misc_feature: MA Experiment 20001458 PARAMETER Experiment Name: At_50mM_NH4NO3_L-to-H_P Parameter: Treatment Value: 50mM NH4NO3 vs. 100mM Manitol
  misc_feature: MA Experiment ID: 20001459 Result: Up-regulated in Transcription
  misc_feature: MA Experiment 20001459 PARAMETER Experiment Name: At_50mM_NH4NO3_L-to-H_P Parameter: Age (day) Value: Undefined
  misc_feature: MA Experiment 20001459 PARAMETER Experiment Name: At_50mM_NH4NO3_L-to-H_P Parameter: Organism Value: Undefined
  misc_feature: MA Experiment 20001459 PARAMETER Experiment Name: At_50mM_NH4NO3_L-to-H_P Parameter: Plant Line Value: Undefined
  misc_feature: MA Experiment 20001459 PARAMETER Experiment Name: At_50mM_NH4NO3_L-to-H_P Parameter: Timepoint (hr) Value: 4
  misc_feature: MA Experiment 20001459 PARAMETER Experiment Name: At_50mM_NH4NO3_L-to-H_P Parameter: Tissue Value: Siliques
  misc_feature: MA Experiment 20001459 PARAMETER Experiment Name: At_50mM_NH4NO3_L-to-H_P Parameter: Treatment Value: 50mM NH4NO3 vs. 100mM Manitol
  misc_feature: MA Experiment ID: 20001557 Result: Up-regulated in Transcription
  misc_feature: MA Experiment 20001557 PARAMETER Experiment Name: At_Drought_Soil_Dry_P Parameter: Age (day) Value: 27
  misc_feature: MA Experiment 20001557 PARAMETER Experiment Name: At_Drought_Soil_Dry_P Parameter: Organism Value: A. thaliana
  misc_feature: MA Experiment 20001557 PARAMETER Experiment Name: At_Drought_Soil_Dry_P Parameter: Plant Line Value: WS
  misc_feature: MA Experiment 20001557 PARAMETER Experiment Name: At_Drought_Soil_Dry_P Parameter: Post Timepoint (hr) Value: 3
  misc_feature: MA Experiment 20001557 PARAMETER Experiment Name: At_Drought_Soil_Dry_P Parameter: Post-Treatment Value: Re-Water vs. No Drought
  misc_feature: MA Experiment 20001557 PARAMETER Experiment Name: At_Drought_Soil_Dry_P Parameter: Timepoint (day) Value: 13
  misc_feature: MA Experiment 20001557 PARAMETER Experiment Name: At_Drought_Soil_Dry_P Parameter: Treatment Value: Drought vs. No Drought
  misc_feature: MA Experiment ID: 20001756 Result: Up-regulated in Transcription
  misc_feature: MA Experiment 20001756 PARAMETER Experiment Name: At_50mM_NH4NO3_L-to-H_P Parameter: Timepoint (hr) Value: 4
  misc_feature: MA Experiment 20001756 PARAMETER Experiment Name: At_50mM_NH4NO3_L-to-H_P Parameter: Tissue Value: Leaf
  misc_feature: MA Experiment 20001756 PARAMETER Experiment Name: At_50mM_NH4NO3_L-to-H_P Parameter: Treatment Value: 50mM NH4NO3 vs 100mM Mannitol
  misc_feature: MA Experiment ID: 20001759 Result: Up-regulated in Transcription
  misc_feature: MA Experiment 20001759 PARAMETER Experiment Name: At_50mM_NH4NO3_L-to-H_P Parameter: Timepoint (hr) Value: 1
  misc_feature: MA Experiment 20001759 PARAMETER Experiment Name: At_50mM_NH4NO3_L-to-H_P Parameter: Tissue Value: Siliques
  misc_feature: MA Experiment 20001759 PARAMETER Experiment Name: At_50mM_NH4NO3_L-to-H_P Parameter: Treatment Value: 50mM NH4NO3 vs 100mM Mannitol
  misc_feature: MA Experiment ID: 20001760 Result: Up-regulated in Transcription
  misc_feature: MA Experiment 20001760 PARAMETER Experiment Name: At_50mM_NH4NO3_L-to-H_P Parameter: Timepoint (hr) Value: 2
  misc_feature: MA Experiment 20001760 PARAMETER Experiment Name: At_50mM_NH4NO3_L-to-H_P Parameter: Tissue Value: Siliques
  misc_feature: MA Experiment 20001760 PARAMETER Experiment Name: At_50mM_NH4NO3_L-to-H_P Parameter: Treatment Value: 50mM NH4NO3 vs 100mM Mannitol

SEQ ID NO: 93241 - protein, 382 aa, Arabidopsis thaliana; identical to SEQ ID NO: 89485
  peptide (1)..(382): Ceres Seq. ID no. 12719101
  misc_feature (14)..(269): Pfam Name: Protein kinase domain Pfam Description: Protein kinase domain
  misc_feature (1)..(376): Homolog of NCBI NO: 30683336 NR Description: CBL-interacting protein kinase 3 [Arabidopsis
  misc_feature (6)..(373): Homolog of NCBI NO: 7446371 NR Description: probable serine/threonine kinase (EC 2.7.1.-) - sorghum >gi|2632252|emb|CAA73067.1| serine/threonine kinase
  misc_feature (6)..(373): Homolog of NCBI NO: 7446372 NR Description: probable serine/threonine kinase (EC 2.7.1.-) - sorghum >gi|2632254|emb|CAA73068.1| serine/threonine kinase
  misc_feature (1)..(382): Homolog of NCBI NO: 30688193 NR Description: NAF specific protein kinase family [Arabidopsis >gi|29294047|gb|AAO73884.1| NAF specific protein kinase family
  misc_feature (8)..(373): Homolog of NCBI NO: 18397430 NR Description: serine/threonine kinase, putative; protein id: supported by cDNA: gi_14486385, supported by cDNA: gi_15912282,
  misc_feature (8)..(373): Homolog of NCBI NO: 15223317 NR Description: serine threonine kinase, putative; protein id: supported by cDNA: gi_14423523, supported by cDNA: gi_20259787
  misc_feature (8)..(373): Homolog of NCBI NO: 25387051 NR Description: probable serine/threonine kinase [imported] - thaliana >gi|12320856|gb|AAG50566.1|AC073506_8 serine/threonine
  misc_feature (8)..(373): Homolog of NCBI NO: 14423524 NR Description: similar to wpk4 protein kinase [Arabidopsis >gi|20259788|gb|AAM13241.1| similar to wpk4 protein kinase
  misc_feature (8)..(373): Homolog of NCBI NO: 30677898 NR Description: CBL-interacting protein kinase 9 [Arabidopsis
  misc_feature (8)..(373): Homolog of NCBI NO: 30677901 NR Description: CBL-interacting protein kinase 9 [Arabidopsis

SEQ ID NO: 93242 - protein, 328 aa, Arabidopsis thaliana; identical to SEQ ID NO: 89486
  peptide (1)..(328): Ceres Seq. ID no. 12719102
  misc_feature (1)..(215): Pfam Name: Protein kinase domain Pfam Description: Protein kinase domain
  misc_feature (1)..(322): Homolog of NCBI NO: 30683336 NR Description: CBL-interacting protein kinase 3 [Arabidopsis
  misc_feature (1)..(319): Homolog of NCBI NO: 7446371 NR Description: probable serine/threonine kinase (EC 2.7.1.-) - sorghum >gi|2632252|emb|CAA73067.1| serine/threonine kinase
  misc_feature (1)..(319): Homolog of NCBI NO: 7446372 NR Description: probable serine/threonine kinase (EC 2.7.1.-) - sorghum >gi|2632254|emb|CAA73068.1| serine/threonine kinase
  misc_feature (1)..(328): Homolog of NCBI NO: 30688193 NR Description: NAF specific protein kinase family [Arabidopsis >gi|29294047|gb|AAO73884.1| NAF specific protein kinase family
  misc_feature (1)..(319): Homolog of NCBI NO: 18397430 NR Description: serine/threonine kinase, putative; protein id: supported by cDNA: gi_14486385, supported by cDNA: gi_15912282,
  misc_feature (1)..(319): Homolog of NCBI NO: 15223317 NR Description: serine threonine kinase, putative; protein id: supported by cDNA: gi_14423523, supported by cDNA: gi_20259787
  misc_feature (1)..(319): Homolog of NCBI NO: 25387051 NR Description: probable serine/threonine kinase [imported] - thaliana >gi|12320856|gb|AAG50566.1|AC073506_8 serine/threonine
  misc_feature (1)..(319): Homolog of NCBI NO: 14423524 NR Description: similar to wpk4 protein kinase [Arabidopsis >gi|20259788|gb|AAM13241.1| similar to wpk4 protein kinase
  misc_feature (1)..(319): Homolog of NCBI NO: 30677898 NR Description: CBL-interacting protein kinase 9 [Arabidopsis
  misc_feature (1)..(319): Homolog of NCBI NO: 30677901 NR Description: CBL-interacting protein kinase 9 [Arabidopsis

SEQ ID NO: 93243 - protein, 317 aa, Arabidopsis thaliana; identical to SEQ ID NO: 89487
  peptide (1)..(317): Ceres Seq. ID no. 12719103
  misc_feature (1)..(204): Pfam Name: Protein kinase domain Pfam Description: Protein kinase domain
  misc_feature (1)..(311): Homolog of NCBI NO: 30683336 NR Description: CBL-interacting protein kinase 3 [Arabidopsis
  misc_feature (1)..(308): Homolog of NCBI NO: 7446371 NR Description: probable serine/threonine kinase (EC 2.7.1.-) - sorghum >gi|2632252|emb|CAA73067.1| serine/threonine kinase
  misc_feature (1)..(308): Homolog of NCBI NO: 7446372 NR Description: probable serine/threonine kinase (EC 2.7.1.-) - sorghum >gi|2632254|emb|CAA73068.1| serine/threonine kinase
  misc_feature (1)..(317): Homolog of NCBI NO: 30688193 NR Description: NAF specific protein kinase family [Arabidopsis >gi|29294047|gb|AAO73884.1| NAF specific protein kinase family
  misc_feature (1)..(308): Homolog of NCBI NO: 18397430 NR Description: serine/threonine kinase, putative; protein id: supported by cDNA: gi_14486385, supported by cDNA: gi_15912282,
  misc_feature (1)..(308): Homolog of NCBI NO: 15223317 NR Description: serine threonine kinase, putative; protein id: supported by cDNA: gi_14423523, supported by cDNA: gi_20259787
  misc_feature (1)..(308): Homolog of NCBI NO: 25387051 NR Description: probable serine/threonine kinase [imported] - thaliana >gi|12320856|gb|AAG50566.1|AC073506_8 serine/threonine
  misc_feature (1)..(308): Homolog of NCBI NO: 14423524 NR Description: similar to wpk4 protein kinase [Arabidopsis >gi|20259788|gb|AAM13241.1| similar to wpk4 protein kinase
  misc_feature (1)..(308): Homolog of NCBI NO: 30677898 NR Description: CBL-interacting protein kinase 9 [Arabidopsis
  misc_feature (1)..(308): Homolog of NCBI NO: 30677901 NR Description: CBL-interacting protein kinase 9 [Arabidopsis

SEQ ID NO: 93244 - DNA, 1545 bp, Arabidopsis thaliana; identical to SEQ ID NO: 89488
  misc_feature (1)..(1545): Ceres Seq. ID no. 12719104
  misc_feature: MA Experiment ID: 20000171 Result: Up-regulated in Transcription
  misc_feature: MA Experiment 20000171 PARAMETER Experiment Name: At_42deg_Heat_P Parameter: Age (day) Value: 14
  misc_feature: MA Experiment 20000171 PARAMETER Experiment Name: At_42deg_Heat_P Parameter: Organism Value: A. thaliana
  misc_feature: MA Experiment 20000171 PARAMETER Experiment Name: At_42deg_Heat_P Parameter: Plant Line Value: WS
  misc_feature: MA Experiment 20000171 PARAMETER Experiment Name: At_42deg_Heat_P Parameter: Temperature (deg C) Value: 42 vs. 22
  misc_feature: MA Experiment 20000171 PARAMETER Experiment Name: At_42deg_Heat_P Parameter: Timepoint (hr) Value: 1
  misc_feature: MA Experiment 20000171 PARAMETER Experiment Name: At_42deg_Heat_P Parameter: Tissue Value: Aerial
  misc_feature: MA Experiment ID: 20000173 Result: Up-regulated in Transcription
  misc_feature: MA Experiment 20000173 PARAMETER Experiment Name: At_42deg_Heat_P Parameter: Age (day) Value: 14
  misc_feature: MA Experiment 20000173 PARAMETER Experiment Name: At_42deg_Heat_P Parameter: Organism Value: A. thaliana
  misc_feature: MA Experiment 20000173 PARAMETER Experiment Name: At_42deg_Heat_P Parameter: Plant Line Value: WS
  misc_feature: MA Experiment 20000173 PARAMETER Experiment Name: At_42deg_Heat_P Parameter: Temperature (deg C) Value: 42 vs. 22
  misc_feature: MA Experiment 20000173 PARAMETER Experiment Name: At_42deg_Heat_P Parameter: Timepoint (hr) Value: 6
  misc_feature: MA Experiment 20000173 PARAMETER Experiment Name: At_42deg_Heat_P Parameter: Tissue Value: Aerial
  misc_feature: MA Experiment ID: 20000180 Result: Up-regulated in Transcription
  misc_feature: MA Experiment 20000180 PARAMETER Experiment Name: At_Germinating_Seeds_P Parameter: Age (hr) Value: 24 vs. 0
  misc_feature: MA Experiment 20000180 PARAMETER Experiment Name: At_Germinating_Seeds_P Parameter: Tissue Value: Germinating Seeds
  misc_feature: MA Experiment ID: 20000184 Result: Up-regulated in Transcription
  misc_feature: MA Experiment 20000184 PARAMETER Experiment Name: At_Shoots__P Parameter: Age (day) Value: 7
  misc_feature: MA Experiment 20000184 PARAMETER Experiment Name: At_Shoots__P Parameter: Tissue Value: Shoots vs. Whole Plant
  misc_feature: MA Experiment ID: 20000185 Result: Up-regulated in Transcription
  misc_feature: MA Experiment 20000185 PARAMETER Experiment Name: At_Roots__P Parameter: Age (day) Value: 7 vs. 21
  misc_feature: MA Experiment 20000185 PARAMETER Experiment Name: At_Roots__P Parameter: Organism Value: A. thaliana
  misc_feature: MA Experiment 20000185 PARAMETER Experiment Name: At_Roots__P Parameter: Tissue Value: Roots vs. Whole Plant
  misc_feature: MA Experiment ID: 20000437 Result: Down-regulated in Transcription
  misc_feature: MA Experiment 20000437 PARAMETER Experiment Name: At_Drought_P Parameter: Age (day) Value: 8
  misc_feature: MA Experiment 20000437 PARAMETER Experiment Name: At_Drought_P Parameter: Organism Value: A. thaliana
  misc_feature: MA Experiment 20000437 PARAMETER Experiment Name: At_Drought_P Parameter: Plant Line Value: WS
  misc_feature: MA Experiment 20000437 PARAMETER Experiment Name: At_Drought_P Parameter: Timepoint (hr) Value: 24
  misc_feature: MA Experiment 20000437 PARAMETER Experiment Name: At_Drought_P Parameter: Tissue Value: Whole Plant
  misc_feature: MA Experiment 20000437 PARAMETER Experiment Name: At_Drought_P Parameter: Treatment Value: Drought vs. No Drought
  misc_feature: MA Experiment ID: 20000438 Result: Up-regulated in Transcription
  misc_feature: MA Experiment 20000438 PARAMETER Experiment Name: At_Shoots__P Parameter: Age (day) Value: 14
  misc_feature: MA Experiment 20000438 PARAMETER Experiment Name: At_Shoots__P Parameter: Tissue Value: Shoots vs. Whole Plant
  misc_feature: MA Experiment ID: 20000439 Result: Up-regulated in Transcription
  misc_feature: MA Experiment 20000439 PARAMETER Experiment Name: At_Roots__P Parameter: Age (day) Value: 14 vs. 21
  misc_feature: MA Experiment 20000439 PARAMETER Experiment Name: At_Roots__P Parameter: Organism Value: A. thaliana
  misc_feature: MA Experiment 20000439 PARAMETER Experiment Name: At_Roots__P Parameter: Tissue Value: Roots vs. Whole Plant

SEQ ID NO: 93245 - protein, 514 aa, Arabidopsis thaliana; identical to SEQ ID NO: 89489
  peptide (1)..(514): Ceres Seq. ID no. 12719105
  misc_feature (40)..(505): Pfam Name: Cytochrome P450 Pfam Description: Cytochrome P450
  misc_feature (1)..(514): Homolog of NCBI NO: 15225832 NR Description: cytochrome p450 family; protein id: At2g27000.1
  misc_feature (146)..(513): Homolog of NCBI NO: 15225834 NR Description: cytochrome p450, putative; protein id: [Arabidopsis thaliana] >gi|25282589|pir||F84667 probable
  misc_feature (5)..(127): Homolog of NCBI NO: 15225834 NR Description: cytochrome p450, putative; protein id: [Arabidopsis thaliana] >gi|25282589|pir||F84667 probable
  misc_feature (13)..(511): Homolog of NCBI NO: 15233774 NR Description: cytochrome p450 family; protein id: At4g15350.1
  misc_feature (13)..(511): Homolog of NCBI NO: 7430617 NR Description: cytochrome P450 - Arabidopsis thaliana
  misc_feature (1)..(513): Homolog of NCBI NO: 15232418 NR Description: cytochrome P450, putative; protein id: At3g20950.1
  misc_feature (1)..(512): Homolog of NCBI NO: 15231052 NR Description: cytochrome p450 family; protein id: At3g20130.1
  misc_feature (1)..(510): Homolog of NCBI NO: 15231053 NR Description: cytochrome p450 family; protein id: At3g20140.1
  misc_feature (1)..(513): Homolog of NCBI NO: 30685997 NR Description: cytochrome P450 family [Arabidopsis thaliana]
  misc_feature (5)..(512): Homolog of NCBI NO: 18402480 NR Description: cytochrome P450, putative; protein id: supported by cDNA: 147792. [Arabidopsis thaliana]

SEQ ID NO: 93246 - protein, 510 aa, Arabidopsis thaliana; identical to SEQ ID NO: 89490
  peptide (1)..(510): Ceres Seq. ID no. 12719106
  misc_feature (36)..(501): Pfam Name: Cytochrome P450 Pfam Description: Cytochrome P450
  misc_feature (1)..(510): Homolog of NCBI NO: 15225832 NR Description: cytochrome p450 family; protein id: At2g27000.1
  misc_feature (142)..(509): Homolog of NCBI NO: 15225834 NR Description: cytochrome p450, putative; protein id: [Arabidopsis thaliana] >gi|25282589|pir||F84667 probable
  misc_feature (1)..(123): Homolog of NCBI NO: 15225834 NR Description: cytochrome p450, putative; protein id: [Arabidopsis thaliana] >gi|25282589|pir||F84667 probable
  misc_feature (9)..(507): Homolog of NCBI NO: 15233774 NR Description: cytochrome p450 family; protein id: At4g15350.1
  misc_feature (9)..(507): Homolog of NCBI NO: 7430617 NR Description: cytochrome P450 - Arabidopsis thaliana
  misc_feature (1)..(509): Homolog of NCBI NO: 15232418 NR Description: cytochrome P450, putative; protein id: At3g20950.1
  misc_feature (1)..(508): Homolog of NCBI NO: 15231052 NR Description: cytochrome p450 family; protein id: At3g20130.1
  misc_feature (1)..(506): Homolog of NCBI NO: 15231053 NR Description: cytochrome p450 family; protein id: At3g20140.1
  misc_feature (1)..(509): Homolog of NCBI NO: 30685997 NR Description: cytochrome P450 family [Arabidopsis thaliana]
  misc_feature (1)..(508): Homolog of NCBI NO: 18402480 NR Description: cytochrome P450, putative; protein id: supported by cDNA: 147792. [Arabidopsis thaliana]

SEQ ID NO: 93247 - protein, 455 aa, Arabidopsis thaliana; identical to SEQ ID NO: 89491
  peptide (1)..(455): Ceres Seq. ID no. 12719107
  misc_feature (1)..(446): Pfam Name: Cytochrome P450 Pfam Description: Cytochrome P450
  misc_feature (1)..(455): Homolog of NCBI NO: 15225832 NR Description: cytochrome p450 family; protein id: At2g27000.1
  misc_feature (87)..(454): Homolog of NCBI NO: 15225834 NR Description: cytochrome p450, putative; protein id: [Arabidopsis thaliana] >gi|25282589|pir||F84667 probable
  misc_feature (1)..(68): Homolog of NCBI NO: 15225834 NR Description: cytochrome p450, putative; protein id: [Arabidopsis thaliana] >gi|25282589|pir||F84667 probable
  misc_feature (1)..(452): Homolog of NCBI NO: 15233774 NR Description: cytochrome p450 family; protein id: At4g15350.1
  misc_feature (1)..(452): Homolog of NCBI NO: 7430617 NR Description: cytochrome P450 - Arabidopsis thaliana
  misc_feature (1)..(454): Homolog of NCBI NO: 15232418 NR Description: cytochrome P450, putative; protein id: At3g20950.1
  misc_feature (1)..(453): Homolog of NCBI NO: 15231052 NR Description: cytochrome p450 family; protein id: At3g20130.1
  misc_feature (1)..(451): Homolog of NCBI NO: 15231053 NR Description: cytochrome p450 family; protein id: At3g20140.1
  misc_feature (1)..(454): Homolog of NCBI NO: 30685997 NR Description: cytochrome P450 family [Arabidopsis thaliana]
  misc_feature (1)..(453): Homolog of NCBI NO: 18402480 NR Description: cytochrome P450, putative; protein id: supported by cDNA: 147792. [Arabidopsis thaliana]

SEQ ID NO: 93248 - DNA, 1118 bp, Arabidopsis thaliana; identical to SEQ ID NO: 89492
  misc_feature (1)..(1118): Ceres Seq. ID no. 12719112
  misc_feature: MA Experiment ID: 20000234 Result: Down-regulated in Transcription
  misc_feature: MA Experiment 20000234 PARAMETER Experiment Name: At_Siliques_P Parameter: Age (day) Value: 21
  misc_feature: MA Experiment 20000234 PARAMETER Experiment Name: At_Siliques_P Parameter: Organism Value: A. thaliana
  misc_feature: MA Experiment 20000234 PARAMETER Experiment Name: At_Siliques_P Parameter: Plant Line Value: WS
  misc_feature: MA Experiment 20000234 PARAMETER Experiment Name: At_Siliques_P Parameter: Tissue Value: Less Than 5mm Siliques vs. Whole Plant
  misc_feature: MA Experiment ID: 20000235 Result: Down-regulated in Transcription
  misc_feature: MA Experiment 20000235 PARAMETER Experiment Name: At_Siliques_P Parameter: Age (day) Value: 21
  misc_feature: MA Experiment 20000235 PARAMETER Experiment Name: At_Siliques_P Parameter: Organism Value: A. thaliana
  misc_feature: MA Experiment 20000235 PARAMETER Experiment Name: At_Siliques_P Parameter: Plant Line Value: WS
  misc_feature: MA Experiment 20000235 PARAMETER Experiment Name: At_Siliques_P Parameter: Tissue Value: 5-10mm Siliques vs. Whole Plant
  misc_feature: MA Experiment ID: 20000264 Result: Down-regulated in Transcription
  misc_feature: MA Experiment 20000264 PARAMETER Experiment Name: At_Open_Flower_P Parameter: Age (day) Value: 21
  misc_feature: MA Experiment 20000264 PARAMETER Experiment Name: At_Open_Flower_P Parameter: Plant Line Value: WS
  misc_feature: MA Experiment 20000264 PARAMETER Experiment Name: At_Open_Flower_P Parameter: Tissue Value: Open Flower vs. Whole Plant
  misc_feature: MA Experiment ID: 20000265 Result: Down-regulated in Transcription
  misc_feature: MA Experiment 20000265 PARAMETER Experiment Name: At_Open_Flower_P Parameter: Age (day) Value: 21
  misc_feature: MA Experiment 20000265 PARAMETER Experiment Name: At_Open_Flower_P Parameter: Plant Line Value: WS
  misc_feature: MA Experiment 20000265 PARAMETER Experiment Name: At_Open_Flower_P Parameter: Tissue Value: Closed Flower vs. Whole Plant
  misc_feature: MA Experiment ID: 20000268 Result: Down-regulated in Transcription
  misc_feature: MA Experiment 20000268 PARAMETER Experiment Name: At_100mM_NaCl__P Parameter: Age (day) Value: 14
  misc_feature: MA Experiment 20000268 PARAMETER Experiment Name: At_100mM_NaCl__P Parameter: Organism Value: A. thaliana
  misc_feature: MA Experiment 20000268 PARAMETER Experiment Name: At_100mM_NaCl__P Parameter: Plant Line Value: WS
  misc_feature: MA Experiment 20000268 PARAMETER Experiment Name: At_100mM_NaCl__P Parameter: Timepoint (hr) Value: 6
  misc_feature: MA Experiment 20000268 PARAMETER Experiment Name: At_100mM_NaCl__P Parameter: Tissue Value: Whole Plant
  misc_feature: MA Experiment 20000268 PARAMETER Experiment Name: At_100mM_NaCl__P Parameter: Treatment Value: 100mM NaCl vs. No Treatment
  misc_feature: MA Experiment ID: 20000286 Result: Down-regulated in Transcription
  misc_feature: MA Experiment 20000286 PARAMETER Experiment Name: At_Open_Flower_P Parameter: Age (day) Value: 21
  misc_feature: MA Experiment 20000286 PARAMETER Experiment Name: At_Open_Flower_P Parameter: Plant Line Value: WS
  misc_feature: MA Experiment 20000286 PARAMETER Experiment Name: At_Open_Flower_P Parameter: Tissue Value: Half Open vs. Whole Plant
  misc_feature: MA Experiment ID: 20000437 Result: Down-regulated in Transcription
  misc_feature: MA Experiment 20000437 PARAMETER Experiment Name: At_Drought_P Parameter: Age (day) Value: 8
  misc_feature: MA Experiment 20000437 PARAMETER Experiment Name: At_Drought_P Parameter: Organism Value: A. thaliana
  misc_feature: MA Experiment 20000437 PARAMETER Experiment Name: At_Drought_P Parameter: Plant Line Value: WS
  misc_feature: MA Experiment 20000437 PARAMETER Experiment Name: At_Drought_P Parameter: Timepoint (hr) Value: 24
  misc_feature: MA Experiment 20000437 PARAMETER Experiment Name: At_Drought_P Parameter: Tissue Value: Whole Plant
  misc_feature: MA Experiment 20000437 PARAMETER Experiment Name: At_Drought_P Parameter: Treatment Value: Drought vs. No Drought
  misc_feature: MA Experiment ID: 20000438 Result: Down-regulated in Transcription
  misc_feature: MA Experiment 20000438 PARAMETER Experiment Name: At_Shoots__P Parameter: Age (day) Value: 14
  misc_feature: MA Experiment 20000438 PARAMETER Experiment Name: At_Shoots__P Parameter: Tissue Value: Shoots vs. Whole Plant
  misc_feature: MA Experiment ID: 20000460 Result: Up-regulated in Transcription
  misc_feature: MA Experiment 20000460 PARAMETER Experiment Name: At_10percent_PEG_P Parameter: Age (day) Value: 12
  misc_feature: MA Experiment 20000460 PARAMETER Experiment Name: At_10percent_PEG_P Parameter: Organism Value: A. thaliana
  misc_feature: MA Experiment 20000460 PARAMETER Experiment Name: At_10percent_PEG_P Parameter: Plant Line Value: WS
  misc_feature: MA Experiment 20000460 PARAMETER Experiment Name: At_10percent_PEG_P Parameter: Timepoint (day) Value: 12
  misc_feature: MA Experiment 20000460 PARAMETER Experiment Name: At_10percent_PEG_P Parameter: Tissue Value: Whole Plant
  misc_feature: MA Experiment 20000460 PARAMETER Experiment Name: At_10percent_PEG_P Parameter: Treatment Value: 10percent PEG vs. No Treatment
  misc_feature: MA Experiment ID: 20000495 Result: Down-regulated in Transcription
  misc_feature: MA Experiment 20000495 PARAMETER Experiment Name: At_Guard_Cells_P Parameter: Harvest Date Value: 8/2/2002
  misc_feature: MA Experiment 20000495 PARAMETER Experiment Name: At_Guard_Cells_P Parameter: Organism Value: A. thaliana
  misc_feature: MA Experiment 20000495 PARAMETER Experiment Name: At_Guard_Cells_P Parameter: Tissue Value: Guard Cells vs. Leaves
  misc_feature: MA Experiment ID: 20000527 Result: Up-regulated in Transcription
  misc_feature: MA Experiment 20000527 PARAMETER Experiment Name: At_10percent_PEG_P Parameter: Age (day) Value: 20
  misc_feature: MA Experiment 20000527 PARAMETER Experiment Name: At_10percent_PEG_P Parameter: Organism Value: A. thaliana
  misc_feature: MA Experiment 20000527 PARAMETER Experiment Name: At_10percent_PEG_P Parameter: Plant Line Value: WS
  misc_feature: MA Experiment 20000527 PARAMETER Experiment Name: At_10percent_PEG_P Parameter: Timepoint (day) Value: 20
  misc_feature: MA Experiment 20000527 PARAMETER Experiment Name: At_10percent_PEG_P Parameter: Tissue Value: Whole Plant
  misc_feature: MA Experiment 20000527 PARAMETER Experiment Name: At_10percent_PEG_P Parameter: Treatment Value: 10percent PEG vs. No Treatment
  misc_feature: MA Experiment ID: 20000794 Result: Down-regulated in Transcription
  misc_feature: MA Experiment 20000794 PARAMETER Experiment Name: At_Petals_P Parameter: Age (day) Value: 23-25 days
  misc_feature: MA Experiment 20000794 PARAMETER Experiment Name: At_Petals_P Parameter: Plant Line Value: WS
  misc_feature: MA Experiment 20000794 PARAMETER Experiment Name: At_Petals_P Parameter: Tissue Value: Petals vs. Whole plant
  misc_feature: MA Experiment ID: 20001247 Result: Up-regulated in Transcription
  misc_feature: MA Experiment 20001247 PARAMETER Experiment Name: At_Far-red-induction_P Parameter: Age (day) Value: 7
  misc_feature: MA Experiment 20001247 PARAMETER Experiment Name: At_Far-red-induction_P Parameter: Light Value: Far-red vs. White
  misc_feature: MA Experiment 20001247 PARAMETER Experiment Name: At_Far-red-induction_P Parameter: Organism Value: A. thaliana
  misc_feature: MA Experiment 20001247 PARAMETER Experiment Name: At_Far-red-induction_P Parameter: Plant Line Value: Columbia
  misc_feature: MA Experiment 20001247 PARAMETER Experiment Name: At_Far-red-induction_P Parameter: Timepoint (hr) Value: 1
  misc_feature: MA Experiment 20001247 PARAMETER Experiment Name: At_Far-red-induction_P Parameter: Tissue Value: Whole Plant
  misc_feature: MA Experiment ID: 20001557 Result: Up-regulated in Transcription
  misc_feature: MA Experiment 20001557 PARAMETER Experiment Name: At_Drought_Soil_Dry_P Parameter: Age (day) Value: 27
  misc_feature: MA Experiment 20001557 PARAMETER Experiment Name: At_Drought_Soil_Dry_P Parameter: Organism Value: A. thaliana
  misc_feature: MA Experiment 20001557 PARAMETER Experiment Name: At_Drought_Soil_Dry_P Parameter: Plant Line Value: WS
  misc_feature: MA Experiment 20001557 PARAMETER Experiment Name: At_Drought_Soil_Dry_P Parameter: Post Timepoint (hr) Value: 3
  misc_feature: MA Experiment 20001557 PARAMETER Experiment Name: At_Drought_Soil_Dry_P Parameter: Post-Treatment Value: Re-Water vs. No Drought
  misc_feature: MA Experiment 20001557 PARAMETER Experiment Name: At_Drought_Soil_Dry_P Parameter: Timepoint (day) Value: 13
  misc_feature: MA Experiment 20001557 PARAMETER Experiment Name: At_Drought_Soil_Dry_P Parameter: Treatment Value: Drought vs. No Drought
  misc_feature: MA Experiment ID: 20001558 Result: Up-regulated in Transcription
  misc_feature: MA Experiment 20001558 PARAMETER Experiment Name: At_Drought_Soil_Dry_P Parameter: Age (day) Value: 27
  misc_feature: MA Experiment 20001558 PARAMETER Experiment Name: At_Drought_Soil_Dry_P Parameter: Organism Value: A. thaliana
  misc_feature: MA Experiment 20001558 PARAMETER Experiment Name: At_Drought_Soil_Dry_P Parameter: Plant Line Value: WS
  misc_feature: MA Experiment 20001558 PARAMETER Experiment Name: At_Drought_Soil_Dry_P Parameter: Post Timepoint (hr) Value: 6
  misc_feature: MA Experiment 20001558 PARAMETER Experiment Name: At_Drought_Soil_Dry_P Parameter: Post-Treatment Value: Re-Water vs. No Drought
  misc_feature: MA Experiment 20001558 PARAMETER Experiment Name: At_Drought_Soil_Dry_P Parameter: Timepoint (day) Value: 13
  misc_feature: MA Experiment 20001558 PARAMETER Experiment Name: At_Drought_Soil_Dry_P Parameter: Treatment Value: Drought vs. No Drought
  misc_feature: MA Experiment ID: 20001560 Result: Up-regulated in Transcription
  misc_feature: MA Experiment 20001560 PARAMETER Experiment Name: At_Drought_Soil_Dry_P Parameter: Age (day) Value: 28
  misc_feature: MA Experiment 20001560 PARAMETER Experiment Name: At_Drought_Soil_Dry_P Parameter: Organism Value: A. thaliana
  misc_feature: MA Experiment 20001560 PARAMETER Experiment Name: At_Drought_Soil_Dry_P Parameter: Plant Line Value: WS
  misc_feature: MA Experiment 20001560 PARAMETER Experiment Name: At_Drought_Soil_Dry_P Parameter: Post Timepoint (hr) Value: None
  misc_feature: MA Experiment 20001560 PARAMETER Experiment Name: At_Drought_Soil_Dry_P Parameter: Post-Treatment Value: None
  misc_feature: MA Experiment 20001560 PARAMETER Experiment Name: At_Drought_Soil_Dry_P Parameter: Timepoint (day) Value: 14
  misc_feature: MA Experiment 20001560 PARAMETER Experiment Name: At_Drought_Soil_Dry_P Parameter: Treatment Value: Drought vs. No Drought
  misc_feature: MA Experiment ID: 20001761 Result: Down-regulated in Transcription
  misc_feature: MA Experiment 20001761 PARAMETER Experiment Name: At_50mM_NH4NO3_L-to-H_P Parameter: Timepoint (hr) Value: 4
  misc_feature: MA Experiment 20001761 PARAMETER Experiment Name: At_50mM_NH4NO3_L-to-H_P Parameter: Tissue Value: Siliques
  misc_feature: MA Experiment 20001761 PARAMETER Experiment Name: At_50mM_NH4NO3_L-to-H_P Parameter: Treatment Value: 50mM NH4NO3 vs 100mM Mannitol

SEQ ID NO: 93249 - protein, 282 aa, Arabidopsis thaliana; identical to SEQ ID NO: 89493
  peptide (1)..(282): Ceres Seq. ID no. 12719113
  misc_feature (23)..(282): Homolog of NCBI NO: 18401317 NR Description: expressed protein; protein id: At2g27080.1, by cDNA: gi_13877664, supported by cDNA: gi_15450380, supported cDNA: gi_16974488 [Arabidopsis thaliana] >gi|25407856|pir||E84668
  misc_feature (40)..(281): Homolog of NCBI NO: 15242167 NR Description: putative protein; protein id: At5g21130.1 thaliana] >gi|29294053|gb|AAO73890.1| hypothetical protein
  misc_feature (52)..(275): Homolog of NCBI NO: 34909192 NR Description: P0425G02.19 [Oryza sativa (japonica
  misc_feature (70)..(275): Homolog of NCBI NO: 18408342 NR Description: expressed protein; protein id: At1g65690.1, by cDNA: 21639. [Arabidopsis thaliana]
  misc_feature (70)..(275): Homolog of NCBI NO: 6686408 NR Description: F1E22.7 [Arabidopsis thaliana]
  misc_feature (49)..(277): Homolog of NCBI NO: 15239459 NR Description: putative protein; protein id: At5g36970.1
  misc_feature (49)..(277): Homolog of NCBI NO: 10178216 NR Description: gb|AAF23842.1~gene_id:MLF18.15~similar to unknown
  misc_feature (29)..(276): Homolog of NCBI NO: 38344198 NR Description: OSJNBa0064G10.14 [Oryza sativa (japonica
  misc_feature (89)..(270): Homolog of NCBI NO: 15221846 NR Description: hypothetical protein; protein id: At1g54540.1
  misc_feature (43)..(281): Homolog of NCBI NO: 38636986 NR Description: unknown protein [Oryza sativa (japonica

SEQ ID NO: 93250 - protein, 260 aa, Arabidopsis thaliana; identical to SEQ ID NO: 89494
  peptide (1)..(260): Ceres Seq. ID no. 12719114
  misc_feature (1)..(260): Homolog of NCBI NO: 18401317 NR Description: expressed protein; protein id: At2g27080.1, by cDNA: gi_13877664, supported by cDNA: gi_15450380, supported cDNA: gi_16974488 [Arabidopsis thaliana] >gi|25407856|pir||E84668
  misc_feature (18)..(259): Homolog of NCBI NO: 15242167 NR Description: putative protein; protein id: At5g21130.1 thaliana] >gi|29294053|gb|AAO73890.1| hypothetical protein
  misc_feature (30)..(253): Homolog of NCBI NO: 34909192 NR Description: P0425G02.19 [Oryza sativa (japonica
  misc_feature (48)..(253): Homolog of NCBI NO: 18408342 NR Description: expressed protein; protein id: At1g65690.1, by cDNA: 21639. [Arabidopsis thaliana]
  misc_feature (48)..(253): Homolog of NCBI NO: 6686408 NR Description: F1E22.7 [Arabidopsis thaliana]
  misc_feature (27)..(255): Homolog of NCBI NO: 15239459 NR Description: putative protein; protein id: At5g36970.1
  misc_feature (27)..(255): Homolog of NCBI NO: 10178216 NR Description: gb|AAF23842.1~gene_id:MLF18.15~similar to unknown
  misc_feature (7)..(254): Homolog of NCBI NO: 38344198 NR Description: OSJNBa0064G10.14 [Oryza sativa (japonica
  misc_feature (67)..(248): Homolog of NCBI NO: 15221846 NR Description: hypothetical protein; protein id: At1g54540.1
  misc_feature (21)..(259): Homolog of NCBI NO: 38636986 NR Description: unknown protein [Oryza sativa (japonica

SEQ ID NO: 93251 - DNA, 2232 bp, Arabidopsis thaliana; identical to SEQ ID NO: 89495
  misc_feature (1)..(2232): Ceres Seq. ID no. 12719115
  misc_feature: MA Experiment ID: 20000179 Result: Down-regulated in Transcription
  misc_feature: MA Experiment 20000179 PARAMETER Experiment Name: At_Germinating_Seeds_P Parameter: Age (hr) Value: 6 vs. 0
  misc_feature: MA Experiment 20000179 PARAMETER Experiment Name: At_Germinating_Seeds_P Parameter: Tissue Value: Germinating Seeds
  misc_feature: MA Experiment ID: 20000180 Result: Down-regulated in Transcription
  misc_feature: MA Experiment 20000180 PARAMETER Experiment Name: At_Germinating_Seeds_P Parameter: Age (hr) Value: 24 vs. 0
  misc_feature: MA Experiment 20000180 PARAMETER Experiment Name: At_Germinating_Seeds_P Parameter: Tissue Value: Germinating Seeds
  misc_feature: MA Experiment ID: 20000184 Result: Down-regulated in Transcription
  misc_feature: MA Experiment 20000184 PARAMETER Experiment Name: At_Shoots__P Parameter: Age (day) Value: 7
  misc_feature: MA Experiment 20000184 PARAMETER Experiment Name: At_Shoots__P Parameter: Tissue Value: Shoots vs. Whole Plant

SEQ ID NO: 93252 - protein, 743 aa, Arabidopsis thaliana; identical to SEQ ID NO: 89496
  peptide (1)..(743): Ceres Seq. ID no. 12719116
  misc_feature (287)..(655): Pfam Name: Protein of unknown function (DUF632) Pfam Description: Protein of unknown function (DUF632)
  misc_feature (307)..(651): Homolog of NCBI NO: 15236022 NR Description: putative protein; protein id: At4g39790.1
  misc_feature (10)..(253): Homolog of NCBI NO: 15236022 NR Description: putative protein; protein id: At4g39790.1
  misc_feature (390)..(735): Homolog of NCBI NO: 15234640 NR Description: putative protein; protein id: At4g30130.1, by cDNA: gi_15810478 [Arabidopsis thaliana]
  misc_feature (1)..(341): Homolog of NCBI NO: 15234640 NR Description: putative protein; protein id: At4g30130.1, by cDNA: gi_15810478 [Arabidopsis thaliana]
  misc_feature (426)..(733): Homolog of NCBI NO: 22324428 NR Description: hypothetical protein~predicted by GeneMark.hmm
  misc_feature (380)..(733): Homolog of NCBI NO: 15219083 NR Description: putative bzip-like transcription factor; protein At1g21740.1 [Arabidopsis thaliana] >gi|25518309|pir||A86351
  misc_feature (1)..(98): Homolog of NCBI NO: 15219083 NR Description: putative bzip-like transcription factor; protein At1g21740.1 [Arabidopsis thaliana] >gi|25518309|pir||A86351
  misc_feature (1)..(410): Homolog of NCBI NO: 15223973 NR Description: unknown protein; protein id: At1g77500.1
  misc_feature (424)..(668): Homolog of NCBI NO: 15223973 NR Description: unknown protein; protein id: At1g77500.1
  misc_feature (413)..(674): Homolog of NCBI NO: 15236929 NR Description: putative protein; protein id: At4g35240.1

SEQ ID NO: 93253 - protein, 624 aa, Arabidopsis thaliana; identical to SEQ ID NO: 89497
  peptide (1)..(624): Ceres Seq. ID no. 12719117
  misc_feature (168)..(536): Pfam Name: Protein of unknown function (DUF632) Pfam Description: Protein of unknown function (DUF632)
  misc_feature (188)..(532): Homolog of NCBI NO: 15236022 NR Description: putative protein; protein id: At4g39790.1
  misc_feature (1)..(134): Homolog of NCBI NO: 15236022 NR Description: putative protein; protein id: At4g39790.1
  misc_feature (271)..(616): Homolog of NCBI NO: 15234640 NR Description: putative protein; protein id: At4g30130.1, by cDNA: gi_15810478 [Arabidopsis thaliana]
  misc_feature (1)..(222): Homolog of NCBI NO: 15234640 NR Description: putative protein; protein id: At4g30130.1, by cDNA: gi_15810478 [Arabidopsis thaliana]
  misc_feature (307)..(614): Homolog of NCBI NO: 22324428 NR Description: hypothetical protein~predicted by GeneMark.hmm
  misc_feature (261)..(614): Homolog of NCBI NO: 15219083 NR Description: putative bzip-like transcription factor; protein At1g21740.1 [Arabidopsis thaliana] >gi|25518309|pir||A86351
  misc_feature (1)..(291): Homolog of NCBI NO: 15223973 NR Description: unknown protein; protein id: At1g77500.1
  misc_feature (305)..(549): Homolog of NCBI NO: 15223973 NR Description: unknown protein; protein id: At1g77500.1
  misc_feature (294)..(555): Homolog of NCBI NO: 15236929 NR Description: putative protein; protein id: At4g35240.1
  misc_feature (49)..(219): Homolog of NCBI NO: 15236929 NR Description: putative protein; protein id: At4g35240.1

SEQ ID NO: 93254 - protein, 588 aa, Arabidopsis thaliana; identical to SEQ ID NO: 89498
  peptide (1)..(588): Ceres Seq. ID no. 12719118
  misc_feature (132)..(500): Pfam Name: Protein of unknown function (DUF632) Pfam Description: Protein of unknown function (DUF632)
  misc_feature (152)..(496): Homolog of NCBI NO: 15236022 NR Description: putative protein; protein id: At4g39790.1
  misc_feature (1)..(98): Homolog of NCBI NO: 15236022 NR Description: putative protein; protein id: At4g39790.1
  misc_feature (235)..(580): Homolog of NCBI NO: 15234640 NR Description: putative protein; protein id: At4g30130.1, by cDNA: gi_15810478 [Arabidopsis thaliana]
  misc_feature (1)..(186): Homolog of NCBI NO: 15234640 NR Description: putative protein; protein id: At4g30130.1, by cDNA: gi_15810478 [Arabidopsis thaliana]
  misc_feature (271)..(578): Homolog of NCBI NO: 22324428 NR Description: hypothetical protein~predicted by GeneMark.hmm
  misc_feature (225)..(578): Homolog of NCBI NO: 15219083 NR Description: putative bzip-like transcription factor; protein At1g21740.1 [Arabidopsis thaliana] >gi|25518309|pir||A86351
  misc_feature (1)..(255): Homolog of NCBI NO: 15223973 NR Description: unknown protein; protein id: At1g77500.1
  misc_feature (269)..(513): Homolog of NCBI NO: 15223973 NR Description: unknown protein; protein id: At1g77500.1
  misc_feature (258)..(519): Homolog of NCBI NO: 15236929 NR Description: putative protein; protein id: At4g35240.1
  misc_feature (13)..(183): Homolog of NCBI NO: 15236929 NR Description: putative protein; protein id: At4g35240.1

SEQ ID NO: 93255 - DNA, 2286 bp, Arabidopsis thaliana; identical to SEQ ID NO: 89499
  misc_feature (1)..(2286): Ceres Seq. ID no. 12719134
  misc_feature: MA Experiment ID: 20000180 Result: Down-regulated in Transcription
  misc_feature: MA Experiment 20000180 PARAMETER Experiment Name: At_Germinating_Seeds_P Parameter: Age (hr) Value: 24 vs. 0
  misc_feature: MA Experiment 20000180 PARAMETER Experiment Name: At_Germinating_Seeds_P Parameter: Tissue Value: Germinating Seeds
  misc_feature: MA Experiment ID: 20000227 Result: Up-regulated in Transcription
  misc_feature: MA Experiment 20000227 PARAMETER Experiment Name: At_Root-Tips-vs-Tops_P Parameter: Tissue Value: Root Tips vs. Root Tops
  misc_feature: MA Experiment ID: 20001906 Result: Up-regulated in Transcription
  misc_feature: MA Experiment 20001906 PARAMETER Experiment Name: At_Drought_Reproduction_P Parameter: Age (day) Value: 35
  misc_feature: MA Experiment 20001906 PARAMETER Experiment Name: At_Drought_Reproduction_P Parameter: Organism Value: A. thaliana
  misc_feature: MA Experiment 20001906 PARAMETER Experiment Name: At_Drought_Reproduction_P Parameter: Plant Line Value: WS
  misc_feature: MA Experiment 20001906 PARAMETER Experiment Name: At_Drought_Reproduction_P Parameter: Timepoint (day) Value: 5
  misc_feature: MA Experiment 20001906 PARAMETER Experiment Name: At_Drought_Reproduction_P Parameter: Tissue Value: Siliques
  misc_feature: MA Experiment 20001906 PARAMETER Experiment Name: At_Drought_Reproduction_P Parameter: Treatment Value: Drought vs. No Drought
  misc_feature: MA Experiment ID: 20001908 Result: Up-regulated in Transcription
  misc_feature: MA Experiment 20001908 PARAMETER Experiment Name: At_Drought_Reproduction_P Parameter: Age (day) Value: 40
  misc_feature: MA Experiment 20001908 PARAMETER Experiment Name: At_Drought_Reproduction_P Parameter: Organism Value: A. thaliana
  misc_feature: MA Experiment 20001908 PARAMETER Experiment Name: At_Drought_Reproduction_P Parameter: Plant Line Value: WS
  misc_feature: MA Experiment 20001908 PARAMETER Experiment Name: At_Drought_Reproduction_P Parameter: Timepoint (day) Value: 10
  misc_feature: MA Experiment 20001908 PARAMETER Experiment Name: At_Drought_Reproduction_P Parameter: Tissue Value: Siliques
  misc_feature: MA Experiment 20001908 PARAMETER Experiment Name: At_Drought_Reproduction_P Parameter: Treatment Value: Drought vs. No Drought

SEQ ID NO: 93256 - protein, 761 aa, Arabidopsis thaliana; identical to SEQ ID NO: 89500
  peptide (1)..(761): Ceres Seq. ID no. 12719135
  misc_feature (180)..(593): Pfam Name: Extensin-like region Pfam Description: Extensin-like region
  misc_feature (46)..(748): Homolog of NCBI NO: 11994733 NR Description: contains similarity to cell wall-plasma membrane
  misc_feature (46)..(757): Homolog of NCBI NO: 11994733 NR Description: contains similarity to cell wall-plasma membrane
  misc_feature (46)..(751): Homolog of NCBI NO: 11994733 NR Description: contains similarity to cell wall-plasma membrane
  misc_feature (46)..(758): Homolog of NCBI NO: 11994733 NR Description: contains similarity to cell wall-plasma membrane
  misc_feature (37)..(750): Homolog of NCBI NO: 1754989 NR Description: proline-rich protein PRP2 precursor [Lupinus
  misc_feature (46)..(748): Homolog of NCBI NO: 11994733 NR Description: contains similarity to cell wall-plasma membrane
  misc_feature (9)..(750): Homolog of NCBI NO: 1754989 NR Description: proline-rich protein PRP2 precursor [Lupinus
  misc_feature (42)..(727): Homolog of NCBI NO: 1754989 NR Description: proline-rich protein PRP2 precursor [Lupinus
  misc_feature (42)..(748): Homolog of NCBI NO: 11994733 NR Description: contains similarity to cell wall-plasma membrane
  misc_feature (36)..(748): Homolog of NCBI NO: 11994733 NR Description: contains similarity to cell wall-plasma membrane

SEQ ID NO: 93257 - protein, 605 aa, Arabidopsis thaliana; identical to SEQ ID NO: 89501
  peptide (1)..(605): Ceres Seq. ID no. 12719136
  misc_feature (24)..(437): Pfam Name: Extensin-like region Pfam Description: Extensin-like region
  misc_feature (1)..(592): Homolog of NCBI NO: 11994733 NR Description: contains similarity to cell wall-plasma membrane
  misc_feature (1)..(601): Homolog of NCBI NO: 11994733 NR Description: contains similarity to cell wall-plasma membrane
  misc_feature (1)..(595): Homolog of NCBI NO: 11994733 NR Description: contains similarity to cell wall-plasma membrane
  misc_feature (1)..(602): Homolog of NCBI NO: 11994733 NR Description: contains similarity to cell wall-plasma membrane
  misc_feature (1)..(594): Homolog of NCBI NO: 1754989 NR Description: proline-rich protein PRP2 precursor [Lupinus
  misc_feature (1)..(592): Homolog of NCBI NO: 11994733 NR Description: contains similarity to cell wall-plasma membrane
  misc_feature (1)..(594): Homolog of NCBI NO: 1754989 NR Description: proline-rich protein PRP2 precursor [Lupinus
  misc_feature (1)..(571): Homolog of NCBI NO: 1754989 NR Description: proline-rich protein PRP2 precursor [Lupinus
  misc_feature (1)..(592): Homolog of NCBI NO: 11994733 NR Description: contains similarity to cell wall-plasma membrane
  misc_feature (1)..(592): Homolog of NCBI NO: 11994733 NR Description: contains similarity to cell wall-plasma membrane

SEQ ID NO: 93258 - DNA, 1307 bp, Arabidopsis thaliana; identical to SEQ ID NO: 89502
  misc_feature (1)..(1307): Ceres Seq. ID no. 12719142
  misc_feature: MA Experiment ID: 20000307 Result: Up-regulated in Transcription
  misc_feature: MA Experiment 20000307 PARAMETER Experiment Name: At_Germinating_Seeds_Sub_P Parameter: Age (hr) Value: 24 vs. 0
  misc_feature: MA Experiment 20000307 PARAMETER Experiment Name: At_Germinating_Seeds_Sub_P Parameter: Organism Value: A. thaliana
  misc_feature: MA Experiment 20000307 PARAMETER Experiment Name: At_Germinating_Seeds_Sub_P Parameter: Plant Line Value: WS
  misc_feature: MA Experiment 20000307 PARAMETER Experiment Name: At_Germinating_Seeds_Sub_P Parameter: Tissue Value: Germinating Seeds
  misc_feature: MA Experiment ID: 20000315 Result: Up-regulated in Transcription
  misc_feature: MA Experiment 20000315 PARAMETER Experiment Name: At_14day_Shoots-Roots_Sub_P Parameter: Age (day) Value: 14
  misc_feature: MA Experiment 20000315 PARAMETER Experiment Name: At_14day_Shoots-Roots_Sub_P Parameter: Organism Value: A. thaliana
  misc_feature: MA Experiment 20000315 PARAMETER Experiment Name: At_14day_Shoots-Roots_Sub_P Parameter: Plant Line Value: WS
  misc_feature: MA Experiment 20000315 PARAMETER Experiment Name: At_14day_Shoots-Roots_Sub_P Parameter: Tissue Value: Shoots vs. Whole Plant
  misc_feature: MA Experiment ID: 20000328 Result: Up-regulated in Transcription
  misc_feature: MA Experiment 20000328 PARAMETER Experiment Name: At_42deg_Heat_Sub_P Parameter: Age (day) Value: 14
  misc_feature: MA Experiment 20000328 PARAMETER Experiment Name: At_42deg_Heat_Sub_P Parameter: Organism Value: A. thaliana
  misc_feature: MA Experiment 20000328 PARAMETER Experiment Name: At_42deg_Heat_Sub_P Parameter: Plant Line Value: WS
  misc_feature: MA Experiment 20000328 PARAMETER Experiment Name: At_42deg_Heat_Sub_P Parameter: Temperature (deg C) Value: 42 vs. 22
  misc_feature: MA Experiment 20000328 PARAMETER Experiment Name: At_42deg_Heat_Sub_P Parameter: Timepoint (hr) Value: 6
  misc_feature: MA Experiment 20000328 PARAMETER Experiment Name: At_42deg_Heat_Sub_P Parameter: Tissue Value: Aerial

SEQ ID NO: 93259 - protein, 348 aa, Arabidopsis thaliana; identical to SEQ ID NO: 89503
  peptide (1)..(348): Ceres Seq. ID no. 12719143
  misc_feature (128)..(347): Pfam Name: Papain family cysteine protease Pfam Description: Papain family cysteine protease
  misc_feature (1)..(348): Homolog of NCBI NO: 18401420 NR Description: cysteine proteinase; protein id: At2g27420.1, by cDNA: gi_17381153, supported by cDNA: gi_20465848 [Arabidopsis >gi|25289995|pir||F84672 probable cysteine proteinase cysteine
  misc_feature (1)..(348): Homolog of NCBI NO: 18408828 NR Description: cysteine protease; protein id: At3g49340.1
  misc_feature (1)..(348): Homolog of NCBI NO: 18403438 NR Description: cysteine proteinase; protein id: At2g34080.1
  misc_feature (3)..(348): Homolog of NCBI NO: 30690594 NR Description: cysteine proteinase [Arabidopsis thaliana]
  misc_feature (13)..(348): Homolog of NCBI NO: 25289991 NR Description: cysteine proteinase (EC 3.4.22.-) [similarity] - thaliana >gi|9502421|gb|AAF88120.1|AC021043_13 Putative cysteine
  misc_feature (5)..(348): Homolog of NCBI NO: 18396939 NR Description: cysteine protease; protein id: At1g29080.1
  misc_feature (3)..(348): Homolog of NCBI NO: 24285904 NR Description: cysteine proteinase precursor [Ipomoea batatas]
  misc_feature (1)..(348): Homolog of NCBI NO: 13491750 NR Description: cysteine protease [Ipomoea batatas]
  misc_feature (17)..(348): Homolog of NCBI NO: 535454 NR Description: cysteine proteinase
  misc_feature (22)..(347): Homolog of NCBI NO: 2118132 NR Description: cysteine proteinase (EC 3.4.22.-) - Douglas fir

SEQ ID NO: 93260 - protein, 310 aa, Arabidopsis thaliana; identical to SEQ ID NO: 89504
  peptide (1)..(310): Ceres Seq. ID no. 12719144
  misc_feature (90)..(309): Pfam Name: Papain family cysteine protease Pfam Description: Papain family cysteine protease
  misc_feature (1)..(310): Homolog of NCBI NO: 18401420 NR Description: cysteine proteinase; protein id: At2g27420.1, by cDNA: gi_17381153, supported by cDNA: gi_20465848 [Arabidopsis >gi|25289995|pir||F84672 probable cysteine proteinase cysteine
  misc_feature (1)..(310): Homolog of NCBI NO: 18408828 NR Description: cysteine protease; protein id: At3g49340.1
  misc_feature (1)..(310): Homolog of NCBI NO: 18403438 NR Description: cysteine proteinase; protein id: At2g34080.1
  misc_feature (1)..(310): Homolog of NCBI NO: 30690594 NR Description: cysteine proteinase [Arabidopsis thaliana]
  misc_feature (1)..(310): Homolog of NCBI NO: 25289991 NR Description: cysteine proteinase (EC 3.4.22.-) [similarity] - thaliana >gi|9502421|gb|AAF88120.1|AC021043_13 Putative cysteine
  misc_feature (1)..(310): Homolog of NCBI NO: 18396939 NR Description: cysteine protease; protein id: At1g29080.1
  misc_feature (1)..(310): Homolog of NCBI NO: 24285904 NR Description: cysteine proteinase precursor [Ipomoea batatas]
  misc_feature (1)..(310): Homolog of NCBI NO: 13491750 NR Description: cysteine protease [Ipomoea batatas]
  misc_feature (1)..(310): Homolog of NCBI NO: 535454 NR Description: cysteine proteinase
  misc_feature (1)..(309): Homolog of NCBI NO: 2118132 NR Description: cysteine proteinase (EC 3.4.22.-) - Douglas fir

SEQ ID NO: 93261 - protein, 278 aa, Arabidopsis thaliana; identical to SEQ ID NO: 89505
  peptide (1)..(278): Ceres Seq. ID no. 12719145
  misc_feature (58)..(277): Pfam Name: Papain family cysteine protease Pfam Description: Papain family cysteine protease
  misc_feature (1)..(278): Homolog of NCBI NO: 18401420 NR Description: cysteine proteinase; protein id: At2g27420.1, by cDNA: gi_17381153, supported by cDNA: gi_20465848 [Arabidopsis >gi|25289995|pir||F84672 probable cysteine proteinase cysteine
  misc_feature (1)..(278): Homolog of NCBI NO: 18408828 NR Description: cysteine protease; protein id: At3g49340.1
  misc_feature (1)..(278): Homolog of NCBI NO: 18403438 NR Description: cysteine proteinase; protein id: At2g34080.1
  misc_feature (1)..(278): Homolog of NCBI NO: 30690594 NR Description: cysteine proteinase [Arabidopsis thaliana]
  misc_feature (1)..(278): Homolog of NCBI NO: 25289991 NR Description: cysteine proteinase (EC 3.4.22.-) [similarity] - thaliana >gi|9502421|gb|AAF88120.1|AC021043_13 Putative cysteine
  misc_feature (1)..(278): Homolog of NCBI NO: 18396939 NR Description: cysteine protease; protein id: At1g29080.1
  misc_feature (1)..(278): Homolog of NCBI NO: 24285904 NR Description: cysteine proteinase precursor [Ipomoea batatas]
  misc_feature (1)..(278): Homolog of NCBI NO: 13491750 NR Description: cysteine protease [Ipomoea batatas]
  misc_feature (1)..(278): Homolog of NCBI NO: 535454 NR Description: cysteine proteinase
  misc_feature (1)..(277): Homolog of NCBI NO: 2118132 NR Description: cysteine proteinase (EC 3.4.22.-) - Douglas fir

SEQ ID NO: 93262 - DNA, 1683 bp, Arabidopsis thaliana; identical to SEQ ID NO: 89506
  misc_feature (1)..(1683): Ceres Seq. ID no. 12719182
  misc_feature: MA Experiment ID: 20000166 Result: Down-regulated in Transcription
  misc_feature: MA Experiment 20000166 PARAMETER Experiment Name: At_100uM_ABA_P Parameter: Age (day) Value: 14
  misc_feature: MA Experiment 20000166 PARAMETER Experiment Name: At_100uM_ABA_P Parameter: Organism Value: A. thaliana
  misc_feature: MA Experiment 20000166 PARAMETER Experiment Name: At_100uM_ABA_P Parameter: Plant Line Value: WS
  misc_feature: MA Experiment 20000166 PARAMETER Experiment Name: At_100uM_ABA_P Parameter: Timepoint (hr) Value: 1
  misc_feature: MA Experiment 20000166 PARAMETER Experiment Name: At_100uM_ABA_P Parameter: Tissue Value: Aerial
  misc_feature: MA Experiment 20000166 PARAMETER Experiment Name: At_100uM_ABA_P Parameter: Treatment Value: 100uM ABA vs. No Treatment
  misc_feature: MA Experiment ID: 20000169 Result: Down-regulated in Transcription
  misc_feature: MA Experiment 20000169 PARAMETER Experiment Name: At_100uM_ABA_P Parameter: Age (day) Value: 14
  misc_feature: MA Experiment 20000169 PARAMETER Experiment Name: At_100uM_ABA_P Parameter: Organism Value: A. thaliana
  misc_feature: MA Experiment 20000169 PARAMETER Experiment Name: At_100uM_ABA_P Parameter: Plant Line Value: WS
  misc_feature: MA Experiment 20000169 PARAMETER Experiment Name: At_100uM_ABA_P Parameter: Timepoint (hr) Value: 6
  misc_feature: MA Experiment 20000169 PARAMETER Experiment Name: At_100uM_ABA_P Parameter: Tissue Value: Aerial
  misc_feature: MA Experiment 20000169 PARAMETER Experiment Name: At_100uM_ABA_P Parameter: Treatment Value: 100uM ABA vs. No Treatment
  misc_feature: MA Experiment ID: 20000179 Result: Up-regulated in Transcription
  misc_feature: MA Experiment 20000179 PARAMETER Experiment Name: At_Germinating_Seeds_P Parameter: Age (hr) Value: 6 vs. 0
  misc_feature: MA Experiment 20000179 PARAMETER Experiment Name: At_Germinating_Seeds_P Parameter: Tissue Value: Germinating Seeds
  misc_feature: MA Experiment ID: 20000180 Result: Up-regulated in Transcription
  misc_feature: MA Experiment 20000180 PARAMETER Experiment Name: At_Germinating_Seeds_P Parameter: Age (hr) Value: 24 vs. 0
  misc_feature: MA Experiment 20000180 PARAMETER Experiment Name: At_Germinating_Seeds_P Parameter: Tissue Value: Germinating Seeds
  misc_feature: MA Experiment ID: 20000182 Result: Up-regulated in Transcription
  misc_feature: MA Experiment 20000182 PARAMETER Experiment Name: At_2mM_SA_P Parameter: Age (day) Value: 14
  misc_feature: MA Experiment 20000182 PARAMETER Experiment Name: At_2mM_SA_P Parameter: Organism Value: A. thaliana
  misc_feature: MA Experiment 20000182 PARAMETER Experiment Name: At_2mM_SA_P Parameter: Plant Line Value: WS
  misc_feature: MA Experiment 20000182 PARAMETER Experiment Name: At_2mM_SA_P Parameter: Timepoint (hr) Value: 6
  misc_feature: MA Experiment 20000182 PARAMETER Experiment Name: At_2mM_SA_P Parameter: Tissue Value: Aerial
  misc_feature: MA Experiment 20000182 PARAMETER Experiment Name: At_2mM_SA_P Parameter: Treatment Value: 2mM SA vs. No Treatment
  misc_feature: MA Experiment ID: 20000184 Result: Down-regulated in Transcription
  misc_feature: MA Experiment 20000184 PARAMETER Experiment Name: At_Shoots__P Parameter: Age (day) Value: 7
  misc_feature: MA Experiment 20000184 PARAMETER Experiment Name: At_Shoots__P Parameter: Tissue Value: Shoots vs. Whole Plant
  misc_feature: MA Experiment ID: 20000185 Result: Down-regulated in Transcription
  misc_feature: MA Experiment 20000185 PARAMETER Experiment Name: At_Roots__P Parameter: Age (day) Value: 7 vs. 21
  misc_feature: MA Experiment 20000185 PARAMETER Experiment Name: At_Roots__P Parameter: Organism Value: A. thaliana
  misc_feature: MA Experiment 20000185 PARAMETER Experiment Name: At_Roots__P Parameter: Tissue Value: Roots vs. Whole Plant
  misc_feature: MA Experiment ID: 20000211 Result: Up-regulated in Transcription
  misc_feature: MA Experiment 20000211 PARAMETER Experiment Name: At_0.001percent_MeJA__P Parameter: Age (day) Value: 14
  misc_feature: MA Experiment 20000211 PARAMETER Experiment Name: At_0.001percent_MeJA__P Parameter: Organism Value: A. thaliana
  misc_feature: MA Experiment 20000211 PARAMETER Experiment Name: At_0.001percent_MeJA__P Parameter: Plant Line Value: WS
  misc_feature: MA Experiment 20000211 PARAMETER Experiment Name: At_0.001percent_MeJA__P Parameter: Timepoint (hr) Value: 1
  misc_feature: MA Experiment 20000211 PARAMETER Experiment Name: At_0.001percent_MeJA__P Parameter: Tissue Value: Aerial
  misc_feature: MA Experiment 20000211 PARAMETER Experiment Name: At_0.001percent_MeJA__P Parameter: Treatment Value: 0.001percent MeJA vs. No Treatment
  misc_feature: MA Experiment ID: 20000264 Result: Down-regulated in Transcription
  misc_feature: MA Experiment 20000264 PARAMETER Experiment Name: At_Open_Flower_P Parameter: Age (day) Value: 21
  misc_feature: MA Experiment 20000264 PARAMETER Experiment Name: At_Open_Flower_P Parameter: Plant Line Value: WS
  misc_feature: MA Experiment 20000264 PARAMETER Experiment Name: At_Open_Flower_P Parameter: Tissue Value: Open Flower vs. Whole Plant
  misc_feature: MA Experiment ID: 20000265 Result: Down-regulated in Transcription
  misc_feature: MA Experiment 20000265 PARAMETER Experiment Name: At_Open_Flower_P Parameter: Age (day) Value: 21
  misc_feature: MA Experiment 20000265 PARAMETER Experiment Name: At_Open_Flower_P Parameter: Plant Line Value: WS
  misc_feature: MA Experiment 20000265 PARAMETER Experiment Name: At_Open_Flower_P Parameter: Tissue Value: Closed Flower vs. Whole Plant
  misc_feature: MA Experiment ID: 20000267 Result: Up-regulated in Transcription
  misc_feature: MA Experiment 20000267 PARAMETER Experiment Name: At_Drought_P Parameter: Age (day) Value: 7
  misc_feature: MA Experiment 20000267 PARAMETER Experiment Name: At_Drought_P Parameter: Organism Value: A. thaliana
  misc_feature: MA Experiment 20000267 PARAMETER Experiment Name: At_Drought_P Parameter: Plant Line Value: WS
  misc_feature: MA Experiment 20000267 PARAMETER Experiment Name: At_Drought_P Parameter: Timepoint (hr) Value: 6
  misc_feature: MA Experiment 20000267 PARAMETER Experiment Name: At_Drought_P Parameter: Tissue Value: Whole Plant
  misc_feature: MA Experiment 20000267 PARAMETER Experiment Name: At_Drought_P Parameter: Treatment Value: Drought vs. No Drought
  misc_feature: MA Experiment ID: 20000286 Result: Down-regulated in Transcription
  misc_feature: MA Experiment 20000286 PARAMETER Experiment Name: At_Open_Flower_P Parameter: Age (day) Value: 21
  misc_feature: MA Experiment 20000286 PARAMETER Experiment Name: At_Open_Flower_P Parameter: Plant Line Value: WS
  misc_feature: MA Experiment 20000286 PARAMETER Experiment Name: At_Open_Flower_P Parameter: Tissue Value: Half Open vs. Whole Plant
  misc_feature: MA Experiment ID: 20000438 Result: Down-regulated in Transcription
  misc_feature: MA Experiment 20000438 PARAMETER Experiment Name: At_Shoots__P Parameter: Age (day) Value: 14
  misc_feature: MA Experiment 20000438 PARAMETER Experiment Name: At_Shoots__P Parameter: Tissue Value: Shoots vs. Whole Plant
  misc_feature: MA Experiment ID: 20000439 Result: Down-regulated in Transcription
  misc_feature: MA Experiment 20000439 PARAMETER Experiment Name: At_Roots__P Parameter: Age (day) Value: 14 vs. 21
  misc_feature: MA Experiment 20000439 PARAMETER Experiment Name: At_Roots__P Parameter: Organism Value: A. thaliana
  misc_feature: MA Experiment 20000439 PARAMETER Experiment Name: At_Roots__P Parameter: Tissue Value: Roots vs. Whole Plant
  misc_feature: MA Experiment ID: 20000451 Result: Up-regulated in Transcription
  misc_feature: MA Experiment 20000451 PARAMETER Experiment Name: At_CS6879_Shoots-Roots_P Parameter: Age (day) Value: 14
  misc_feature: MA Experiment 20000451 PARAMETER Experiment Name: At_CS6879_Shoots-Roots_P Parameter: Organism Value: A. thaliana
  misc_feature: MA Experiment 20000451 PARAMETER Experiment Name: At_CS6879_Shoots-Roots_P Parameter: Plant Line Value: CS6879 vs. WS
  misc_feature: MA Experiment 20000451 PARAMETER Experiment Name: At_CS6879_Shoots-Roots_P Parameter: Tissue Value: Roots
  misc_feature: MA Experiment ID: 20000460 Result: Up-regulated in Transcription
  misc_feature: MA Experiment 20000460 PARAMETER Experiment Name: At_10percent_PEG_P Parameter: Age (day) Value: 12
  misc_feature: MA Experiment 20000460 PARAMETER Experiment Name: At_10percent_PEG_P Parameter: Organism Value: A. thaliana
  misc_feature: MA Experiment 20000460 PARAMETER Experiment Name: At_10percent_PEG_P Parameter: Plant Line Value: WS
  misc_feature: MA Experiment 20000460 PARAMETER Experiment Name: At_10percent_PEG_P Parameter: Timepoint (day) Value: 12
  misc_feature: MA Experiment 20000460 PARAMETER Experiment Name: At_10percent_PEG_P Parameter: Tissue Value: Whole Plant
  misc_feature: MA Experiment 20000460 PARAMETER Experiment Name: At_10percent_PEG_P Parameter: Treatment Value: 10percent PEG vs. No Treatment
  misc_feature: MA Experiment ID: 20000495 Result: Down-regulated in Transcription
  misc_feature: MA Experiment 20000495 PARAMETER Experiment Name: At_Guard_Cells_P Parameter: Harvest Date Value: 8/2/2002
  misc_feature: MA Experiment 20000495 PARAMETER Experiment Name: At_Guard_Cells_P Parameter: Organism Value: A. thaliana
  misc_feature: MA Experiment 20000495 PARAMETER Experiment Name: At_Guard_Cells_P Parameter: Tissue Value: Guard Cells vs. Leaves
  misc_feature: MA Experiment ID: 20000496 Result: Down-regulated in Transcription
  misc_feature: MA Experiment 20000496 PARAMETER Experiment Name: At_Guard_Cells_P Parameter: Harvest Date Value: 7/19/2002
  misc_feature: MA Experiment 20000496 PARAMETER Experiment Name: At_Guard_Cells_P Parameter: Organism Value: Canola
  misc_feature: MA Experiment 20000496 PARAMETER Experiment Name: At_Guard_Cells_P Parameter: Tissue Value: Guard Cells vs. Leaves
  misc_feature: MA Experiment ID: 20000527 Result: Up-regulated in Transcription
  misc_feature: MA Experiment 20000527 PARAMETER Experiment Name: At_10percent_PEG_P Parameter: Age (day) Value: 20
  misc_feature: MA Experiment 20000527 PARAMETER Experiment Name: At_10percent_PEG_P Parameter: Organism Value: A. thaliana
  misc_feature: MA Experiment 20000527 PARAMETER Experiment Name: At_10percent_PEG_P Parameter: Plant Line Value: WS
  misc_feature: MA Experiment 20000527 PARAMETER Experiment Name: At_10percent_PEG_P Parameter: Timepoint (day) Value: 20
  misc_feature: MA Experiment 20000527 PARAMETER Experiment Name: At_10percent_PEG_P Parameter: Tissue Value: Whole Plant
  misc_feature: MA Experiment 20000527 PARAMETER Experiment Name: At_10percent_PEG_P Parameter: Treatment Value: 10percent PEG vs. No Treatment
  misc_feature: MA Experiment ID: 20000573 Result: Up-regulated in Transcription
  misc_feature: MA Experiment 20000573 PARAMETER Experiment Name: At_100uM_ABA_Mutants__P Parameter: Organism Value: A. thaliana
  misc_feature: MA Experiment 20000573 PARAMETER Experiment Name: At_100uM_ABA_Mutants__P Parameter: Plant Line Value: CS22 vs. Ler wt
  misc_feature: MA Experiment 20000573 PARAMETER Experiment Name: At_100uM_ABA_Mutants__P Parameter: Timepoint (hr) Value: N/A
  misc_feature: MA Experiment 20000573 PARAMETER Experiment Name: At_100uM_ABA_Mutants__P Parameter: Tissue Value: Whole Plant
  misc_feature: MA Experiment 20000573 PARAMETER Experiment Name: At_100uM_ABA_Mutants__P Parameter: Treatment Value: None
  misc_feature: MA Experiment ID: 20000574 Result: Up-regulated in Transcription
  misc_feature: MA Experiment 20000574 PARAMETER Experiment Name: At_100uM_ABA_Mutants__P Parameter: Organism Value: A. thaliana
  misc_feature: MA Experiment 20000574 PARAMETER Experiment Name: At_100uM_ABA_Mutants__P Parameter: Plant Line Value: CS23 vs. Ler wt
  misc_feature: MA Experiment 20000574 PARAMETER Experiment Name: At_100uM_ABA_Mutants__P Parameter: Timepoint (hr) Value: N/A
  misc_feature: MA Experiment 20000574 PARAMETER Experiment Name: At_100uM_ABA_Mutants__P Parameter: Tissue Value: Whole Plant
  misc_feature: MA Experiment 20000574 PARAMETER Experiment Name: At_100uM_ABA_Mutants__P Parameter: Treatment Value: None
  misc_feature: MA Experiment ID: 20000575 Result: Down-regulated in Transcription
  misc_feature: MA Experiment 20000575 PARAMETER Experiment Name: At_100uM_ABA_Mutants__P Parameter: Organism Value: A. thaliana
  misc_feature: MA Experiment 20000575 PARAMETER Experiment Name: At_100uM_ABA_Mutants__P Parameter: Plant Line Value: CS22
  misc_feature: MA Experiment 20000575 PARAMETER Experiment Name: At_100uM_ABA_Mutants__P Parameter: Timepoint (hr) Value: 6
  misc_feature: MA Experiment 20000575 PARAMETER Experiment Name: At_100uM_ABA_Mutants__P Parameter: Tissue Value: Whole Plant
  misc_feature: MA Experiment 20000575 PARAMETER Experiment Name: At_100uM_ABA_Mutants__P Parameter: Treatment Value: 1uM ABA vs. No Treatment
  misc_feature: MA Experiment ID: 20000794 Result: Down-regulated in Transcription
  misc_feature: MA Experiment 20000794 PARAMETER Experiment Name: At_Petals_P Parameter: Age (day) Value: 23-25 days
  misc_feature: MA Experiment 20000794 PARAMETER Experiment Name: At_Petals_P Parameter: Plant Line Value: WS
  misc_feature: MA Experiment 20000794 PARAMETER Experiment Name: At_Petals_P Parameter: Tissue Value: Petals vs. Whole plant
  misc_feature: MA Experiment ID: 20001247 Result: Up-regulated in Transcription
  misc_feature: MA Experiment 20001247 PARAMETER Experiment Name: At_Far-red-induction_P Parameter: Age (day) Value: 7
  misc_feature: MA Experiment 20001247 PARAMETER Experiment Name: At_Far-red-induction_P Parameter: Light Value: Far-red vs. White
  misc_feature: MA Experiment 20001247 PARAMETER Experiment Name: At_Far-red-induction_P Parameter: Organism Value: A. thaliana
  misc_feature: MA Experiment 20001247 PARAMETER Experiment Name: At_Far-red-induction_P Parameter: Plant Line Value: Columbia
  misc_feature: MA Experiment 20001247 PARAMETER Experiment Name: At_Far-red-induction_P Parameter: Timepoint (hr) Value: 1
  misc_feature: MA Experiment 20001247 PARAMETER Experiment Name: At_Far-red-induction_P Parameter: Tissue Value: Whole Plant
  misc_feature: MA Experiment ID: 20001450 Result: Down-regulated in Transcription
  misc_feature: MA Experiment 20001450 PARAMETER Experiment Name: At_Far-red-induction_P Parameter: Age (day) Value: 7
  misc_feature: MA Experiment 20001450 PARAMETER Experiment Name: At_Far-red-induction_P Parameter: Light Value: Far-red vs. White
  misc_feature: MA Experiment 20001450 PARAMETER Experiment Name: At_Far-red-induction_P Parameter: Organism Value: A. thaliana
  misc_feature: MA Experiment 20001450 PARAMETER Experiment Name: At_Far-red-induction_P Parameter: Plant Line Value: Columbia
  misc_feature: MA Experiment 20001450 PARAMETER Experiment Name: At_Far-red-induction_P Parameter: Timepoint (hr) Value: 8
  misc_feature: MA Experiment 20001450 PARAMETER Experiment Name: At_Far-red-induction_P Parameter: Tissue Value: Whole Plant
  misc_feature: MA Experiment ID: 20001557 Result: Up-regulated in Transcription
  misc_feature: MA Experiment 20001557 PARAMETER Experiment Name: At_Drought_Soil_Dry_P Parameter: Age (day) Value: 27
  misc_feature: MA Experiment 20001557 PARAMETER Experiment Name: At_Drought_Soil_Dry_P Parameter: Organism Value: A. thaliana
  misc_feature: MA Experiment 20001557 PARAMETER Experiment Name: At_Drought_Soil_Dry_P Parameter: Plant Line Value: WS
  misc_feature: MA Experiment 20001557 PARAMETER Experiment Name: At_Drought_Soil_Dry_P Parameter: Post Timepoint (hr) Value: 3
  misc_feature: MA Experiment 20001557 PARAMETER Experiment Name: At_Drought_Soil_Dry_P Parameter: Post-Treatment Value: Re-Water vs. No Drought
  misc_feature: MA Experiment 20001557 PARAMETER Experiment Name: At_Drought_Soil_Dry_P Parameter: Timepoint (day) Value: 13
  misc_feature: MA Experiment 20001557 PARAMETER Experiment Name: At_Drought_Soil_Dry_P Parameter: Treatment Value: Drought vs. No Drought
  misc_feature: MA Experiment ID: 20001770 Result: Up-regulated in Transcription
  misc_feature: MA Experiment 20001770 PARAMETER Experiment Name: At_Far-red-enriched-adult_P Parameter: Age (day) Value: 28
  misc_feature: MA Experiment 20001770 PARAMETER Experiment Name: At_Far-red-enriched-adult_P Parameter: Light Value: Far-red enriched vs. White
  misc_feature: MA Experiment 20001770 PARAMETER Experiment Name: At_Far-red-enriched-adult_P Parameter: Organism Value: A. thaliana
  misc_feature: MA Experiment 20001770 PARAMETER Experiment Name: At_Far-red-enriched-adult_P Parameter: Plant Line Value: Columbia
  misc_feature: MA Experiment 20001770 PARAMETER Experiment Name: At_Far-red-enriched-adult_P Parameter: Timepoint (hr) Value: 8
  misc_feature: MA Experiment 20001770 PARAMETER Experiment Name: At_Far-red-enriched-adult_P Parameter: Tissue Value: Aerial
  misc_feature: MA Experiment ID: 20001904 Result: Down-regulated in Transcription
  misc_feature: MA Experiment 20001904 PARAMETER Experiment Name: At_Drought_Reproduction_P Parameter: Age (day) Value: 37
  misc_feature: MA Experiment 20001904 PARAMETER Experiment Name: At_Drought_Reproduction_P Parameter: Organism Value: A. thaliana
  misc_feature: MA Experiment 20001904 PARAMETER Experiment Name: At_Drought_Reproduction_P Parameter: Plant Line Value: WS
  misc_feature: MA Experiment 20001904 PARAMETER Experiment Name: At_Drought_Reproduction_P Parameter: Timepoint (day) Value: 7
  misc_feature: MA Experiment 20001904 PARAMETER Experiment Name: At_Drought_Reproduction_P Parameter: Tissue Value: Rosettes
  misc_feature: MA Experiment 20001904 PARAMETER Experiment Name: At_Drought_Reproduction_P Parameter: Treatment Value: Drought vs. No Drought

SEQ ID NO: 93263 - protein, 517 aa, Arabidopsis thaliana; identical to SEQ ID NO: 89507
  peptide (1)..(517): Ceres Seq. ID no. 12719183
  misc_feature (23)..(517): Homolog of NCBI NO: 15226228 NR Description: cytochrome p450, putative; protein id: supported by cDNA: gi_13877668, supported by cDNA: gi_18087601 thaliana] >gi|25282628|pir||G84675 probable cytochrome P450
  misc_feature (28)..(516): Homolog of NCBI NO: 34908446 NR Description: putative cytochrome P450 [Oryza sativa (japonica group)] >gi|15290017|dbj|BAB63711.1| putative cytochrome P450
  misc_feature (23)..(517): Homolog of NCBI NO: 15228396 NR Description: cytochrome p450, putative; protein id: At3g48520.1
  misc_feature (24)..(516): Homolog of NCBI NO: 21536522 NR Description: cytochrome P450-like protein [Arabidopsis
  misc_feature (24)..(516): Homolog of NCBI NO: 26452145 NR Description: putative cytochrome P450 [Arabidopsis thaliana]
  misc_feature (24)..(516): Homolog of NCBI NO: 15242759 NR Description: cytochrome P450, putative; protein id: supported by cDNA: 101598. [Arabidopsis thaliana]
  misc_feature (77)..(516): Homolog of NCBI NO: 18000072 NR Description: cytochrome P450-dependent fatty acid hydroxylase
  misc_feature (16)..(516): Homolog of NCBI NO: 18000066 NR Description: cytochrome P450-dependent fatty acid hydroxylase
  misc_feature (77)..(516): Homolog of NCBI NO: 34909022 NR Description: cytochrome P450-like protein [Oryza sativa
  misc_feature (16)..(517): Homolog of NCBI NO: 18000070 NR Description: cytochrome P450-dependent fatty acid hydroxylase

SEQ ID NO: 93264 - protein, 495 aa, Arabidopsis thaliana; identical to SEQ ID NO: 89508
  peptide (1)..(495): Ceres Seq. ID no. 12719184
  misc_feature (1)..(495): Homolog of NCBI NO: 15226228 NR Description: cytochrome p450, putative; protein id: supported by cDNA: gi_13877668, supported by cDNA: gi_18087601 thaliana] >gi|25282628|pir||G84675 probable cytochrome P450
  misc_feature (6)..(494): Homolog of NCBI NO: 34908446 NR Description: putative cytochrome P450 [Oryza sativa (japonica group)] >gi|15290017|dbj|BAB63711.1| putative cytochrome P450
  misc_feature (1)..(495): Homolog of NCBI NO: 15228396 NR Description: cytochrome p450, putative; protein id: At3g48520.1
  misc_feature (2)..(494): Homolog of NCBI NO: 21536522 NR Description: cytochrome P450-like protein [Arabidopsis
  misc_feature (2)..(494): Homolog of NCBI NO: 26452145 NR Description: putative cytochrome P450 [Arabidopsis thaliana]
  misc_feature (2)..(494): Homolog of NCBI NO: 15242759 NR Description: cytochrome P450, putative; protein id: supported by cDNA: 101598. [Arabidopsis thaliana]
  misc_feature (55)..(494): Homolog of NCBI NO: 18000072 NR Description: cytochrome P450-dependent fatty acid hydroxylase
  misc_feature (1)..(494): Homolog of NCBI NO: 18000066 NR Description: cytochrome P450-dependent fatty acid hydroxylase
  misc_feature (55)..(494): Homolog of NCBI NO: 34909022 NR Description: cytochrome P450-like protein [Oryza sativa
  misc_feature (1)..(495): Homolog of NCBI NO: 18000070 NR Description: cytochrome P450-dependent fatty acid hydroxylase

SEQ ID NO: 93265 - DNA, 1371 bp, Arabidopsis thaliana; identical to SEQ ID NO: 89509
  misc_feature (1)..(1371): Ceres Seq. ID no. 12719239
  misc_feature: MA Experiment ID: 20000180 Result: Up-regulated in Transcription
  misc_feature: MA Experiment 20000180 PARAMETER Experiment Name: At_Germinating_Seeds_P Parameter: Age (hr) Value: 24 vs. 0
  misc_feature: MA Experiment 20000180 PARAMETER Experiment Name: At_Germinating_Seeds_P Parameter: Tissue Value: Germinating Seeds

SEQ ID NO: 93266 - protein, 456 aa, Arabidopsis thaliana; identical to SEQ ID NO: 89510
  peptide (1)..(456): Ceres Seq. ID no. 12719240
  misc_feature (25)..(344): Pfam Name: Glycosyl hydrolases family 17 Pfam Description: Glycosyl hydrolases family 17
  misc_feature (1)..(456): Homolog of NCBI NO: 15226720 NR Description: glycosyl hydrolase family 17; protein id:
  misc_feature (1)..(350): Homolog of NCBI NO: 30690053 NR Description: glycosyl hydrolase family 17 [Arabidopsis
  misc_feature (21)..(350): Homolog of NCBI NO: 7447982 NR Description: hypothetical protein T4L20.60 - Arabidopsis (fragment) >gi|3641838|emb|CAA18827.1| putative protein
  misc_feature (4)..(443): Homolog of NCBI NO: 14279169 NR Description: beta-1,3-glucanase-like protein [Olea europaea]
  misc_feature (5)..(443): Homolog of NCBI NO: 31126737 NR Description: putative beta 1,3-glucanase [Oryza sativa
  misc_feature (8)..(356): Homolog of NCBI NO: 22327528 NR Description: glycosyl hydrolase family 17; protein id:
  misc_feature (8)..(362): Homolog of NCBI NO: 10177275 NR Description: beta-1,3-glucanase-like protein [Arabidopsis
  misc_feature (4)..(368): Homolog of NCBI NO: 34902328 NR Description: Putative glycosyl hydrolase [Oryza sativa
  misc_feature (1)..(452): Homolog of NCBI NO: 9758115 NR Description: beta-1,3-glucanase-like protein [Arabidopsis
  misc_feature (3)..(451): Homolog of NCBI NO: 11071974 NR Description: elicitor inducible beta-1,3-glucanase Nt-SubE76

SEQ ID NO: 93267 - protein, 322 aa, Arabidopsis thaliana; identical to SEQ ID NO: 89511
  peptide (1)..(322): Ceres Seq. ID no. 12719241
  misc_feature (1)..(210): Pfam Name: Glycosyl hydrolases family 17 Pfam Description: Glycosyl hydrolases family 17
  misc_feature (1)..(322): Homolog of NCBI NO: 15226720 NR Description: glycosyl hydrolase family 17; protein id:
  misc_feature (1)..(216): Homolog of NCBI NO: 30690053 NR Description: glycosyl hydrolase family 17 [Arabidopsis
  misc_feature (1)..(216): Homolog of NCBI NO: 7447982 NR Description: hypothetical protein T4L20.60 - Arabidopsis (fragment) >gi|3641838|emb|CAA18827.1| putative protein
  misc_feature (1)..(309): Homolog of NCBI NO: 14279169 NR Description: beta-1,3-glucanase-like protein [Olea europaea]
  misc_feature (1)..(309): Homolog of NCBI NO: 31126737 NR Description: putative beta 1,3-glucanase [Oryza sativa
  misc_feature (1)..(222): Homolog of NCBI NO: 22327528 NR Description: glycosyl hydrolase family 17; protein id:
  misc_feature (1)..(228): Homolog of NCBI NO: 10177275 NR Description: beta-1,3-glucanase-like protein [Arabidopsis
  misc_feature (1)..(234): Homolog of NCBI NO: 34902328 NR Description: Putative glycosyl hydrolase [Oryza sativa
  misc_feature (1)..(318): Homolog of NCBI NO: 9758115 NR Description: beta-1,3-glucanase-like protein [Arabidopsis
  misc_feature (1)..(317): Homolog of NCBI NO: 11071974 NR Description: elicitor inducible beta-1,3-glucanase Nt-SubE76

SEQ ID NO: 93268 - protein, 298 aa, Arabidopsis thaliana; identical to SEQ ID NO: 89512
  peptide (1)..(298): Ceres Seq. ID no. 12719242
  misc_feature (1)..(186): Pfam Name: Glycosyl hydrolases family 17 Pfam Description: Glycosyl hydrolases family 17
  misc_feature (1)..(298): Homolog of NCBI NO: 15226720 NR Description: glycosyl hydrolase family 17; protein id:
  misc_feature (1)..(192): Homolog of NCBI NO: 30690053 NR Description: glycosyl hydrolase family 17 [Arabidopsis
  misc_feature (1)..(192): Homolog of NCBI NO: 7447982 NR Description: hypothetical protein T4L20.60 - Arabidopsis (fragment) >gi|3641838|emb|CAA18827.1| putative protein
  misc_feature (1)..(285): Homolog of NCBI NO: 14279169 NR Description: beta-1,3-glucanase-like protein [Olea europaea]
  misc_feature (1)..(285): Homolog of NCBI NO: 31126737 NR Description: putative beta 1,3-glucanase [Oryza sativa
  misc_feature (1)..(198): Homolog of NCBI NO: 22327528 NR Description: glycosyl hydrolase family 17; protein id:
  misc_feature (1)..(204): Homolog of NCBI NO: 10177275 NR Description: beta-1,3-glucanase-like protein [Arabidopsis
  misc_feature (1)..(210): Homolog of NCBI NO: 34902328 NR Description: Putative glycosyl hydrolase [Oryza sativa
  misc_feature (1)..(294): Homolog of NCBI NO: 9758115 NR Description: beta-1,3-glucanase-like protein [Arabidopsis
  misc_feature (1)..(293): Homolog of NCBI NO: 11071974 NR Description: elicitor inducible beta-1,3-glucanase Nt-SubE76

SEQ ID NO: 93269 - DNA, 753 bp, Arabidopsis thaliana; identical to SEQ ID NO: 89513
  misc_feature (1)..(753): Ceres Seq. ID no. 12719336
  misc_feature: MA Experiment ID: 20000166 Result: Up-regulated in Transcription
  misc_feature: MA Experiment 20000166 PARAMETER Experiment Name: At_100uM_ABA_P Parameter: Age (day) Value: 14
  misc_feature: MA Experiment 20000166 PARAMETER Experiment Name: At_100uM_ABA_P Parameter: Organism Value: A. thaliana
  misc_feature: MA Experiment 20000166 PARAMETER Experiment Name: At_100uM_ABA_P Parameter: Plant Line Value: WS
  misc_feature: MA Experiment 20000166 PARAMETER Experiment Name: At_100uM_ABA_P Parameter: Timepoint (hr) Value: 1
  misc_feature: MA Experiment 20000166 PARAMETER Experiment Name: At_100uM_ABA_P Parameter: Tissue Value: Aerial
  misc_feature: MA Experiment 20000166 PARAMETER Experiment Name: At_100uM_ABA_P Parameter: Treatment Value: 100uM ABA vs. No Treatment
  misc_feature: MA Experiment ID: 20000173 Result: Down-regulated in Transcription
  misc_feature: MA Experiment 20000173 PARAMETER Experiment Name: At_42deg_Heat_P Parameter: Age (day) Value: 14
  misc_feature: MA Experiment 20000173 PARAMETER Experiment Name: At_42deg_Heat_P Parameter: Organism Value: A. thaliana
  misc_feature: MA Experiment 20000173 PARAMETER Experiment Name: At_42deg_Heat_P Parameter: Plant Line Value: WS
  misc_feature: MA Experiment 20000173 PARAMETER Experiment Name: At_42deg_Heat_P Parameter: Temperature (deg C) Value: 42 vs. 22
  misc_feature: MA Experiment 20000173 PARAMETER Experiment Name: At_42deg_Heat_P Parameter: Timepoint (hr) Value: 6
  misc_feature: MA Experiment 20000173 PARAMETER Experiment Name: At_42deg_Heat_P Parameter: Tissue Value: Aerial
  misc_feature: MA Experiment ID: 20000184 Result: Down-regulated in Transcription
  misc_feature: MA Experiment 20000184 PARAMETER Experiment Name: At_Shoots__P Parameter: Age (day) Value: 7
  misc_feature: MA Experiment 20000184 PARAMETER Experiment Name: At_Shoots__P Parameter: Tissue Value: Shoots vs. Whole Plant
  misc_feature: MA Experiment ID: 20000185 Result: Down-regulated in Transcription
  misc_feature: MA Experiment 20000185 PARAMETER Experiment Name: At_Roots__P Parameter: Age (day) Value: 7 vs. 21
  misc_feature: MA Experiment 20000185 PARAMETER Experiment Name: At_Roots__P Parameter: Organism Value: A. thaliana
  misc_feature: MA Experiment 20000185 PARAMETER Experiment Name: At_Roots__P Parameter: Tissue Value: Roots vs. Whole Plant
  misc_feature: MA Experiment ID: 20000234 Result: Down-regulated in Transcription
  misc_feature: MA Experiment 20000234 PARAMETER Experiment Name: At_Siliques_P Parameter: Age (day) Value: 21
  misc_feature: MA Experiment 20000234 PARAMETER Experiment Name: At_Siliques_P Parameter: Organism Value: A. thaliana
  misc_feature: MA Experiment 20000234 PARAMETER Experiment Name: At_Siliques_P Parameter: Plant Line Value: WS
  misc_feature: MA Experiment 20000234 PARAMETER Experiment Name: At_Siliques_P Parameter: Tissue Value: Less Than 5mm Siliques vs. Whole Plant
  misc_feature: MA Experiment ID: 20000235 Result: Down-regulated in Transcription
  misc_feature: MA Experiment 20000235 PARAMETER Experiment Name: At_Siliques_P Parameter: Age (day) Value: 21
  misc_feature: MA Experiment 20000235 PARAMETER Experiment Name: At_Siliques_P Parameter: Organism Value: A. thaliana
  misc_feature: MA Experiment 20000235 PARAMETER Experiment Name: At_Siliques_P Parameter: Plant Line Value: WS
  misc_feature: MA Experiment 20000235 PARAMETER Experiment Name: At_Siliques_P Parameter: Tissue Value: 5-10mm Siliques vs. Whole Plant
  misc_feature: MA Experiment ID: 20000264 Result: Down-regulated in Transcription
  misc_feature: MA Experiment 20000264 PARAMETER Experiment Name: At_Open_Flower_P Parameter: Age (day) Value: 21
  misc_feature: MA Experiment 20000264 PARAMETER Experiment Name: At_Open_Flower_P Parameter: Plant Line Value: WS
  misc_feature: MA Experiment 20000264 PARAMETER Experiment Name: At_Open_Flower_P Parameter: Tissue Value: Open Flower vs. Whole Plant
  misc_feature: MA Experiment ID: 20000265 Result: Down-regulated in Transcription
  misc_feature: MA Experiment 20000265 PARAMETER Experiment Name: At_Open_Flower_P Parameter: Age (day) Value: 21
  misc_feature: MA Experiment 20000265 PARAMETER Experiment Name: At_Open_Flower_P Parameter: Plant Line Value: WS
  misc_feature: MA Experiment 20000265 PARAMETER Experiment Name: At_Open_Flower_P Parameter: Tissue Value: Closed Flower vs. Whole Plant
  misc_feature: MA Experiment ID: 20000267 Result: Up-regulated in Transcription
  misc_feature: MA Experiment 20000267 PARAMETER Experiment Name: At_Drought_P Parameter: Age (day) Value: 7
  misc_feature: MA Experiment 20000267 PARAMETER Experiment Name: At_Drought_P Parameter: Organism Value: A. thaliana
  misc_feature: MA Experiment 20000267 PARAMETER Experiment Name: At_Drought_P Parameter: Plant Line Value: WS
  misc_feature: MA Experiment 20000267 PARAMETER Experiment Name: At_Drought_P Parameter: Timepoint (hr) Value: 6
  misc_feature: MA Experiment 20000267 PARAMETER Experiment Name: At_Drought_P Parameter: Tissue Value: Whole Plant
  misc_feature: MA Experiment 20000267 PARAMETER Experiment Name: At_Drought_P Parameter: Treatment Value: Drought vs. No Drought
  misc_feature: MA Experiment ID: 20000286 Result: Down-regulated in Transcription
  misc_feature: MA Experiment 20000286 PARAMETER Experiment Name: At_Open_Flower_P Parameter: Age (day) Value: 21
  misc_feature: MA Experiment 20000286 PARAMETER Experiment Name: At_Open_Flower_P Parameter: Plant Line Value: WS
  misc_feature: MA Experiment 20000286 PARAMETER Experiment Name: At_Open_Flower_P Parameter: Tissue Value: Half Open vs. Whole Plant
  misc_feature: MA Experiment ID: 20000438 Result: Down-regulated in Transcription
  misc_feature: MA Experiment 20000438 PARAMETER Experiment Name: At_Shoots__P Parameter: Age (day) Value: 14
  misc_feature: MA Experiment 20000438 PARAMETER Experiment Name: At_Shoots__P Parameter: Tissue Value: Shoots vs. Whole Plant
  misc_feature: MA Experiment ID: 20000439 Result: Down-regulated in Transcription
  misc_feature: MA Experiment 20000439 PARAMETER Experiment Name: At_Roots__P Parameter: Age (day) Value: 14 vs. 21
  misc_feature: MA Experiment 20000439 PARAMETER Experiment Name: At_Roots__P Parameter: Organism Value: A. thaliana
  misc_feature: MA Experiment 20000439 PARAMETER Experiment Name: At_Roots__P Parameter: Tissue Value: Roots vs. Whole Plant
  misc_feature: MA Experiment ID: 20000445 Result: Up-regulated in Transcription
  misc_feature: MA Experiment 20000445 PARAMETER Experiment Name: At_100uM_NAA__P Parameter: Age (day) Value: 14
  misc_feature: MA Experiment 20000445 PARAMETER Experiment Name: At_100uM_NAA__P Parameter: Organism Value: A. thaliana
  misc_feature: MA Experiment 20000445 PARAMETER Experiment Name: At_100uM_NAA__P Parameter: Plant Line Value: WS
  misc_feature: MA Experiment 20000445 PARAMETER Experiment Name: At_100uM_NAA__P Parameter: Timepoint (hr) Value: 6
  misc_feature: MA Experiment 20000445 PARAMETER Experiment Name: At_100uM_NAA__P Parameter: Tissue Value: Aerial
  misc_feature: MA Experiment 20000445 PARAMETER Experiment Name: At_100uM_NAA__P Parameter: Treatment Value: 100uM NAA vs. No Treatment
  misc_feature: MA Experiment ID: 20000460 Result: Up-regulated in Transcription
  misc_feature: MA Experiment 20000460 PARAMETER Experiment Name: At_10percent_PEG_P Parameter: Age (day) Value: 12
  misc_feature: MA Experiment 20000460 PARAMETER Experiment Name: At_10percent_PEG_P Parameter: Organism Value: A. thaliana
  misc_feature: MA Experiment 20000460 PARAMETER Experiment Name: At_10percent_PEG_P Parameter: Plant Line Value: WS
  misc_feature: MA Experiment 20000460 PARAMETER Experiment Name: At_10percent_PEG_P Parameter: Timepoint (day) Value: 12
  misc_feature: MA Experiment 20000460 PARAMETER Experiment Name: At_10percent_PEG_P Parameter: Tissue Value: Whole Plant
  misc_feature: MA Experiment 20000460 PARAMETER Experiment Name: At_10percent_PEG_P Parameter: Treatment Value: 10percent PEG vs. No Treatment
  misc_feature: MA Experiment ID: 20000573 Result: Down-regulated in Transcription
  misc_feature: MA Experiment 20000573 PARAMETER Experiment Name: At_100uM_ABA_Mutants__P Parameter: Organism Value: A. thaliana
  misc_feature: MA Experiment 20000573 PARAMETER Experiment Name: At_100uM_ABA_Mutants__P Parameter: Plant Line Value: CS22 vs. Ler wt
  misc_feature: MA Experiment 20000573 PARAMETER Experiment Name: At_100uM_ABA_Mutants__P Parameter: Timepoint (hr) Value: N/A
  misc_feature: MA Experiment 20000573 PARAMETER Experiment Name: At_100uM_ABA_Mutants__P Parameter: Tissue Value: Whole Plant
  misc_feature: MA Experiment 20000573 PARAMETER Experiment Name: At_100uM_ABA_Mutants__P Parameter: Treatment Value: None
  misc_feature: MA Experiment ID: 20000574 Result: Down-regulated in Transcription
  misc_feature: MA Experiment 20000574 PARAMETER Experiment Name: At_100uM_ABA_Mutants__P Parameter: Organism Value: A. thaliana
  misc_feature: MA Experiment 20000574 PARAMETER Experiment Name: At_100uM_ABA_Mutants__P Parameter: Plant Line Value: CS23 vs. Ler wt
  misc_feature: MA Experiment 20000574 PARAMETER Experiment Name: At_100uM_ABA_Mutants__P Parameter: Timepoint (hr) Value: N/A
  misc_feature: MA Experiment 20000574 PARAMETER Experiment Name: At_100uM_ABA_Mutants__P Parameter: Tissue Value: Whole Plant
  misc_feature: MA Experiment 20000574 PARAMETER Experiment Name: At_100uM_ABA_Mutants__P Parameter: Treatment Value: None
  misc_feature: MA Experiment ID: 20000709 Result: Down-regulated in Transcription
  misc_feature: MA Experiment 20000709 PARAMETER Experiment Name: At_15mM_NH4NO3_L-to-H_P Parameter: Age (hr) Value: 14
  misc_feature: MA Experiment 20000709 PARAMETER Experiment Name: At_15mM_NH4NO3_L-to-H_P Parameter: Organism Value: A. thaliana
  misc_feature: MA Experiment 20000709 PARAMETER Experiment Name: At_15mM_NH4NO3_L-to-H_P Parameter: Plant Line Value: WS
  misc_feature: MA Experiment 20000709 PARAMETER Experiment Name: At_15mM_NH4NO3_L-to-H_P Parameter: Timepoint (hr) Value: 4
  misc_feature: MA Experiment 20000709 PARAMETER Experiment Name: At_15mM_NH4NO3_L-to-H_P Parameter: Tissue Value: Aerial
  misc_feature: MA Experiment 20000709 PARAMETER Experiment Name: At_15mM_NH4NO3_L-to-H_P Parameter: Treatment Value: 15mM NH4NO3 vs. 30mM Mannitol
  misc_feature: MA Experiment ID: 20000794 Result: Down-regulated in Transcription
  misc_feature: MA Experiment 20000794 PARAMETER Experiment Name: At_Petals_P Parameter: Age (day) Value: 23-25 days
  misc_feature: MA Experiment 20000794 PARAMETER Experiment Name: At_Petals_P Parameter: Plant Line Value: WS
  misc_feature: MA Experiment 20000794 PARAMETER Experiment Name: At_Petals_P Parameter: Tissue Value: Petals vs. Whole plant
  misc_feature: MA Experiment ID: 20001451 Result: Down-regulated in Transcription
  misc_feature: MA Experiment 20001451 PARAMETER Experiment Name: At_Far-red-induction_P Parameter: Age (day) Value: 7
  misc_feature: MA Experiment 20001451 PARAMETER Experiment Name: At_Far-red-induction_P Parameter: Light Value: Far-red vs. White
  misc_feature: MA Experiment 20001451 PARAMETER Experiment Name: At_Far-red-induction_P Parameter: Organism Value: A. thaliana
  misc_feature: MA Experiment 20001451 PARAMETER Experiment Name: At_Far-red-induction_P Parameter: Plant Line Value: Columbia
  misc_feature: MA Experiment 20001451 PARAMETER Experiment Name: At_Far-red-induction_P Parameter: Timepoint (hr) Value: 24
  misc_feature: MA Experiment 20001451 PARAMETER Experiment Name: At_Far-red-induction_P Parameter: Tissue Value: Whole Plant
  misc_feature: MA Experiment ID: 20001556 Result: Down-regulated in Transcription
  misc_feature: MA Experiment 20001556 PARAMETER Experiment Name: At_Drought_Soil_Dry_P Parameter: Age (day) Value: 26
  misc_feature: MA Experiment 20001556 PARAMETER Experiment Name: At_Drought_Soil_Dry_P Parameter: Organism Value: A. thaliana
  misc_feature: MA Experiment 20001556 PARAMETER Experiment Name: At_Drought_Soil_Dry_P Parameter: Plant Line Value: WS
  misc_feature: MA Experiment 20001556 PARAMETER Experiment Name: At_Drought_Soil_Dry_P Parameter: Post Timepoint (hr) Value: None
  misc_feature: MA Experiment 20001556 PARAMETER Experiment Name: At_Drought_Soil_Dry_P Parameter: Post-Treatment Value: None
  misc_feature: MA Experiment 20001556 PARAMETER Experiment Name: At_Drought_Soil_Dry_P Parameter: Timepoint (day) Value: 12
  misc_feature: MA Experiment 20001556 PARAMETER Experiment Name: At_Drought_Soil_Dry_P Parameter: Treatment Value: Drought vs. No Drought
  misc_feature: MA Experiment ID: 20001557 Result: Down-regulated in Transcription
  misc_feature: MA Experiment 20001557 PARAMETER Experiment Name: At_Drought_Soil_Dry_P Parameter: Age (day) Value: 27
  misc_feature: MA Experiment 20001557 PARAMETER Experiment Name: At_Drought_Soil_Dry_P Parameter: Organism Value: A. thaliana
  misc_feature: MA Experiment 20001557 PARAMETER Experiment Name: At_Drought_Soil_Dry_P Parameter: Plant Line Value: WS
  misc_feature: MA Experiment 20001557 PARAMETER Experiment Name: At_Drought_Soil_Dry_P Parameter: Post Timepoint (hr) Value: 3
  misc_feature: MA Experiment 20001557 PARAMETER Experiment Name: At_Drought_Soil_Dry_P Parameter: Post-Treatment Value: Re-Water vs. No Drought
  misc_feature: MA Experiment 20001557 PARAMETER Experiment Name: At_Drought_Soil_Dry_P Parameter: Timepoint (day) Value: 13
  misc_feature: MA Experiment 20001557 PARAMETER Experiment Name: At_Drought_Soil_Dry_P Parameter: Treatment Value: Drought vs. No Drought
  misc_feature: MA Experiment ID: 20001558 Result: Down-regulated in Transcription
  misc_feature: MA Experiment 20001558 PARAMETER Experiment Name: At_Drought_Soil_Dry_P Parameter: Age (day) Value: 27
  misc_feature: MA Experiment 20001558 PARAMETER Experiment Name: At_Drought_Soil_Dry_P Parameter: Organism Value: A. thaliana
  misc_feature: MA Experiment 20001558 PARAMETER Experiment Name: At_Drought_Soil_Dry_P Parameter: Plant Line Value: WS
  misc_feature: MA Experiment 20001558 PARAMETER Experiment Name: At_Drought_Soil_Dry_P Parameter: Post Timepoint (hr) Value: 6
  misc_feature: MA Experiment 20001558 PARAMETER Experiment Name: At_Drought_Soil_Dry_P Parameter: Post-Treatment Value: Re-Water vs. No Drought
  misc_feature: MA Experiment 20001558 PARAMETER Experiment Name: At_Drought_Soil_Dry_P Parameter: Timepoint (day) Value: 13
  misc_feature: MA Experiment 20001558 PARAMETER Experiment Name: At_Drought_Soil_Dry_P Parameter: Treatment Value: Drought vs. No Drought
  misc_feature: MA Experiment ID: 20001559 Result: Down-regulated in Transcription
  misc_feature: MA Experiment 20001559 PARAMETER Experiment Name: At_Drought_Soil_Dry_P Parameter: Age (day) Value: 28
  misc_feature: MA Experiment 20001559 PARAMETER Experiment Name: At_Drought_Soil_Dry_P Parameter: Organism Value: A. thaliana
  misc_feature: MA Experiment 20001559 PARAMETER Experiment Name: At_Drought_Soil_Dry_P Parameter: Plant Line Value: WS
  misc_feature: MA Experiment 20001559 PARAMETER Experiment Name: At_Drought_Soil_Dry_P Parameter: Post Timepoint (hr) Value: 29
  misc_feature: MA Experiment 20001559 PARAMETER Experiment Name: At_Drought_Soil_Dry_P Parameter: Post-Treatment Value: Re-Water vs. No Drought
  misc_feature: MA Experiment 20001559 PARAMETER Experiment Name: At_Drought_Soil_Dry_P Parameter: Timepoint (day) Value: 14
  misc_feature: MA Experiment 20001559 PARAMETER Experiment Name: At_Drought_Soil_Dry_P Parameter: Treatment Value: Drought vs. No Drought
  misc_feature: MA Experiment ID: 20001560 Result: Down-regulated in Transcription
  misc_feature: MA Experiment 20001560 PARAMETER Experiment Name: At_Drought_Soil_Dry_P Parameter: Age (day) Value: 28
  misc_feature: MA Experiment 20001560 PARAMETER Experiment Name: At_Drought_Soil_Dry_P Parameter: Organism Value: A. thaliana
  misc_feature: MA Experiment 20001560 PARAMETER Experiment Name: At_Drought_Soil_Dry_P Parameter: Plant Line Value: WS
  misc_feature: MA Experiment 20001560 PARAMETER Experiment Name: At_Drought_Soil_Dry_P Parameter: Post Timepoint (hr) Value: None
  misc_feature: MA Experiment 20001560 PARAMETER Experiment Name: At_Drought_Soil_Dry_P Parameter: Post-Treatment Value: None
  misc_feature: MA Experiment 20001560 PARAMETER Experiment Name: At_Drought_Soil_Dry_P Parameter: Timepoint (day) Value: 14
  misc_feature: MA Experiment 20001560 PARAMETER Experiment Name: At_Drought_Soil_Dry_P Parameter: Treatment Value: Drought vs. No Drought
  misc_feature: MA Experiment ID: 20001755 Result: Up-regulated in Transcription
  misc_feature: MA Experiment 20001755 PARAMETER Experiment Name: At_50mM_NH4NO3_L-to-H_P Parameter: Timepoint (hr) Value: 2
  misc_feature: MA Experiment 20001755 PARAMETER Experiment Name: At_50mM_NH4NO3_L-to-H_P Parameter: Tissue Value: Leaf
  misc_feature: MA Experiment 20001755 PARAMETER Experiment Name: At_50mM_NH4NO3_L-to-H_P Parameter: Treatment Value: 50mM NH4NO3 vs 100mM Mannitol
  misc_feature: MA Experiment ID: 20001904 Result: Down-regulated in Transcription
  misc_feature: MA Experiment 20001904 PARAMETER Experiment Name: At_Drought_Reproduction_P Parameter: Age (day) Value: 37
  misc_feature: MA Experiment 20001904 PARAMETER Experiment Name: At_Drought_Reproduction_P Parameter: Organism Value: A. thaliana
  misc_feature: MA Experiment 20001904 PARAMETER Experiment Name: At_Drought_Reproduction_P Parameter: Plant Line Value: WS
  misc_feature: MA Experiment 20001904 PARAMETER Experiment Name: At_Drought_Reproduction_P Parameter: Timepoint (day) Value: 7
  misc_feature: MA Experiment 20001904 PARAMETER Experiment Name: At_Drought_Reproduction_P Parameter: Tissue Value: Rosettes
  misc_feature: MA Experiment 20001904 PARAMETER Experiment Name: At_Drought_Reproduction_P Parameter: Treatment Value: Drought vs. No Drought
  misc_feature: MA Experiment ID: 20001905 Result: Down-regulated in Transcription
  misc_feature: MA Experiment 20001905 PARAMETER Experiment Name: At_Drought_Reproduction_P Parameter: Age (day) Value: 40
  misc_feature: MA Experiment 20001905 PARAMETER Experiment Name: At_Drought_Reproduction_P Parameter: Organism Value: A. thaliana
  misc_feature: MA Experiment 20001905 PARAMETER Experiment Name: At_Drought_Reproduction_P Parameter: Plant Line Value: WS
  misc_feature: MA Experiment 20001905 PARAMETER Experiment Name: At_Drought_Reproduction_P Parameter: Timepoint (day) Value: 10
  misc_feature: MA Experiment 20001905 PARAMETER Experiment Name: At_Drought_Reproduction_P Parameter: Tissue Value: Rosettes
  misc_feature: MA Experiment 20001905 PARAMETER Experiment Name: At_Drought_Reproduction_P Parameter: Treatment Value: Drought vs. No Drought

SEQ ID NO: 93270 - protein, 250 aa, Arabidopsis thaliana; identical to SEQ ID NO: 89514
  peptide (1)..(250): Ceres Seq. ID no. 12719337
  misc_feature (2)..(109): Pfam Name: No apical meristem (NAM) protein Pfam Description: No apical meristem (NAM) protein
  misc_feature (1)..(250): Homolog of NCBI NO: 18398293 NR Description: NAM (no apical meristem)-like protein; protein At2g17040.1, supported by cDNA: gi_13605646, supported by cDNA: [Arabidopsis thaliana] >gi|13605647|gb|AAK32817.1|AF361804_1
  misc_feature (1)..(250): Homolog of NCBI NO: 25411775 NR Description: NAM (no apical meristem)-like protein [imported]
  misc_feature (2)..(126): Homolog of NCBI NO: 30678000 NR Description: No apical meristem (NAM) protein family thaliana] >gi|24030186|gb|AAN41274.1| putative NAM (no apical
  misc_feature (2)..(126): Homolog of NCBI NO: 30678002 NR Description: No apical meristem (NAM) protein family
  misc_feature (2)..(109): Homolog of NCBI NO: 25410986 NR Description: NAM (no apical meristem)-like protein [imported]
  misc_feature (8)..(225): Homolog of NCBI NO: 15223376 NR Description: putative NAM protein; protein id: At1g26870.1
  misc_feature (8)..(225): Homolog of NCBI NO: 25518578 NR Description: hypothetical protein T2P11.6 - Arabidopsis
  misc_feature (17)..(126): Homolog of NCBI NO: 21450867 NR Description: putative NAM protein [Arabidopsis thaliana]
  misc_feature (2)..(170): Homolog of NCBI NO: 15218843 NR Description: jasmonic acid, putative; protein id: At1g65910.1
  misc_feature (2)..(157): Homolog of NCBI NO: 18416983 NR Description: putative protein; protein id: At4g27410.2, by cDNA: 38344., supported by cDNA: gi_15982728, supported by gi_16226942, supported by cDNA: gi_20259262 [Arabidopsis

SEQ ID NO: 93271 - protein, 148 aa, Arabidopsis thaliana; identical to SEQ ID NO: 89515
  peptide (1)..(148): Ceres Seq. ID no. 12719338
  misc_feature (1)..(148): Homolog of NCBI NO: 18398293 NR Description: NAM (no apical meristem)-like protein; protein At2g17040.1, supported by cDNA: gi_13605646, supported by cDNA: [Arabidopsis thaliana] >gi|13605647|gb|AAK32817.1|AF361804_1
  misc_feature (1)..(148): Homolog of NCBI NO: 25411775 NR Description: NAM (no apical meristem)-like protein [imported]
  misc_feature (1)..(24): Homolog of NCBI NO: 30678000 NR Description: No apical meristem (NAM) protein family thaliana] >gi|24030186|gb|AAN41274.1| putative NAM (no apical
  misc_feature (1)..(24): Homolog of NCBI NO: 30678002 NR Description: No apical meristem (NAM) protein family
  misc_feature (1)..(123): Homolog of NCBI NO: 15223376 NR Description: putative NAM protein; protein id: At1g26870.1
  misc_feature (1)..(123): Homolog of NCBI NO: 25518578 NR Description: hypothetical protein T2P11.6 - Arabidopsis
  misc_feature (1)..(24): Homolog of NCBI NO: 21450867 NR Description: putative NAM protein [Arabidopsis thaliana]
  misc_feature (1)..(68): Homolog of NCBI NO: 15218843 NR Description: jasmonic acid, putative; protein id: At1g65910.1
  misc_feature (1)..(55): Homolog of NCBI NO: 18416983 NR Description: putative protein; protein id: At4g27410.2, by cDNA: 38344., supported by cDNA: gi_15982728, supported by gi_16226942, supported by cDNA: gi_20259262 [Arabidopsis
  misc_feature (1)..(55): Homolog of NCBI NO: 23397295 NR Description: unknown protein [Arabidopsis thaliana]

SEQ ID NO: 93272 - protein, 143 aa, Arabidopsis thaliana; identical to SEQ ID NO: 89516
  peptide (1)..(143): Ceres Seq. ID no. 12719339
  misc_feature (1)..(143): Homolog of NCBI NO: 18398293 NR Description: NAM (no apical meristem)-like protein; protein At2g17040.1, supported by cDNA: gi_13605646, supported by cDNA: [Arabidopsis thaliana] >gi|13605647|gb|AAK32817.1|AF361804_1
  misc_feature (1)..(143): Homolog of NCBI NO: 25411775 NR Description: NAM (no apical meristem)-like protein [imported]
  misc_feature (1)..(19): Homolog of NCBI NO: 30678000 NR Description: No apical meristem (NAM) protein family thaliana] >gi|24030186|gb|AAN41274.1| putative NAM (no apical
  misc_feature (1)..(19): Homolog of NCBI NO: 30678002 NR Description: No apical meristem (NAM) protein family
  misc_feature (1)..(118): Homolog of NCBI NO: 15223376 NR Description: putative NAM protein; protein id: At1g26870.1
  misc_feature (1)..(118): Homolog of NCBI NO: 25518578 NR Description: hypothetical protein T2P11.6 - Arabidopsis
  misc_feature (1)..(19): Homolog of NCBI NO: 21450867 NR Description: putative NAM protein [Arabidopsis thaliana]
  misc_feature (1)..(63): Homolog of NCBI NO: 15218843 NR Description: jasmonic acid, putative; protein id: At1g65910.1
  misc_feature (1)..(50): Homolog of NCBI NO: 18416983 NR Description: putative protein; protein id: At4g27410.2, by cDNA: 38344., supported by cDNA: gi_15982728, supported by gi_16226942, supported by cDNA: gi_20259262 [Arabidopsis
  misc_feature (1)..(50): Homolog of NCBI NO: 23397295 NR Description: unknown protein [Arabidopsis thaliana]

SEQ ID NO: 93273 - DNA, 1286 bp, Arabidopsis thaliana; identical to SEQ ID NO: 89517
  misc_feature (1)..(1286): Ceres Seq. ID no. 12719356
  misc_feature: MA Experiment ID: 108469 Result: Up-regulated in Transcription
  misc_feature: MA Experiment ID: 108573 Result: Up-regulated in Transcription
  misc_feature: MA Experiment 108573 PARAMETER Experiment Name: At_Drought_cDNA_P Parameter: Timepoint (hr) Value: 6
  misc_feature: MA Experiment 108573 PARAMETER Experiment Name: At_Drought_cDNA_P Parameter: Tissue Value: Aerial
  misc_feature: MA Experiment 108573 PARAMETER Experiment Name: At_Drought_cDNA_P Parameter: Treatment Value: Drought vs. No Drought
  misc_feature: MA Experiment ID: 108585 Result: Up-regulated in Transcription
  misc_feature: MA Experiment 108585 PARAMETER Experiment Name: At_5mM_NaNP_cDNA_P Parameter: Timepoint (hr) Value: 6
  misc_feature: MA Experiment 108585 PARAMETER Experiment Name: At_5mM_NaNP_cDNA_P Parameter: Tissue Value: Aerial
  misc_feature: MA Experiment 108585 PARAMETER Experiment Name: At_5mM_NaNP_cDNA_P Parameter: Treatment Value: null
  misc_feature: MA Experiment ID: 108605 Result: Up-regulated in Transcription
  misc_feature: MA Experiment 108605 PARAMETER Experiment Name: At_100uM_ABA_cDNA_P Parameter: Timepoint (hr) Value: 6
  misc_feature: MA Experiment 108605 PARAMETER Experiment Name: At_100uM_ABA_cDNA_P Parameter: Tissue Value: Aerial
  misc_feature: MA Experiment 108605 PARAMETER Experiment Name: At_100uM_ABA_cDNA_P Parameter: Treatment Value: 100uM ABA vs. No Treatment
  misc_feature: MA Experiment ID: 108607 Result: Up-regulated in Transcription
  misc_feature: MA Experiment 108607 PARAMETER Experiment Name: At_100uM_ABA_cDNA_P Parameter: Timepoint (hr) Value: 4
  misc_feature: MA Experiment 108607 PARAMETER Experiment Name: At_100uM_ABA_cDNA_P Parameter: Tissue Value: Aerial
  misc_feature: MA Experiment 108607 PARAMETER Experiment Name: At_100uM_ABA_cDNA_P Parameter: Treatment Value: 100uM ABA vs. No Treatment
  misc_feature: MA Experiment ID: 108668 Result: Up-regulated in Transcription
  misc_feature: MA Experiment 108668 PARAMETER Experiment Name: At_2mM_SA_cDNA_P Parameter: Plant Line Value: WS
  misc_feature: MA Experiment 108668 PARAMETER Experiment Name: At_2mM_SA_cDNA_P Parameter: Timepoint (hr) Value: 6
  misc_feature: MA Experiment 108668 PARAMETER Experiment Name: At_2mM_SA_cDNA_P Parameter: Treatment Value: 2mM SA vs. No Treatment
  misc_feature: MA Experiment ID: 20000069 Result: Up-regulated in Transcription
  misc_feature: MA Experiment 20000069 PARAMETER Experiment Name: At_100uM_ABA_Mutants_cDNA_P Parameter: Plant Line Value: CS23
  misc_feature: MA Experiment 20000069 PARAMETER Experiment Name: At_100uM_ABA_Mutants_cDNA_P Parameter: Timepoint (hr) Value: 6
  misc_feature: MA Experiment 20000069 PARAMETER Experiment Name: At_100uM_ABA_Mutants_cDNA_P Parameter: Tissue Value: Aerial
  misc_feature: MA Experiment 20000069 PARAMETER Experiment Name: At_100uM_ABA_Mutants_cDNA_P Parameter: Treatment Value: 100uM ABA vs. No Treatment
  misc_feature: MA Experiment ID: 20000070 Result: Up-regulated in Transcription
  misc_feature: MA Experiment 20000070 PARAMETER Experiment Name: At_100uM_ABA_Mutants_cDNA_P Parameter: Plant Line Value: CS24
  misc_feature: MA Experiment 20000070 PARAMETER Experiment Name: At_100uM_ABA_Mutants_cDNA_P Parameter: Timepoint (hr) Value: 6
  misc_feature: MA Experiment 20000070 PARAMETER Experiment Name: At_100uM_ABA_Mutants_cDNA_P Parameter: Tissue Value: Aerial
  misc_feature: MA Experiment 20000070 PARAMETER Experiment Name: At_100uM_ABA_Mutants_cDNA_P Parameter: Treatment Value: 100uM ABA vs. No Treatment
  misc_feature: MA Experiment ID: 20000072 Result: Up-regulated in Transcription
  misc_feature: MA Experiment 20000072 PARAMETER Experiment Name: At_100uM_ABA_Mutants_cDNA_P Parameter: Plant Line Value: CS8105
  misc_feature: MA Experiment 20000072 PARAMETER Experiment Name: At_100uM_ABA_Mutants_cDNA_P Parameter: Timepoint (hr) Value: 6
  misc_feature: MA Experiment 20000072 PARAMETER Experiment Name: At_100uM_ABA_Mutants_cDNA_P Parameter: Tissue Value: Aerial
  misc_feature: MA Experiment 20000072 PARAMETER Experiment Name: At_100uM_ABA_Mutants_cDNA_P Parameter: Treatment Value: 100uM ABA vs. No Treatment
  misc_feature: MA Experiment ID: 20000086 Result: Up-regulated in Transcription
  misc_feature: MA Experiment 20000086 PARAMETER Experiment Name: At_100uM_ABA_Mutants_cDNA_P Parameter: Plant Line Value: CS22
  misc_feature: MA Experiment 20000086 PARAMETER Experiment Name: At_100uM_ABA_Mutants_cDNA_P Parameter: Timepoint (hr) Value: 6
  misc_feature: MA Experiment 20000086 PARAMETER Experiment Name: At_100uM_ABA_Mutants_cDNA_P Parameter: Tissue Value: Aerial
  misc_feature: MA Experiment 20000086 PARAMETER Experiment Name: At_100uM_ABA_Mutants_cDNA_P Parameter: Treatment Value: 100uM ABA vs. No Treatment
  misc_feature: MA Experiment ID: 20000087 Result: Up-regulated in Transcription
  misc_feature: MA Experiment 20000087 PARAMETER Experiment Name: At_100uM_ABA_Mutants_cDNA_P Parameter: Plant Line Value: WS
  misc_feature: MA Experiment 20000087 PARAMETER Experiment Name: At_100uM_ABA_Mutants_cDNA_P Parameter: Timepoint (hr) Value: 6
  misc_feature: MA Experiment 20000087 PARAMETER Experiment Name: At_100uM_ABA_Mutants_cDNA_P Parameter: Tissue Value: Aerial
  misc_feature: MA Experiment 20000087 PARAMETER Experiment Name: At_100uM_ABA_Mutants_cDNA_P Parameter: Treatment Value: 100uM ABA vs. No Treatment
  misc_feature: MA Experiment ID: 20000088 Result: Up-regulated in Transcription
  misc_feature: MA Experiment 20000088 PARAMETER Experiment Name: At_100uM_ABA_Mutants_cDNA_P Parameter: Plant Line Value: Landsberg
  misc_feature: MA Experiment 20000088 PARAMETER Experiment Name: At_100uM_ABA_Mutants_cDNA_P Parameter: Timepoint (hr) Value: 6
  misc_feature: MA Experiment 20000088 PARAMETER Experiment Name: At_100uM_ABA_Mutants_cDNA_P Parameter: Tissue Value: Aerial
  misc_feature: MA Experiment 20000088 PARAMETER Experiment Name: At_100uM_ABA_Mutants_cDNA_P Parameter: Treatment Value: 100uM ABA vs. No Treatment
  misc_feature: MA Experiment ID: 20000090 Result: Up-regulated in Transcription
  misc_feature: MA Experiment ID: 20000182 Result: Up-regulated in Transcription
  misc_feature: MA Experiment 20000182 PARAMETER Experiment Name: At_2mM_SA_P Parameter: Age (day) Value: 14
  misc_feature: MA Experiment 20000182 PARAMETER Experiment Name: At_2mM_SA_P Parameter: Organism Value: A. thaliana
  misc_feature: MA Experiment 20000182 PARAMETER Experiment Name: At_2mM_SA_P Parameter: Plant Line Value: WS
  misc_feature: MA Experiment 20000182 PARAMETER Experiment Name: At_2mM_SA_P Parameter: Timepoint (hr) Value: 6
  misc_feature: MA Experiment 20000182 PARAMETER Experiment Name: At_2mM_SA_P Parameter: Tissue Value: Aerial
  misc_feature: MA Experiment 20000182 PARAMETER Experiment Name: At_2mM_SA_P Parameter: Treatment Value: 2mM SA vs. No Treatment
  misc_feature: MA Experiment ID: 20000234 Result: Down-regulated in Transcription
  misc_feature: MA Experiment 20000234 PARAMETER Experiment Name: At_Siliques_P Parameter: Age (day) Value: 21
  misc_feature: MA Experiment 20000234 PARAMETER Experiment Name: At_Siliques_P Parameter: Organism Value: A. thaliana
  misc_feature: MA Experiment 20000234 PARAMETER Experiment Name: At_Siliques_P Parameter: Plant Line Value: WS
  misc_feature: MA Experiment 20000234 PARAMETER Experiment Name: At_Siliques_P Parameter: Tissue Value: Less Than 5mm Siliques vs. Whole Plant
  misc_feature: MA Experiment ID: 20000235 Result: Down-regulated in Transcription
  misc_feature: MA Experiment 20000235 PARAMETER Experiment Name: At_Siliques_P Parameter: Age (day) Value: 21
  misc_feature: MA Experiment 20000235 PARAMETER Experiment Name: At_Siliques_P Parameter: Organism Value: A. thaliana
  misc_feature: MA Experiment 20000235 PARAMETER Experiment Name: At_Siliques_P Parameter: Plant Line Value: WS
  misc_feature: MA Experiment 20000235 PARAMETER Experiment Name: At_Siliques_P Parameter: Tissue Value: 5-10mm Siliques vs. Whole Plant
  misc_feature: MA Experiment ID: 20000264 Result: Down-regulated in Transcription
  misc_feature: MA Experiment 20000264 PARAMETER Experiment Name: At_Open_Flower_P Parameter: Age (day) Value: 21
  misc_feature: MA Experiment 20000264 PARAMETER Experiment Name: At_Open_Flower_P Parameter: Plant Line Value: WS
  misc_feature: MA Experiment 20000264 PARAMETER Experiment Name: At_Open_Flower_P Parameter: Tissue Value: Open Flower vs. Whole Plant
  misc_feature: MA Experiment ID: 20000265 Result: Down-regulated in Transcription
  misc_feature: MA Experiment 20000265 PARAMETER Experiment Name: At_Open_Flower_P Parameter: Age (day) Value: 21
  misc_feature: MA Experiment 20000265 PARAMETER Experiment Name: At_Open_Flower_P Parameter: Plant Line Value: WS
  misc_feature: MA Experiment 20000265 PARAMETER Experiment Name: At_Open_Flower_P Parameter: Tissue Value: Closed Flower vs. Whole Plant
  misc_feature: MA Experiment ID: 20000794 Result: Down-regulated in Transcription
  misc_feature: MA Experiment 20000794 PARAMETER Experiment Name: At_Petals_P Parameter: Age (day) Value: 23-25 days
  misc_feature: MA Experiment 20000794 PARAMETER Experiment Name: At_Petals_P Parameter: Plant Line Value: WS
  misc_feature: MA Experiment 20000794 PARAMETER Experiment Name: At_Petals_P Parameter: Tissue Value: Petals vs. Whole plant

SEQ ID NO: 93274 - protein, 350 aa, Arabidopsis thaliana; identical to SEQ ID NO: 27338
  peptide (1)..(350): Ceres Seq. ID no. 12719357
  misc_feature (110)..(156): Pfam Name: LysM domain Pfam Description: LysM domain
  misc_feature (1)..(350): Homolog of NCBI NO: 18398317 NR Description: expressed protein; protein id: At2g17120.1, by cDNA: 6280., supported by cDNA: gi_15810364, supported by
  misc_feature (1)..(350): Homolog of NCBI NO: 21593990 NR Description: unknown [Arabidopsis thaliana]
  misc_feature (11)..(346): Homolog of NCBI NO: 28207683 NR Description: Erwinia induced protein 1 [Solanum tuberosum]
  misc_feature (14)..(344): Homolog of NCBI NO: 22758281 NR Description: Unknown protein [Oryza sativa (japonica
  misc_feature (9)..(330): Homolog of NCBI NO: 18395044 NR Description: expressed protein; protein id: At1g21880.1, by cDNA: gi_15982869 [Arabidopsis thaliana]
  misc_feature (9)..(310): Homolog of NCBI NO: 30687570 NR Description: expressed protein [Arabidopsis thaliana]
  misc_feature (8)..(334): Homolog of NCBI NO: 30699276 NR Description: expressed protein [Arabidopsis thaliana]
  misc_feature (8)..(334): Homolog of NCBI NO: 25406518 NR Description: unknown protein T5M16.22 [imported] - Arabidopsis

SEQ ID NO: 93275 - protein, 326 aa, Arabidopsis thaliana; identical to SEQ ID NO: 27339
  peptide (1)..(326): Ceres Seq. ID no. 12719358
  misc_feature (86)..(132): Pfam Name: LysM domain Pfam Description: LysM domain
  misc_feature (1)..(326): Homolog of NCBI NO: 18398317 NR Description: expressed protein; protein id: At2g17120.1, by cDNA: 6280., supported by cDNA: gi_15810364, supported by
  misc_feature (1)..(326): Homolog of NCBI NO: 21593990 NR Description: unknown [Arabidopsis thaliana]
  misc_feature (1)..(322): Homolog of NCBI NO: 28207683 NR Description: Erwinia induced protein 1 [Solanum tuberosum]
  misc_feature (1)..(320): Homolog of NCBI NO: 22758281 NR Description: Unknown protein [Oryza sativa (japonica
  misc_feature (1)..(306): Homolog of NCBI NO: 18395044 NR Description: expressed protein; protein id: At1g21880.1, by cDNA: gi_15982869 [Arabidopsis thaliana]
  misc_feature (1)..(286): Homolog of NCBI NO: 30687570 NR Description: expressed protein [Arabidopsis thaliana]
  misc_feature (1)..(310): Homolog of NCBI NO: 30699276 NR Description: expressed protein [Arabidopsis thaliana]
  misc_feature (1)..(310): Homolog of NCBI NO: 25406518 NR Description: unknown protein T5M16.22 [imported] - Arabidopsis

SEQ ID NO: 93276 - DNA, 1422 bp, Arabidopsis thaliana; identical to SEQ ID NO: 89520
  misc_feature (1)..(1422): Ceres Seq. ID no. 12719382
  misc_feature: MA Experiment ID: 20000574 Result: Up-regulated in Transcription
  misc_feature: MA Experiment 20000574 PARAMETER Experiment Name: At_100uM_ABA_Mutants__P Parameter: Organism Value: A. thaliana
  misc_feature: MA Experiment 20000574 PARAMETER Experiment Name: At_100uM_ABA_Mutants__P Parameter: Plant Line Value: CS23 vs. Ler wt
  misc_feature: MA Experiment 20000574 PARAMETER Experiment Name: At_100uM_ABA_Mutants__P Parameter: Timepoint (hr) Value: N/A
  misc_feature: MA Experiment 20000574 PARAMETER Experiment Name: At_100uM_ABA_Mutants__P Parameter: Tissue Value: Whole Plant
  misc_feature: MA Experiment 20000574 PARAMETER Experiment Name: At_100uM_ABA_Mutants__P Parameter: Treatment Value: None

SEQ ID NO: 93277 - protein, 473 aa, Arabidopsis thaliana; identical to SEQ ID NO: 89521
  peptide (1)..(473): Ceres Seq. ID no. 12719383
  misc_feature (1)..(473): Homolog of NCBI NO: 15227817 NR Description: putative obtusifoliol 14-alpha demethylase; id: At2g17330.1 [Arabidopsis thaliana] >gi|25282617|pir||H84550
  misc_feature (8)..(473): Homolog of NCBI NO: 15221075 NR Description: putative obtusifoliol 14-alpha demethylase; id: At1g11680.1, supported by cDNA: 110306., supported by cDNA: supported by cDNA: gi_15292852, supported by cDNA:
  misc_feature (1)..(473): Homolog of NCBI NO: 27461067 NR Description: obtusifoliol-14-demethylase [Nicotiana tabacum]
  misc_feature (8)..(473): Homolog of NCBI NO: 18000074 NR Description: obtusifoliol-14-demethylase [Nicotiana tabacum]
  misc_feature (9)..(470): Homolog of NCBI NO: 27542762 NR Description: cytochrome P450-like protein [Sorghum bicolor]
  misc_feature (9)..(470): Homolog of NCBI NO: 5921924 NR Description: Cytochrome P450 51 (CYPL1) (P450-L1A1)
  misc_feature (40)..(470): Homolog of NCBI NO: 6166036 NR Description: Cytochrome P450 51 (CYPL1) (P450-L1A1)
  misc_feature (65)..(470): Homolog of NCBI NO: 4586676 NR Description: sterol 14-demethylase [Oryza sativa (japonica
  misc_feature (163)..(470): Homolog of NCBI NO: 7489685 NR Description: probable obtusifoliol 14-alpha-demethylase CYP51
  misc_feature (111)..(470): Homolog of NCBI NO: 21619563 NR Description: cytochrome P450, 51 (lanosterol

SEQ ID NO: 93278 - protein, 417 aa, Arabidopsis thaliana; identical to SEQ ID NO: 89522
  peptide (1)..(417): Ceres Seq. ID no. 12719384
  misc_feature (1)..(417): Homolog of NCBI NO: 15227817 NR Description: putative obtusifoliol 14-alpha demethylase; id: At2g17330.1 [Arabidopsis thaliana] >gi|25282617|pir||H84550
  misc_feature (1)..(417): Homolog of NCBI NO: 15221075 NR Description: putative obtusifoliol 14-alpha demethylase; id: At1g11680.1, supported by cDNA: 110306., supported by cDNA: supported by cDNA: gi_15292852, supported by cDNA:
  misc_feature (1)..(417): Homolog of NCBI NO: 27461067 NR Description: obtusifoliol-14-demethylase [Nicotiana tabacum]
  misc_feature (1)..(417): Homolog of NCBI NO: 18000074 NR Description: obtusifoliol-14-demethylase [Nicotiana tabacum]
  misc_feature (1)..(414): Homolog of NCBI NO: 27542762 NR Description: cytochrome P450-like protein [Sorghum bicolor]
  misc_feature (1)..(414): Homolog of NCBI NO: 5921924 NR Description: Cytochrome P450 51 (CYPL1) (P450-L1A1)
  misc_feature (1)..(414): Homolog of NCBI NO: 6166036 NR Description: Cytochrome P450 51 (CYPL1) (P450-L1A1)
  misc_feature (9)..(414): Homolog of NCBI NO: 4586676 NR Description: sterol 14-demethylase [Oryza sativa (japonica
  misc_feature (107)..(414): Homolog of NCBI NO: 7489685 NR Description: probable obtusifoliol 14-alpha-demethylase CYP51
  misc_feature (55)..(414): Homolog of NCBI NO: 21619563 NR Description: cytochrome P450, 51 (lanosterol

SEQ ID NO: 93279 - protein, 343 aa, Arabidopsis thaliana; identical to SEQ ID NO: 89523
  peptide (1)..(343): Ceres Seq. ID no. 12719385
  misc_feature (1)..(343): Homolog of NCBI NO: 15227817 NR Description: putative obtusifoliol 14-alpha demethylase; id: At2g17330.1 [Arabidopsis thaliana] >gi|25282617|pir||H84550
  misc_feature (1)..(343): Homolog of NCBI NO: 15221075 NR Description: putative obtusifoliol 14-alpha demethylase; id: At1g11680.1, supported by cDNA: 110306., supported by cDNA: supported by cDNA: gi_15292852, supported by cDNA:
  misc_feature (1)..(343): Homolog of NCBI NO: 27461067 NR Description: obtusifoliol-14-demethylase [Nicotiana tabacum]
  misc_feature (1)..(343): Homolog of NCBI NO: 18000074 NR Description: obtusifoliol-14-demethylase [Nicotiana tabacum]
  misc_feature (1)..(340): Homolog of NCBI NO: 27542762 NR Description: cytochrome P450-like protein [Sorghum bicolor]
  misc_feature (1)..(340): Homolog of NCBI NO: 5921924 NR Description: Cytochrome P450 51 (CYPL1) (P450-L1A1)
  misc_feature (1)..(340): Homolog of NCBI NO: 6166036 NR Description: Cytochrome P450 51 (CYPL1) (P450-L1A1)
  misc_feature (1)..(340): Homolog of NCBI NO: 4586676 NR Description: sterol 14-demethylase [Oryza sativa (japonica
  misc_feature (33)..(340): Homolog of NCBI NO: 7489685 NR Description: probable obtusifoliol 14-alpha-demethylase CYP51
  misc_feature (1)..(340): Homolog of NCBI NO: 21619563 NR Description: cytochrome P450, 51 (lanosterol

SEQ ID NO: 93280 - DNA, 1410 bp, Arabidopsis thaliana; identical to SEQ ID NO: 89524
  misc_feature (1)..(1410): Ceres Seq. ID no. 12719426
  misc_feature: MA Experiment ID: 20000185 Result: Down-regulated in Transcription
  misc_feature: MA Experiment 20000185 PARAMETER Experiment Name: At_Roots__P Parameter: Age (day) Value: 7 vs. 21
  misc_feature: MA Experiment 20000185 PARAMETER Experiment Name: At_Roots__P Parameter: Organism Value: A. thaliana
  misc_feature: MA Experiment 20000185 PARAMETER Experiment Name: At_Roots__P Parameter: Tissue Value: Roots vs. Whole Plant
  misc_feature: MA Experiment ID: 20000264 Result: Down-regulated in Transcription
  misc_feature: MA Experiment 20000264 PARAMETER Experiment Name: At_Open_Flower_P Parameter: Age (day) Value: 21
  misc_feature: MA Experiment 20000264 PARAMETER Experiment Name: At_Open_Flower_P Parameter: Plant Line Value: WS
  misc_feature: MA Experiment 20000264 PARAMETER Experiment Name: At_Open_Flower_P Parameter: Tissue Value: Open Flower vs. Whole Plant
  misc_feature: MA Experiment ID: 20000265 Result: Down-regulated in Transcription
  misc_feature: MA Experiment 20000265 PARAMETER Experiment Name: At_Open_Flower_P Parameter: Age (day) Value: 21
  misc_feature: MA Experiment 20000265 PARAMETER Experiment Name: At_Open_Flower_P Parameter: Plant Line Value: WS
  misc_feature: MA Experiment 20000265 PARAMETER Experiment Name: At_Open_Flower_P Parameter: Tissue Value: Closed Flower vs. Whole Plant
  misc_feature: MA Experiment ID: 20000286 Result: Down-regulated in Transcription
  misc_feature: MA Experiment 20000286 PARAMETER Experiment Name: At_Open_Flower_P Parameter: Age (day) Value: 21
  misc_feature: MA Experiment 20000286 PARAMETER Experiment Name: At_Open_Flower_P Parameter: Plant Line Value: WS
  misc_feature: MA Experiment 20000286 PARAMETER Experiment Name: At_Open_Flower_P Parameter: Tissue Value: Half Open vs. Whole Plant
  misc_feature: MA Experiment ID: 20000438 Result: Down-regulated in Transcription
  misc_feature: MA Experiment 20000438 PARAMETER Experiment Name: At_Shoots__P Parameter: Age (day) Value: 14
  misc_feature: MA Experiment 20000438 PARAMETER Experiment Name: At_Shoots__P Parameter: Tissue Value: Shoots vs. Whole Plant
  misc_feature: MA Experiment ID: 20000439 Result: Down-regulated in Transcription
  misc_feature: MA Experiment 20000439 PARAMETER Experiment Name: At_Roots__P Parameter: Age (day) Value: 14 vs. 21
  misc_feature: MA Experiment 20000439 PARAMETER Experiment Name: At_Roots__P Parameter: Organism Value: A. thaliana
  misc_feature: MA Experiment 20000439 PARAMETER Experiment Name: At_Roots__P Parameter: Tissue Value: Roots vs. Whole Plant
  misc_feature: MA Experiment ID: 20000451 Result: Up-regulated in Transcription
  misc_feature: MA Experiment 20000451 PARAMETER Experiment Name: At_CS6879_Shoots-Roots_P Parameter: Age (day) Value: 14
  misc_feature: MA Experiment 20000451 PARAMETER Experiment Name: At_CS6879_Shoots-Roots_P Parameter: Organism Value: A. thaliana
  misc_feature: MA Experiment 20000451 PARAMETER Experiment Name: At_CS6879_Shoots-Roots_P Parameter: Plant Line Value: CS6879 vs. WS
  misc_feature: MA Experiment 20000451 PARAMETER Experiment Name: At_CS6879_Shoots-Roots_P Parameter: Tissue Value: Roots
  misc_feature: MA Experiment ID: 20000453 Result: Down-regulated in Transcription
  misc_feature: MA Experiment 20000453 PARAMETER Experiment Name: At_100uM_ABA_P Parameter: Age (day) Value: 15
  misc_feature: MA Experiment 20000453 PARAMETER Experiment Name: At_100uM_ABA_P Parameter: Organism Value: A. thaliana
  misc_feature: MA Experiment 20000453 PARAMETER Experiment Name: At_100uM_ABA_P Parameter: Plant Line Value: WS
  misc_feature: MA Experiment 20000453 PARAMETER Experiment Name: At_100uM_ABA_P Parameter: Timepoint (hr) Value: 24
  misc_feature: MA Experiment 20000453 PARAMETER Experiment Name: At_100uM_ABA_P Parameter: Tissue Value: Aerial
  misc_feature: MA Experiment 20000453 PARAMETER Experiment Name: At_100uM_ABA_P Parameter: Treatment Value: 100uM ABA vs. No Treatment
  misc_feature: MA Experiment ID: 20000455 Result: Down-regulated in Transcription
  misc_feature: MA Experiment 20000455 PARAMETER Experiment Name: At_100uM_ABA_P Parameter: Age (day) Value: 16
  misc_feature: MA Experiment 20000455 PARAMETER Experiment Name: At_100uM_ABA_P Parameter: Organism Value: A. thaliana
  misc_feature: MA Experiment 20000455 PARAMETER Experiment Name: At_100uM_ABA_P Parameter: Plant Line Value: WS
  misc_feature: MA Experiment 20000455 PARAMETER Experiment Name: At_100uM_ABA_P Parameter: Timepoint (hr) Value: 48
  misc_feature: MA Experiment 20000455 PARAMETER Experiment Name: At_100uM_ABA_P Parameter: Tissue Value: Aerial
  misc_feature: MA Experiment 20000455 PARAMETER Experiment Name: At_100uM_ABA_P Parameter: Treatment Value: 100uM ABA vs. No Treatment
  misc_feature: MA Experiment ID: 20000794 Result: Down-regulated in Transcription
  misc_feature: MA Experiment 20000794 PARAMETER Experiment Name: At_Petals_P Parameter: Age (day) Value: 23-25 days
  misc_feature: MA Experiment 20000794 PARAMETER Experiment Name: At_Petals_P Parameter: Plant Line Value: WS
  misc_feature: MA Experiment 20000794 PARAMETER Experiment Name: At_Petals_P Parameter: Tissue Value: Petals vs. Whole plant
  misc_feature: MA Experiment ID: 20001555 Result: Down-regulated in Transcription
  misc_feature: MA Experiment 20001555 PARAMETER Experiment Name: At_Drought_Soil_Dry_P Parameter: Age (day) Value: 24
  misc_feature: MA Experiment 20001555 PARAMETER Experiment Name: At_Drought_Soil_Dry_P Parameter: Organism Value: A. thaliana
  misc_feature: MA Experiment 20001555 PARAMETER Experiment Name: At_Drought_Soil_Dry_P Parameter: Plant Line Value: WS
  misc_feature: MA Experiment 20001555 PARAMETER Experiment Name: At_Drought_Soil_Dry_P Parameter: Post Timepoint (hr) Value: None
  misc_feature: MA Experiment 20001555 PARAMETER Experiment Name: At_Drought_Soil_Dry_P Parameter: Post-Treatment Value: None
  misc_feature: MA Experiment 20001555 PARAMETER Experiment Name: At_Drought_Soil_Dry_P Parameter: Timepoint (day) Value: 10
  misc_feature: MA Experiment 20001555 PARAMETER Experiment Name: At_Drought_Soil_Dry_P Parameter: Treatment Value: Drought vs. No Drought
  misc_feature: MA Experiment ID: 20001556 Result: Down-regulated in Transcription
  misc_feature: MA Experiment 20001556 PARAMETER Experiment Name: At_Drought_Soil_Dry_P Parameter: Age (day) Value: 26
  misc_feature: MA Experiment 20001556 PARAMETER Experiment Name: At_Drought_Soil_Dry_P Parameter: Organism Value: A. thaliana
  misc_feature: MA Experiment 20001556 PARAMETER Experiment Name: At_Drought_Soil_Dry_P Parameter: Plant Line Value: WS
  misc_feature: MA Experiment 20001556 PARAMETER Experiment Name: At_Drought_Soil_Dry_P Parameter: Post Timepoint (hr) Value: None
  misc_feature: MA Experiment 20001556 PARAMETER Experiment Name: At_Drought_Soil_Dry_P Parameter: Post-Treatment Value: None
  misc_feature: MA Experiment 20001556 PARAMETER Experiment Name: At_Drought_Soil_Dry_P Parameter: Timepoint (day) Value: 12
  misc_feature: MA Experiment 20001556 PARAMETER Experiment Name: At_Drought_Soil_Dry_P Parameter: Treatment Value: Drought vs. No Drought
  misc_feature: MA Experiment ID: 20001557 Result: Down-regulated in Transcription
  misc_feature: MA Experiment 20001557 PARAMETER Experiment Name: At_Drought_Soil_Dry_P Parameter: Age (day) Value: 27
  misc_feature: MA Experiment 20001557 PARAMETER Experiment Name: At_Drought_Soil_Dry_P Parameter: Organism Value: A. thaliana
  misc_feature: MA Experiment 20001557 PARAMETER Experiment Name: At_Drought_Soil_Dry_P Parameter: Plant Line Value: WS
  misc_feature: MA Experiment 20001557 PARAMETER Experiment Name: At_Drought_Soil_Dry_P Parameter: Post Timepoint (hr) Value: 3
  misc_feature: MA Experiment 20001557 PARAMETER Experiment Name: At_Drought_Soil_Dry_P Parameter: Post-Treatment Value: Re-Water vs. No Drought
  misc_feature: MA Experiment 20001557 PARAMETER Experiment Name: At_Drought_Soil_Dry_P Parameter: Timepoint (day) Value: 13
  misc_feature: MA Experiment 20001557 PARAMETER Experiment Name: At_Drought_Soil_Dry_P Parameter: Treatment Value: Drought vs. No Drought
  misc_feature: MA Experiment ID: 20001558 Result: Down-regulated in Transcription
  misc_feature: MA Experiment 20001558 PARAMETER Experiment Name: At_Drought_Soil_Dry_P Parameter: Age (day) Value: 27
  misc_feature: MA Experiment 20001558 PARAMETER Experiment Name: At_Drought_Soil_Dry_P Parameter: Organism Value: A. thaliana
  misc_feature: MA Experiment 20001558 PARAMETER Experiment Name: At_Drought_Soil_Dry_P Parameter: Plant Line Value: WS
  misc_feature: MA Experiment 20001558 PARAMETER Experiment Name: At_Drought_Soil_Dry_P Parameter: Post Timepoint (hr) Value: 6
  misc_feature: MA Experiment 20001558 PARAMETER Experiment Name: At_Drought_Soil_Dry_P Parameter: Post-Treatment Value: Re-Water vs. No Drought
  misc_feature: MA Experiment 20001558 PARAMETER Experiment Name: At_Drought_Soil_Dry_P Parameter: Timepoint (day) Value: 13
  misc_feature: MA Experiment 20001558 PARAMETER Experiment Name: At_Drought_Soil_Dry_P Parameter: Treatment Value: Drought vs. No Drought
  misc_feature: MA Experiment ID: 20001560 Result: Down-regulated in Transcription
  misc_feature: MA Experiment 20001560 PARAMETER Experiment Name: At_Drought_Soil_Dry_P Parameter: Age (day) Value: 28
  misc_feature: MA Experiment 20001560 PARAMETER Experiment Name: At_Drought_Soil_Dry_P Parameter: Organism Value: A. thaliana
  misc_feature: MA Experiment 20001560 PARAMETER Experiment Name: At_Drought_Soil_Dry_P Parameter: Plant Line Value: WS
  misc_feature: MA Experiment 20001560 PARAMETER Experiment Name: At_Drought_Soil_Dry_P Parameter: Post Timepoint (hr) Value: None
  misc_feature: MA Experiment 20001560 PARAMETER Experiment Name: At_Drought_Soil_Dry_P Parameter: Post-Treatment Value: None
  misc_feature: MA Experiment 20001560 PARAMETER Experiment Name: At_Drought_Soil_Dry_P Parameter: Timepoint (day) Value: 14
  misc_feature: MA Experiment 20001560 PARAMETER Experiment Name: At_Drought_Soil_Dry_P Parameter: Treatment Value: Drought vs. No Drought
  misc_feature: MA Experiment ID: 20001760 Result: Up-regulated in Transcription
  misc_feature: MA Experiment 20001760 PARAMETER Experiment Name: At_50mM_NH4NO3_L-to-H_P Parameter: Timepoint (hr) Value: 2
  misc_feature: MA Experiment 20001760 PARAMETER Experiment Name: At_50mM_NH4NO3_L-to-H_P Parameter: Tissue Value: Siliques
  misc_feature: MA Experiment 20001760 PARAMETER Experiment Name: At_50mM_NH4NO3_L-to-H_P Parameter: Treatment Value: 50mM NH4NO3 vs 100mM Mannitol
  misc_feature: MA Experiment ID: 20001773 Result: Down-regulated in Transcription
  misc_feature: MA Experiment 20001773 PARAMETER Experiment Name: At_Far-red-enriched-adult_P Parameter: Age (day) Value: 30
  misc_feature: MA Experiment 20001773 PARAMETER Experiment Name: At_Far-red-enriched-adult_P Parameter: Light Value: Far-red enriched vs. White
  misc_feature: MA Experiment 20001773 PARAMETER Experiment Name: At_Far-red-enriched-adult_P Parameter: Organism Value: A. thaliana
  misc_feature: MA Experiment 20001773 PARAMETER Experiment Name: At_Far-red-enriched-adult_P Parameter: Plant Line Value: Columbia
  misc_feature: MA Experiment 20001773 PARAMETER Experiment Name: At_Far-red-enriched-adult_P Parameter: Timepoint (hr) Value: 48
  misc_feature: MA Experiment 20001773 PARAMETER Experiment Name: At_Far-red-enriched-adult_P Parameter: Tissue Value: Aerial
  misc_feature: MA Experiment ID: 20001904 Result: Down-regulated in Transcription
  misc_feature: MA Experiment 20001904 PARAMETER Experiment Name: At_Drought_Reproduction_P Parameter: Age (day) Value: 37
  misc_feature: MA Experiment 20001904 PARAMETER Experiment Name: At_Drought_Reproduction_P Parameter: Organism Value: A. thaliana
  misc_feature: MA Experiment 20001904 PARAMETER Experiment Name: At_Drought_Reproduction_P Parameter: Plant Line Value: WS
  misc_feature: MA Experiment 20001904 PARAMETER Experiment Name: At_Drought_Reproduction_P Parameter: Timepoint (day) Value: 7
  misc_feature: MA Experiment 20001904 PARAMETER Experiment Name: At_Drought_Reproduction_P Parameter: Tissue Value: Rosettes
  misc_feature: MA Experiment 20001904 PARAMETER Experiment Name: At_Drought_Reproduction_P Parameter: Treatment Value: Drought vs. No Drought
  misc_feature: MA Experiment ID: 20001905 Result: Down-regulated in Transcription
  misc_feature: MA Experiment 20001905 PARAMETER Experiment Name: At_Drought_Reproduction_P Parameter: Age (day) Value: 40
  misc_feature: MA Experiment 20001905 PARAMETER Experiment Name: At_Drought_Reproduction_P Parameter: Organism Value: A. thaliana
  misc_feature: MA Experiment 20001905 PARAMETER Experiment Name: At_Drought_Reproduction_P Parameter: Plant Line Value: WS
  misc_feature: MA Experiment 20001905 PARAMETER Experiment Name: At_Drought_Reproduction_P Parameter: Timepoint (day) Value: 10
  misc_feature: MA Experiment 20001905 PARAMETER Experiment Name: At_Drought_Reproduction_P Parameter: Tissue Value: Rosettes
  misc_feature: MA Experiment 20001905 PARAMETER Experiment Name: At_Drought_Reproduction_P Parameter: Treatment Value: Drought vs. No Drought

SEQ ID NO: 93281 - protein, 402 aa, Arabidopsis thaliana; identical to SEQ ID NO: 89525
  peptide (1)..(402): Ceres Seq. ID no. 12719427
  misc_feature (167)..(359): Pfam Name: Arabidopsis proteins of unknown function Pfam Description: Arabidopsis proteins of unknown function
  misc_feature (1)..(402): Homolog of NCBI NO: 18406490 NR Description: expressed protein; protein id: At2g44240.1, by cDNA: gi_16226494 [Arabidopsis thaliana] At2g44240/F4I1.5 [Arabidopsis thaliana]
  misc_feature (2)..(402): Homolog of NCBI NO: 7486438 NR Description: hypothetical protein At2g44240 [imported] -
  misc_feature (2)..(402): Homolog of NCBI NO: 7486433 NR Description: hypothetical protein At2g44220 [imported] - thaliana >gi|3128169|gb|AAC16073.1| hypothetical protein
  misc_feature (11)..(402): Homolog of NCBI NO: 30689660 NR Description: expressed protein [Arabidopsis thaliana]
  misc_feature (11)..(402): Homolog of NCBI NO: 21805747 NR Description: hypothetical protein [Arabidopsis thaliana]
  misc_feature (7)..(402): Homolog of NCBI NO: 18406483 NR Description: expressed protein; protein id: At2g44210.1, by cDNA: 39057., supported by cDNA: gi_15081718 [Arabidopsis
  misc_feature (31)..(402): Homolog of NCBI NO: 34393554 NR Description: putative carboxyl-terminal proteinase [Oryza
  misc_feature (3)..(402): Homolog of NCBI NO: 30103019 NR Description: unknown protein [Oryza sativa (japonica
  misc_feature (5)..(402): Homolog of NCBI NO: 34393299 NR Description: putative DD1A protein [Oryza sativa (japonica
  misc_feature (6)..(401): Homolog of NCBI NO: 15241244 NR Description: putative protein; protein id: At5g56530.1, by cDNA: gi_17381169 [Arabidopsis thaliana]

SEQ ID NO: 93282 - protein, 401 aa, Arabidopsis thaliana; identical to SEQ ID NO: 89526
  peptide (1)..(401): Ceres Seq. ID no. 12719428
  misc_feature (166)..(358): Pfam Name: Arabidopsis proteins of unknown function Pfam Description: Arabidopsis proteins of unknown function
  misc_feature (1)..(401): Homolog of NCBI NO: 18406490 NR Description: expressed protein; protein id: At2g44240.1, by cDNA: gi_16226494 [Arabidopsis thaliana] At2g44240/F4I1.5 [Arabidopsis thaliana]
  misc_feature (1)..(401): Homolog of NCBI NO: 7486438 NR Description: hypothetical protein At2g44240 [imported] -
  misc_feature (1)..(401): Homolog of NCBI NO: 7486433 NR Description: hypothetical protein At2g44220 [imported] - thaliana >gi|3128169|gb|AAC16073.1| hypothetical protein
  misc_feature (10)..(401): Homolog of NCBI NO: 30689660 NR Description: expressed protein [Arabidopsis thaliana]
  misc_feature (10)..(401): Homolog of NCBI NO: 21805747 NR Description: hypothetical protein [Arabidopsis thaliana]
  misc_feature (6)..(401): Homolog of NCBI NO: 18406483 NR Description: expressed protein; protein id: At2g44210.1, by cDNA: 39057., supported by cDNA: gi_15081718 [Arabidopsis
  misc_feature (30)..(401): Homolog of NCBI NO: 34393554 NR Description: putative carboxyl-terminal proteinase [Oryza
  misc_feature (2)..(401): Homolog of NCBI NO: 30103019 NR Description: unknown protein [Oryza sativa (japonica
  misc_feature (4)..(401): Homolog of NCBI NO: 34393299 NR Description: putative DD1A protein [Oryza sativa (japonica
  misc_feature (5)..(400): Homolog of NCBI NO: 15241244 NR Description: putative protein; protein id: At5g56530.1, by cDNA: gi_17381169 [Arabidopsis thaliana]

SEQ ID NO: 93283 - protein, 391 aa, Arabidopsis thaliana; identical to SEQ ID NO: 89527
  peptide (1)..(391): Ceres Seq. ID no. 12719429
  misc_feature (156)..(348): Pfam Name: Arabidopsis proteins of unknown function Pfam Description: Arabidopsis proteins of unknown function
  misc_feature (1)..(391): Homolog of NCBI NO: 18406490 NR Description: expressed protein; protein id: At2g44240.1, by cDNA: gi_16226494 [Arabidopsis thaliana] At2g44240/F4I1.5 [Arabidopsis thaliana]
  misc_feature (1)..(391): Homolog of NCBI NO: 7486438 NR Description: hypothetical protein At2g44240 [imported] -
  misc_feature (1)..(391): Homolog of NCBI NO: 7486433 NR Description: hypothetical protein At2g44220 [imported] - thaliana >gi|3128169|gb|AAC16073.1| hypothetical protein
  misc_feature (1)..(391): Homolog of NCBI NO: 30689660 NR Description: expressed protein [Arabidopsis thaliana]
  misc_feature (1)..(391): Homolog of NCBI NO: 21805747 NR Description: hypothetical protein [Arabidopsis thaliana]
  misc_feature (1)..(391): Homolog of NCBI NO: 18406483 NR Description: expressed protein; protein id: At2g44210.1, by cDNA: 39057., supported by cDNA: gi_15081718 [Arabidopsis
  misc_feature (20)..(391): Homolog of NCBI NO: 34393554 NR Description: putative carboxyl-terminal proteinase [Oryza
  misc_feature (1)..(391): Homolog of NCBI NO: 30103019 NR Description: unknown protein [Oryza sativa (japonica
  misc_feature (1)..(391): Homolog of NCBI NO: 34393299 NR Description: putative DD1A protein [Oryza sativa (japonica
  misc_feature (1)..(390): Homolog of NCBI NO: 15241244 NR Description: putative protein; protein id: At5g56530.1, by cDNA: gi_17381169 [Arabidopsis thaliana]

SEQ ID NO: 93284 - DNA, 615 bp, Arabidopsis thaliana; identical to SEQ ID NO: 89528
  misc_feature (1)..(615): Ceres Seq. ID no. 12719434
  misc_feature: MA Experiment ID: 20000173 Result: Down-regulated in Transcription
  misc_feature: MA Experiment 20000173 PARAMETER Experiment Name: At_42deg_Heat_P Parameter: Age (day) Value: 14
  misc_feature: MA Experiment 20000173 PARAMETER Experiment Name: At_42deg_Heat_P Parameter: Organism Value: A. thaliana
  misc_feature: MA Experiment 20000173 PARAMETER Experiment Name: At_42deg_Heat_P Parameter: Plant Line Value: WS
  misc_feature: MA Experiment 20000173 PARAMETER Experiment Name: At_42deg_Heat_P Parameter: Temperature (deg C) Value: 42 vs. 22
  misc_feature: MA Experiment 20000173 PARAMETER Experiment Name: At_42deg_Heat_P Parameter: Timepoint (hr) Value: 6
  misc_feature: MA Experiment 20000173 PARAMETER Experiment Name: At_42deg_Heat_P Parameter: Tissue Value: Aerial
  misc_feature: MA Experiment ID: 20000264 Result: Down-regulated in Transcription
  misc_feature: MA Experiment 20000264 PARAMETER Experiment Name: At_Open_Flower_P Parameter: Age (day) Value: 21
  misc_feature: MA Experiment 20000264 PARAMETER Experiment Name: At_Open_Flower_P Parameter: Plant Line Value: WS
  misc_feature: MA Experiment 20000264 PARAMETER Experiment Name: At_Open_Flower_P Parameter: Tissue Value: Open Flower vs. Whole Plant
  misc_feature: MA Experiment ID: 20000265 Result: Down-regulated in Transcription
  misc_feature: MA Experiment 20000265 PARAMETER Experiment Name: At_Open_Flower_P Parameter: Age (day) Value: 21
  misc_feature: MA Experiment 20000265 PARAMETER Experiment Name: At_Open_Flower_P Parameter: Plant Line Value: WS
  misc_feature: MA Experiment 20000265 PARAMETER Experiment Name: At_Open_Flower_P Parameter: Tissue Value: Closed Flower vs. Whole Plant
  misc_feature: MA Experiment ID: 20000286 Result: Down-regulated in Transcription
  misc_feature: MA Experiment 20000286 PARAMETER Experiment Name: At_Open_Flower_P Parameter: Age (day) Value: 21
  misc_feature: MA Experiment 20000286 PARAMETER Experiment Name: At_Open_Flower_P Parameter: Plant Line Value: WS
  misc_feature: MA Experiment 20000286 PARAMETER Experiment Name: At_Open_Flower_P Parameter: Tissue Value: Half Open vs. Whole Plant
  misc_feature: MA Experiment ID: 20000452 Result: Up-regulated in Transcription
  misc_feature: MA Experiment 20000452 PARAMETER Experiment Name: At_CS6879_Shoots-Roots_P Parameter: Age (day) Value: 14
  misc_feature: MA Experiment 20000452 PARAMETER Experiment Name: At_CS6879_Shoots-Roots_P Parameter: Organism Value: A. thaliana
  misc_feature: MA Experiment 20000452 PARAMETER Experiment Name: At_CS6879_Shoots-Roots_P Parameter: Plant Line Value: CS6879 vs. WS
  misc_feature: MA Experiment 20000452 PARAMETER Experiment Name: At_CS6879_Shoots-Roots_P Parameter: Tissue Value: Shoots
  misc_feature: MA Experiment ID: 20000573 Result: Down-regulated in Transcription
  misc_feature: MA Experiment 20000573 PARAMETER Experiment Name: At_100uM_ABA_Mutants__P Parameter: Organism Value: A. thaliana
  misc_feature: MA Experiment 20000573 PARAMETER Experiment Name: At_100uM_ABA_Mutants__P Parameter: Plant Line Value: CS22 vs. Ler wt
  misc_feature: MA Experiment 20000573 PARAMETER Experiment Name: At_100uM_ABA_Mutants__P Parameter: Timepoint (hr) Value: N/A
  misc_feature: MA Experiment 20000573 PARAMETER Experiment Name: At_100uM_ABA_Mutants__P Parameter: Tissue Value: Whole Plant
  misc_feature: MA Experiment 20000573 PARAMETER Experiment Name: At_100uM_ABA_Mutants__P Parameter: Treatment Value: None
  misc_feature: MA Experiment ID: 20000794 Result: Down-regulated in Transcription
  misc_feature: MA Experiment 20000794 PARAMETER Experiment Name: At_Petals_P Parameter: Age (day) Value: 23-25 days
  misc_feature: MA Experiment 20000794 PARAMETER Experiment Name: At_Petals_P Parameter: Plant Line Value: WS
  misc_feature: MA Experiment 20000794 PARAMETER Experiment Name: At_Petals_P Parameter: Tissue Value: Petals vs. Whole plant
  misc_feature: MA Experiment ID: 20001248 Result: Down-regulated in Transcription
  misc_feature: MA Experiment 20001248 PARAMETER Experiment Name: At_Far-red-induction_P Parameter: Age (day) Value: 7
  misc_feature: MA Experiment 20001248 PARAMETER Experiment Name: At_Far-red-induction_P Parameter: Light Value: Far-red vs. White
  misc_feature: MA Experiment 20001248 PARAMETER Experiment Name: At_Far-red-induction_P Parameter: Organism Value: A. thaliana
  misc_feature: MA Experiment 20001248 PARAMETER Experiment Name: At_Far-red-induction_P Parameter: Plant Line Value: Columbia
  misc_feature: MA Experiment 20001248 PARAMETER Experiment Name: At_Far-red-induction_P Parameter: Timepoint (hr) Value: 4
  misc_feature: MA Experiment 20001248 PARAMETER Experiment Name: At_Far-red-induction_P Parameter: Tissue Value: Whole Plant
  misc_feature: MA Experiment ID: 20001450 Result: Down-regulated in Transcription
  misc_feature: MA Experiment 20001450 PARAMETER Experiment Name: At_Far-red-induction_P Parameter: Age (day) Value: 7
  misc_feature: MA Experiment 20001450 PARAMETER Experiment Name: At_Far-red-induction_P Parameter: Light Value: Far-red vs. White
  misc_feature: MA Experiment 20001450 PARAMETER Experiment Name: At_Far-red-induction_P Parameter: Organism Value: A. thaliana
  misc_feature: MA Experiment 20001450 PARAMETER Experiment Name: At_Far-red-induction_P Parameter: Plant Line Value: Columbia
  misc_feature: MA Experiment 20001450 PARAMETER Experiment Name: At_Far-red-induction_P Parameter: Timepoint (hr) Value: 8
  misc_feature: MA Experiment 20001450 PARAMETER Experiment Name: At_Far-red-induction_P Parameter: Tissue Value: Whole Plant

SEQ ID NO: 93285 - protein, 204 aa, Arabidopsis thaliana; identical to SEQ ID NO: 89529
  peptide (1)..(204): Ceres Seq. ID no. 12719435
  misc_feature (35)..(112): Pfam Name: Protease inhibitor/seed storage/LTP family Pfam Description: Protease inhibitor/seed storage/LTP family
  misc_feature (1)..(204): Homolog of NCBI NO: 15224863 NR Description: unknown protein; protein id: At2g44300.1
  misc_feature (1)..(204): Homolog of NCBI NO: 15224862 NR Description: unknown protein; protein id: At2g44290.1
  misc_feature (111)..(204): Homolog of NCBI NO: 13122284 NR Description: non-specific lipid transfer protein (nLTP) like
  misc_feature (13)..(160): Homolog of NCBI NO: 34394084 NR Description: lipid transfer protein-like [Oryza sativa
  misc_feature (13)..(201): Homolog of NCBI NO: 18405294 NR Description: expressed protein; protein id: At1g55260.1, by cDNA: 13599., supported by cDNA: gi_15724271, supported by gi_19699113 [Arabidopsis thaliana] >gi|25354706|pir||E96594
  misc_feature (27)..(201): Homolog of NCBI NO: 21537387 NR Description: unknown [Arabidopsis thaliana]
  misc_feature (7)..(148): Homolog of NCBI NO: 15231070 NR Description: putative protein; protein id: At3g58550.1, by cDNA: 27380. [Arabidopsis thaliana] >gi|11357439|pir||T45675
  misc_feature (12)..(148): Homolog of NCBI NO: 21555220 NR Description: unknown [Arabidopsis thaliana]
  misc_feature (6)..(166): Homolog of NCBI NO: 21553541 NR Description: lipid transfer protein, putative [Arabidopsis
  misc_feature (6)..(166): Homolog of NCBI NO: 15217777 NR Description: lipid transfer protein, putative; protein id: supported by cDNA: 15027., supported by cDNA: gi_20260113

SEQ ID NO: 93286 - protein, 196 aa, Arabidopsis thaliana; identical to SEQ ID NO: 89530
  peptide (1)..(196): Ceres Seq. ID no. 12719436
  misc_feature (27)..(104): Pfam Name: Protease inhibitor/seed storage/LTP family Pfam Description: Protease inhibitor/seed storage/LTP family
  misc_feature (1)..(196): Homolog of NCBI NO: 15224863 NR Description: unknown protein; protein id: At2g44300.1
  misc_feature (1)..(196): Homolog of NCBI NO: 15224862 NR Description: unknown protein; protein id: At2g44290.1
  misc_feature (103)..(196): Homolog of NCBI NO: 13122284 NR Description: non-specific lipid transfer protein (nLTP) like
  misc_feature (5)..(152): Homolog of NCBI NO: 34394084 NR Description: lipid transfer protein-like [Oryza sativa
  misc_feature (5)..(193): Homolog of NCBI NO: 18405294 NR Description: expressed protein; protein id: At1g55260.1, by cDNA: 13599., supported by cDNA: gi_15724271, supported by gi_19699113 [Arabidopsis thaliana] >gi|25354706|pir||E96594
  misc_feature (19)..(193): Homolog of NCBI NO: 21537387 NR Description: unknown [Arabidopsis thaliana]
  misc_feature (1)..(140): Homolog of NCBI NO: 15231070 NR Description: putative protein; protein id: At3g58550.1, by cDNA: 27380. [Arabidopsis thaliana] >gi|11357439|pir||T45675
  misc_feature (4)..(140): Homolog of NCBI NO: 21555220 NR Description: unknown [Arabidopsis thaliana]
  misc_feature (1)..(158): Homolog of NCBI NO: 21553541 NR Description: lipid transfer protein, putative [Arabidopsis
  misc_feature (1)..(158): Homolog of NCBI NO: 15217777 NR Description: lipid transfer protein, putative; protein id: supported by cDNA: 15027., supported by cDNA: gi_20260113

SEQ ID NO: 93287 - protein, 185 aa, Arabidopsis thaliana; identical to SEQ ID NO: 89531
  peptide (1)..(185): Ceres Seq. ID no. 12719437
  misc_feature (16)..(93): Pfam Name: Protease inhibitor/seed storage/LTP family Pfam Description: Protease inhibitor/seed storage/LTP family
  misc_feature (1)..(185): Homolog of NCBI NO: 15224863 NR Description: unknown protein; protein id: At2g44300.1
  misc_feature (1)..(185): Homolog of NCBI NO: 15224862 NR Description: unknown protein; protein id: At2g44290.1
  misc_feature (92)..(185): Homolog of NCBI NO: 13122284 NR Description: non-specific lipid transfer protein (nLTP) like
  misc_feature (1)..(141): Homolog of NCBI NO: 34394084 NR Description: lipid transfer protein-like [Oryza sativa
  misc_feature (1)..(182): Homolog of NCBI NO: 18405294 NR Description: expressed protein; protein id: At1g55260.1, by cDNA: 13599., supported by cDNA: gi_15724271, supported by gi_19699113 [Arabidopsis thaliana] >gi|25354706|pir||E96594
  misc_feature (8)..(182): Homolog of NCBI NO: 21537387 NR Description: unknown [Arabidopsis thaliana]
  misc_feature (1)..(129): Homolog of NCBI NO: 15231070 NR Description: putative protein; protein id: At3g58550.1, by cDNA: 27380. [Arabidopsis thaliana] >gi|11357439|pir||T45675
  misc_feature (1)..(129): Homolog of NCBI NO: 21555220 NR Description: unknown [Arabidopsis thaliana]
  misc_feature (1)..(147): Homolog of NCBI NO: 21553541 NR Description: lipid transfer protein, putative [Arabidopsis
  misc_feature (1)..(147): Homolog of NCBI NO: 15217777 NR Description: lipid transfer protein, putative; protein id: supported by cDNA: 15027., supported by cDNA: gi_20260113

SEQ ID NO: 93288 - DNA, 1749 bp, Arabidopsis thaliana; identical to SEQ ID NO: 89532
  misc_feature (1)..(1749): Ceres Seq. ID no. 12719449
  misc_feature: MA Experiment ID: 20000180 Result: Down-regulated in Transcription
  misc_feature: MA Experiment 20000180 PARAMETER Experiment Name: At_Germinating_Seeds_P Parameter: Age (hr) Value: 24 vs. 0
  misc_feature: MA Experiment 20000180 PARAMETER Experiment Name: At_Germinating_Seeds_P Parameter: Tissue Value: Germinating Seeds
  misc_feature: MA Experiment ID: 20000234 Result: Up-regulated in Transcription
  misc_feature: MA Experiment 20000234 PARAMETER Experiment Name: At_Siliques_P Parameter: Age (day) Value: 21
  misc_feature: MA Experiment 20000234 PARAMETER Experiment Name: At_Siliques_P Parameter: Organism Value: A. thaliana
  misc_feature: MA Experiment 20000234 PARAMETER Experiment Name: At_Siliques_P Parameter: Plant Line Value: WS
  misc_feature: MA Experiment 20000234 PARAMETER Experiment Name: At_Siliques_P Parameter: Tissue Value: Less Than 5mm Siliques vs. Whole Plant
  misc_feature: MA Experiment ID: 20000235 Result: Up-regulated in Transcription
  misc_feature: MA Experiment 20000235 PARAMETER Experiment Name: At_Siliques_P Parameter: Age (day) Value: 21
  misc_feature: MA Experiment 20000235 PARAMETER Experiment Name: At_Siliques_P Parameter: Organism Value: A. thaliana
  misc_feature: MA Experiment 20000235 PARAMETER Experiment Name: At_Siliques_P Parameter: Plant Line Value: WS
  misc_feature: MA Experiment 20000235 PARAMETER Experiment Name: At_Siliques_P Parameter: Tissue Value: 5-10mm Siliques vs. Whole Plant
  misc_feature: MA Experiment ID: 20000264 Result: Up-regulated in Transcription
  misc_feature: MA Experiment 20000264 PARAMETER Experiment Name: At_Open_Flower_P Parameter: Age (day) Value: 21
  misc_feature: MA Experiment 20000264 PARAMETER Experiment Name: At_Open_Flower_P Parameter: Plant Line Value: WS
  misc_feature: MA Experiment 20000264 PARAMETER Experiment Name: At_Open_Flower_P Parameter: Tissue Value: Open Flower vs. Whole Plant
  misc_feature: MA Experiment ID: 20000286 Result: Up-regulated in Transcription
  misc_feature: MA Experiment 20000286 PARAMETER Experiment Name: At_Open_Flower_P Parameter: Age (day) Value: 21
  misc_feature: MA Experiment 20000286 PARAMETER Experiment Name: At_Open_Flower_P Parameter: Plant Line Value: WS
  misc_feature: MA Experiment 20000286 PARAMETER Experiment Name: At_Open_Flower_P Parameter: Tissue Value: Half Open vs. Whole Plant
  misc_feature: MA Experiment ID: 20000308 Result: Up-regulated in Transcription
  misc_feature: MA Experiment 20000308 PARAMETER Experiment Name: At_100mM_NaCl__P Parameter: Age (day) Value: 17
  misc_feature: MA Experiment 20000308 PARAMETER Experiment Name: At_100mM_NaCl__P Parameter: Organism Value: A. thaliana
  misc_feature: MA Experiment 20000308 PARAMETER Experiment Name: At_100mM_NaCl__P Parameter: Plant Line Value: WS
  misc_feature: MA Experiment 20000308 PARAMETER Experiment Name: At_100mM_NaCl__P Parameter: Timepoint (hr) Value: 72
  misc_feature: MA Experiment 20000308 PARAMETER Experiment Name: At_100mM_NaCl__P Parameter: Tissue Value: Whole Plant
  misc_feature: MA Experiment 20000308 PARAMETER Experiment Name: At_100mM_NaCl__P Parameter: Treatment Value: 100mM NaCl vs. No Treatment
  misc_feature: MA Experiment ID: 20000437 Result: Up-regulated in Transcription
  misc_feature: MA Experiment 20000437 PARAMETER Experiment Name: At_Drought_P Parameter: Age (day) Value: 8
  misc_feature: MA Experiment 20000437 PARAMETER Experiment Name: At_Drought_P Parameter: Organism Value: A. thaliana
  misc_feature: MA Experiment 20000437 PARAMETER Experiment Name: At_Drought_P Parameter: Plant Line Value: WS
  misc_feature: MA Experiment 20000437 PARAMETER Experiment Name: At_Drought_P Parameter: Timepoint (hr) Value: 24
  misc_feature: MA Experiment 20000437 PARAMETER Experiment Name: At_Drought_P Parameter: Tissue Value: Whole Plant
  misc_feature: MA Experiment 20000437 PARAMETER Experiment Name: At_Drought_P Parameter: Treatment Value: Drought vs. No Drought
  misc_feature: MA Experiment ID: 20000495 Result: Up-regulated in Transcription
  misc_feature: MA Experiment 20000495 PARAMETER Experiment Name: At_Guard_Cells_P Parameter: Harvest Date Value: 8/2/2002
  misc_feature: MA Experiment 20000495 PARAMETER Experiment Name: At_Guard_Cells_P Parameter: Organism Value: A. thaliana
  misc_feature: MA Experiment 20000495 PARAMETER Experiment Name: At_Guard_Cells_P Parameter: Tissue Value: Guard Cells vs. Leaves
  misc_feature: MA Experiment ID: 20000527 Result: Down-regulated in Transcription
  misc_feature: MA Experiment 20000527 PARAMETER Experiment Name: At_10percent_PEG_P Parameter: Age (day) Value: 20
  misc_feature: MA Experiment 20000527 PARAMETER Experiment Name: At_10percent_PEG_P Parameter: Organism Value: A. thaliana
  misc_feature: MA Experiment 20000527 PARAMETER Experiment Name: At_10percent_PEG_P Parameter: Plant Line Value: WS
  misc_feature: MA Experiment 20000527 PARAMETER Experiment Name: At_10percent_PEG_P Parameter: Timepoint (day) Value: 20
  misc_feature: MA Experiment 20000527 PARAMETER Experiment Name: At_10percent_PEG_P Parameter: Tissue Value: Whole Plant
  misc_feature: MA Experiment 20000527 PARAMETER Experiment Name: At_10percent_PEG_P Parameter: Treatment Value: 10percent PEG vs. No Treatment
  misc_feature: MA Experiment ID: 20000573 Result: Down-regulated in Transcription
  misc_feature: MA Experiment 20000573 PARAMETER Experiment Name: At_100uM_ABA_Mutants__P Parameter: Organism Value: A. thaliana
  misc_feature: MA Experiment 20000573 PARAMETER Experiment Name: At_100uM_ABA_Mutants__P Parameter: Plant Line Value: CS22 vs. Ler wt
  misc_feature: MA Experiment 20000573 PARAMETER Experiment Name: At_100uM_ABA_Mutants__P Parameter: Timepoint (hr) Value: N/A
  misc_feature: MA Experiment 20000573 PARAMETER Experiment Name: At_100uM_ABA_Mutants__P Parameter: Tissue Value: Whole Plant
  misc_feature: MA Experiment 20000573 PARAMETER Experiment Name: At_100uM_ABA_Mutants__P Parameter: Treatment Value: None
  misc_feature: MA Experiment ID: 20000574 Result: Down-regulated in Transcription
  misc_feature: MA Experiment 20000574 PARAMETER Experiment Name: At_100uM_ABA_Mutants__P Parameter: Organism Value: A. thaliana
  misc_feature: MA Experiment 20000574 PARAMETER Experiment Name: At_100uM_ABA_Mutants__P Parameter: Plant Line Value: CS23 vs. Ler wt
  misc_feature: MA Experiment 20000574 PARAMETER Experiment Name: At_100uM_ABA_Mutants__P Parameter: Timepoint (hr) Value: N/A
  misc_feature: MA Experiment 20000574 PARAMETER Experiment Name: At_100uM_ABA_Mutants__P Parameter: Tissue Value: Whole Plant
  misc_feature: MA Experiment 20000574 PARAMETER Experiment Name: At_100uM_ABA_Mutants__P Parameter: Treatment Value: None
  misc_feature: MA Experiment ID: 20000709 Result: Up-regulated in Transcription
  misc_feature: MA Experiment 20000709 PARAMETER Experiment Name: At_15mM_NH4NO3_L-to-H_P Parameter: Age (hr) Value: 14
  misc_feature: MA Experiment 20000709 PARAMETER Experiment Name: At_15mM_NH4NO3_L-to-H_P Parameter: Organism Value: A. thaliana
  misc_feature: MA Experiment 20000709 PARAMETER Experiment Name: At_15mM_NH4NO3_L-to-H_P Parameter: Plant Line Value: WS
  misc_feature: MA Experiment 20000709 PARAMETER Experiment Name: At_15mM_NH4NO3_L-to-H_P Parameter: Timepoint (hr) Value: 4
  misc_feature: MA Experiment 20000709 PARAMETER Experiment Name: At_15mM_NH4NO3_L-to-H_P Parameter: Tissue Value: Aerial
  misc_feature: MA Experiment 20000709 PARAMETER Experiment Name: At_15mM_NH4NO3_L-to-H_P Parameter: Treatment Value: 15mM NH4NO3 vs. 30mM Mannitol
  misc_feature: MA Experiment ID: 20001450 Result: Down-regulated in Transcription
  misc_feature: MA Experiment 20001450 PARAMETER Experiment Name: At_Far-red-induction_P Parameter: Age (day) Value: 7
  misc_feature: MA Experiment 20001450 PARAMETER Experiment Name: At_Far-red-induction_P Parameter: Light Value: Far-red vs. White
  misc_feature: MA Experiment 20001450 PARAMETER Experiment Name: At_Far-red-induction_P Parameter: Organism Value: A. thaliana
  misc_feature: MA Experiment 20001450 PARAMETER Experiment Name: At_Far-red-induction_P Parameter: Plant Line Value: Columbia
  misc_feature: MA Experiment 20001450 PARAMETER Experiment Name: At_Far-red-induction_P Parameter: Timepoint (hr) Value: 8
  misc_feature: MA Experiment 20001450 PARAMETER Experiment Name: At_Far-red-induction_P Parameter: Tissue Value: Whole Plant
  misc_feature: MA Experiment ID: 20001451 Result: Down-regulated in Transcription
  misc_feature: MA Experiment 20001451 PARAMETER Experiment Name: At_Far-red-induction_P Parameter: Age (day) Value: 7
  misc_feature: MA Experiment 20001451 PARAMETER Experiment Name: At_Far-red-induction_P Parameter: Light Value: Far-red vs. White
  misc_feature: MA Experiment 20001451 PARAMETER Experiment Name: At_Far-red-induction_P Parameter: Organism Value: A. thaliana
  misc_feature: MA Experiment 20001451 PARAMETER Experiment Name: At_Far-red-induction_P Parameter: Plant Line Value: Columbia
  misc_feature: MA Experiment 20001451 PARAMETER Experiment Name: At_Far-red-induction_P Parameter: Timepoint (hr) Value: 24
  misc_feature: MA Experiment 20001451 PARAMETER Experiment Name: At_Far-red-induction_P Parameter: Tissue Value: Whole Plant
  misc_feature: MA Experiment ID: 20001910 Result: Up-regulated in Transcription
  misc_feature: MA Experiment 20001910 PARAMETER Experiment Name: At_Drought_Reproduction_P Parameter: Age (day) Value: 37
  misc_feature: MA Experiment 20001910 PARAMETER Experiment Name: At_Drought_Reproduction_P Parameter: Organism Value: A. thaliana
  misc_feature: MA Experiment 20001910 PARAMETER Experiment Name: At_Drought_Reproduction_P Parameter: Plant Line Value: WS
  misc_feature: MA Experiment 20001910 PARAMETER Experiment Name: At_Drought_Reproduction_P Parameter: Timepoint (day) Value: 7
  misc_feature: MA Experiment 20001910 PARAMETER Experiment Name: At_Drought_Reproduction_P Parameter: Tissue Value: Flowers
  misc_feature: MA Experiment 20001910 PARAMETER Experiment Name: At_Drought_Reproduction_P Parameter: Treatment Value: Drought vs. No Drought
  misc_feature: MA Experiment ID: 20001911 Result: Up-regulated in Transcription
  misc_feature: MA Experiment 20001911 PARAMETER Experiment Name: At_Drought_Reproduction_P Parameter: Age (day) Value: 40
  misc_feature: MA Experiment 20001911 PARAMETER Experiment Name: At_Drought_Reproduction_P Parameter: Organism Value: A. thaliana
  misc_feature: MA Experiment 20001911 PARAMETER Experiment Name: At_Drought_Reproduction_P Parameter: Plant Line Value: WS
  misc_feature: MA Experiment 20001911 PARAMETER Experiment Name: At_Drought_Reproduction_P Parameter: Timepoint (day) Value: 10
  misc_feature: MA Experiment 20001911 PARAMETER Experiment Name: At_Drought_Reproduction_P Parameter: Tissue Value: Flowers
  misc_feature: MA Experiment 20001911 PARAMETER Experiment Name: At_Drought_Reproduction_P Parameter: Treatment Value: Drought vs. No Drought

SEQ ID NO: 93289 - protein, 582 aa, Arabidopsis thaliana; identical to SEQ ID NO: 89533
  peptide (1)..(582): Ceres Seq. ID no. 12719450
  misc_feature (1)..(577): Homolog of NCBI NO: 7435454 NR Description: beta-glucosidase homolog At2g44470 [imported] -
  misc_feature (5)..(575): Homolog of NCBI NO: 15232262 NR Description: glycosyl hydrolase family 1, beta-glucosidase; id: At3g60140.1, supported by cDNA: gi_10834547 [Arabidopsis
  misc_feature (5)..(575): Homolog of NCBI NO: 10834548 NR Description: beta-glucosidase [Arabidopsis thaliana]
  misc_feature (1)..(450): Homolog of NCBI NO: 30689724 NR Description: glycosyl hydrolase family 1 [Arabidopsis thaliana]
  misc_feature (7)..(509): Homolog of NCBI NO: 22327030 NR Description: glycosyl hydrolase family 1; protein id:
  misc_feature (7)..(509): Homolog of NCBI NO: 15238569 NR Description: glycosyl hydrolase family 1; protein id:
  misc_feature (7)..(509): Homolog of NCBI NO: 10177855 NR Description: beta-glucosidase [Arabidopsis thaliana]
  misc_feature (6)..(504): Homolog of NCBI NO: 38344468 NR Description: OSJNBa0022H21.3 [Oryza sativa (japonica
  misc_feature (29)..(522): Homolog of NCBI NO: 25404995 NR Description: protein T4O12.15 [imported] - Arabidopsis >gi|8778810|gb|AAF26759.2|AC007396_8 T4O12.15 [Arabidopsis
  misc_feature (20)..(539): Homolog of NCBI NO: 30685472 NR Description: glycosyl hydrolase family 1 [Arabidopsis thaliana]

SEQ ID NO: 93290 - protein, 580 aa, Arabidopsis thaliana; identical to SEQ ID NO: 89534
  peptide (1)..(580): Ceres Seq. ID no. 12719451
  misc_feature (1)..(575): Homolog of NCBI NO: 7435454 NR Description: beta-glucosidase homolog At2g44470 [imported] -
  misc_feature (3)..(573): Homolog of NCBI NO: 15232262 NR Description: glycosyl hydrolase family 1, beta-glucosidase; id: At3g60140.1, supported by cDNA: gi_10834547 [Arabidopsis
  misc_feature (3)..(573): Homolog of NCBI NO: 10834548 NR Description: beta-glucosidase [Arabidopsis thaliana]
  misc_feature (1)..(448): Homolog of NCBI NO: 30689724 NR Description: glycosyl hydrolase family 1 [Arabidopsis thaliana]
  misc_feature (5)..(507): Homolog of NCBI NO: 22327030 NR Description: glycosyl hydrolase family 1; protein id:
  misc_feature (5)..(507): Homolog of NCBI NO: 15238569 NR Description: glycosyl hydrolase family 1; protein id:
  misc_feature (5)..(507): Homolog of NCBI NO: 10177855 NR Description: beta-glucosidase [Arabidopsis thaliana]
  misc_feature (4)..(502): Homolog of NCBI NO: 38344468 NR Description: OSJNBa0022H21.3 [Oryza sativa (japonica
  misc_feature (27)..(520): Homolog of NCBI NO: 25404995 NR Description: protein T4O12.15 [imported] - Arabidopsis >gi|8778810|gb|AAF26759.2|AC007396_8 T4O12.15 [Arabidopsis
  misc_feature (18)..(537): Homolog of NCBI NO: 30685472 NR Description: glycosyl hydrolase family 1 [Arabidopsis thaliana]

SEQ ID NO: 93291 - protein, 507 aa, Arabidopsis thaliana; identical to SEQ ID NO: 89535
  peptide (1)..(507): Ceres Seq. ID no. 12719452
  misc_feature (1)..(502): Homolog of NCBI NO: 7435454 NR Description: beta-glucosidase homolog At2g44470 [imported] -
  misc_feature (1)..(500): Homolog of NCBI NO: 15232262 NR Description: glycosyl hydrolase family 1, beta-glucosidase; id: At3g60140.1, supported by cDNA: gi_10834547 [Arabidopsis
  misc_feature (1)..(500): Homolog of NCBI NO: 10834548 NR Description: beta-glucosidase [Arabidopsis thaliana]
  misc_feature (1)..(375): Homolog of NCBI NO: 30689724 NR Description: glycosyl hydrolase family 1 [Arabidopsis thaliana]
  misc_feature (1)..(434): Homolog of NCBI NO: 22327030 NR Description: glycosyl hydrolase family 1; protein id:
  misc_feature (1)..(434): Homolog of NCBI NO: 15238569 NR Description: glycosyl hydrolase family 1; protein id:
  misc_feature (1)..(434): Homolog of NCBI NO: 10177855 NR Description: beta-glucosidase [Arabidopsis thaliana]
  misc_feature (1)..(429): Homolog of NCBI NO: 38344468 NR Description: OSJNBa0022H21.3 [Oryza sativa (japonica
  misc_feature (1)..(447): Homolog of NCBI NO: 25404995 NR Description: protein T4O12.15 [imported] - Arabidopsis >gi|8778810|gb|AAF26759.2|AC007396_8 T4O12.15 [Arabidopsis
  misc_feature (1)..(464): Homolog of NCBI NO: 30685472 NR Description: glycosyl hydrolase family 1 [Arabidopsis thaliana]

SEQ ID NO: 93292 - DNA, 1743 bp, Arabidopsis thaliana; identical to SEQ ID NO: 89536
  misc_feature (1)..(1743): Ceres Seq. ID no. 12719453

SEQ ID NO: 93293 - protein, 580 aa, Arabidopsis thaliana; identical to SEQ ID NO: 89537
  peptide (1)..(580): Ceres Seq. ID no. 12719454
  misc_feature (1)..(441): Homolog of NCBI NO: 30689724 NR Description: glycosyl hydrolase family 1 [Arabidopsis thaliana]
  misc_feature (1)..(580): Homolog of NCBI NO: 7435453 NR Description: probable beta-glucosidase At2g44460 [imported] -
  misc_feature (1)..(580): Homolog of NCBI NO: 30689721 NR Description: glycosyl hydrolase family 1 [Arabidopsis thaliana]
  misc_feature (6)..(580): Homolog of NCBI NO: 15232262 NR Description: glycosyl hydrolase family 1, beta-glucosidase; id: At3g60140.1, supported by cDNA: gi_10834547 [Arabidopsis
  misc_feature (6)..(580): Homolog of NCBI NO: 10834548 NR Description: beta-glucosidase [Arabidopsis thaliana]
  misc_feature (3)..(497): Homolog of NCBI NO: 15238569 NR Description: glycosyl hydrolase family 1; protein id:
  misc_feature (3)..(497): Homolog of NCBI NO: 22327030 NR Description: glycosyl hydrolase family 1; protein id:
  misc_feature (3)..(497): Homolog of NCBI NO: 10177855 NR Description: beta-glucosidase [Arabidopsis thaliana]
  misc_feature (20)..(495): Homolog of NCBI NO: 30685472 NR Description: glycosyl hydrolase family 1 [Arabidopsis thaliana]
  misc_feature (20)..(495): Homolog of NCBI NO: 7435455 NR Description: probable beta-glucosidase At2g32860 [imported] -

SEQ ID NO: 93294 - protein, 505 aa, Arabidopsis thaliana; identical to SEQ ID NO: 89538
  peptide (1)..(505): Ceres Seq. ID no. 12719455
  misc_feature (1)..(366): Homolog of NCBI NO: 30689724 NR Description: glycosyl hydrolase family 1 [Arabidopsis thaliana]
  misc_feature (1)..(505): Homolog of NCBI NO: 7435453 NR Description: probable beta-glucosidase At2g44460 [imported] -
  misc_feature (1)..(505): Homolog of NCBI NO: 30689721 NR Description: glycosyl hydrolase family 1 [Arabidopsis thaliana]
  misc_feature (1)..(505): Homolog of NCBI NO: 15232262 NR Description: glycosyl hydrolase family 1, beta-glucosidase; id: At3g60140.1, supported by cDNA: gi_10834547 [Arabidopsis
  misc_feature (1)..(505): Homolog of NCBI NO: 10834548 NR Description: beta-glucosidase [Arabidopsis thaliana]
  misc_feature (1)..(422): Homolog of NCBI NO: 15238569 NR Description: glycosyl hydrolase family 1; protein id:
  misc_feature (1)..(422): Homolog of NCBI NO: 22327030 NR Description: glycosyl hydrolase family 1; protein id:
  misc_feature (1)..(422): Homolog of NCBI NO: 10177855 NR Description: beta-glucosidase [Arabidopsis thaliana]
  misc_feature (1)..(420): Homolog of NCBI NO: 30685472 NR Description: glycosyl hydrolase family 1 [Arabidopsis thaliana]
  misc_feature (1)..(420): Homolog of NCBI NO: 7435455 NR Description: probable beta-glucosidase At2g32860 [imported] -

SEQ ID NO: 93295 - protein, 390 aa, Arabidopsis thaliana; identical to SEQ ID NO: 75520
  peptide (1)..(390): Ceres Seq. ID no. 12719456
  misc_feature (1)..(251): Homolog of NCBI NO: 30689724 NR Description: glycosyl hydrolase family 1 [Arabidopsis thaliana]
  misc_feature (1)..(390): Homolog of NCBI NO: 7435453 NR Description: probable beta-glucosidase At2g44460 [imported] -
  misc_feature (1)..(390): Homolog of NCBI NO: 30689721 NR Description: glycosyl hydrolase family 1 [Arabidopsis thaliana]
  misc_feature (1)..(390): Homolog of NCBI NO: 15232262 NR Description: glycosyl hydrolase family 1, beta-glucosidase; id: At3g60140.1, supported by cDNA: gi_10834547 [Arabidopsis
  misc_feature (1)..(390): Homolog of NCBI NO: 10834548 NR Description: beta-glucosidase [Arabidopsis thaliana]
  misc_feature (1)..(307): Homolog of NCBI NO: 15238569 NR Description: glycosyl hydrolase family 1; protein id:
  misc_feature (1)..(307): Homolog of NCBI NO: 22327030 NR Description: glycosyl hydrolase family 1; protein id:
  misc_feature (1)..(307): Homolog of NCBI NO: 10177855 NR Description: beta-glucosidase [Arabidopsis thaliana]
  misc_feature (1)..(305): Homolog of NCBI NO: 30685472 NR Description: glycosyl hydrolase family 1 [Arabidopsis thaliana]
  misc_feature (1)..(305): Homolog of NCBI NO: 7435455 NR Description: probable beta-glucosidase At2g32860 [imported] -

SEQ ID NO: 93296 - DNA, 1463 bp, Arabidopsis thaliana; identical to SEQ ID NO: 89540
  misc_feature (1)..(1463): Ceres Seq. ID no. 12719461
  misc_feature: MA Experiment ID: 108464 Result: Down-regulated in Transcription
  misc_feature: MA Experiment 108464 PARAMETER Experiment Name: At_Germinating_Seeds_cDNA_P Parameter: Age (day) Value: 4 vs. 0
  misc_feature: MA Experiment 108464 PARAMETER Experiment Name: At_Germinating_Seeds_cDNA_P Parameter: Tissue Value: Germinating Seeds
  misc_feature: MA Experiment ID: 108569 Result: Up-regulated in Transcription
  misc_feature: MA Experiment 108569 PARAMETER Experiment Name: At_0.001%_MeJA__cDNA_P Parameter: Timepoint (hr) Value: 6
  misc_feature: MA Experiment 108569 PARAMETER Experiment Name: At_0.001%_MeJA__cDNA_P Parameter: Tissue Value: Aerial
  misc_feature: MA Experiment 108569 PARAMETER Experiment Name: At_0.001%_MeJA__cDNA_P Parameter: Treatment Value: 0.001% MeJA vs. No Treatment
  misc_feature: MA Experiment ID: 108573 Result: Up-regulated in Transcription
  misc_feature: MA Experiment 108573 PARAMETER Experiment Name: At_Drought_cDNA_P Parameter: Timepoint (hr) Value: 6
  misc_feature: MA Experiment 108573 PARAMETER Experiment Name: At_Drought_cDNA_P Parameter: Tissue Value: Aerial
  misc_feature: MA Experiment 108573 PARAMETER Experiment Name: At_Drought_cDNA_P Parameter: Treatment Value: Drought vs. No Drought
  misc_feature: MA Experiment ID: 108585 Result: Up-regulated in Transcription
  misc_feature: MA Experiment 108585 PARAMETER Experiment Name: At_5mM_NaNP_cDNA_P Parameter: Timepoint (hr) Value: 6
  misc_feature: MA Experiment 108585 PARAMETER Experiment Name: At_5mM_NaNP_cDNA_P Parameter: Tissue Value: Aerial
  misc_feature: MA Experiment 108585 PARAMETER Experiment Name: At_5mM_NaNP_cDNA_P Parameter: Treatment Value: null
  misc_feature: MA Experiment ID: 108595 Result: Down-regulated in Transcription
  misc_feature: MA Experiment 108595 PARAMETER Experiment Name: At_Ler-pi_Ovule_cDNA_P Parameter: Plant Line Value: null

SEQ ID NO: 93297 - protein, 452 aa, Arabidopsis thaliana; identical to SEQ ID NO: 89541
  peptide (1)..(452): Ceres Seq. ID no. 12719462
  misc_feature (128)..(396): Pfam Name: UbiA prenyltransferase family Pfam Description: UbiA prenyltransferase family
  misc_feature (1)..(452): Homolog of NCBI NO: 7485006 NR Description: heme A farnesyltransferase homolog F16B22.1 -
  misc_feature (22)..(452): Homolog of NCBI NO: 18406556 NR Description: putative heme A:farnesyltransferase; protein id: supported by cDNA: gi_15028298, supported by cDNA: gi_21280972 thaliana] >gi|15028299|gb|AAK76626.1| putative heme
  misc_feature (22)..(452): Homolog of NCBI NO: 25408912 NR Description: probable heme A farnesyltransferase [imported] -
  misc_feature (22)..(451): Homolog of NCBI NO: 34913400 NR Description: putative heme A farnesyltransferase homolog
  misc_feature (122)..(389): Homolog of NCBI NO: 30410008 NR Description: RIKEN cDNA 2410004F01 [Mus musculus]
  misc_feature (82)..(404): Homolog of NCBI NO: 19112823 NR Description: cytochrome c oxidase assembly protein cox10 [Schizosaccharomyces pombe] >gi|7490416|pir||T40309 cytochrome c
  misc_feature (121)..(389): Homolog of NCBI NO: 20141419 NR Description: Protoheme IX farnesyltransferase, mitochondrial (Heme O synthase) >gi|2138300|gb|AAC51330.1| heme A: [Homo sapiens] >gi|12652629|gb|AAH00060.1|AAH00060 COX10 (yeast)
  misc_feature (121)..(389): Homolog of NCBI NO: 30584237 NR Description: Homo sapiens COX10 homolog, cytochrome c oxidase protein, heme A: farnesyltransferase (yeast) [synthetic
  misc_feature (122)..(389): Homolog of NCBI NO: 17921982 NR Description: heme A:farnesyltransferase; COX10 (yeast) cytochrome c oxidase assembly protein (heme A: cytochrome c oxidase subunit X; cytochrome c oxidase assembly
  misc_feature (119)..(413): Homolog of NCBI NO: 19921064 NR Description: CG5037-PA [Drosophila melanogaster]

SEQ ID NO: 93298 - protein, 431 aa, Arabidopsis thaliana; identical to SEQ ID NO: 89542
  peptide (1)..(431): Ceres Seq. ID no. 12719463
  misc_feature (107)..(375): Pfam Name: UbiA prenyltransferase family Pfam Description: UbiA prenyltransferase family
  misc_feature (1)..(431): Homolog of NCBI NO: 7485006 NR Description: heme A farnesyltransferase homolog F16B22.1 -
  misc_feature (1)..(431): Homolog of NCBI NO: 18406556 NR Description: putative heme A:farnesyltransferase; protein id: supported by cDNA: gi_15028298, supported by cDNA: gi_21280972 thaliana] >gi|15028299|gb|AAK76626.1| putative heme
  misc_feature (1)..(431): Homolog of NCBI NO: 25408912 NR Description: probable heme A farnesyltransferase [imported] -
  misc_feature (1)..(430): Homolog of NCBI NO: 34913400 NR Description: putative heme A farnesyltransferase homolog
  misc_feature (101)..(368): Homolog of NCBI NO: 30410008 NR Description: RIKEN cDNA 2410004F01 [Mus musculus]
  misc_feature (61)..(383): Homolog of NCBI NO: 19112823 NR Description: cytochrome c oxidase assembly protein cox10 [Schizosaccharomyces pombe] >gi|7490416|pir||T40309 cytochrome c
  misc_feature (100)..(368): Homolog of NCBI NO: 20141419 NR Description: Protoheme IX farnesyltransferase, mitochondrial (Heme O synthase) >gi|2138300|gb|AAC51330.1| heme A: [Homo sapiens] >gi|12652629|gb|AAH00060.1|AAH00060 COX10 (yeast)
  misc_feature (100)..(368): Homolog of NCBI NO: 30584237 NR Description: Homo sapiens COX10 homolog, cytochrome c oxidase protein, heme A: farnesyltransferase (yeast) [synthetic
  misc_feature (101)..(368): Homolog of NCBI NO: 17921982 NR Description: heme A:farnesyltransferase; COX10 (yeast) cytochrome c oxidase assembly protein (heme A: cytochrome c oxidase subunit X; cytochrome c oxidase assembly
  misc_feature (98)..(392): Homolog of NCBI NO: 19921064 NR Description: CG5037-PA [Drosophila melanogaster]

SEQ ID NO: 93299 - protein, 324 aa, Arabidopsis thaliana; identical to SEQ ID NO: 89543
  peptide (1)..(324): Ceres Seq. ID no. 12719464
  misc_feature (1)..(268): Pfam Name: UbiA prenyltransferase family Pfam Description: UbiA prenyltransferase family
  misc_feature (1)..(324): Homolog of NCBI NO: 7485006 NR Description: heme A farnesyltransferase homolog F16B22.1 -
  misc_feature (1)..(324): Homolog of NCBI NO: 18406556 NR Description: putative heme A:farnesyltransferase; protein id: supported by cDNA: gi_15028298, supported by cDNA: gi_21280972 thaliana] >gi|15028299|gb|AAK76626.1| putative heme
  misc_feature (1)..(324): Homolog of NCBI NO: 25408912 NR Description: probable heme A farnesyltransferase [imported] -
  misc_feature (1)..(323): Homolog of NCBI NO: 34913400 NR Description: putative heme A farnesyltransferase homolog
  misc_feature (1)..(261): Homolog of NCBI NO: 30410008 NR Description: RIKEN cDNA 2410004F01 [Mus musculus]
  misc_feature (1)..(276): Homolog of NCBI NO: 19112823 NR Description: cytochrome c oxidase assembly protein cox10 [Schizosaccharomyces pombe] >gi|7490416|pir||T40309 cytochrome c
  misc_feature (1)..(261): Homolog of NCBI NO: 20141419 NR Description: Protoheme IX farnesyltransferase, mitochondrial (Heme O synthase) >gi|2138300|gb|AAC51330.1| heme A: [Homo sapiens] >gi|12652629|gb|AAH00060.1|AAH00060 COX10 (yeast)
  misc_feature (1)..(261): Homolog of NCBI NO: 30584237 NR Description: Homo sapiens COX10 homolog, cytochrome c oxidase protein, heme A: farnesyltransferase (yeast) [synthetic
  misc_feature (1)..(261): Homolog of NCBI NO: 17921982 NR Description: heme A:farnesyltransferase; COX10 (yeast) cytochrome c oxidase assembly protein (heme A: cytochrome c oxidase subunit X; cytochrome c oxidase assembly
  misc_feature (1)..(285): Homolog of NCBI NO: 19921064 NR Description: CG5037-PA [Drosophila melanogaster]

SEQ ID NO: 93300 - DNA, 954 bp, Arabidopsis thaliana; identical to SEQ ID NO: 89544
  misc_feature (1)..(954): Ceres Seq. ID no. 12719504
  misc_feature: MA Experiment ID: 20000173 Result: Down-regulated in Transcription
  misc_feature: MA Experiment 20000173 PARAMETER Experiment Name: At_42deg_Heat_P Parameter: Age (day) Value: 14
  misc_feature: MA Experiment 20000173 PARAMETER Experiment Name: At_42deg_Heat_P Parameter: Organism Value: A. thaliana
  misc_feature: MA Experiment 20000173 PARAMETER Experiment Name: At_42deg_Heat_P Parameter: Plant Line Value: WS
  misc_feature: MA Experiment 20000173 PARAMETER Experiment Name: At_42deg_Heat_P Parameter: Temperature (deg C) Value: 42 vs. 22
  misc_feature: MA Experiment 20000173 PARAMETER Experiment Name: At_42deg_Heat_P Parameter: Timepoint (hr) Value: 6
  misc_feature: MA Experiment 20000173 PARAMETER Experiment Name: At_42deg_Heat_P Parameter: Tissue Value: Aerial
  misc_feature: MA Experiment ID: 20000185 Result: Up-regulated in Transcription
  misc_feature: MA Experiment 20000185 PARAMETER Experiment Name: At_Roots__P Parameter: Age (day) Value: 7 vs. 21
  misc_feature: MA Experiment 20000185 PARAMETER Experiment Name: At_Roots__P Parameter: Organism Value: A. thaliana
  misc_feature: MA Experiment 20000185 PARAMETER Experiment Name: At_Roots__P Parameter: Tissue Value: Roots vs. Whole Plant
  misc_feature: MA Experiment ID: 20000234 Result: Down-regulated in Transcription
  misc_feature: MA Experiment 20000234 PARAMETER Experiment Name: At_Siliques_P Parameter: Age (day) Value: 21
  misc_feature: MA Experiment 20000234 PARAMETER Experiment Name: At_Siliques_P Parameter: Organism Value: A. thaliana
  misc_feature: MA Experiment 20000234 PARAMETER Experiment Name: At_Siliques_P Parameter: Plant Line Value: WS
  misc_feature: MA Experiment 20000234 PARAMETER Experiment Name: At_Siliques_P Parameter: Tissue Value: Less Than 5mm Siliques vs. Whole Plant
  misc_feature: MA Experiment ID: 20000265 Result: Down-regulated in Transcription
  misc_feature: MA Experiment 20000265 PARAMETER Experiment Name: At_Open_Flower_P Parameter: Age (day) Value: 21
  misc_feature: MA Experiment 20000265 PARAMETER Experiment Name: At_Open_Flower_P Parameter: Plant Line Value: WS
  misc_feature: MA Experiment 20000265 PARAMETER Experiment Name: At_Open_Flower_P Parameter: Tissue Value: Closed Flower vs. Whole Plant
  misc_feature: MA Experiment ID: 20000288 Result: Down-regulated in Transcription
  misc_feature: MA Experiment 20000288 PARAMETER Experiment Name: At_Drought_P Parameter: Age (day) Value: 7
  misc_feature: MA Experiment 20000288 PARAMETER Experiment Name: At_Drought_P Parameter: Organism Value: A. thaliana
  misc_feature: MA Experiment 20000288 PARAMETER Experiment Name: At_Drought_P Parameter: Plant Line Value: WS
  misc_feature: MA Experiment 20000288 PARAMETER Experiment Name: At_Drought_P Parameter: Timepoint (hr) Value: 1
  misc_feature: MA Experiment 20000288 PARAMETER Experiment Name: At_Drought_P Parameter: Tissue Value: Whole Plant
  misc_feature: MA Experiment 20000288 PARAMETER Experiment Name: At_Drought_P Parameter: Treatment Value: Drought vs. No Drought
  misc_feature: MA Experiment ID: 20000438 Result: Down-regulated in Transcription
  misc_feature: MA Experiment 20000438 PARAMETER Experiment Name: At_Shoots__P Parameter: Age (day) Value: 14
  misc_feature: MA Experiment 20000438 PARAMETER Experiment Name: At_Shoots__P Parameter: Tissue Value: Shoots vs. Whole Plant
  misc_feature: MA Experiment ID: 20000439 Result: Up-regulated in Transcription
  misc_feature: MA Experiment 20000439 PARAMETER Experiment Name: At_Roots__P Parameter: Age (day) Value: 14 vs. 21
  misc_feature: MA Experiment 20000439 PARAMETER Experiment Name: At_Roots__P Parameter: Organism Value: A. thaliana
  misc_feature: MA Experiment 20000439 PARAMETER Experiment Name: At_Roots__P Parameter: Tissue Value: Roots vs. Whole Plant
  misc_feature: MA Experiment ID: 20001248 Result: Down-regulated in Transcription
  misc_feature: MA Experiment 20001248 PARAMETER Experiment Name: At_Far-red-induction_P Parameter: Age (day) Value: 7
  misc_feature: MA Experiment 20001248 PARAMETER Experiment Name: At_Far-red-induction_P Parameter: Light Value: Far-red vs. White
  misc_feature: MA Experiment 20001248 PARAMETER Experiment Name: At_Far-red-induction_P Parameter: Organism Value: A. thaliana
  misc_feature: MA Experiment 20001248 PARAMETER Experiment Name: At_Far-red-induction_P Parameter: Plant Line Value: Columbia
  misc_feature: MA Experiment 20001248 PARAMETER Experiment Name: At_Far-red-induction_P Parameter: Timepoint (hr) Value: 4
  misc_feature: MA Experiment 20001248 PARAMETER Experiment Name: At_Far-red-induction_P Parameter: Tissue Value: Whole Plant
  misc_feature: MA Experiment ID: 20001450 Result: Down-regulated in Transcription
  misc_feature: MA Experiment 20001450 PARAMETER Experiment Name: At_Far-red-induction_P Parameter: Age (day) Value: 7
  misc_feature: MA Experiment 20001450 PARAMETER Experiment Name: At_Far-red-induction_P Parameter: Light Value: Far-red vs. White
  misc_feature: MA Experiment 20001450 PARAMETER Experiment Name: At_Far-red-induction_P Parameter: Organism Value: A. thaliana
  misc_feature: MA Experiment 20001450 PARAMETER Experiment Name: At_Far-red-induction_P Parameter: Plant Line Value: Columbia
  misc_feature: MA Experiment 20001450 PARAMETER Experiment Name: At_Far-red-induction_P Parameter: Timepoint (hr) Value: 8
  misc_feature: MA Experiment 20001450 PARAMETER Experiment Name: At_Far-red-induction_P Parameter: Tissue Value: Whole Plant
  misc_feature: MA Experiment ID: 20001911 Result: Up-regulated in Transcription
  misc_feature: MA Experiment 20001911 PARAMETER Experiment Name: At_Drought_Reproduction_P Parameter: Age (day) Value: 40
  misc_feature: MA Experiment 20001911 PARAMETER Experiment Name: At_Drought_Reproduction_P Parameter: Organism Value: A. thaliana
  misc_feature: MA Experiment 20001911 PARAMETER Experiment Name: At_Drought_Reproduction_P Parameter: Plant Line Value: WS
  misc_feature: MA Experiment 20001911 PARAMETER Experiment Name: At_Drought_Reproduction_P Parameter: Timepoint (day) Value: 10
  misc_feature: MA Experiment 20001911 PARAMETER Experiment Name: At_Drought_Reproduction_P Parameter: Tissue Value: Flowers
  misc_feature: MA Experiment 20001911 PARAMETER Experiment Name: At_Drought_Reproduction_P Parameter: Treatment Value: Drought vs. No Drought

SEQ ID NO: 93301 - protein, 317 aa, Arabidopsis thaliana; identical to SEQ ID NO: 89545
  peptide (1)..(317): Ceres Seq. ID no. 12719505
  misc_feature (1)..(317): Homolog of NCBI NO: 15227574 NR Description: hypothetical protein; protein id: At2g36090.1
  misc_feature (10)..(309): Homolog of NCBI NO: 32479726 NR Description: OJ991214_12.2 [Oryza sativa (japonica
  misc_feature (15)..(287): Homolog of NCBI NO: 15225867 NR Description: unknown protein; protein id: At2g27310.1, by cDNA: gi_13877666 [Arabidopsis thaliana]
  misc_feature (64)..(314): Homolog of NCBI NO: 15225867 NR Description: unknown protein; protein id: At2g27310.1, by cDNA: gi_13877666 [Arabidopsis thaliana]

SEQ ID NO: 93302 - protein, 235 aa, Arabidopsis thaliana; identical to SEQ ID NO: 89546
  peptide (1)..(235): Ceres Seq. ID no. 12719506
  misc_feature (1)..(235): Homolog of NCBI NO: 15227574 NR Description: hypothetical protein; protein id: At2g36090.1
  misc_feature (1)..(227): Homolog of NCBI NO: 32479726 NR Description: OJ991214_12.2 [Oryza sativa (japonica
  misc_feature (1)..(205): Homolog of NCBI NO: 15225867 NR Description: unknown protein; protein id: At2g27310.1, by cDNA: gi_13877666 [Arabidopsis thaliana]
  misc_feature (1)..(232): Homolog of NCBI NO: 15225867 NR Description: unknown protein; protein id: At2g27310.1, by cDNA: gi_13877666 [Arabidopsis thaliana]

SEQ ID NO: 93303 - DNA, 1029 bp, Arabidopsis thaliana; identical to SEQ ID NO: 89547
  misc_feature (1)..(1029): Ceres Seq. ID no. 12719513
  misc_feature: MA Experiment ID: 20000184 Result: Up-regulated in Transcription
  misc_feature: MA Experiment 20000184 PARAMETER Experiment Name: At_Shoots__P Parameter: Age (day) Value: 7
  misc_feature: MA Experiment 20000184 PARAMETER Experiment Name: At_Shoots__P Parameter: Tissue Value: Shoots vs. Whole Plant
  misc_feature: MA Experiment ID: 20000185 Result: Up-regulated in Transcription
  misc_feature: MA Experiment 20000185 PARAMETER Experiment Name: At_Roots__P Parameter: Age (day) Value: 7 vs. 21
  misc_feature: MA Experiment 20000185 PARAMETER Experiment Name: At_Roots__P Parameter: Organism Value: A. thaliana
  misc_feature: MA Experiment 20000185 PARAMETER Experiment Name: At_Roots__P Parameter: Tissue Value: Roots vs. Whole Plant
  misc_feature: MA Experiment ID: 20000439 Result: Up-regulated in Transcription
  misc_feature: MA Experiment 20000439 PARAMETER Experiment Name: At_Roots__P Parameter: Age (day) Value: 14 vs. 21
  misc_feature: MA Experiment 20000439 PARAMETER Experiment Name: At_Roots__P Parameter: Organism Value: A. thaliana
  misc_feature: MA Experiment 20000439 PARAMETER Experiment Name: At_Roots__P Parameter: Tissue Value: Roots vs. Whole Plant

SEQ ID NO: 93304 - protein, 255 aa, Arabidopsis thaliana; identical to SEQ ID NO: 89548
  peptide (1)..(255): Ceres Seq. ID no. 12719514
  misc_feature (54)..(252): Pfam Name: S-antigen protein Pfam Description: S-antigen protein
  misc_feature (1)..(255): Homolog of NCBI NO: 15227583 NR Description: unknown protein; protein id: At2g36120.1
  misc_feature (1)..(252): Homolog of NCBI NO: 322647 NR Description: glycine-rich protein GRP22 - rape
  misc_feature (33)..(253): Homolog of NCBI NO: 322647 NR Description: glycine-rich protein GRP22 - rape
  misc_feature (39)..(252): Homolog of NCBI NO: 30679122 NR Description: expressed protein [Arabidopsis thaliana]
  misc_feature (7)..(255): Homolog of NCBI NO: 121628 NR Description: GLYCINE-RICH CELL WALL STRUCTURAL PROTEIN 1.0
  misc_feature (36)..(251): Homolog of NCBI NO: 72320 NR Description: glycine-rich cell wall protein precursor - thaliana >gi|16293|emb|CAA41249.1| glycine rich protein
  misc_feature (36)..(251): Homolog of NCBI NO: 15228946 NR Description: unknown protein; protein id: At3g17050.1
  misc_feature (39)..(251): Homolog of NCBI NO: 72320 NR Description: glycine-rich cell wall protein precursor - thaliana >gi|16293|emb|CAA41249.1| glycine rich protein
  misc_feature (39)..(251): Homolog of NCBI NO: 15228946 NR Description: unknown protein; protein id: At3g17050.1
  misc_feature (39)..(251): Homolog of NCBI NO: 72320 NR Description: glycine-rich cell wall protein precursor - thaliana >gi|16293|emb|CAA41249.1| glycine rich protein

SEQ ID NO: 93305 - protein, 193 aa, Arabidopsis thaliana; identical to SEQ ID NO: 89549
  peptide (1)..(193): Ceres Seq. ID no. 12719515
  misc_feature (1)..(193): Homolog of NCBI NO: 39579227 NR Description: Hypothetical protein CBG24854 [Caenorhabditis

SEQ ID NO: 93306 - protein, 180 aa, Arabidopsis thaliana; identical to SEQ ID NO: 89550
  peptide (1)..(180): Ceres Seq. ID no. 12719516
  misc_feature (1)..(180): Homolog of NCBI NO: 39579227 NR Description: Hypothetical protein CBG24854 [Caenorhabditis

SEQ ID NO: 93307 - DNA, 2850 bp, Arabidopsis thaliana; identical to SEQ ID NO: 89551
  misc_feature (1)..(2850): Ceres Seq. ID no. 12719528
  misc_feature: MA Experiment ID: 20000264 Result: Up-regulated in Transcription
  misc_feature: MA Experiment 20000264 PARAMETER Experiment Name: At_Open_Flower_P Parameter: Age (day) Value: 21
  misc_feature: MA Experiment 20000264 PARAMETER Experiment Name: At_Open_Flower_P Parameter: Plant Line Value: WS
  misc_feature: MA Experiment 20000264 PARAMETER Experiment Name: At_Open_Flower_P Parameter: Tissue Value: Open Flower vs. Whole Plant
  misc_feature: MA Experiment ID: 20000439 Result: Up-regulated in Transcription
  misc_feature: MA Experiment 20000439 PARAMETER Experiment Name: At_Roots__P Parameter: Age (day) Value: 14 vs. 21
  misc_feature: MA Experiment 20000439 PARAMETER Experiment Name: At_Roots__P Parameter: Organism Value: A. thaliana
  misc_feature: MA Experiment 20000439 PARAMETER Experiment Name: At_Roots__P Parameter: Tissue Value: Roots vs. Whole Plant
  misc_feature: MA Experiment ID: 20000495 Result: Up-regulated in Transcription
  misc_feature: MA Experiment 20000495 PARAMETER Experiment Name: At_Guard_Cells_P Parameter: Harvest Date Value: 8/2/2002
  misc_feature: MA Experiment 20000495 PARAMETER Experiment Name: At_Guard_Cells_P Parameter: Organism Value: A. thaliana
  misc_feature: MA Experiment 20000495 PARAMETER Experiment Name: At_Guard_Cells_P Parameter: Tissue Value: Guard Cells vs. Leaves
  misc_feature: MA Experiment ID: 20000794 Result: Up-regulated in Transcription
  misc_feature: MA Experiment 20000794 PARAMETER Experiment Name: At_Petals_P Parameter: Age (day) Value: 23-25 days
  misc_feature: MA Experiment 20000794 PARAMETER Experiment Name: At_Petals_P Parameter: Plant Line Value: WS
  misc_feature: MA Experiment 20000794 PARAMETER Experiment Name: At_Petals_P Parameter: Tissue Value: Petals vs. Whole plant
  misc_feature: MA Experiment ID: 20001451 Result: Up-regulated in Transcription
  misc_feature: MA Experiment 20001451 PARAMETER Experiment Name: At_Far-red-induction_P Parameter: Age (day) Value: 7
  misc_feature: MA Experiment 20001451 PARAMETER Experiment Name: At_Far-red-induction_P Parameter: Light Value: Far-red vs. White
  misc_feature: MA Experiment 20001451 PARAMETER Experiment Name: At_Far-red-induction_P Parameter: Organism Value: A. thaliana
  misc_feature: MA Experiment 20001451 PARAMETER Experiment Name: At_Far-red-induction_P Parameter: Plant Line Value: Columbia
  misc_feature: MA Experiment 20001451 PARAMETER Experiment Name: At_Far-red-induction_P Parameter: Timepoint (hr) Value: 24
  misc_feature: MA Experiment 20001451 PARAMETER Experiment Name: At_Far-red-induction_P Parameter: Tissue Value: Whole Plant
  misc_feature: MA Experiment ID: 20001557 Result: Up-regulated in Transcription
  misc_feature: MA Experiment 20001557 PARAMETER Experiment Name: At_Drought_Soil_Dry_P Parameter: Age (day) Value: 27
  misc_feature: MA Experiment 20001557 PARAMETER Experiment Name: At_Drought_Soil_Dry_P Parameter: Organism Value: A. thaliana
  misc_feature: MA Experiment 20001557 PARAMETER Experiment Name: At_Drought_Soil_Dry_P Parameter: Plant Line Value: WS
  misc_feature: MA Experiment 20001557 PARAMETER Experiment Name: At_Drought_Soil_Dry_P Parameter: Post Timepoint (hr) Value: 3
  misc_feature: MA Experiment 20001557 PARAMETER Experiment Name: At_Drought_Soil_Dry_P Parameter: Post-Treatment Value: Re-Water vs. No Drought
  misc_feature: MA Experiment 20001557 PARAMETER Experiment Name: At_Drought_Soil_Dry_P Parameter: Timepoint (day) Value: 13
  misc_feature: MA Experiment 20001557 PARAMETER Experiment Name: At_Drought_Soil_Dry_P Parameter: Treatment Value: Drought vs. No Drought

SEQ ID NO: 93308 - protein, 949 aa, Arabidopsis thaliana; identical to SEQ ID NO: 89552
  peptide (1)..(949): Ceres Seq. ID no. 12719529
  misc_feature (559)..(898): Pfam Name: Protein kinase domain Pfam Description: Protein kinase domain
  misc_feature (87)..(949): Homolog of NCBI NO: 30693719 NR Description: protein kinase (KIPK) [Arabidopsis thaliana]
  misc_feature (212)..(949): Homolog of NCBI NO: 7716430 NR Description: protein kinase KIPK [Arabidopsis thaliana]
  misc_feature (386)..(949): Homolog of NCBI NO: 15242814 NR Description: protein kinase -like protein; protein id:
  misc_feature (1)..(221): Homolog of NCBI NO: 15242814 NR Description: protein kinase -like protein; protein id:
  misc_feature (496)..(949): Homolog of NCBI NO: 15238798 NR Description: protein kinase (EC 2.7.1.37) 5 (pir||JN0505); id: At5g47750.1, supported by cDNA: gi_15809918, supported by gi_17064849, supported by cDNA: gi_20259909 [Arabidopsis
  misc_feature (496)..(949): Homolog of NCBI NO: 17064850 NR Description: protein kinase 5 [Arabidopsis thaliana]
  misc_feature (447)..(949): Homolog of NCBI NO: 15236802 NR Description: putative protein kinase; protein id: At4g26610.1, by cDNA: gi_17380933, supported by cDNA: gi_20258942 [Arabidopsis >gi|7488161|pir||T08927 probable protein kinase T15N24.60
  misc_feature (532)..(949): Homolog of NCBI NO: 320622 NR Description: probable protein kinase - maize (fragment)
  misc_feature (513)..(915): Homolog of NCBI NO: 1346057 NR Description: Protein kinase G11A >gi|100705|pir||B30311
  misc_feature (450)..(949): Homolog of NCBI NO: 15241076 NR Description: serine threonine-specific protein kinase ATPK64

SEQ ID NO: 93309 - protein, 922 aa, Arabidopsis thaliana; identical to SEQ ID NO: 89553
  peptide (1)..(922): Ceres Seq. ID no. 12719530
  misc_feature (532)..(871): Pfam Name: Protein kinase domain Pfam Description: Protein kinase domain
  misc_feature (60)..(922): Homolog of NCBI NO: 30693719 NR Description: protein kinase (KIPK) [Arabidopsis thaliana]
  misc_feature (185)..(922): Homolog of NCBI NO: 7716430 NR Description: protein kinase KIPK [Arabidopsis thaliana]
  misc_feature (359)..(922): Homolog of NCBI NO: 15242814 NR Description: protein kinase -like protein; protein id:
  misc_feature (1)..(194): Homolog of NCBI NO: 15242814 NR Description: protein kinase -like protein; protein id:
  misc_feature (469)..(922): Homolog of NCBI NO: 15238798 NR Description: protein kinase (EC 2.7.1.37) 5 (pir||JN0505); id: At5g47750.1, supported by cDNA: gi_15809918, supported by gi_17064849, supported by cDNA: gi_20259909 [Arabidopsis
  misc_feature (469)..(922): Homolog of NCBI NO: 17064850 NR Description: protein kinase 5 [Arabidopsis thaliana]
  misc_feature (420)..(922): Homolog of NCBI NO: 15236802 NR Description: putative protein kinase; protein id: At4g26610.1, by cDNA: gi_17380933, supported by cDNA: gi_20258942 [Arabidopsis >gi|7488161|pir||T08927 probable protein kinase T15N24.60
  misc_feature (505)..(922): Homolog of NCBI NO: 320622 NR Description: probable protein kinase - maize (fragment)
  misc_feature (486)..(888): Homolog of NCBI NO: 1346057 NR Description: Protein kinase G11A >gi|100705|pir||B30311
  misc_feature (423)..(922): Homolog of NCBI NO: 15241076 NR Description: serine threonine-specific protein kinase ATPK64

SEQ ID NO: 93310 - protein, 913 aa, Arabidopsis thaliana; identical to SEQ ID NO: 89554
  peptide (1)..(913): Ceres Seq. ID no. 12719531
  misc_feature (523)..(862): Pfam Name: Protein kinase domain Pfam Description: Protein kinase domain
  misc_feature (51)..(913): Homolog of NCBI NO: 30693719 NR Description: protein kinase (KIPK) [Arabidopsis thaliana]
  misc_feature (176)..(913): Homolog of NCBI NO: 7716430 NR Description: protein kinase KIPK [Arabidopsis thaliana]
  misc_feature (350)..(913): Homolog of NCBI NO: 15242814 NR Description: protein kinase -like protein; protein id:
  misc_feature (1)..(185): Homolog of NCBI NO: 15242814 NR Description: protein kinase -like protein; protein id:
  misc_feature (460)..(913): Homolog of NCBI NO: 15238798 NR Description: protein kinase (EC 2.7.1.37) 5 (pir||JN0505); id: At5g47750.1, supported by cDNA: gi_15809918, supported by gi_17064849, supported by cDNA: gi_20259909 [Arabidopsis
  misc_feature (460)..(913): Homolog of NCBI NO: 17064850 NR Description: protein kinase 5 [Arabidopsis thaliana]
  misc_feature (411)..(913): Homolog of NCBI NO: 15236802 NR Description: putative protein kinase; protein id: At4g26610.1, by cDNA: gi_17380933, supported by cDNA: gi_20258942 [Arabidopsis >gi|7488161|pir||T08927 probable protein kinase T15N24.60
  misc_feature (496)..(913): Homolog of NCBI NO: 320622 NR Description: probable protein kinase - maize (fragment)
  misc_feature (477)..(879): Homolog of NCBI NO: 1346057 NR Description: Protein kinase G11A >gi|100705|pir||B30311
  misc_feature (414)..(913): Homolog of NCBI NO: 15241076 NR Description: serine threonine-specific protein kinase ATPK64

SEQ ID NO: 93311 - DNA, 1572 bp, Arabidopsis thaliana; identical to SEQ ID NO: 89555
  misc_feature (1)..(1572): Ceres Seq. ID no. 12719572
  misc_feature: MA Experiment ID: 20000184 Result: Up-regulated in Transcription
  misc_feature: MA Experiment 20000184 PARAMETER Experiment Name: At_Shoots__P Parameter: Age (day) Value: 7
  misc_feature: MA Experiment 20000184 PARAMETER Experiment Name: At_Shoots__P Parameter: Tissue Value: Shoots vs. Whole Plant
  misc_feature: MA Experiment ID: 20000437 Result: Up-regulated in Transcription
  misc_feature: MA Experiment 20000437 PARAMETER Experiment Name: At_Drought_P Parameter: Age (day) Value: 8
  misc_feature: MA Experiment 20000437 PARAMETER Experiment Name: At_Drought_P Parameter: Organism Value: A. thaliana
  misc_feature: MA Experiment 20000437 PARAMETER Experiment Name: At_Drought_P Parameter: Plant Line Value: WS
  misc_feature: MA Experiment 20000437 PARAMETER Experiment Name: At_Drought_P Parameter: Timepoint (hr) Value: 24
  misc_feature: MA Experiment 20000437 PARAMETER Experiment Name: At_Drought_P Parameter: Tissue Value: Whole Plant
  misc_feature: MA Experiment 20000437 PARAMETER Experiment Name: At_Drought_P Parameter: Treatment Value: Drought vs. No Drought

SEQ ID NO: 93312 - protein, 448 aa, Arabidopsis thaliana; identical to SEQ ID NO: 89556
  peptide (1)..(448): Ceres Seq. ID no. 12719573
  misc_feature (287)..(359): Pfam Name: Late embryogenesis abundant protein Pfam Description: Late embryogenesis abundant protein
  misc_feature (1)..(448): Homolog of NCBI NO: 15228014 NR Description: late embryogenesis abundant protein (AtECP63); id: At2g36640.1, supported by cDNA: gi_1526423 [Arabidopsis >gi|25307676|pir||H84782 late embryogenesis abundant protein
  misc_feature (1)..(448): Homolog of NCBI NO: 7487938 NR Description: late embryogenesis abundant protein - Arabidopsis >gi|1526424|dbj|BAA11017.1| LEA protein in group 3 [Arabidopsis
  misc_feature (70)..(442): Homolog of NCBI NO: 15231736 NR Description: late embryogenesis abundant protein - like; id: At3g53040.1, supported by cDNA: gi_18175756, supported by gi_20465916 [Arabidopsis thaliana] >gi|11358481|pir||T47561 late
  misc_feature (2)..(365): Homolog of NCBI NO: 15231736 NR Description: late embryogenesis abundant protein - like; id: At3g53040.1, supported by cDNA: gi_18175756, supported by gi_20465916 [Arabidopsis thaliana] >gi|11358481|pir||T47561 late
  misc_feature (1)..(440): Homolog of NCBI NO: 282899 NR Description: embryonic abundant protein, 59K - soybean maturation polypeptide >gi|384333|prf||1905420A late
  misc_feature (6)..(440): Homolog of NCBI NO: 119127 NR Description: Embryonic protein DC-8 >gi|82044|pir||S04909
  misc_feature (1)..(448): Homolog of NCBI NO: 481805 NR Description: embryonic protein BP8 - European white birch
  misc_feature (300)..(448): Homolog of NCBI NO: 26451786 NR Description: putative f13k3 late embryogenesis abundant AtECP63 [Arabidopsis thaliana] >gi|28372836|gb|AAO39900.1|
  misc_feature (1)..(360): Homolog of NCBI NO: 481805 NR Description: embryonic protein BP8 - European white birch
  misc_feature (1)..(395): Homolog of NCBI NO: 119127 NR Description: Embryonic protein DC-8 >gi|82044|pir||S04909

SEQ ID NO: 93313 - protein, 414 aa, Arabidopsis thaliana; identical to SEQ ID NO: 89557
  peptide (1)..(414): Ceres Seq. ID no. 12719574
  misc_feature (253)..(325): Pfam Name: Late embryogenesis abundant protein Pfam Description: Late embryogenesis abundant protein
  misc_feature (1)..(414): Homolog of NCBI NO: 15228014 NR Description: late embryogenesis abundant protein (AtECP63); id: At2g36640.1, supported by cDNA: gi_1526423 [Arabidopsis >gi|25307676|pir||H84782 late embryogenesis abundant protein
  misc_feature (1)..(414): Homolog of NCBI NO: 7487938 NR Description: late embryogenesis abundant protein - Arabidopsis >gi|1526424|dbj|BAA11017.1| LEA protein in group 3 [Arabidopsis
  misc_feature (36)..(408): Homolog of NCBI NO: 15231736 NR Description: late embryogenesis abundant protein - like; id: At3g53040.1, supported by cDNA: gi_18175756, supported by gi_20465916 [Arabidopsis thaliana] >gi|11358481|pir||T47561 late
  misc_feature (1)..(331): Homolog of NCBI NO: 15231736 NR Description: late embryogenesis abundant protein - like; id: At3g53040.1, supported by cDNA: gi_18175756, supported by gi_20465916 [Arabidopsis thaliana] >gi|11358481|pir||T47561 late
  misc_feature (1)..(406): Homolog of NCBI NO: 282899 NR Description: embryonic abundant protein, 59K - soybean maturation polypeptide >gi|384333|prf||1905420A late
  misc_feature (1)..(406): Homolog of NCBI NO: 119127 NR Description: Embryonic protein DC-8 >gi|82044|pir||S04909
  misc_feature (1)..(414): Homolog of NCBI NO: 481805 NR Description: embryonic protein BP8 - European white birch
  misc_feature (266)..(414): Homolog of NCBI NO: 26451786 NR Description: putative f13k3 late embryogenesis abundant AtECP63 [Arabidopsis thaliana] >gi|28372836|gb|AAO39900.1|
  misc_feature (1)..(326): Homolog of NCBI NO: 481805 NR Description: embryonic protein BP8 - European white birch
  misc_feature (1)..(361): Homolog of NCBI NO: 119127 NR Description: Embryonic protein DC-8 >gi|82044|pir||S04909

SEQ ID NO: 93314 - DNA, 862 bp, Arabidopsis thaliana; identical to SEQ ID NO: 89558
  misc_feature (1)..(862): Ceres Seq. ID no. 12719579
  misc_feature: MA Experiment ID: 20000182 Result: Up-regulated in Transcription
  misc_feature: MA Experiment 20000182 PARAMETER Experiment Name: At_2mM_SA_P Parameter: Age (day) Value: 14
  misc_feature: MA Experiment 20000182 PARAMETER Experiment Name: At_2mM_SA_P Parameter: Organism Value: A. thaliana
  misc_feature: MA Experiment 20000182 PARAMETER Experiment Name: At_2mM_SA_P Parameter: Plant Line Value: WS
  misc_feature: MA Experiment 20000182 PARAMETER Experiment Name: At_2mM_SA_P Parameter: Timepoint (hr) Value: 6
  misc_feature: MA Experiment 20000182 PARAMETER Experiment Name: At_2mM_SA_P Parameter: Tissue Value: Aerial
  misc_feature: MA Experiment 20000182 PARAMETER Experiment Name: At_2mM_SA_P Parameter: Treatment Value: 2mM SA vs. No Treatment
  misc_feature: MA Experiment ID: 20000184 Result: Down-regulated in Transcription
  misc_feature: MA Experiment 20000184 PARAMETER Experiment Name: At_Shoots__P Parameter: Age (day) Value: 7
  misc_feature: MA Experiment 20000184 PARAMETER Experiment Name: At_Shoots__P Parameter: Tissue Value: Shoots vs. Whole Plant
  misc_feature: MA Experiment ID: 20000437 Result: Up-regulated in Transcription
  misc_feature: MA Experiment 20000437 PARAMETER Experiment Name: At_Drought_P Parameter: Age (day) Value: 8
  misc_feature: MA Experiment 20000437 PARAMETER Experiment Name: At_Drought_P Parameter: Organism Value: A. thaliana
  misc_feature: MA Experiment 20000437 PARAMETER Experiment Name: At_Drought_P Parameter: Plant Line Value: WS
  misc_feature: MA Experiment 20000437 PARAMETER Experiment Name: At_Drought_P Parameter: Timepoint (hr) Value: 24
  misc_feature: MA Experiment 20000437 PARAMETER Experiment Name: At_Drought_P Parameter: Tissue Value: Whole Plant
  misc_feature: MA Experiment 20000437 PARAMETER Experiment Name: At_Drought_P Parameter: Treatment Value: Drought vs. No Drought

SEQ ID NO: 93315 - protein, 139 aa, Arabidopsis thaliana; identical to SEQ ID NO: 89559
  peptide (1)..(139): Ceres Seq. ID no. 12719580
  misc_feature (1)..(139): Homolog of NCBI NO: 30686868 NR Description: expressed protein [Arabidopsis thaliana] At2g36680/F13K3.8 [Arabidopsis thaliana]
  misc_feature (1)..(131): Homolog of NCBI NO: 30686871 NR Description: expressed protein [Arabidopsis thaliana]
  misc_feature (118)..(139): Homolog of NCBI NO: 30686871 NR Description: expressed protein [Arabidopsis thaliana]
  misc_feature (1)..(131): Homolog of NCBI NO: 25408498 NR Description: hypothetical protein At2g36680 [imported] - thaliana >gi|4415913|gb|AAD20144.1| unknown protein [Arabidopsis
  misc_feature (118)..(139): Homolog of NCBI NO: 25408498 NR Description: hypothetical protein At2g36680 [imported] - thaliana >gi|4415913|gb|AAD20144.1| unknown protein [Arabidopsis
  misc_feature (1)..(139): Homolog of NCBI NO: 15231750 NR Description: putative protein; protein id: At3g53120.1

SEQ ID NO: 93316 - DNA, 1506 bp, Arabidopsis thaliana; identical to SEQ ID NO: 89560
  misc_feature (1)..(1506): Ceres Seq. ID no. 12719591
  misc_feature: MA Experiment ID: 20000227 Result: Up-regulated in Transcription
  misc_feature: MA Experiment 20000227 PARAMETER Experiment Name: At_Root-Tips-vs-Tops_P Parameter: Tissue Value: Root Tips vs. Root Tops
  misc_feature: MA Experiment ID: 20000495 Result: Up-regulated in Transcription
  misc_feature: MA Experiment 20000495 PARAMETER Experiment Name: At_Guard_Cells_P Parameter: Harvest Date Value: 8/2/2002
  misc_feature: MA Experiment 20000495 PARAMETER Experiment Name: At_Guard_Cells_P Parameter: Organism Value: A. thaliana
  misc_feature: MA Experiment 20000495 PARAMETER Experiment Name: At_Guard_Cells_P Parameter: Tissue Value: Guard Cells vs. Leaves

SEQ ID NO: 93317 - protein, 501 aa, Arabidopsis thaliana; identical to SEQ ID NO: 89561
  peptide (1)..(501): Ceres Seq. ID no. 12719592
  misc_feature (180)..(214): Pfam Name: PPR repeat Pfam Description: PPR repeat
  misc_feature (1)..(501): Homolog of NCBI NO: 15228026 NR Description: hypothetical protein; protein id: At2g36730.1
  misc_feature (17)..(486): Homolog of NCBI NO: 15227067 NR Description: hypothetical protein; protein id: At2g02980.1
  misc_feature (15)..(485): Homolog of NCBI NO: 7486979 NR Description: hypothetical protein T13K14.230 - Arabidopsis
  misc_feature (17)..(486): Homolog of NCBI NO: 21780142 NR Description: hypothetical protein [Arabidopsis thaliana]
  misc_feature (13)..(485): Homolog of NCBI NO: 34393394 NR Description: putative pentatricopeptide (PPR)
  misc_feature (7)..(492): Homolog of NCBI NO: 25346319 NR Description: hypothetical protein F23H11.3 [imported] - thaliana >gi|5080805|gb|AAD39314.1|AC007258_3 Hypothetical
  misc_feature (4)..(492): Homolog of NCBI NO: 15218900 NR Description: hypothetical protein; protein id: At1g59720.1
  misc_feature (14)..(492): Homolog of NCBI NO: 8778758 NR Description: T30E16.32 [Arabidopsis thaliana]
  misc_feature (31)..(492): Homolog of NCBI NO: 15222917 NR Description: hypothetical protein; protein id: At1g50270.1
  misc_feature (24)..(486): Homolog of NCBI NO: 15226299 NR Description: hypothetical protein; protein id: At2g01510.1

SEQ ID NO: 93318 - protein, 419 aa, Arabidopsis thaliana; identical to SEQ ID NO: 89562
  peptide (1)..(419): Ceres Seq. ID no. 12719593
  misc_feature (98)..(132): Pfam Name: PPR repeat Pfam Description: PPR repeat
  misc_feature (1)..(419): Homolog of NCBI NO: 15228026 NR Description: hypothetical protein; protein id: At2g36730.1
  misc_feature (1)..(404): Homolog of NCBI NO: 15227067 NR Description: hypothetical protein; protein id: At2g02980.1
  misc_feature (1)..(403): Homolog of NCBI NO: 7486979 NR Description: hypothetical protein T13K14.230 - Arabidopsis
  misc_feature (1)..(404): Homolog of NCBI NO: 21780142 NR Description: hypothetical protein [Arabidopsis thaliana]
  misc_feature (1)..(403): Homolog of NCBI NO: 34393394 NR Description: putative pentatricopeptide (PPR)
  misc_feature (1)..(410): Homolog of NCBI NO: 25346319 NR Description: hypothetical protein F23H11.3 [imported] - thaliana >gi|5080805|gb|AAD39314.1|AC007258_3 Hypothetical
  misc_feature (1)..(410): Homolog of NCBI NO: 15218900 NR Description: hypothetical protein; protein id: At1g59720.1
  misc_feature (1)..(410): Homolog of NCBI NO: 8778758 NR Description: T30E16.32 [Arabidopsis thaliana]
  misc_feature (1)..(410): Homolog of NCBI NO: 15222917 NR Description: hypothetical protein; protein id: At1g50270.1
  misc_feature (1)..(404): Homolog of NCBI NO: 15226299 NR Description: hypothetical protein; protein id: At2g01510.1

SEQ ID NO: 93319 - protein, 398 aa, Arabidopsis thaliana; identical to SEQ ID NO: 89563
  peptide (1)..(398): Ceres Seq. ID no. 12719594
  misc_feature (77)..(111): Pfam Name: PPR repeat Pfam Description: PPR repeat
  misc_feature (1)..(398): Homolog of NCBI NO: 15228026 NR Description: hypothetical protein; protein id: At2g36730.1
  misc_feature (1)..(383): Homolog of NCBI NO: 15227067 NR Description: hypothetical protein; protein id: At2g02980.1
  misc_feature (1)..(382): Homolog of NCBI NO: 7486979 NR Description: hypothetical protein T13K14.230 - Arabidopsis
  misc_feature (1)..(383): Homolog of NCBI NO: 21780142 NR Description: hypothetical protein [Arabidopsis thaliana]
  misc_feature (1)..(382): Homolog of NCBI NO: 34393394 NR Description: putative pentatricopeptide (PPR)
  misc_feature (1)..(389): Homolog of NCBI NO: 25346319 NR Description: hypothetical protein F23H11.3 [imported] - thaliana >gi|5080805|gb|AAD39314.1|AC007258_3 Hypothetical
  misc_feature (1)..(389): Homolog of NCBI NO: 15218900 NR Description: hypothetical protein; protein id: At1g59720.1
  misc_feature (1)..(389): Homolog of NCBI NO: 8778758 NR Description: T30E16.32 [Arabidopsis thaliana]
  misc_feature (1)..(389): Homolog of NCBI NO: 15222917 NR Description: hypothetical protein; protein id: At1g50270.1
  misc_feature (1)..(383): Homolog of NCBI NO: 15226299 NR Description: hypothetical protein; protein id: At2g01510.1

SEQ ID NO: 93320 - DNA, 1476 bp, Arabidopsis thaliana; identical to SEQ ID NO: 89564
  misc_feature (1)..(1476): Ceres Seq. ID no. 12719595
  misc_feature: MA Experiment ID: 20000306 Result: Down-regulated in Transcription
  misc_feature: MA Experiment 20000306 PARAMETER Experiment Name: At_Germinating_Seeds_Sub_P Parameter: Age (hr) Value: 6 vs. 0
  misc_feature: MA Experiment 20000306 PARAMETER Experiment Name: At_Germinating_Seeds_Sub_P Parameter: Organism Value: A. thaliana
  misc_feature: MA Experiment 20000306 PARAMETER Experiment Name: At_Germinating_Seeds_Sub_P Parameter: Plant Line Value: WS
  misc_feature: MA Experiment 20000306 PARAMETER Experiment Name: At_Germinating_Seeds_Sub_P Parameter: Tissue Value: Germinating Seeds
  misc_feature: MA Experiment ID: 20000307 Result: Down-regulated in Transcription
  misc_feature: MA Experiment 20000307 PARAMETER Experiment Name: At_Germinating_Seeds_Sub_P Parameter: Age (hr) Value: 24 vs. 0
  misc_feature: MA Experiment 20000307 PARAMETER Experiment Name: At_Germinating_Seeds_Sub_P Parameter: Organism Value: A. thaliana
  misc_feature: MA Experiment 20000307 PARAMETER Experiment Name: At_Germinating_Seeds_Sub_P Parameter: Plant Line Value: WS
  misc_feature: MA Experiment 20000307 PARAMETER Experiment Name: At_Germinating_Seeds_Sub_P Parameter: Tissue Value: Germinating Seeds
  misc_feature: MA Experiment ID: 20000327 Result: Up-regulated in Transcription
  misc_feature: MA Experiment 20000327 PARAMETER Experiment Name: At_42deg_Heat_Sub_P Parameter: Age (day) Value: 14
  misc_feature: MA Experiment 20000327 PARAMETER Experiment Name: At_42deg_Heat_Sub_P Parameter: Organism Value: A. thaliana
  misc_feature: MA Experiment 20000327 PARAMETER Experiment Name: At_42deg_Heat_Sub_P Parameter: Plant Line Value: WS
  misc_feature: MA Experiment 20000327 PARAMETER Experiment Name: At_42deg_Heat_Sub_P Parameter: Temperature (deg C) Value: 42 vs. 22
  misc_feature: MA Experiment 20000327 PARAMETER Experiment Name: At_42deg_Heat_Sub_P Parameter: Timepoint (hr) Value: 1
  misc_feature: MA Experiment 20000327 PARAMETER Experiment Name: At_42deg_Heat_Sub_P Parameter: Tissue Value: Aerial
  misc_feature: MA Experiment ID: 20000328 Result: Up-regulated in Transcription
  misc_feature: MA Experiment 20000328 PARAMETER Experiment Name: At_42deg_Heat_Sub_P Parameter: Age (day) Value: 14
  misc_feature: MA Experiment 20000328 PARAMETER Experiment Name: At_42deg_Heat_Sub_P Parameter: Organism Value: A. thaliana
  misc_feature: MA Experiment 20000328 PARAMETER Experiment Name: At_42deg_Heat_Sub_P Parameter: Plant Line Value: WS
  misc_feature: MA Experiment 20000328 PARAMETER Experiment Name: At_42deg_Heat_Sub_P Parameter: Temperature (deg C) Value: 42 vs. 22
  misc_feature: MA Experiment 20000328 PARAMETER Experiment Name: At_42deg_Heat_Sub_P Parameter: Timepoint (hr) Value: 6
  misc_feature: MA Experiment 20000328 PARAMETER Experiment Name: At_42deg_Heat_Sub_P Parameter: Tissue Value: Aerial
  misc_feature: MA Experiment ID: 20000346 Result: Up-regulated in Transcription
  misc_feature: MA Experiment 20000346 PARAMETER Experiment Name: At_2mM_SA_Sub_P Parameter: Age (day) Value: 14
  misc_feature: MA Experiment 20000346 PARAMETER Experiment Name: At_2mM_SA_Sub_P Parameter: Organism Value: A. thaliana
  misc_feature: MA Experiment 20000346 PARAMETER Experiment Name: At_2mM_SA_Sub_P Parameter: Plant Line Value: WS
  misc_feature: MA Experiment 20000346 PARAMETER Experiment Name: At_2mM_SA_Sub_P Parameter: Timepoint (hr) Value: 1
  misc_feature: MA Experiment 20000346 PARAMETER Experiment Name: At_2mM_SA_Sub_P Parameter: Tissue Value: Aerial
  misc_feature: MA Experiment 20000346 PARAMETER Experiment Name: At_2mM_SA_Sub_P Parameter: Treatment Value: 2mM SA vs. No Treatment
  misc_feature: MA Experiment ID: 20000347 Result: Up-regulated in Transcription
  misc_feature: MA Experiment 20000347 PARAMETER Experiment Name: At_2mM_SA_Sub_P Parameter: Age (day) Value: 14
  misc_feature: MA Experiment 20000347 PARAMETER Experiment Name: At_2mM_SA_Sub_P Parameter: Organism Value: A. thaliana
  misc_feature: MA Experiment 20000347 PARAMETER Experiment Name: At_2mM_SA_Sub_P Parameter: Plant Line Value: WS
  misc_feature: MA Experiment 20000347 PARAMETER Experiment Name: At_2mM_SA_Sub_P Parameter: Timepoint (hr) Value: 6
  misc_feature: MA Experiment 20000347 PARAMETER Experiment Name: At_2mM_SA_Sub_P Parameter: Tissue Value: Aerial
  misc_feature: MA Experiment 20000347 PARAMETER Experiment Name: At_2mM_SA_Sub_P Parameter: Treatment Value: 2mM SA vs. No Treatment
  misc_feature: MA Experiment ID: 20000440 Result: Up-regulated in Transcription
  misc_feature: MA Experiment 20000440 PARAMETER Experiment Name: At_Closed-Flower__Sub_P Parameter: Tissue Value: Closed Flower vs. Whole Plant

SEQ ID NO: 93321 - protein, 491 aa, Arabidopsis thaliana; identical to SEQ ID NO: 89565
  peptide (1)..(491): Ceres Seq. ID no. 12719596
  misc_feature (10)..(491): Pfam Name: UDP-glucoronosyl and UDP-glucosyl transferase Pfam Description: UDP-glucoronosyl and UDP-glucosyl transferase
  misc_feature (1)..(491): Homolog of NCBI NO: 15228031 NR Description: putative glucosyl transferase; protein id: [Arabidopsis thaliana] >gi|25286801|pir||C84784 probable glucosyl
  misc_feature (8)..(489): Homolog of NCBI NO: 15228037 NR Description: putative glucosyl transferase; protein id: supported by cDNA: gi_17065333 [Arabidopsis thaliana]
  misc_feature (4)..(490): Homolog of NCBI NO: 15228034 NR Description: putative glucosyl transferase; protein id: supported by cDNA: gi_15028388, supported by cDNA: gi_19310660
  misc_feature (1)..(490): Homolog of NCBI NO: 15228033 NR Description: putative glucosyl transferase; protein id: supported by cDNA: gi_20856889 [Arabidopsis thaliana]
  misc_feature (8)..(488): Homolog of NCBI NO: 15228035 NR Description: putative glucosyl transferase; protein id: [Arabidopsis thaliana] >gi|25286803|pir||G84784 probable glucosyl
  misc_feature (8)..(488): Homolog of NCBI NO: 26450153 NR Description: putative glucosyl transferase [Arabidopsis
  misc_feature (4)..(490): Homolog of NCBI NO: 15228032 NR Description: putative glucosyl transferase; protein id: [Arabidopsis thaliana] >gi|25286791|pir||D84784 probable glucosyl
  misc_feature (8)..(488): Homolog of NCBI NO: 15231758 NR Description: glucosyltransferase - like protein; protein id:
  misc_feature (22)..(488): Homolog of NCBI NO: 19911211 NR Description: glucosyltransferase-14 [Vigna angularis]
  misc_feature (10)..(491): Homolog of NCBI NO: 19911201 NR Description: glucosyltransferase-9 [Vigna angularis]

SEQ ID NO: 93322 - protein, 475 aa, Arabidopsis thaliana; identical to SEQ ID NO: 89566
  peptide (1)..(475): Ceres Seq. ID no. 12719597
  misc_feature (1)..(475): Pfam Name: UDP-glucoronosyl and UDP-glucosyl transferase Pfam Description: UDP-glucoronosyl and UDP-glucosyl transferase
  misc_feature (1)..(475): Homolog of NCBI NO: 15228031 NR Description: putative glucosyl transferase; protein id: [Arabidopsis thaliana] >gi|25286801|pir||C84784 probable glucosyl
  misc_feature (1)..(473): Homolog of NCBI NO: 15228037 NR Description: putative glucosyl transferase; protein id: supported by cDNA: gi_17065333 [Arabidopsis thaliana]
  misc_feature (1)..(474): Homolog of NCBI NO: 15228034 NR Description: putative glucosyl transferase; protein id: supported by cDNA: gi_15028388, supported by cDNA: gi_19310660
  misc_feature (1)..(474): Homolog of NCBI NO: 15228033 NR Description: putative glucosyl transferase; protein id: supported by cDNA: gi_20856889 [Arabidopsis thaliana]
  misc_feature (1)..(472): Homolog of NCBI NO: 15228035 NR Description: putative glucosyl transferase; protein id: [Arabidopsis thaliana] >gi|25286803|pir||G84784 probable glucosyl
  misc_feature (1)..(472): Homolog of NCBI NO: 26450153 NR Description: putative glucosyl transferase [Arabidopsis
  misc_feature (1)..(474): Homolog of NCBI NO: 15228032 NR Description: putative glucosyl transferase; protein id: [Arabidopsis thaliana] >gi|25286791|pir||D84784 probable glucosyl
  misc_feature (1)..(472): Homolog of NCBI NO: 15231758 NR Description: glucosyltransferase - like protein; protein id:
  misc_feature (6)..(472): Homolog of NCBI NO: 19911211 NR Description: glucosyltransferase-14 [Vigna angularis]
  misc_feature (1)..(475): Homolog of NCBI NO: 19911201 NR Description: glucosyltransferase-9 [Vigna angularis]

SEQ ID NO: 93323 - protein, 470 aa, Arabidopsis thaliana; identical to SEQ ID NO: 89567
  peptide (1)..(470): Ceres Seq. ID no. 12719598
  misc_feature (1)..(470): Pfam Name: UDP-glucoronosyl and UDP-glucosyl transferase Pfam Description: UDP-glucoronosyl and UDP-glucosyl transferase
  misc_feature (1)..(470): Homolog of NCBI NO: 15228031 NR Description: putative glucosyl transferase; protein id: [Arabidopsis thaliana] >gi|25286801|pir||C84784 probable glucosyl
  misc_feature (1)..(468): Homolog of NCBI NO: 15228037 NR Description: putative glucosyl transferase; protein id: supported by cDNA: gi_17065333 [Arabidopsis thaliana]
  misc_feature (1)..(469): Homolog of NCBI NO: 15228034 NR Description: putative glucosyl transferase; protein id: supported by cDNA: gi_15028388, supported by cDNA: gi_19310660
  misc_feature (1)..(469): Homolog of NCBI NO: 15228033 NR Description: putative glucosyl transferase; protein id: supported by cDNA: gi_20856889 [Arabidopsis thaliana]
  misc_feature (1)..(467): Homolog of NCBI NO: 15228035 NR Description: putative glucosyl transferase; protein id: [Arabidopsis thaliana] >gi|25286803|pir||G84784 probable glucosyl
  misc_feature (1)..(467): Homolog of NCBI NO: 26450153 NR Description: putative glucosyl transferase [Arabidopsis
  misc_feature (1)..(469): Homolog of NCBI NO: 15228032 NR Description: putative glucosyl transferase; protein id: [Arabidopsis thaliana] >gi|25286791|pir||D84784 probable glucosyl
  misc_feature (1)..(467): Homolog of NCBI NO: 15231758 NR Description: glucosyltransferase - like protein; protein id:
  misc_feature (1)..(467): Homolog of NCBI NO: 19911211 NR Description: glucosyltransferase-14 [Vigna angularis]
  misc_feature (1)..(470): Homolog of NCBI NO: 19911201 NR Description: glucosyltransferase-9 [Vigna angularis]

SEQ ID NO: 93324 - DNA, 1663 bp, Arabidopsis thaliana; identical to SEQ ID NO: 89568
  misc_feature (1)..(1663): Ceres Seq. ID no. 12719603
  misc_feature: MA Experiment ID: 20000307 Result: Down-regulated in Transcription
  misc_feature: MA Experiment 20000307 PARAMETER Experiment Name: At_Germinating_Seeds_Sub_P Parameter: Age (hr) Value: 24 vs. 0
  misc_feature: MA Experiment 20000307 PARAMETER Experiment Name: At_Germinating_Seeds_Sub_P Parameter: Organism Value: A. thaliana
  misc_feature: MA Experiment 20000307 PARAMETER Experiment Name: At_Germinating_Seeds_Sub_P Parameter: Plant Line Value: WS
  misc_feature: MA Experiment 20000307 PARAMETER Experiment Name: At_Germinating_Seeds_Sub_P Parameter: Tissue Value: Germinating Seeds
  misc_feature: MA Experiment ID: 20000315 Result: Down-regulated in Transcription
  misc_feature: MA Experiment 20000315 PARAMETER Experiment Name: At_14day_Shoots-Roots_Sub_P Parameter: Age (day) Value: 14
  misc_feature: MA Experiment 20000315 PARAMETER Experiment Name: At_14day_Shoots-Roots_Sub_P Parameter: Organism Value: A. thaliana
  misc_feature: MA Experiment 20000315 PARAMETER Experiment Name: At_14day_Shoots-Roots_Sub_P Parameter: Plant Line Value: WS
  misc_feature: MA Experiment 20000315 PARAMETER Experiment Name: At_14day_Shoots-Roots_Sub_P Parameter: Tissue Value: Shoots vs. Whole Plant
  misc_feature: MA Experiment ID: 20000346 Result: Up-regulated in Transcription
  misc_feature: MA Experiment 20000346 PARAMETER Experiment Name: At_2mM_SA_Sub_P Parameter: Age (day) Value: 14
  misc_feature: MA Experiment 20000346 PARAMETER Experiment Name: At_2mM_SA_Sub_P Parameter: Organism Value: A. thaliana
  misc_feature: MA Experiment 20000346 PARAMETER Experiment Name: At_2mM_SA_Sub_P Parameter: Plant Line Value: WS
  misc_feature: MA Experiment 20000346 PARAMETER Experiment Name: At_2mM_SA_Sub_P Parameter: Timepoint (hr) Value: 1
  misc_feature: MA Experiment 20000346 PARAMETER Experiment Name: At_2mM_SA_Sub_P Parameter: Tissue Value: Aerial
  misc_feature: MA Experiment 20000346 PARAMETER Experiment Name: At_2mM_SA_Sub_P Parameter: Treatment Value: 2mM SA vs. No Treatment
  misc_feature: MA Experiment ID: 20000347 Result: Up-regulated in Transcription
  misc_feature: MA Experiment 20000347 PARAMETER Experiment Name: At_2mM_SA_Sub_P Parameter: Age (day) Value: 14
  misc_feature: MA Experiment 20000347 PARAMETER Experiment Name: At_2mM_SA_Sub_P Parameter: Organism Value: A. thaliana
  misc_feature: MA Experiment 20000347 PARAMETER Experiment Name: At_2mM_SA_Sub_P Parameter: Plant Line Value: WS
  misc_feature: MA Experiment 20000347 PARAMETER Experiment Name: At_2mM_SA_Sub_P Parameter: Timepoint (hr) Value: 6
  misc_feature: MA Experiment 20000347 PARAMETER Experiment Name: At_2mM_SA_Sub_P Parameter: Tissue Value: Aerial
  misc_feature: MA Experiment 20000347 PARAMETER Experiment Name: At_2mM_SA_Sub_P Parameter: Treatment Value: 2mM SA vs. No Treatment
  misc_feature: MA Experiment ID: 20000355 Result: Down-regulated in Transcription
  misc_feature: MA Experiment 20000355 PARAMETER Experiment Name: At_Siliques_Sub_P Parameter: Age (day) Value: 21
  misc_feature: MA Experiment 20000355 PARAMETER Experiment Name: At_Siliques_Sub_P Parameter: Organism Value: A. thaliana
  misc_feature: MA Experiment 20000355 PARAMETER Experiment Name: At_Siliques_Sub_P Parameter: Plant Line Value: WS
  misc_feature: MA Experiment 20000355 PARAMETER Experiment Name: At_Siliques_Sub_P Parameter: Tissue Value: Less Than 5mm Siliques vs. Whole Plant
  misc_feature: MA Experiment ID: 20000440 Result: Down-regulated in Transcription
  misc_feature: MA Experiment 20000440 PARAMETER Experiment Name: At_Closed-Flower__Sub_P Parameter: Tissue Value: Closed Flower vs. Whole Plant

SEQ ID NO: 93325 - protein, 496 aa, Arabidopsis thaliana; identical to SEQ ID NO: 89569
  peptide (1)..(496): Ceres Seq. ID no. 12719604
  misc_feature (14)..(492): Pfam Name: UDP-glucoronosyl and UDP-glucosyl transferase Pfam Description: UDP-glucoronosyl and UDP-glucosyl transferase
  misc_feature (1)..(496): Homolog of NCBI NO: 15228034 NR Description: putative glucosyl transferase; protein id: supported by cDNA: gi_15028388, supported by cDNA: gi_19310660
  misc_feature (1)..(496): Homolog of NCBI NO: 15228033 NR Description: putative glucosyl transferase; protein id: supported by cDNA: gi_20856889 [Arabidopsis thaliana]
  misc_feature (1)..(496): Homolog of NCBI NO: 15228032 NR Description: putative glucosyl transferase; protein id: [Arabidopsis thaliana] >gi|25286791|pir||D84784 probable glucosyl
  misc_feature (1)..(496): Homolog of NCBI NO: 15228037 NR Description: putative glucosyl transferase; protein id: supported by cDNA: gi_17065333 [Arabidopsis thaliana]
  misc_feature (1)..(496): Homolog of NCBI NO: 15228035 NR Description: putative glucosyl transferase; protein id: [Arabidopsis thaliana] >gi|25286803|pir||G84784 probable glucosyl
  misc_feature (1)..(496): Homolog of NCBI NO: 26450153 NR Description: putative glucosyl transferase [Arabidopsis
  misc_feature (8)..(495): Homolog of NCBI NO: 15228031 NR Description: putative glucosyl transferase; protein id: [Arabidopsis thaliana] >gi|25286801|pir||C84784 probable glucosyl
  misc_feature (10)..(493): Homolog of NCBI NO: 15231758 NR Description: glucosyltransferase - like protein; protein id:
  misc_feature (26)..(493): Homolog of NCBI NO: 19911211 NR Description: glucosyltransferase-14 [Vigna angularis]
  misc_feature (14)..(495): Homolog of NCBI NO: 19911201 NR Description: glucosyltransferase-9 [Vigna angularis]

SEQ ID NO: 93326 - protein, 476 aa, Arabidopsis thaliana; identical to SEQ ID NO: 89570
  peptide (1)..(476): Ceres Seq. ID no. 12719605
  misc_feature (1)..(472): Pfam Name: UDP-glucoronosyl and UDP-glucosyl transferase Pfam Description: UDP-glucoronosyl and UDP-glucosyl transferase
  misc_feature (1)..(476): Homolog of NCBI NO: 15228034 NR Description: putative glucosyl transferase; protein id: supported by cDNA: gi_15028388, supported by cDNA: gi_19310660
  misc_feature (1)..(476): Homolog of NCBI NO: 15228033 NR Description: putative glucosyl transferase; protein id: supported by cDNA: gi_20856889 [Arabidopsis thaliana]
  misc_feature (1)..(476): Homolog of NCBI NO: 15228032 NR Description: putative glucosyl transferase; protein id: [Arabidopsis thaliana] >gi|25286791|pir||D84784 probable glucosyl
  misc_feature (1)..(476): Homolog of NCBI NO: 15228037 NR Description: putative glucosyl transferase; protein id: supported by cDNA: gi_17065333 [Arabidopsis thaliana]
  misc_feature (1)..(476): Homolog of NCBI NO: 15228035 NR Description: putative glucosyl transferase; protein id: [Arabidopsis thaliana] >gi|25286803|pir||G84784 probable glucosyl
  misc_feature (1)..(476): Homolog of NCBI NO: 26450153 NR Description: putative glucosyl transferase [Arabidopsis
  misc_feature (1)..(475): Homolog of NCBI NO: 15228031 NR Description: putative glucosyl transferase; protein id: [Arabidopsis thaliana] >gi|25286801|pir||C84784 probable glucosyl
  misc_feature (1)..(473): Homolog of NCBI NO: 15231758 NR Description: glucosyltransferase - like protein; protein id:
  misc_feature (6)..(473): Homolog of NCBI NO: 19911211 NR Description: glucosyltransferase-14 [Vigna angularis]
  misc_feature (1)..(475): Homolog of NCBI NO: 19911201 NR Description: glucosyltransferase-9 [Vigna angularis]

SEQ ID NO: 93327 - protein, 471 aa, Arabidopsis thaliana; identical to SEQ ID NO: 89571
  peptide (1)..(471): Ceres Seq. ID no. 12719606
  misc_feature (1)..(467): Pfam Name: UDP-glucoronosyl and UDP-glucosyl transferase Pfam Description: UDP-glucoronosyl and UDP-glucosyl transferase
  misc_feature (1)..(471): Homolog of NCBI NO: 15228034 NR Description: putative glucosyl transferase; protein id: supported by cDNA: gi_15028388, supported by cDNA: gi_19310660
  misc_feature (1)..(471): Homolog of NCBI NO: 15228033 NR Description: putative glucosyl transferase; protein id: supported by cDNA: gi_20856889 [Arabidopsis thaliana]
  misc_feature (1)..(471): Homolog of NCBI NO: 15228032 NR Description: putative glucosyl transferase; protein id: [Arabidopsis thaliana] >gi|25286791|pir||D84784 probable glucosyl
  misc_feature (1)..(471): Homolog of NCBI NO: 15228037 NR Description: putative glucosyl transferase; protein id: supported by cDNA: gi_17065333 [Arabidopsis thaliana]
  misc_feature (1)..(471): Homolog of NCBI NO: 15228035 NR Description: putative glucosyl transferase; protein id: [Arabidopsis thaliana] >gi|25286803|pir||G84784 probable glucosyl
  misc_feature (1)..(471): Homolog of NCBI NO: 26450153 NR Description: putative glucosyl transferase [Arabidopsis
  misc_feature (1)..(470): Homolog of NCBI NO: 15228031 NR Description: putative glucosyl transferase; protein id: [Arabidopsis thaliana] >gi|25286801|pir||C84784 probable glucosyl
  misc_feature (1)..(468): Homolog of NCBI NO: 15231758 NR Description: glucosyltransferase - like protein; protein id:
  misc_feature (1)..(468): Homolog of NCBI NO: 19911211 NR Description: glucosyltransferase-14 [Vigna angularis]
  misc_feature (1)..(470): Homolog of NCBI NO: 19911201 NR Description: glucosyltransferase-9 [Vigna angularis]

SEQ ID NO: 93328 - DNA, 1605 bp, Arabidopsis thaliana; identical to SEQ ID NO: 89572
  misc_feature (1)..(1605): Ceres Seq. ID no. 12719611
  misc_feature: MA Experiment ID: 20000306 Result: Down-regulated in Transcription
  misc_feature: MA Experiment 20000306 PARAMETER Experiment Name: At_Germinating_Seeds_Sub_P Parameter: Age (hr) Value: 6 vs. 0
  misc_feature: MA Experiment 20000306 PARAMETER Experiment Name: At_Germinating_Seeds_Sub_P Parameter: Organism Value: A. thaliana
  misc_feature: MA Experiment 20000306 PARAMETER Experiment Name: At_Germinating_Seeds_Sub_P Parameter: Plant Line Value: WS
  misc_feature: MA Experiment 20000306 PARAMETER Experiment Name: At_Germinating_Seeds_Sub_P Parameter: Tissue Value: Germinating Seeds
  misc_feature: MA Experiment ID: 20000307 Result: Down-regulated in Transcription
  misc_feature: MA Experiment 20000307 PARAMETER Experiment Name: At_Germinating_Seeds_Sub_P Parameter: Age (hr) Value: 24 vs. 0
  misc_feature: MA Experiment 20000307 PARAMETER Experiment Name: At_Germinating_Seeds_Sub_P Parameter: Organism Value: A. thaliana
  misc_feature: MA Experiment 20000307 PARAMETER Experiment Name: At_Germinating_Seeds_Sub_P Parameter: Plant Line Value: WS
  misc_feature: MA Experiment 20000307 PARAMETER Experiment Name: At_Germinating_Seeds_Sub_P Parameter: Tissue Value: Germinating Seeds
  misc_feature: MA Experiment ID: 20000315 Result: Down-regulated in Transcription
  misc_feature: MA Experiment 20000315 PARAMETER Experiment Name: At_14day_Shoots-Roots_Sub_P Parameter: Age (day) Value: 14
  misc_feature: MA Experiment 20000315 PARAMETER Experiment Name: At_14day_Shoots-Roots_Sub_P Parameter: Organism Value: A. thaliana
  misc_feature: MA Experiment 20000315 PARAMETER Experiment Name: At_14day_Shoots-Roots_Sub_P Parameter: Plant Line Value: WS
  misc_feature: MA Experiment 20000315 PARAMETER Experiment Name: At_14day_Shoots-Roots_Sub_P Parameter: Tissue Value: Shoots vs. Whole Plant
  misc_feature: MA Experiment ID: 20000346 Result: Up-regulated in Transcription
  misc_feature: MA Experiment 20000346 PARAMETER Experiment Name: At_2mM_SA_Sub_P Parameter: Age (day) Value: 14
  misc_feature: MA Experiment 20000346 PARAMETER Experiment Name: At_2mM_SA_Sub_P Parameter: Organism Value: A. thaliana
  misc_feature: MA Experiment 20000346 PARAMETER Experiment Name: At_2mM_SA_Sub_P Parameter: Plant Line Value: WS
  misc_feature: MA Experiment 20000346 PARAMETER Experiment Name: At_2mM_SA_Sub_P Parameter: Timepoint (hr) Value: 1
  misc_feature: MA Experiment 20000346 PARAMETER Experiment Name: At_2mM_SA_Sub_P Parameter: Tissue Value: Aerial
  misc_feature: MA Experiment 20000346 PARAMETER Experiment Name: At_2mM_SA_Sub_P Parameter: Treatment Value: 2mM SA vs. No Treatment

SEQ ID NO: 93329 - protein, 495 aa, Arabidopsis thaliana; identical to SEQ ID NO: 89573
  peptide (1)..(495): Ceres Seq. ID no. 12719612
  misc_feature (1)..(495): Homolog of NCBI NO: 15228037 NR Description: putative glucosyl transferase; protein id: supported by cDNA: gi_17065333 [Arabidopsis thaliana]
  misc_feature (10)..(495): Homolog of NCBI NO: 15228035 NR Description: putative glucosyl transferase; protein id: [Arabidopsis thaliana] >gi|25286803|pir||G84784 probable glucosyl
  misc_feature (10)..(495): Homolog of NCBI NO: 26450153 NR Description: putative glucosyl transferase [Arabidopsis
  misc_feature (1)..(495): Homolog of NCBI NO: 15228034 NR Description: putative glucosyl transferase; protein id: supported by cDNA: gi_15028388, supported by cDNA: gi_19310660
  misc_feature (1)..(495): Homolog of NCBI NO: 15228033 NR Description: putative glucosyl transferase; protein id: supported by cDNA: gi_20856889 [Arabidopsis thaliana]
  misc_feature (10)..(493): Homolog of NCBI NO: 15228031 NR Description: putative glucosyl transferase; protein id: [Arabidopsis thaliana] >gi|25286801|pir||C84784 probable glucosyl
  misc_feature (1)..(492): Homolog of NCBI NO: 15228032 NR Description: putative glucosyl transferase; protein id: [Arabidopsis thaliana] >gi|25286791|pir||D84784 probable glucosyl
  misc_feature (10)..(492): Homolog of NCBI NO: 15231758 NR Description: glucosyltransferase - like protein; protein id:
  misc_feature (6)..(489): Homolog of NCBI NO: 19911201 NR Description: glucosyltransferase-9 [Vigna angularis]
  misc_feature (24)..(492): Homolog of NCBI NO: 19911211 NR Description: glucosyltransferase-14 [Vigna angularis]

SEQ ID NO: 93330 - protein, 477 aa, Arabidopsis thaliana; identical to SEQ ID NO: 89574
  peptide (1)..(477): Ceres Seq. ID no. 12719613
  misc_feature (1)..(477): Homolog of NCBI NO: 15228037 NR Description: putative glucosyl transferase; protein id: supported by cDNA: gi_17065333 [Arabidopsis thaliana]
  misc_feature (1)..(477): Homolog of NCBI NO: 15228035 NR Description: putative glucosyl transferase; protein id: [Arabidopsis thaliana] >gi|25286803|pir||G84784 probable glucosyl
  misc_feature (1)..(477): Homolog of NCBI NO: 26450153 NR Description: putative glucosyl transferase [Arabidopsis
  misc_feature (1)..(477): Homolog of NCBI NO: 15228034 NR Description: putative glucosyl transferase; protein id: supported by cDNA: gi_15028388, supported by cDNA: gi_19310660
  misc_feature (1)..(477): Homolog of NCBI NO: 15228033 NR Description: putative glucosyl transferase; protein id: supported by cDNA: gi_20856889 [Arabidopsis thaliana]
  misc_feature (1)..(475): Homolog of NCBI NO: 15228031 NR Description: putative glucosyl transferase; protein id: [Arabidopsis thaliana] >gi|25286801|pir||C84784 probable glucosyl
  misc_feature (1)..(474): Homolog of NCBI NO: 15228032 NR Description: putative glucosyl transferase; protein id: [Arabidopsis thaliana] >gi|25286791|pir||D84784 probable glucosyl
  misc_feature (1)..(474): Homolog of NCBI NO: 15231758 NR Description: glucosyltransferase - like protein; protein id:
  misc_feature (1)..(471): Homolog of NCBI NO: 19911201 NR Description: glucosyltransferase-9 [Vigna angularis]
  misc_feature (6)..(474): Homolog of NCBI NO: 19911211 NR Description: glucosyltransferase-14 [Vigna angularis]

SEQ ID NO: 93331 - protein, 472 aa, Arabidopsis thaliana; identical to SEQ ID NO: 89575
  peptide (1)..(472): Ceres Seq. ID no. 12719614
  misc_feature (1)..(472): Homolog of NCBI NO: 15228037 NR Description: putative glucosyl transferase; protein id: supported by cDNA: gi_17065333 [Arabidopsis thaliana]
  misc_feature (1)..(472): Homolog of NCBI NO: 15228035 NR Description: putative glucosyl transferase; protein id: [Arabidopsis thaliana] >gi|25286803|pir||G84784 probable glucosyl
  misc_feature (1)..(472): Homolog of NCBI NO: 26450153 NR Description: putative glucosyl transferase [Arabidopsis
  misc_feature (1)..(472): Homolog of NCBI NO: 15228034 NR Description: putative glucosyl transferase; protein id: supported by cDNA: gi_15028388, supported by cDNA: gi_19310660
  misc_feature (1)..(472): Homolog of NCBI NO: 15228033 NR Description: putative glucosyl transferase; protein id: supported by cDNA: gi_20856889 [Arabidopsis thaliana]
  misc_feature (1)..(470): Homolog of NCBI NO: 15228031 NR Description: putative glucosyl transferase; protein id: [Arabidopsis thaliana] >gi|25286801|pir||C84784 probable glucosyl
  misc_feature (1)..(469): Homolog of NCBI NO: 15228032 NR Description: putative glucosyl transferase; protein id: [Arabidopsis thaliana] >gi|25286791|pir||D84784 probable glucosyl
  misc_feature (1)..(469): Homolog of NCBI NO: 15231758 NR Description: glucosyltransferase - like protein; protein id:
  misc_feature (1)..(466): Homolog of NCBI NO: 19911201 NR Description: glucosyltransferase-9 [Vigna angularis]
  misc_feature (1)..(469): Homolog of NCBI NO: 19911211 NR Description: glucosyltransferase-14 [Vigna angularis]

SEQ ID NO: 93332 - DNA, 926 bp, Arabidopsis thaliana; identical to SEQ ID NO: 89576
  misc_feature (1)..(926): Ceres Seq. ID no. 12719626
  misc_feature: MA Experiment ID: 20000171 Result: Up-regulated in Transcription
  misc_feature: MA Experiment 20000171 PARAMETER Experiment Name: At_42deg_Heat_P Parameter: Age (day) Value: 14
  misc_feature: MA Experiment 20000171 PARAMETER Experiment Name: At_42deg_Heat_P Parameter: Organism Value: A. thaliana
  misc_feature: MA Experiment 20000171 PARAMETER Experiment Name: At_42deg_Heat_P Parameter: Plant Line Value: WS
  misc_feature: MA Experiment 20000171 PARAMETER Experiment Name: At_42deg_Heat_P Parameter: Temperature (deg C) Value: 42 vs. 22
  misc_feature: MA Experiment 20000171 PARAMETER Experiment Name: At_42deg_Heat_P Parameter: Timepoint (hr) Value: 1
  misc_feature: MA Experiment 20000171 PARAMETER Experiment Name: At_42deg_Heat_P Parameter: Tissue Value: Aerial
  misc_feature: MA Experiment ID: 20000185 Result: Up-regulated in Transcription
  misc_feature: MA Experiment 20000185 PARAMETER Experiment Name: At_Roots__P Parameter: Age (day) Value: 7 vs. 21
  misc_feature: MA Experiment 20000185 PARAMETER Experiment Name: At_Roots__P Parameter: Organism Value: A. thaliana
  misc_feature: MA Experiment 20000185 PARAMETER Experiment Name: At_Roots__P Parameter: Tissue Value: Roots vs. Whole Plant
  misc_feature: MA Experiment ID: 20000265 Result: Up-regulated in Transcription
  misc_feature: MA Experiment 20000265 PARAMETER Experiment Name: At_Open_Flower_P Parameter: Age (day) Value: 21
  misc_feature: MA Experiment 20000265 PARAMETER Experiment Name: At_Open_Flower_P Parameter: Plant Line Value: WS
  misc_feature: MA Experiment 20000265 PARAMETER Experiment Name: At_Open_Flower_P Parameter: Tissue Value: Closed Flower vs. Whole Plant
  misc_feature: MA Experiment ID: 20000439 Result: Up-regulated in Transcription
  misc_feature: MA Experiment 20000439 PARAMETER Experiment Name: At_Roots__P Parameter: Age (day) Value: 14 vs. 21
  misc_feature: MA Experiment 20000439 PARAMETER Experiment Name: At_Roots__P Parameter: Organism Value: A. thaliana
  misc_feature: MA Experiment 20000439 PARAMETER Experiment Name: At_Roots__P Parameter: Tissue Value: Roots vs. Whole Plant
  misc_feature: MA Experiment ID: 20000527 Result: Down-regulated in Transcription
  misc_feature: MA Experiment 20000527 PARAMETER Experiment Name: At_10percent_PEG_P Parameter: Age (day) Value: 20
  misc_feature: MA Experiment 20000527 PARAMETER Experiment Name: At_10percent_PEG_P Parameter: Organism Value: A. thaliana
  misc_feature: MA Experiment 20000527 PARAMETER Experiment Name: At_10percent_PEG_P Parameter: Plant Line Value: WS
  misc_feature: MA Experiment 20000527 PARAMETER Experiment Name: At_10percent_PEG_P Parameter: Timepoint (day) Value: 20
  misc_feature: MA Experiment 20000527 PARAMETER Experiment Name: At_10percent_PEG_P Parameter: Tissue Value: Whole Plant
  misc_feature: MA Experiment 20000527 PARAMETER Experiment Name: At_10percent_PEG_P Parameter: Treatment Value: 10percent PEG vs. No Treatment

SEQ ID NO: 93333 - protein, 298 aa, Arabidopsis thaliana; identical to SEQ ID NO: 89577
  peptide (1)..(298): Ceres Seq. ID no. 12719627
  misc_feature (14)..(62): Pfam Name: Myb-like DNA-binding domain Pfam Description: Myb-like DNA-binding domain
  misc_feature (1)..(298): Homolog of NCBI NO: 15228049 NR Description: light-regulated myb protein, putative; protein At2g36890.1 [Arabidopsis thaliana] >gi|25294087|pir||H84785
  misc_feature (55)..(298): Homolog of NCBI NO: 11358537 NR Description: myb-related transcription factor MYB38 [imported] Arabidopsis thaliana (fragment) >gi|3941452|gb|AAC83602.1|
  misc_feature (1)..(297): Homolog of NCBI NO: 18419456 NR Description: blind [Lycopersicon esculentum]
  misc_feature (1)..(280): Homolog of NCBI NO: 15237193 NR Description: myb family transcription factor; protein id:
  misc_feature (1)..(212): Homolog of NCBI NO: 11273952 NR Description: myb-related transcription factor MYB68 [imported] Arabidopsis thaliana >gi|3941494|gb|AAC83623.1| putative
  misc_feature (1)..(212): Homolog of NCBI NO: 15239158 NR Description: myb DNA-binding protein (MYB68); protein id: supported by cDNA: gi_3941493 [Arabidopsis thaliana]
  misc_feature (1)..(153): Homolog of NCBI NO: 11358686 NR Description: probable transcription factor MYB36 [imported] - thaliana >gi|3941448|gb|AAC83600.1| putative transcription factor
  misc_feature (1)..(153): Homolog of NCBI NO: 15242793 NR Description: myb family transcription factor; protein id: supported by cDNA: gi_3941447 [Arabidopsis thaliana]
  misc_feature (1)..(134): Homolog of NCBI NO: 40253739 NR Description: putative P-type R2R3 Myb protein [Oryza sativa
  misc_feature (1)..(118): Homolog of NCBI NO: 2832408 NR Description: R2R3-MYB transcription factor [Arabidopsis

SEQ ID NO: 93334 - protein, 178 aa, Arabidopsis thaliana; identical to SEQ ID NO: 89578
  peptide (1)..(178): Ceres Seq. ID no. 12719628
  misc_feature (1)..(178): Homolog of NCBI NO: 15228049 NR Description: light-regulated myb protein, putative; protein At2g36890.1 [Arabidopsis thaliana] >gi|25294087|pir||H84785
  misc_feature (1)..(178): Homolog of NCBI NO: 11358537 NR Description: myb-related transcription factor MYB38 [imported] Arabidopsis thaliana (fragment) >gi|3941452|gb|AAC83602.1|
  misc_feature (1)..(177): Homolog of NCBI NO: 18419456 NR Description: blind [Lycopersicon esculentum]
  misc_feature (1)..(160): Homolog of NCBI NO: 15237193 NR Description: myb family transcription factor; protein id:
  misc_feature (1)..(92): Homolog of NCBI NO: 11273952 NR Description: myb-related transcription factor MYB68 [imported] Arabidopsis thaliana >gi|3941494|gb|AAC83623.1| putative
  misc_feature (1)..(92): Homolog of NCBI NO: 15239158 NR Description: myb DNA-binding protein (MYB68); protein id: supported by cDNA: gi_3941493 [Arabidopsis thaliana]
  misc_feature (1)..(33): Homolog of NCBI NO: 11358686 NR Description: probable transcription factor MYB36 [imported] - thaliana >gi|3941448|gb|AAC83600.1| putative transcription factor
  misc_feature (1)..(33): Homolog of NCBI NO: 15242793 NR Description: myb family transcription factor; protein id: supported by cDNA: gi_3941447 [Arabidopsis thaliana]
  misc_feature (1)..(14): Homolog of NCBI NO: 40253739 NR Description: putative P-type R2R3 Myb protein [Oryza sativa
  misc_feature (1)..(23): Homolog of NCBI NO: 34906426 NR Description: putative MYB family transcription factor [Oryza

SEQ ID NO: 93335 - protein, 151 aa, Arabidopsis thaliana; identical to SEQ ID NO: 89579
  peptide (1)..(151): Ceres Seq. ID no. 12719629
  misc_feature (1)..(151): Homolog of NCBI NO: 15228049 NR Description: light-regulated myb protein, putative; protein At2g36890.1 [Arabidopsis thaliana] >gi|25294087|pir||H84785
  misc_feature (1)..(151): Homolog of NCBI NO: 11358537 NR Description: myb-related transcription factor MYB38 [imported] Arabidopsis thaliana (fragment) >gi|3941452|gb|AAC83602.1|
  misc_feature (1)..(150): Homolog of NCBI NO: 18419456 NR Description: blind [Lycopersicon esculentum]
  misc_feature (1)..(133): Homolog of NCBI NO: 15237193 NR Description: myb family transcription factor; protein id:
  misc_feature (1)..(65): Homolog of NCBI NO: 11273952 NR Description: myb-related transcription factor MYB68 [imported] Arabidopsis thaliana >gi|3941494|gb|AAC83623.1| putative
  misc_feature (1)..(65): Homolog of NCBI NO: 15239158 NR Description: myb DNA-binding protein (MYB68); protein id: supported by cDNA: gi_3941493 [Arabidopsis thaliana]
  misc_feature (1)..(97): Homolog of NCBI NO: 15235710 NR Description: myb DNA-binding protein (AtMYB87); protein id: [Arabidopsis thaliana] >gi|7438332|pir||T06025 transcription
  misc_feature (1)..(64): Homolog of NCBI NO: 18415694 NR Description: myb family protein; protein id: At4g21440.1, by cDNA: 33333., supported by cDNA: gi_17065085 [Arabidopsis >gi|7242487|emb|CAB77384.1| putative transcription factor
  misc_feature (1)..(64): Homolog of NCBI NO: 21592858 NR Description: myb-related protein M4 [Arabidopsis thaliana]
  misc_feature (1)..(17): Homolog of NCBI NO: 282963 NR Description: myb-related protein Ph2 - garden petunia

SEQ ID NO: 93336 - DNA, 1522 bp, Arabidopsis thaliana; identical to SEQ ID NO: 89580
  misc_feature (1)..(1522): Ceres Seq. ID no. 12719634
  misc_feature: MA Experiment ID: 20000166 Result: Down-regulated in Transcription
  misc_feature: MA Experiment 20000166 PARAMETER Experiment Name: At_100uM_ABA_P Parameter: Age (day) Value: 14
  misc_feature: MA Experiment 20000166 PARAMETER Experiment Name: At_100uM_ABA_P Parameter: Organism Value: A. thaliana
  misc_feature: MA Experiment 20000166 PARAMETER Experiment Name: At_100uM_ABA_P Parameter: Plant Line Value: WS
  misc_feature: MA Experiment 20000166 PARAMETER Experiment Name: At_100uM_ABA_P Parameter: Timepoint (hr) Value: 1
  misc_feature: MA Experiment 20000166 PARAMETER Experiment Name: At_100uM_ABA_P Parameter: Tissue Value: Aerial
  misc_feature: MA Experiment 20000166 PARAMETER Experiment Name: At_100uM_ABA_P Parameter: Treatment Value: 100uM ABA vs. No Treatment
  misc_feature: MA Experiment ID: 20000169 Result: Down-regulated in Transcription
  misc_feature: MA Experiment 20000169 PARAMETER Experiment Name: At_100uM_ABA_P Parameter: Age (day) Value: 14
  misc_feature: MA Experiment 20000169 PARAMETER Experiment Name: At_100uM_ABA_P Parameter: Organism Value: A. thaliana
  misc_feature: MA Experiment 20000169 PARAMETER Experiment Name: At_100uM_ABA_P Parameter: Plant Line Value: WS
  misc_feature: MA Experiment 20000169 PARAMETER Experiment Name: At_100uM_ABA_P Parameter: Timepoint (hr) Value: 6
  misc_feature: MA Experiment 20000169 PARAMETER Experiment Name: At_100uM_ABA_P Parameter: Tissue Value: Aerial
  misc_feature: MA Experiment 20000169 PARAMETER Experiment Name: At_100uM_ABA_P Parameter: Treatment Value: 100uM ABA vs. No Treatment
  misc_feature: MA Experiment ID: 20000173 Result: Down-regulated in Transcription
  misc_feature: MA Experiment 20000173 PARAMETER Experiment Name: At_42deg_Heat_P Parameter: Age (day) Value: 14
  misc_feature: MA Experiment 20000173 PARAMETER Experiment Name: At_42deg_Heat_P Parameter: Organism Value: A. thaliana
  misc_feature: MA Experiment 20000173 PARAMETER Experiment Name: At_42deg_Heat_P Parameter: Plant Line Value: WS
  misc_feature: MA Experiment 20000173 PARAMETER Experiment Name: At_42deg_Heat_P Parameter: Temperature (deg C) Value: 42 vs. 22
  misc_feature: MA Experiment 20000173 PARAMETER Experiment Name: At_42deg_Heat_P Parameter: Timepoint (hr) Value: 6
  misc_feature: MA Experiment 20000173 PARAMETER Experiment Name: At_42deg_Heat_P Parameter: Tissue Value: Aerial
  misc_feature: MA Experiment ID: 20000179 Result: Down-regulated in Transcription
  misc_feature: MA Experiment 20000179 PARAMETER Experiment Name: At_Germinating_Seeds_P Parameter: Age (hr) Value: 6 vs. 0
  misc_feature: MA Experiment 20000179 PARAMETER Experiment Name: At_Germinating_Seeds_P Parameter: Tissue Value: Germinating Seeds
  misc_feature: MA Experiment ID: 20000180 Result: Down-regulated in Transcription
  misc_feature: MA Experiment 20000180 PARAMETER Experiment Name: At_Germinating_Seeds_P Parameter: Age (hr) Value: 24 vs. 0
  misc_feature: MA Experiment 20000180 PARAMETER Experiment Name: At_Germinating_Seeds_P Parameter: Tissue Value: Germinating Seeds
  misc_feature: MA Experiment ID: 20000184 Result: Down-regulated in Transcription
  misc_feature: MA Experiment 20000184 PARAMETER Experiment Name: At_Shoots__P Parameter: Age (day) Value: 7
  misc_feature: MA Experiment 20000184 PARAMETER Experiment Name: At_Shoots__P Parameter: Tissue Value: Shoots vs. Whole Plant
  misc_feature: MA Experiment ID: 20000264 Result: Up-regulated in Transcription
  misc_feature: MA Experiment 20000264 PARAMETER Experiment Name: At_Open_Flower_P Parameter: Age (day) Value: 21
  misc_feature: MA Experiment 20000264 PARAMETER Experiment Name: At_Open_Flower_P Parameter: Plant Line Value: WS
  misc_feature: MA Experiment 20000264 PARAMETER Experiment Name: At_Open_Flower_P Parameter: Tissue Value: Open Flower vs. Whole Plant
  misc_feature: MA Experiment ID: 20000527 Result: Down-regulated in Transcription
  misc_feature: MA Experiment 20000527 PARAMETER Experiment Name: At_10percent_PEG_P Parameter: Age (day) Value: 20
  misc_feature: MA Experiment 20000527 PARAMETER Experiment Name: At_10percent_PEG_P Parameter: Organism Value: A. thaliana
  misc_feature: MA Experiment 20000527 PARAMETER Experiment Name: At_10percent_PEG_P Parameter: Plant Line Value: WS
  misc_feature: MA Experiment 20000527 PARAMETER Experiment Name: At_10percent_PEG_P Parameter: Timepoint (day) Value: 20
  misc_feature: MA Experiment 20000527 PARAMETER Experiment Name: At_10percent_PEG_P Parameter: Tissue Value: Whole Plant
  misc_feature: MA Experiment 20000527 PARAMETER Experiment Name: At_10percent_PEG_P Parameter: Treatment Value: 10percent PEG vs. No Treatment
  misc_feature: MA Experiment ID: 20000794 Result: Up-regulated in Transcription
  misc_feature: MA Experiment 20000794 PARAMETER Experiment Name: At_Petals_P Parameter: Age (day) Value: 23-25 days
  misc_feature: MA Experiment 20000794 PARAMETER Experiment Name: At_Petals_P Parameter: Plant Line Value: WS
  misc_feature: MA Experiment 20000794 PARAMETER Experiment Name: At_Petals_P Parameter: Tissue Value: Petals vs. Whole plant
  misc_feature: MA Experiment ID: 20001450 Result: Down-regulated in Transcription
  misc_feature: MA Experiment 20001450 PARAMETER Experiment Name: At_Far-red-induction_P Parameter: Age (day) Value: 7
  misc_feature: MA Experiment 20001450 PARAMETER Experiment Name: At_Far-red-induction_P Parameter: Light Value: Far-red vs. White
  misc_feature: MA Experiment 20001450 PARAMETER Experiment Name: At_Far-red-induction_P Parameter: Organism Value: A. thaliana
  misc_feature: MA Experiment 20001450 PARAMETER Experiment Name: At_Far-red-induction_P Parameter: Plant Line Value: Columbia
  misc_feature: MA Experiment 20001450 PARAMETER Experiment Name: At_Far-red-induction_P Parameter: Timepoint (hr) Value: 8
  misc_feature: MA Experiment 20001450 PARAMETER Experiment Name: At_Far-red-induction_P Parameter: Tissue Value: Whole Plant
  misc_feature: MA Experiment ID: 20001554 Result: Down-regulated in Transcription
  misc_feature: MA Experiment 20001554 PARAMETER Experiment Name: At_Drought_Soil_Dry_P Parameter: Age (day) Value: 21
  misc_feature: MA Experiment 20001554 PARAMETER Experiment Name: At_Drought_Soil_Dry_P Parameter: Organism Value: A. thaliana
  misc_feature: MA Experiment 20001554 PARAMETER Experiment Name: At_Drought_Soil_Dry_P Parameter: Plant Line Value: WS
  misc_feature: MA Experiment 20001554 PARAMETER Experiment Name: At_Drought_Soil_Dry_P Parameter: Post Timepoint (hr) Value: None
  misc_feature: MA Experiment 20001554 PARAMETER Experiment Name: At_Drought_Soil_Dry_P Parameter: Post-Treatment Value: None
  misc_feature: MA Experiment 20001554 PARAMETER Experiment Name: At_Drought_Soil_Dry_P Parameter: Timepoint (day) Value: 7
  misc_feature: MA Experiment 20001554 PARAMETER Experiment Name: At_Drought_Soil_Dry_P Parameter: Treatment Value: Drought vs. No Drought
  misc_feature: MA Experiment ID: 20001768 Result: Down-regulated in Transcription
  misc_feature: MA Experiment 20001768 PARAMETER Experiment Name: At_Far-red-enriched-adult_P Parameter: Age (day) Value: 28
  misc_feature: MA Experiment 20001768 PARAMETER Experiment Name: At_Far-red-enriched-adult_P Parameter: Light Value: Far-red enriched vs. White
  misc_feature: MA Experiment 20001768 PARAMETER Experiment Name: At_Far-red-enriched-adult_P Parameter: Organism Value: A. thaliana
  misc_feature: MA Experiment 20001768 PARAMETER Experiment Name: At_Far-red-enriched-adult_P Parameter: Plant Line Value: Columbia
  misc_feature: MA Experiment 20001768 PARAMETER Experiment Name: At_Far-red-enriched-adult_P Parameter: Timepoint (hr) Value: 1
  misc_feature: MA Experiment 20001768 PARAMETER Experiment Name: At_Far-red-enriched-adult_P Parameter: Tissue Value: Aerial

SEQ ID NO: 93337 - protein, 504 aa, Arabidopsis thaliana; identical to SEQ ID NO: 89581
  peptide (1)..(504): Ceres Seq. ID no. 12719635
  misc_feature (15)..(504): Homolog of NCBI NO: 15228063 NR Description: putative glucosyltransferase; protein id: supported by cDNA: gi_15809993 [Arabidopsis thaliana]
  misc_feature (24)..(488): Homolog of NCBI NO: 21537408 NR Description: putative glucosyltransferase [Arabidopsis
  misc_feature (24)..(488): Homolog of NCBI NO: 15226332 NR Description: putative glucosyltransferase; protein id: supported by cDNA: 13761. [Arabidopsis thaliana]
  misc_feature (18)..(487): Homolog of NCBI NO: 37534766 NR Description: putative putative glucosyltransferase [Oryza
  misc_feature (18)..(484): Homolog of NCBI NO: 15218268 NR Description: UDP-glucose glucosyltransferase, putative; id: At1g78270.1, supported by cDNA: gi_20466351 [Arabidopsis >gi|8052539|gb|AAF71803.1|AC013430_12 F3F9.19 [Arabidopsis
  misc_feature (20)..(483): Homolog of NCBI NO: 15219876 NR Description: UDP-glucose glucosyltransferase, putative; id: At1g22400.1, supported by cDNA: gi_19698984 [Arabidopsis
  misc_feature (20)..(484): Homolog of NCBI NO: 17065006 NR Description: UDP-glucose glucosyltransferase [Arabidopsis
  misc_feature (20)..(484): Homolog of NCBI NO: 15219870 NR Description: UDP-glucose glucosyltransferase; protein id: supported by cDNA: gi_12083243, supported by cDNA: gi_17065005,
  misc_feature (20)..(484): Homolog of NCBI NO: 15219867 NR Description: UDP-glucose glucosyltransferase, putative;
  misc_feature (21)..(484): Homolog of NCBI NO: 25286821 NR Description: T16E15.2 protein - Arabidopsis thaliana

SEQ ID NO: 93338 - protein, 490 aa, Arabidopsis thaliana; identical to SEQ ID NO: 89582
  peptide (1)..(490): Ceres Seq. ID no. 12719636
  misc_feature (1)..(490): Homolog of NCBI NO: 15228063 NR Description: putative glucosyltransferase; protein id: supported by cDNA: gi_15809993 [Arabidopsis thaliana]
  misc_feature (10)..(474): Homolog of NCBI NO: 21537408 NR Description: putative glucosyltransferase [Arabidopsis
  misc_feature (10)..(474): Homolog of NCBI NO: 15226332 NR Description: putative glucosyltransferase; protein id: supported by cDNA: 13761. [Arabidopsis thaliana]
  misc_feature (4)..(473): Homolog of NCBI NO: 37534766 NR Description: putative putative glucosyltransferase [Oryza
  misc_feature (4)..(470): Homolog of NCBI NO: 15218268 NR Description: UDP-glucose glucosyltransferase, putative; id: At1g78270.1, supported by cDNA: gi_20466351 [Arabidopsis >gi|8052539|gb|AAF71803.1|AC013430_12 F3F9.19 [Arabidopsis
  misc_feature (6)..(469): Homolog of NCBI NO: 15219876 NR Description: UDP-glucose glucosyltransferase, putative; id: At1g22400.1, supported by cDNA: gi_19698984 [Arabidopsis
  misc_feature (6)..(470): Homolog of NCBI NO: 17065006 NR Description: UDP-glucose glucosyltransferase [Arabidopsis
  misc_feature (6)..(470): Homolog of NCBI NO: 15219870 NR Description: UDP-glucose glucosyltransferase; protein id: supported by cDNA: gi_12083243, supported by cDNA: gi_17065005,
  misc_feature (6)..(470): Homolog of NCBI NO: 15219867 NR Description: UDP-glucose glucosyltransferase, putative;
  misc_feature (7)..(470): Homolog of NCBI NO: 25286821 NR Description: T16E15.2 protein - Arabidopsis thaliana

SEQ ID NO: 93339 - protein, 479 aa, Arabidopsis thaliana; identical to SEQ ID NO: 89583
  peptide (1)..(479): Ceres Seq. ID no. 12719637
  misc_feature (1)..(479): Homolog of NCBI NO: 15228063 NR Description: putative glucosyltransferase; protein id: supported by cDNA: gi_15809993 [Arabidopsis thaliana]
  misc_feature (1)..(463): Homolog of NCBI NO: 21537408 NR Description: putative glucosyltransferase [Arabidopsis
  misc_feature (1)..(463): Homolog of NCBI NO: 15226332 NR Description: putative glucosyltransferase; protein id: supported by cDNA: 13761. [Arabidopsis thaliana]
  misc_feature (1)..(462): Homolog of NCBI NO: 37534766 NR Description: putative putative glucosyltransferase [Oryza
  misc_feature (1)..(459): Homolog of NCBI NO: 15218268 NR Description: UDP-glucose glucosyltransferase, putative; id: At1g78270.1, supported by cDNA: gi_20466351 [Arabidopsis >gi|8052539|gb|AAF71803.1|AC013430_12 F3F9.19 [Arabidopsis
  misc_feature (1)..(458): Homolog of NCBI NO: 15219876 NR Description: UDP-glucose glucosyltransferase, putative; id: At1g22400.1, supported by cDNA: gi_19698984 [Arabidopsis
  misc_feature (1)..(459): Homolog of NCBI NO: 17065006 NR Description: UDP-glucose glucosyltransferase [Arabidopsis
  misc_feature (1)..(459): Homolog of NCBI NO: 15219870 NR Description: UDP-glucose glucosyltransferase; protein id: supported by cDNA: gi_12083243, supported by cDNA: gi_17065005,
  misc_feature (1)..(459): Homolog of NCBI NO: 15219867 NR Description: UDP-glucose glucosyltransferase, putative;
  misc_feature (1)..(459): Homolog of NCBI NO: 25286821 NR Description: T16E15.2 protein - Arabidopsis thaliana

SEQ ID NO: 93340 - DNA, 823 bp, Arabidopsis thaliana; identical to SEQ ID NO: 89584
  misc_feature (1)..(823): Ceres Seq. ID no. 12719656
  misc_feature: MA Experiment ID: 20000173 Result: Up-regulated in Transcription
  misc_feature: MA Experiment 20000173 PARAMETER Experiment Name: At_42deg_Heat_P Parameter: Age (day) Value: 14
  misc_feature: MA Experiment 20000173 PARAMETER Experiment Name: At_42deg_Heat_P Parameter: Organism Value: A. thaliana
  misc_feature: MA Experiment 20000173 PARAMETER Experiment Name: At_42deg_Heat_P Parameter: Plant Line Value: WS
  misc_feature: MA Experiment 20000173 PARAMETER Experiment Name: At_42deg_Heat_P Parameter: Temperature (deg C) Value: 42 vs. 22
  misc_feature: MA Experiment 20000173 PARAMETER Experiment Name: At_42deg_Heat_P Parameter: Timepoint (hr) Value: 6
  misc_feature: MA Experiment 20000173 PARAMETER Experiment Name: At_42deg_Heat_P Parameter: Tissue Value: Aerial
  misc_feature: MA Experiment ID: 20000573 Result: Up-regulated in Transcription
  misc_feature: MA Experiment 20000573 PARAMETER Experiment Name: At_100uM_ABA_Mutants__P Parameter: Organism Value: A. thaliana
  misc_feature: MA Experiment 20000573 PARAMETER Experiment Name: At_100uM_ABA_Mutants__P Parameter: Plant Line Value: CS22 vs. Ler wt
  misc_feature: MA Experiment 20000573 PARAMETER Experiment Name: At_100uM_ABA_Mutants__P Parameter: Timepoint (hr) Value: N/A
  misc_feature: MA Experiment 20000573 PARAMETER Experiment Name: At_100uM_ABA_Mutants__P Parameter: Tissue Value: Whole Plant
  misc_feature: MA Experiment 20000573 PARAMETER Experiment Name: At_100uM_ABA_Mutants__P Parameter: Treatment Value: None
  misc_feature: MA Experiment ID: 20000574 Result: Up-regulated in Transcription
  misc_feature: MA Experiment 20000574 PARAMETER Experiment Name: At_100uM_ABA_Mutants__P Parameter: Organism Value: A. thaliana
  misc_feature: MA Experiment 20000574 PARAMETER Experiment Name: At_100uM_ABA_Mutants__P Parameter: Plant Line Value: CS23 vs. Ler wt
  misc_feature: MA Experiment 20000574 PARAMETER Experiment Name: At_100uM_ABA_Mutants__P Parameter: Timepoint (hr) Value: N/A
  misc_feature: MA Experiment 20000574 PARAMETER Experiment Name: At_100uM_ABA_Mutants__P Parameter: Tissue Value: Whole Plant
  misc_feature: MA Experiment 20000574 PARAMETER Experiment Name: At_100uM_ABA_Mutants__P Parameter: Treatment Value: None
  misc_feature: MA Experiment ID: 20001557 Result: Up-regulated in Transcription
  misc_feature: MA Experiment 20001557 PARAMETER Experiment Name: At_Drought_Soil_Dry_P Parameter: Age (day) Value: 27
  misc_feature: MA Experiment 20001557 PARAMETER Experiment Name: At_Drought_Soil_Dry_P Parameter: Organism Value: A. thaliana
  misc_feature: MA Experiment 20001557 PARAMETER Experiment Name: At_Drought_Soil_Dry_P Parameter: Plant Line Value: WS
  misc_feature: MA Experiment 20001557 PARAMETER Experiment Name: At_Drought_Soil_Dry_P Parameter: Post Timepoint (hr) Value: 3
  misc_feature: MA Experiment 20001557 PARAMETER Experiment Name: At_Drought_Soil_Dry_P Parameter: Post-Treatment Value: Re-Water vs. No Drought
  misc_feature: MA Experiment 20001557 PARAMETER Experiment Name: At_Drought_Soil_Dry_P Parameter: Timepoint (day) Value: 13
  misc_feature: MA Experiment 20001557 PARAMETER Experiment Name: At_Drought_Soil_Dry_P Parameter: Treatment Value: Drought vs. No Drought
  misc_feature: MA Experiment ID: 20001560 Result: Up-regulated in Transcription
  misc_feature: MA Experiment 20001560 PARAMETER Experiment Name: At_Drought_Soil_Dry_P Parameter: Age (day) Value: 28
  misc_feature: MA Experiment 20001560 PARAMETER Experiment Name: At_Drought_Soil_Dry_P Parameter: Organism Value: A. thaliana
  misc_feature: MA Experiment 20001560 PARAMETER Experiment Name: At_Drought_Soil_Dry_P Parameter: Plant Line Value: WS
  misc_feature: MA Experiment 20001560 PARAMETER Experiment Name: At_Drought_Soil_Dry_P Parameter: Post Timepoint (hr) Value: None
  misc_feature: MA Experiment 20001560 PARAMETER Experiment Name: At_Drought_Soil_Dry_P Parameter: Post-Treatment Value: None
  misc_feature: MA Experiment 20001560 PARAMETER Experiment Name: At_Drought_Soil_Dry_P Parameter: Timepoint (day) Value: 14
  misc_feature: MA Experiment 20001560 PARAMETER Experiment Name: At_Drought_Soil_Dry_P Parameter: Treatment Value: Drought vs. No Drought

SEQ ID NO: 93341 - protein, 204 aa, Arabidopsis thaliana; identical to SEQ ID NO: 89585
  peptide (1)..(204): Ceres Seq. ID no. 12719657
  misc_feature (32)..(204): Homolog of NCBI NO: 17979253 NR Description: At2g37060/T2N18.18 [Arabidopsis thaliana]
  misc_feature (32)..(191): Homolog of NCBI NO: 25408527 NR Description: probable CCAAT-box binding trancription factor
  misc_feature (32)..(192): Homolog of NCBI NO: 15231796 NR Description: transcription factor NF-Y, CCAAT-binding - like protein id: At3g53340.1 [Arabidopsis thaliana]
  misc_feature (32)..(151): Homolog of NCBI NO: 30687025 NR Description: CCAAT-box binding trancription factor -related
  misc_feature (32)..(195): Homolog of NCBI NO: 22380 NR Description: CAAT-box DNA binding protein subunit B (NF-YB)
  misc_feature (32)..(195): Homolog of NCBI NO: 115840 NR Description: CCAAT-BINDING TRANSCRIPTION FACTOR SUBUNIT A
  misc_feature (37)..(195): Homolog of NCBI NO: 30409461 NR Description: NF-YB [Oryza sativa (japonica cultivar-group)]
  misc_feature (41)..(188): Homolog of NCBI NO: 30409459 NR Description: NF-YB [Oryza sativa (japonica cultivar-group)]
  misc_feature (32)..(177): Homolog of NCBI NO: 18404885 NR Description: putative CCAAT-binding transcription factor protein id: At2g38880.1, supported by cDNA: 7805. [Arabidopsis >gi|2398527|emb|CAA74051.1| Transcription factor [Arabidopsis
  misc_feature (44)..(188): Homolog of NCBI NO: 34908028 NR Description: putative CAAT-box DNA binding protein [Oryza

SEQ ID NO: 93342 - protein, 173 aa, Arabidopsis thaliana; identical to SEQ ID NO: 89586
  peptide (1)..(173): Ceres Seq. ID no. 12719658
  misc_feature (1)..(173): Homolog of NCBI NO: 17979253 NR Description: At2g37060/T2N18.18 [Arabidopsis thaliana]
  misc_feature (1)..(160): Homolog of NCBI NO: 25408527 NR Description: probable CCAAT-box binding trancription factor
  misc_feature (1)..(161): Homolog of NCBI NO: 15231796 NR Description: transcription factor NF-Y, CCAAT-binding - like protein id: At3g53340.1 [Arabidopsis thaliana]
  misc_feature (1)..(120): Homolog of NCBI NO: 30687025 NR Description: CCAAT-box binding trancription factor -related
  misc_feature (1)..(164): Homolog of NCBI NO: 22380 NR Description: CAAT-box DNA binding protein subunit B (NF-YB)
  misc_feature (1)..(164): Homolog of NCBI NO: 115840 NR Description: CCAAT-BINDING TRANSCRIPTION FACTOR SUBUNIT A
  misc_feature (6)..(164): Homolog of NCBI NO: 30409461 NR Description: NF-YB [Oryza sativa (japonica cultivar-group)]
  misc_feature (10)..(157): Homolog of NCBI NO: 30409459 NR Description: NF-YB [Oryza sativa (japonica cultivar-group)]
  misc_feature (1)..(146): Homolog of NCBI NO: 18404885 NR Description: putative CCAAT-binding transcription factor protein id: At2g38880.1, supported by cDNA: 7805. [Arabidopsis >gi|2398527|emb|CAA74051.1| Transcription factor [Arabidopsis
  misc_feature (13)..(157): Homolog of NCBI NO: 34908028 NR Description: putative CAAT-box DNA binding protein [Oryza

SEQ ID NO: 93343 - protein, 130 aa, Arabidopsis thaliana; identical to SEQ ID NO: 89587
  peptide (1)..(130): Ceres Seq. ID no. 12719659
  misc_feature (1)..(130): Homolog of NCBI NO: 17979253 NR Description: At2g37060/T2N18.18 [Arabidopsis thaliana]
  misc_feature (1)..(117): Homolog of NCBI NO: 25408527 NR Description: probable CCAAT-box binding trancription factor
  misc_feature (1)..(118): Homolog of NCBI NO: 15231796 NR Description: transcription factor NF-Y, CCAAT-binding - like protein id: At3g53340.1 [Arabidopsis thaliana]
  misc_feature (1)..(77): Homolog of NCBI NO: 30687025 NR Description: CCAAT-box binding trancription factor -related
  misc_feature (1)..(121): Homolog of NCBI NO: 22380 NR Description: CAAT-box DNA binding protein subunit B (NF-YB)
  misc_feature (1)..(121): Homolog of NCBI NO: 115840 NR Description: CCAAT-BINDING TRANSCRIPTION FACTOR SUBUNIT A
  misc_feature (1)..(121): Homolog of NCBI NO: 30409461 NR Description: NF-YB [Oryza sativa (japonica cultivar-group)]
  misc_feature (1)..(114): Homolog of NCBI NO: 30409459 NR Description: NF-YB [Oryza sativa (japonica cultivar-group)]
  misc_feature (1)..(103): Homolog of NCBI NO: 18404885 NR Description: putative CCAAT-binding transcription factor protein id: At2g38880.1, supported by cDNA: 7805. [Arabidopsis >gi|2398527|emb|CAA74051.1| Transcription factor [Arabidopsis
  misc_feature (1)..(114): Homolog of NCBI NO: 34908028 NR Description: putative CAAT-box DNA binding protein [Oryza

SEQ ID NO: 93344 - DNA, 1056 bp, Arabidopsis thaliana; identical to SEQ ID NO: 89588
  misc_feature (1)..(1056): Ceres Seq. ID no. 12719664
  misc_feature: MA Experiment ID: 20000184 Result: Down-regulated in Transcription
  misc_feature: MA Experiment 20000184 PARAMETER Experiment Name: At_Shoots__P Parameter: Age (day) Value: 7
  misc_feature: MA Experiment 20000184 PARAMETER Experiment Name: At_Shoots__P Parameter: Tissue Value: Shoots vs. Whole Plant
  misc_feature: MA Experiment ID: 20000264 Result: Down-regulated in Transcription
  misc_feature: MA Experiment 20000264 PARAMETER Experiment Name: At_Open_Flower_P Parameter: Age (day) Value: 21
  misc_feature: MA Experiment 20000264 PARAMETER Experiment Name: At_Open_Flower_P Parameter: Plant Line Value: WS
  misc_feature: MA Experiment 20000264 PARAMETER Experiment Name: At_Open_Flower_P Parameter: Tissue Value: Open Flower vs. Whole Plant
  misc_feature: MA Experiment ID: 20000438 Result: Down-regulated in Transcription
  misc_feature: MA Experiment 20000438 PARAMETER Experiment Name: At_Shoots__P Parameter: Age (day) Value: 14
  misc_feature: MA Experiment 20000438 PARAMETER Experiment Name: At_Shoots__P Parameter: Tissue Value: Shoots vs. Whole Plant
  misc_feature: MA Experiment ID: 20000794 Result: Down-regulated in Transcription
  misc_feature: MA Experiment 20000794 PARAMETER Experiment Name: At_Petals_P Parameter: Age (day) Value: 23-25 days
  misc_feature: MA Experiment 20000794 PARAMETER Experiment Name: At_Petals_P Parameter: Plant Line Value: WS
  misc_feature: MA Experiment 20000794 PARAMETER Experiment Name: At_Petals_P Parameter: Tissue Value: Petals vs. Whole plant
  misc_feature: MA Experiment ID: 20001556 Result: Down-regulated in Transcription
  misc_feature: MA Experiment 20001556 PARAMETER Experiment Name: At_Drought_Soil_Dry_P Parameter: Age (day) Value: 26
  misc_feature: MA Experiment 20001556 PARAMETER Experiment Name: At_Drought_Soil_Dry_P Parameter: Organism Value: A. thaliana
  misc_feature: MA Experiment 20001556 PARAMETER Experiment Name: At_Drought_Soil_Dry_P Parameter: Plant Line Value: WS
  misc_feature: MA Experiment 20001556 PARAMETER Experiment Name: At_Drought_Soil_Dry_P Parameter: Post Timepoint (hr) Value: None
  misc_feature: MA Experiment 20001556 PARAMETER Experiment Name: At_Drought_Soil_Dry_P Parameter: Post-Treatment Value: None
  misc_feature: MA Experiment 20001556 PARAMETER Experiment Name: At_Drought_Soil_Dry_P Parameter: Timepoint (day) Value: 12
  misc_feature: MA Experiment 20001556 PARAMETER Experiment Name: At_Drought_Soil_Dry_P Parameter: Treatment Value: Drought vs. No Drought
  misc_feature: MA Experiment ID: 20001557 Result: Down-regulated in Transcription
  misc_feature: MA Experiment 20001557 PARAMETER Experiment Name: At_Drought_Soil_Dry_P Parameter: Age (day) Value: 27
  misc_feature: MA Experiment 20001557 PARAMETER Experiment Name: At_Drought_Soil_Dry_P Parameter: Organism Value: A. thaliana
  misc_feature: MA Experiment 20001557 PARAMETER Experiment Name: At_Drought_Soil_Dry_P Parameter: Plant Line Value: WS
  misc_feature: MA Experiment 20001557 PARAMETER Experiment Name: At_Drought_Soil_Dry_P Parameter: Post Timepoint (hr) Value: 3
  misc_feature: MA Experiment 20001557 PARAMETER Experiment Name: At_Drought_Soil_Dry_P Parameter: Post-Treatment Value: Re-Water vs. No Drought
  misc_feature: MA Experiment 20001557 PARAMETER Experiment Name: At_Drought_Soil_Dry_P Parameter: Timepoint (day) Value: 13
  misc_feature: MA Experiment 20001557 PARAMETER Experiment Name: At_Drought_Soil_Dry_P Parameter: Treatment Value: Drought vs. No Drought
  misc_feature: MA Experiment ID: 20001558 Result: Down-regulated in Transcription
  misc_feature: MA Experiment 20001558 PARAMETER Experiment Name: At_Drought_Soil_Dry_P Parameter: Age (day) Value: 27
  misc_feature: MA Experiment 20001558 PARAMETER Experiment Name: At_Drought_Soil_Dry_P Parameter: Organism Value: A. thaliana
  misc_feature: MA Experiment 20001558 PARAMETER Experiment Name: At_Drought_Soil_Dry_P Parameter: Plant Line Value: WS
  misc_feature: MA Experiment 20001558 PARAMETER Experiment Name: At_Drought_Soil_Dry_P Parameter: Post Timepoint (hr) Value: 6
  misc_feature: MA Experiment 20001558 PARAMETER Experiment Name: At_Drought_Soil_Dry_P Parameter: Post-Treatment Value: Re-Water vs. No Drought
  misc_feature: MA Experiment 20001558 PARAMETER Experiment Name: At_Drought_Soil_Dry_P Parameter: Timepoint (day) Value: 13
  misc_feature: MA Experiment 20001558 PARAMETER Experiment Name: At_Drought_Soil_Dry_P Parameter: Treatment Value: Drought vs. No Drought
  misc_feature: MA Experiment ID: 20001773 Result: Up-regulated in Transcription
  misc_feature: MA Experiment 20001773 PARAMETER Experiment Name: At_Far-red-enriched-adult_P Parameter: Age (day) Value: 30
  misc_feature: MA Experiment 20001773 PARAMETER Experiment Name: At_Far-red-enriched-adult_P Parameter: Light Value: Far-red enriched vs. White
  misc_feature: MA Experiment 20001773 PARAMETER Experiment Name: At_Far-red-enriched-adult_P Parameter: Organism Value: A. thaliana
  misc_feature: MA Experiment 20001773 PARAMETER Experiment Name: At_Far-red-enriched-adult_P Parameter: Plant Line Value: Columbia
  misc_feature: MA Experiment 20001773 PARAMETER Experiment Name: At_Far-red-enriched-adult_P Parameter: Timepoint (hr) Value: 48
  misc_feature: MA Experiment 20001773 PARAMETER Experiment Name: At_Far-red-enriched-adult_P Parameter: Tissue Value: Aerial

SEQ ID NO: 93345 - protein, 351 aa, Arabidopsis thaliana; identical to SEQ ID NO: 89589
  peptide (1)..(351): Ceres Seq. ID no. 12719665
  misc_feature (137)..(351): Pfam Name: Glycosyltransferase family 43 Pfam Description: Glycosyltransferase family 43
  misc_feature (1)..(351): Homolog of NCBI NO: 15228084 NR Description: unknown protein; protein id: At2g37090.1
  misc_feature (1)..(344): Homolog of NCBI NO: 33771692 NR Description: glycuronosyltransferase-like protein [Gossypium
  misc_feature (34)..(344): Homolog of NCBI NO: 16973326 NR Description: hypothetical protein [Gossypium hirsutum]
  misc_feature (5)..(276): Homolog of NCBI NO: 32879543 NR Description: beta3-glucuronyltransferase [Zea mays]
  misc_feature (279)..(340): Homolog of NCBI NO: 32879543 NR Description: beta3-glucuronyltransferase [Zea mays]
  misc_feature (116)..(273): Homolog of NCBI NO: 32968187 NR Description: beta3-glucuronyltransferase [Triticum aestivum]
  misc_feature (279)..(345): Homolog of NCBI NO: 32968187 NR Description: beta3-glucuronyltransferase [Triticum aestivum]
  misc_feature (91)..(273): Homolog of NCBI NO: 32968174 NR Description: beta3-glucuronyltransferase [Hordeum vulgare]
  misc_feature (279)..(344): Homolog of NCBI NO: 32968174 NR Description: beta3-glucuronyltransferase [Hordeum vulgare]
  misc_feature (100)..(341): Homolog of NCBI NO: 5668771 NR Description: Contains similarity to gb|D88035 glycoprotein UDP- glucuronyltransferase from Rattus norvegicus. [Arabidopsis

SEQ ID NO: 93346 - protein, 325 aa, Arabidopsis thaliana; identical to SEQ ID NO: 89590
  peptide (1)..(325): Ceres Seq. ID no. 12719666
  misc_feature (111)..(325): Pfam Name: Glycosyltransferase family 43 Pfam Description: Glycosyltransferase family 43
  misc_feature (1)..(325): Homolog of NCBI NO: 15228084 NR Description: unknown protein; protein id: At2g37090.1
  misc_feature (1)..(318): Homolog of NCBI NO: 33771692 NR Description: glycuronosyltransferase-like protein [Gossypium
  misc_feature (8)..(318): Homolog of NCBI NO: 16973326 NR Description: hypothetical protein [Gossypium hirsutum]
  misc_feature (1)..(250): Homolog of NCBI NO: 32879543 NR Description: beta3-glucuronyltransferase [Zea mays]
  misc_feature (253)..(314): Homolog of NCBI NO: 32879543 NR Description: beta3-glucuronyltransferase [Zea mays]
  misc_feature (90)..(247): Homolog of NCBI NO: 32968187 NR Description: beta3-glucuronyltransferase [Triticum aestivum]
  misc_feature (253)..(319): Homolog of NCBI NO: 32968187 NR Description: beta3-glucuronyltransferase [Triticum aestivum]
  misc_feature (65)..(247): Homolog of NCBI NO: 32968174 NR Description: beta3-glucuronyltransferase [Hordeum vulgare]
  misc_feature (253)..(318): Homolog of NCBI NO: 32968174 NR Description: beta3-glucuronyltransferase [Hordeum vulgare]
  misc_feature (74)..(315): Homolog of NCBI NO: 5668771 NR Description: Contains similarity to gb|D88035 glycoprotein UDP- glucuronyltransferase from Rattus norvegicus. [Arabidopsis

SEQ ID NO: 93347 - protein, 215 aa, Arabidopsis thaliana; identical to SEQ ID NO: 89591
  peptide (1)..(215): Ceres Seq. ID no. 12719667
  misc_feature (1)..(215): Pfam Name: Glycosyltransferase family 43 Pfam Description: Glycosyltransferase family 43
  misc_feature (1)..(215): Homolog of NCBI NO: 15228084 NR Description: unknown protein; protein id: At2g37090.1
  misc_feature (1)..(208): Homolog of NCBI NO: 33771692 NR Description: glycuronosyltransferase-like protein [Gossypium
  misc_feature (1)..(208): Homolog of NCBI NO: 16973326 NR Description: hypothetical protein [Gossypium hirsutum]
  misc_feature (1)..(140): Homolog of NCBI NO: 32879543 NR Description: beta3-glucuronyltransferase [Zea mays]
  misc_feature (143)..(204): Homolog of NCBI NO: 32879543 NR Description: beta3-glucuronyltransferase [Zea mays]
  misc_feature (1)..(137): Homolog of NCBI NO: 32968187 NR Description: beta3-glucuronyltransferase [Triticum aestivum]
  misc_feature (143)..(209): Homolog of NCBI NO: 32968187 NR Description: beta3-glucuronyltransferase [Triticum aestivum]
  misc_feature (1)..(137): Homolog of NCBI NO: 32968174 NR Description: beta3-glucuronyltransferase [Hordeum vulgare]
  misc_feature (143)..(208): Homolog of NCBI NO: 32968174 NR Description: beta3-glucuronyltransferase [Hordeum vulgare]
  misc_feature (1)..(205): Homolog of NCBI NO: 5668771 NR Description: Contains similarity to gb|D88035 glycoprotein UDP- glucuronyltransferase from Rattus norvegicus. [Arabidopsis

SEQ ID NO: 93348 - DNA, 1958 bp, Arabidopsis thaliana; identical to SEQ ID NO: 89592
  misc_feature (1)..(1958): Ceres Seq. ID no. 12719672
  misc_feature: MA Experiment ID: 20000437 Result: Up-regulated in Transcription
  misc_feature: MA Experiment 20000437 PARAMETER Experiment Name: At_Drought_P Parameter: Age (day) Value: 8
  misc_feature: MA Experiment 20000437 PARAMETER Experiment Name: At_Drought_P Parameter: Organism Value: A. thaliana
  misc_feature: MA Experiment 20000437 PARAMETER Experiment Name: At_Drought_P Parameter: Plant Line Value: WS
  misc_feature: MA Experiment 20000437 PARAMETER Experiment Name: At_Drought_P Parameter: Timepoint (hr) Value: 24
  misc_feature: MA Experiment 20000437 PARAMETER Experiment Name: At_Drought_P Parameter: Tissue Value: Whole Plant
  misc_feature: MA Experiment 20000437 PARAMETER Experiment Name: At_Drought_P Parameter: Treatment Value: Drought vs. No Drought
  misc_feature: MA Experiment ID: 20000794 Result: Up-regulated in Transcription
  misc_feature: MA Experiment 20000794 PARAMETER Experiment Name: At_Petals_P Parameter: Age (day) Value: 23-25 days
  misc_feature: MA Experiment 20000794 PARAMETER Experiment Name: At_Petals_P Parameter: Plant Line Value: WS
  misc_feature: MA Experiment 20000794 PARAMETER Experiment Name: At_Petals_P Parameter: Tissue Value: Petals vs. Whole plant
  misc_feature: MA Experiment ID: 20001757 Result: Down-regulated in Transcription
  misc_feature: MA Experiment 20001757 PARAMETER Experiment Name: At_50mM_NH4NO3_L-to-H_P Parameter: Timepoint (hr) Value: 6
  misc_feature: MA Experiment 20001757 PARAMETER Experiment Name: At_50mM_NH4NO3_L-to-H_P Parameter: Tissue Value: Leaf
  misc_feature: MA Experiment 20001757 PARAMETER Experiment Name: At_50mM_NH4NO3_L-to-H_P Parameter: Treatment Value: 50mM NH4NO3 vs 100mM Mannitol
  misc_feature: MA Experiment ID: 20001905 Result: Up-regulated in Transcription
  misc_feature: MA Experiment 20001905 PARAMETER Experiment Name: At_Drought_Reproduction_P Parameter: Age (day) Value: 40
  misc_feature: MA Experiment 20001905 PARAMETER Experiment Name: At_Drought_Reproduction_P Parameter: Organism Value: A. thaliana
  misc_feature: MA Experiment 20001905 PARAMETER Experiment Name: At_Drought_Reproduction_P Parameter: Plant Line Value: WS
  misc_feature: MA Experiment 20001905 PARAMETER Experiment Name: At_Drought_Reproduction_P Parameter: Timepoint (day) Value: 10
  misc_feature: MA Experiment 20001905 PARAMETER Experiment Name: At_Drought_Reproduction_P Parameter: Tissue Value: Rosettes
  misc_feature: MA Experiment 20001905 PARAMETER Experiment Name: At_Drought_Reproduction_P Parameter: Treatment Value: Drought vs. No Drought
  misc_feature: MA Experiment ID: 20001911 Result: Up-regulated in Transcription
  misc_feature: MA Experiment 20001911 PARAMETER Experiment Name: At_Drought_Reproduction_P Parameter: Age (day) Value: 40
  misc_feature: MA Experiment 20001911 PARAMETER Experiment Name: At_Drought_Reproduction_P Parameter: Organism Value: A. thaliana
  misc_feature: MA Experiment 20001911 PARAMETER Experiment Name: At_Drought_Reproduction_P Parameter: Plant Line Value: WS
  misc_feature: MA Experiment 20001911 PARAMETER Experiment Name: At_Drought_Reproduction_P Parameter: Timepoint (day) Value: 10
  misc_feature: MA Experiment 20001911 PARAMETER Experiment Name: At_Drought_Reproduction_P Parameter: Tissue Value: Flowers
  misc_feature: MA Experiment 20001911 PARAMETER Experiment Name: At_Drought_Reproduction_P Parameter: Treatment Value: Drought vs. No Drought

SEQ ID NO: 93349 - protein, 546 aa, Arabidopsis thaliana; identical to SEQ ID NO: 89593
  peptide (1)..(546): Ceres Seq. ID no. 12719673
  misc_feature (492)..(533): Pfam Name: Zinc finger, C3HC4 type (RING finger) Pfam Description: Zinc finger, C3HC4 type (RING finger)
  misc_feature (1)..(546): Homolog of NCBI NO: 30687050 NR Description: zinc finger (C3HC4-type RING finger) protein
  misc_feature (40)..(455): Homolog of NCBI NO: 25408534 NR Description: probable protein with C-terminal RING finger
  misc_feature (506)..(546): Homolog of NCBI NO: 25408534 NR Description: probable protein with C-terminal RING finger
  misc_feature (1)..(544): Homolog of NCBI NO: 1086225 NR Description: RING-finger protein - Lotus japonicus
  misc_feature (85)..(544): Homolog of NCBI NO: 4240031 NR Description: DNA binding zinc finger protein (Pspzf) [Pisum

SEQ ID NO: 93350 - protein, 496 aa, Arabidopsis thaliana; identical to SEQ ID NO: 89594
  peptide (1)..(496): Ceres Seq. ID no. 12719674
  misc_feature (442)..(483): Pfam Name: Zinc finger, C3HC4 type (RING finger) Pfam Description: Zinc finger, C3HC4 type (RING finger)
  misc_feature (1)..(496): Homolog of NCBI NO: 30687050 NR Description: zinc finger (C3HC4-type RING finger) protein
  misc_feature (1)..(405): Homolog of NCBI NO: 25408534 NR Description: probable protein with C-terminal RING finger
  misc_feature (456)..(496): Homolog of NCBI NO: 25408534 NR Description: probable protein with C-terminal RING finger
  misc_feature (1)..(494): Homolog of NCBI NO: 1086225 NR Description: RING-finger protein - Lotus japonicus
  misc_feature (35)..(494): Homolog of NCBI NO: 4240031 NR Description: DNA binding zinc finger protein (Pspzf) [Pisum

SEQ ID NO: 93351 - protein, 491 aa, Arabidopsis thaliana; identical to SEQ ID NO: 89595
  peptide (1)..(491): Ceres Seq. ID no. 12719675
  misc_feature (437)..(478): Pfam Name: Zinc finger, C3HC4 type (RING finger) Pfam Description: Zinc finger, C3HC4 type (RING finger)
  misc_feature (1)..(491): Homolog of NCBI NO: 30687050 NR Description: zinc finger (C3HC4-type RING finger) protein
  misc_feature (1)..(400): Homolog of NCBI NO: 25408534 NR Description: probable protein with C-terminal RING finger
  misc_feature (451)..(491): Homolog of NCBI NO: 25408534 NR Description: probable protein with C-terminal RING finger
  misc_feature (1)..(489): Homolog of NCBI NO: 1086225 NR Description: RING-finger protein - Lotus japonicus
  misc_feature (30)..(489): Homolog of NCBI NO: 4240031 NR Description: DNA binding zinc finger protein (Pspzf) [Pisum

SEQ ID NO: 93352 - DNA, 1974 bp, Arabidopsis thaliana; identical to SEQ ID NO: 89596
  misc_feature (1)..(1974): Ceres Seq. ID no. 12719680
  misc_feature: MA Experiment ID: 20000180 Result: Down-regulated in Transcription
  misc_feature: MA Experiment 20000180 PARAMETER Experiment Name: At_Germinating_Seeds_P Parameter: Age (hr) Value: 24 vs. 0
  misc_feature: MA Experiment 20000180 PARAMETER Experiment Name: At_Germinating_Seeds_P Parameter: Tissue Value: Germinating Seeds
  misc_feature: MA Experiment ID: 20001247 Result: Down-regulated in Transcription
  misc_feature: MA Experiment 20001247 PARAMETER Experiment Name: At_Far-red-induction_P Parameter: Age (day) Value: 7
  misc_feature: MA Experiment 20001247 PARAMETER Experiment Name: At_Far-red-induction_P Parameter: Light Value: Far-red vs. White
  misc_feature: MA Experiment 20001247 PARAMETER Experiment Name: At_Far-red-induction_P Parameter: Organism Value: A. thaliana
  misc_feature: MA Experiment 20001247 PARAMETER Experiment Name: At_Far-red-induction_P Parameter: Plant Line Value: Columbia
  misc_feature: MA Experiment 20001247 PARAMETER Experiment Name: At_Far-red-induction_P Parameter: Timepoint (hr) Value: 1
  misc_feature: MA Experiment 20001247 PARAMETER Experiment Name: At_Far-red-induction_P Parameter: Tissue Value: Whole Plant
  misc_feature: MA Experiment ID: 20001451 Result: Down-regulated in Transcription
  misc_feature: MA Experiment 20001451 PARAMETER Experiment Name: At_Far-red-induction_P Parameter: Age (day) Value: 7
  misc_feature: MA Experiment 20001451 PARAMETER Experiment Name: At_Far-red-induction_P Parameter: Light Value: Far-red vs. White
  misc_feature: MA Experiment 20001451 PARAMETER Experiment Name: At_Far-red-induction_P Parameter: Organism Value: A. thaliana
  misc_feature: MA Experiment 20001451 PARAMETER Experiment Name: At_Far-red-induction_P Parameter: Plant Line Value: Columbia
  misc_feature: MA Experiment 20001451 PARAMETER Experiment Name: At_Far-red-induction_P Parameter: Timepoint (hr) Value: 24
  misc_feature: MA Experiment 20001451 PARAMETER Experiment Name: At_Far-red-induction_P Parameter: Tissue Value: Whole Plant

SEQ ID NO: 93353 - protein, 657 aa, Arabidopsis thaliana; identical to SEQ ID NO: 89597
  peptide (1)..(657): Ceres Seq. ID no. 12719681
  misc_feature (332)..(366): Pfam Name: PPR repeat Pfam Description: PPR repeat
  misc_feature (11)..(608): Homolog of NCBI NO: 24796822 NR Description: putative PPR repeat containing protein [Oryza
  misc_feature (43)..(647): Homolog of NCBI NO: 15227619 NR Description: hypothetical protein; protein id: At2g29760.1
  misc_feature (50)..(646): Homolog of NCBI NO: 15225445 NR Description: hypothetical protein; protein id: At2g13600.1
  misc_feature (21)..(113): Homolog of NCBI NO: 15225445 NR Description: hypothetical protein; protein id: At2g13600.1
  misc_feature (28)..(642): Homolog of NCBI NO: 15227199 NR Description: hypothetical protein; protein id: At2g22410.1, by cDNA: gi_18086348 [Arabidopsis thaliana]
  misc_feature (301)..(639): Homolog of NCBI NO: 18483237 NR Description: putative vegetative storage protein [Sorghum
  misc_feature (76)..(326): Homolog of NCBI NO: 18483237 NR Description: putative vegetative storage protein [Sorghum
  misc_feature (45)..(648): Homolog of NCBI NO: 15237421 NR Description: putative protein; protein id: At5g16860.1
  misc_feature (42)..(645): Homolog of NCBI NO: 9279687 NR Description: gb|AAC35225.1~gene_id:MWI23.6~strong similarity
  misc_feature (42)..(645): Homolog of NCBI NO: 15228829 NR Description: hypothetical protein; protein id: At3g22690.1

SEQ ID NO: 93354 - protein, 555 aa, Arabidopsis thaliana; identical to SEQ ID NO: 89598
  peptide (1)..(555): Ceres Seq. ID no. 12719682
  misc_feature (230)..(264): Pfam Name: PPR repeat Pfam Description: PPR repeat
  misc_feature (1)..(506): Homolog of NCBI NO: 24796822 NR Description: putative PPR repeat containing protein [Oryza
  misc_feature (1)..(545): Homolog of NCBI NO: 15227619 NR Description: hypothetical protein; protein id: At2g29760.1
  misc_feature (1)..(544): Homolog of NCBI NO: 15225445 NR Description: hypothetical protein; protein id: At2g13600.1
  misc_feature (1)..(11): Homolog of NCBI NO: 15225445 NR Description: hypothetical protein; protein id: At2g13600.1
  misc_feature (1)..(540): Homolog of NCBI NO: 15227199 NR Description: hypothetical protein; protein id: At2g22410.1, by cDNA: gi_18086348 [Arabidopsis thaliana]
  misc_feature (199)..(537): Homolog of NCBI NO: 18483237 NR Description: putative vegetative storage protein [Sorghum
  misc_feature (1)..(224): Homolog of NCBI NO: 18483237 NR Description: putative vegetative storage protein [Sorghum
  misc_feature (1)..(546): Homolog of NCBI NO: 15237421 NR Description: putative protein; protein id: At5g16860.1
  misc_feature (1)..(543): Homolog of NCBI NO: 9279687 NR Description: gb|AAC35225.1~gene_id:MWI23.6~strong similarity
  misc_feature (1)..(543): Homolog of NCBI NO: 15228829 NR Description: hypothetical protein; protein id: At3g22690.1

SEQ ID NO: 93355 - protein, 485 aa, Arabidopsis thaliana; identical to SEQ ID NO: 89599
  peptide (1)..(485): Ceres Seq. ID no. 12719683
  misc_feature (160)..(194): Pfam Name: PPR repeat Pfam Description: PPR repeat
  misc_feature (1)..(436): Homolog of NCBI NO: 24796822 NR Description: putative PPR repeat containing protein [Oryza
  misc_feature (1)..(475): Homolog of NCBI NO: 15227619 NR Description: hypothetical protein; protein id: At2g29760.1
  misc_feature (1)..(474): Homolog of NCBI NO: 15225445 NR Description: hypothetical protein; protein id: At2g13600.1
  misc_feature (1)..(470): Homolog of NCBI NO: 15227199 NR Description: hypothetical protein; protein id: At2g22410.1, by cDNA: gi_18086348 [Arabidopsis thaliana]
  misc_feature (129)..(467): Homolog of NCBI NO: 18483237 NR Description: putative vegetative storage protein [Sorghum
  misc_feature (1)..(154): Homolog of NCBI NO: 18483237 NR Description: putative vegetative storage protein [Sorghum
  misc_feature (1)..(476): Homolog of NCBI NO: 15237421 NR Description: putative protein; protein id: At5g16860.1
  misc_feature (1)..(473): Homolog of NCBI NO: 9279687 NR Description: gb|AAC35225.1~gene_id:MWI23.6~strong similarity
  misc_feature (1)..(473): Homolog of NCBI NO: 15228829 NR Description: hypothetical protein; protein id: At3g22690.1
  misc_feature (1)..(471): Homolog of NCBI NO: 21740490 NR Description: OSJNBa0006B20.5 [Oryza sativa (japonica

SEQ ID NO: 93356 - DNA, 888 bp, Arabidopsis thaliana; identical to SEQ ID NO: 89600
  misc_feature (1)..(888): Ceres Seq. ID no. 12719684
  misc_feature: MA Experiment ID: 20000184 Result: Up-regulated in Transcription
  misc_feature: MA Experiment 20000184 PARAMETER Experiment Name: At_Shoots__P Parameter: Age (day) Value: 7
  misc_feature: MA Experiment 20000184 PARAMETER Experiment Name: At_Shoots__P Parameter: Tissue Value: Shoots vs. Whole Plant
  misc_feature: MA Experiment ID: 20000235 Result: Down-regulated in Transcription
  misc_feature: MA Experiment 20000235 PARAMETER Experiment Name: At_Siliques_P Parameter: Age (day) Value: 21
  misc_feature: MA Experiment 20000235 PARAMETER Experiment Name: At_Siliques_P Parameter: Organism Value: A. thaliana
  misc_feature: MA Experiment 20000235 PARAMETER Experiment Name: At_Siliques_P Parameter: Plant Line Value: WS
  misc_feature: MA Experiment 20000235 PARAMETER Experiment Name: At_Siliques_P Parameter: Tissue Value: 5-10mm Siliques vs. Whole Plant
  misc_feature: MA Experiment ID: 20000264 Result: Down-regulated in Transcription
  misc_feature: MA Experiment 20000264 PARAMETER Experiment Name: At_Open_Flower_P Parameter: Age (day) Value: 21
  misc_feature: MA Experiment 20000264 PARAMETER Experiment Name: At_Open_Flower_P Parameter: Plant Line Value: WS
  misc_feature: MA Experiment 20000264 PARAMETER Experiment Name: At_Open_Flower_P Parameter: Tissue Value: Open Flower vs. Whole Plant
  misc_feature: MA Experiment ID: 20000265 Result: Down-regulated in Transcription
  misc_feature: MA Experiment 20000265 PARAMETER Experiment Name: At_Open_Flower_P Parameter: Age (day) Value: 21
  misc_feature: MA Experiment 20000265 PARAMETER Experiment Name: At_Open_Flower_P Parameter: Plant Line Value: WS
  misc_feature: MA Experiment 20000265 PARAMETER Experiment Name: At_Open_Flower_P Parameter: Tissue Value: Closed Flower vs. Whole Plant
  misc_feature: MA Experiment ID: 20000495 Result: Up-regulated in Transcription
  misc_feature: MA Experiment 20000495 PARAMETER Experiment Name: At_Guard_Cells_P Parameter: Harvest Date Value: 8/2/2002
  misc_feature: MA Experiment 20000495 PARAMETER Experiment Name: At_Guard_Cells_P Parameter: Organism Value: A. thaliana
  misc_feature: MA Experiment 20000495 PARAMETER Experiment Name: At_Guard_Cells_P Parameter: Tissue Value: Guard Cells vs. Leaves
  misc_feature: MA Experiment ID: 20000496 Result: Up-regulated in Transcription
  misc_feature: MA Experiment 20000496 PARAMETER Experiment Name: At_Guard_Cells_P Parameter: Harvest Date Value: 7/19/2002
  misc_feature: MA Experiment 20000496 PARAMETER Experiment Name: At_Guard_Cells_P Parameter: Organism Value: Canola
  misc_feature: MA Experiment 20000496 PARAMETER Experiment Name: At_Guard_Cells_P Parameter: Tissue Value: Guard Cells vs. Leaves
  misc_feature: MA Experiment ID: 20001248 Result: Up-regulated in Transcription
  misc_feature: MA Experiment 20001248 PARAMETER Experiment Name: At_Far-red-induction_P Parameter: Age (day) Value: 7
  misc_feature: MA Experiment 20001248 PARAMETER Experiment Name: At_Far-red-induction_P Parameter: Light Value: Far-red vs. White
  misc_feature: MA Experiment 20001248 PARAMETER Experiment Name: At_Far-red-induction_P Parameter: Organism Value: A. thaliana
  misc_feature: MA Experiment 20001248 PARAMETER Experiment Name: At_Far-red-induction_P Parameter: Plant Line Value: Columbia
  misc_feature: MA Experiment 20001248 PARAMETER Experiment Name: At_Far-red-induction_P Parameter: Timepoint (hr) Value: 4
  misc_feature: MA Experiment 20001248 PARAMETER Experiment Name: At_Far-red-induction_P Parameter: Tissue Value: Whole Plant
  misc_feature: MA Experiment ID: 20001450 Result: Up-regulated in Transcription
  misc_feature: MA Experiment 20001450 PARAMETER Experiment Name: At_Far-red-induction_P Parameter: Age (day) Value: 7
  misc_feature: MA Experiment 20001450 PARAMETER Experiment Name: At_Far-red-induction_P Parameter: Light Value: Far-red vs. White
  misc_feature: MA Experiment 20001450 PARAMETER Experiment Name: At_Far-red-induction_P Parameter: Organism Value: A. thaliana
  misc_feature: MA Experiment 20001450 PARAMETER Experiment Name: At_Far-red-induction_P Parameter: Plant Line Value: Columbia
  misc_feature: MA Experiment 20001450 PARAMETER Experiment Name: At_Far-red-induction_P Parameter: Timepoint (hr) Value: 8
  misc_feature: MA Experiment 20001450 PARAMETER Experiment Name: At_Far-red-induction_P Parameter: Tissue Value: Whole Plant
  misc_feature: MA Experiment ID: 20001451 Result: Up-regulated in Transcription
  misc_feature: MA Experiment 20001451 PARAMETER Experiment Name: At_Far-red-induction_P Parameter: Age (day) Value: 7
  misc_feature: MA Experiment 20001451 PARAMETER Experiment Name: At_Far-red-induction_P Parameter: Light Value: Far-red vs. White
  misc_feature: MA Experiment 20001451 PARAMETER Experiment Name: At_Far-red-induction_P Parameter: Organism Value: A. thaliana
  misc_feature: MA Experiment 20001451 PARAMETER Experiment Name: At_Far-red-induction_P Parameter: Plant Line Value: Columbia
  misc_feature: MA Experiment 20001451 PARAMETER Experiment Name: At_Far-red-induction_P Parameter: Timepoint (hr) Value: 24
  misc_feature: MA Experiment 20001451 PARAMETER Experiment Name: At_Far-red-induction_P Parameter: Tissue Value: Whole Plant
  misc_feature: MA Experiment ID: 20001905 Result: Down-regulated in Transcription
  misc_feature: MA Experiment 20001905 PARAMETER Experiment Name: At_Drought_Reproduction_P Parameter: Age (day) Value: 40
  misc_feature: MA Experiment 20001905 PARAMETER Experiment Name: At_Drought_Reproduction_P Parameter: Organism Value: A. thaliana
  misc_feature: MA Experiment 20001905 PARAMETER Experiment Name: At_Drought_Reproduction_P Parameter: Plant Line Value: WS
  misc_feature: MA Experiment 20001905 PARAMETER Experiment Name: At_Drought_Reproduction_P Parameter: Timepoint (day) Value: 10
  misc_feature: MA Experiment 20001905 PARAMETER Experiment Name: At_Drought_Reproduction_P Parameter: Tissue Value: Rosettes
  misc_feature: MA Experiment 20001905 PARAMETER Experiment Name: At_Drought_Reproduction_P Parameter: Treatment Value: Drought vs. No Drought

SEQ ID NO: 93357 - protein, 290 aa, Arabidopsis thaliana; identical to SEQ ID NO: 89601
  peptide (1)..(290): Ceres Seq. ID no. 12719685
  misc_feature (35)..(278): Pfam Name: Uncharacterised protein family (UPF0014) Pfam Description: Uncharacterised protein family (UPF0014)
  misc_feature (18)..(290): Homolog of NCBI NO: 15228120 NR Description: unknown protein; protein id: At2g37330.1, by cDNA: gi_18252848 [Arabidopsis thaliana]
  misc_feature (35)..(290): Homolog of NCBI NO: 8099122 NR Description: similar to an Arabidopsis thialiana chromosome
  misc_feature (48)..(283): Homolog of NCBI NO: 20806838 NR Description: predicted permease [Thermoanaerobacter >gi|20515305|gb|AAM23613.1| predicted permease
  misc_feature (43)..(282): Homolog of NCBI NO: 24111874 NR Description: putative metal resistance protein [Shigella
  misc_feature (48)..(282): Homolog of NCBI NO: 22536854 NR Description: membrane protein, putative [Streptococcus
  misc_feature (48)..(282): Homolog of NCBI NO: 25010719 NR Description: Unknown [Streptococcus agalactiae NEM316]
  misc_feature (43)..(282): Homolog of NCBI NO: 15800228 NR Description: putative metal resistance protein [Escherichia O157:H7 EDL933] >gi|15829808|ref|NP_308581.1| putative metal protein [Escherichia coli O157:H7] >gi|16128475|ref|NP_415024.1|
  misc_feature (43)..(282): Homolog of NCBI NO: 33347459 NR Description: putative metal resistance protein [Escherichia K12] >gi|3915949|sp|P77307|YBBM_ECOLI Hypothetical UPF0014
  misc_feature (43)..(282): Homolog of NCBI NO: 16759481 NR Description: putative membrane protein [Salmonella enterica enterica serovar Typhi] >gi|16763883|ref|NP_459498.1| putative family transport protein, metal resistance protein [Salmonella
  misc_feature (43)..(282): Homolog of NCBI NO: 29142747 NR Description: putative membrane protein [Salmonella enterica enterica serovar Typhi Ty2] >gi|29138379|gb|AAO69949.1| putative

SEQ ID NO: 93358 - protein, 273 aa, Arabidopsis thaliana; identical to SEQ ID NO: 89602
  peptide (1)..(273): Ceres Seq. ID no. 12719686
  misc_feature (18)..(261): Pfam Name: Uncharacterised protein family (UPF0014) Pfam Description: Uncharacterised protein family (UPF0014)
  misc_feature (1)..(273): Homolog of NCBI NO: 15228120 NR Description: unknown protein; protein id: At2g37330.1, by cDNA: gi_18252848 [Arabidopsis thaliana]
  misc_feature (18)..(273): Homolog of NCBI NO: 8099122 NR Description: similar to an Arabidopsis thialiana chromosome
  misc_feature (31)..(266): Homolog of NCBI NO: 20806838 NR Description: predicted permease [Thermoanaerobacter >gi|20515305|gb|AAM23613.1| predicted permease
  misc_feature (26)..(265): Homolog of NCBI NO: 24111874 NR Description: putative metal resistance protein [Shigella
  misc_feature (31)..(265): Homolog of NCBI NO: 22536854 NR Description: membrane protein, putative [Streptococcus
  misc_feature (31)..(265): Homolog of NCBI NO: 25010719 NR Description: Unknown [Streptococcus agalactiae NEM316]
  misc_feature (26)..(265): Homolog of NCBI NO: 15800228 NR Description: putative metal resistance protein [Escherichia O157:H7 EDL933] >gi|15829808|ref|NP_308581.1| putative metal protein [Escherichia coli O157:H7] >gi|16128475|ref|NP_415024.1|
  misc_feature (26)..(265): Homolog of NCBI NO: 33347459 NR Description: putative metal resistance protein [Escherichia K12] >gi|3915949|sp|P77307|YBBM_ECOLI Hypothetical UPF0014
  misc_feature (26)..(265): Homolog of NCBI NO: 16759481 NR Description: putative membrane protein [Salmonella enterica enterica serovar Typhi] >gi|16763883|ref|NP_459498.1| putative family transport protein, metal resistance protein [Salmonella
  misc_feature (26)..(265): Homolog of NCBI NO: 29142747 NR Description: putative membrane protein [Salmonella enterica enterica serovar Typhi Ty2] >gi|29138379|gb|AAO69949.1| putative

SEQ ID NO: 93359 - protein, 252 aa, Arabidopsis thaliana; identical to SEQ ID NO: 89603
  peptide (1)..(252): Ceres Seq. ID no. 12719687
  misc_feature (1)..(240): Pfam Name: Uncharacterised protein family (UPF0014) Pfam Description: Uncharacterised protein family (UPF0014)
  misc_feature (1)..(252): Homolog of NCBI NO: 15228120 NR Description: unknown protein; protein id: At2g37330.1, by cDNA: gi_18252848 [Arabidopsis thaliana]
  misc_feature (1)..(252): Homolog of NCBI NO: 8099122 NR Description: similar to an Arabidopsis thialiana chromosome
  misc_feature (10)..(245): Homolog of NCBI NO: 20806838 NR Description: predicted permease [Thermoanaerobacter >gi|20515305|gb|AAM23613.1| predicted permease
  misc_feature (5)..(244): Homolog of NCBI NO: 24111874 NR Description: putative metal resistance protein [Shigella
  misc_feature (10)..(244): Homolog of NCBI NO: 22536854 NR Description: membrane protein, putative [Streptococcus
  misc_feature (10)..(244): Homolog of NCBI NO: 25010719 NR Description: Unknown [Streptococcus agalactiae NEM316]
  misc_feature (5)..(244): Homolog of NCBI NO: 15800228 NR Description: putative metal resistance protein [Escherichia O157:H7 EDL933] >gi|15829808|ref|NP_308581.1| putative metal protein [Escherichia coli O157:H7] >gi|16128475|ref|NP_415024.1|
  misc_feature (5)..(244): Homolog of NCBI NO: 33347459 NR Description: putative metal resistance protein [Escherichia K12] >gi|3915949|sp|P77307|YBBM_ECOLI Hypothetical UPF0014
  misc_feature (5)..(244): Homolog of NCBI NO: 16759481 NR Description: putative membrane protein [Salmonella enterica enterica serovar Typhi] >gi|16763883|ref|NP_459498.1| putative family transport protein, metal resistance protein [Salmonella
  misc_feature (5)..(244): Homolog of NCBI NO: 29142747 NR Description: putative membrane protein [Salmonella enterica enterica serovar Typhi Ty2] >gi|29138379|gb|AAO69949.1| putative

SEQ ID NO: 93360 - DNA, 966 bp, Arabidopsis thaliana; identical to SEQ ID NO: 89604
  misc_feature (1)..(966): Ceres Seq. ID no. 12719692
  misc_feature: MA Experiment ID: 20000184 Result: Up-regulated in Transcription
  misc_feature: MA Experiment 20000184 PARAMETER Experiment Name: At_Shoots__P Parameter: Age (day) Value: 7
  misc_feature: MA Experiment 20000184 PARAMETER Experiment Name: At_Shoots__P Parameter: Tissue Value: Shoots vs. Whole Plant
  misc_feature: MA Experiment ID: 20000438 Result: Up-regulated in Transcription
  misc_feature: MA Experiment 20000438 PARAMETER Experiment Name: At_Shoots__P Parameter: Age (day) Value: 14
  misc_feature: MA Experiment 20000438 PARAMETER Experiment Name: At_Shoots__P Parameter: Tissue Value: Shoots vs. Whole Plant
  misc_feature: MA Experiment ID: 20000794 Result: Up-regulated in Transcription
  misc_feature: MA Experiment 20000794 PARAMETER Experiment Name: At_Petals_P Parameter: Age (day) Value: 23-25 days
  misc_feature: MA Experiment 20000794 PARAMETER Experiment Name: At_Petals_P Parameter: Plant Line Value: WS
  misc_feature: MA Experiment 20000794 PARAMETER Experiment Name: At_Petals_P Parameter: Tissue Value: Petals vs. Whole plant

SEQ ID NO: 93361 - protein, 321 aa, Arabidopsis thaliana; identical to SEQ ID NO: 89605
  peptide (1)..(321): Ceres Seq. ID no. 12719693
  misc_feature (1)..(321): Homolog of NCBI NO: 15228126 NR Description: unknown protein; protein id: At2g37380.1
  misc_feature (18)..(292): Homolog of NCBI NO: 15225080 NR Description: unknown protein; protein id: At2g39370.1
  misc_feature (32)..(311): Homolog of NCBI NO: 34908072 NR Description: P0506B12.25 [Oryza sativa (japonica
  misc_feature (29)..(317): Homolog of NCBI NO: 28828184 NR Description: similar to Leishmania major. Ppg3 [Dictyostelium
  misc_feature (19)..(122): Homolog of NCBI NO: 8099142 NR Description: hypothetical protein [Oryza sativa]
  misc_feature (15)..(314): Homolog of NCBI NO: 19113482 NR Description: hypothetical serine-rich secreted protein
  misc_feature (27)..(311): Homolog of NCBI NO: 19113482 NR Description: hypothetical serine-rich secreted protein
  misc_feature (48)..(121): Homolog of NCBI NO: 15239627 NR Description: putative protein; protein id: At5g26230.1

SEQ ID NO: 93362 - protein, 298 aa, Arabidopsis thaliana; identical to SEQ ID NO: 89606
  peptide (1)..(298): Ceres Seq. ID no. 12719694
  misc_feature (1)..(298): Homolog of NCBI NO: 15228126 NR Description: unknown protein; protein id: At2g37380.1
  misc_feature (1)..(269): Homolog of NCBI NO: 15225080 NR Description: unknown protein; protein id: At2g39370.1
  misc_feature (9)..(288): Homolog of NCBI NO: 34908072 NR Description: P0506B12.25 [Oryza sativa (japonica
  misc_feature (6)..(294): Homolog of NCBI NO: 28828184 NR Description: similar to Leishmania major. Ppg3 [Dictyostelium
  misc_feature (1)..(99): Homolog of NCBI NO: 8099142 NR Description: hypothetical protein [Oryza sativa]
  misc_feature (1)..(291): Homolog of NCBI NO: 19113482 NR Description: hypothetical serine-rich secreted protein
  misc_feature (4)..(288): Homolog of NCBI NO: 19113482 NR Description: hypothetical serine-rich secreted protein
  misc_feature (25)..(98): Homolog of NCBI NO: 15239627 NR Description: putative protein; protein id: At5g26230.1

SEQ ID NO: 93363 - protein, 262 aa, Arabidopsis thaliana; identical to SEQ ID NO: 89607
  peptide (1)..(262): Ceres Seq. ID no. 12719695
  misc_feature (1)..(262): Homolog of NCBI NO: 15228126 NR Description: unknown protein; protein id: At2g37380.1
  misc_feature (1)..(233): Homolog of NCBI NO: 15225080 NR Description: unknown protein; protein id: At2g39370.1
  misc_feature (1)..(252): Homolog of NCBI NO: 34908072 NR Description: P0506B12.25 [Oryza sativa (japonica
  misc_feature (1)..(258): Homolog of NCBI NO: 28828184 NR Description: similar to Leishmania major. Ppg3 [Dictyostelium
  misc_feature (1)..(63): Homolog of NCBI NO: 8099142 NR Description: hypothetical protein [Oryza sativa]
  misc_feature (1)..(255): Homolog of NCBI NO: 19113482 NR Description: hypothetical serine-rich secreted protein
  misc_feature (1)..(252): Homolog of NCBI NO: 19113482 NR Description: hypothetical serine-rich secreted protein
  misc_feature (1)..(62): Homolog of NCBI NO: 15239627 NR Description: putative protein; protein id: At5g26230.1

SEQ ID NO: 93364 - DNA, 3120 bp, Arabidopsis thaliana; identical to SEQ ID NO: 89608
  misc_feature (1)..(3120): Ceres Seq. ID no. 12719696
  misc_feature: MA Experiment ID: 20000180 Result: Up-regulated in Transcription
  misc_feature: MA Experiment 20000180 PARAMETER Experiment Name: At_Germinating_Seeds_P Parameter: Age (hr) Value: 24 vs. 0
  misc_feature: MA Experiment 20000180 PARAMETER Experiment Name: At_Germinating_Seeds_P Parameter: Tissue Value: Germinating Seeds
  misc_feature: MA Experiment ID: 20000234 Result: Up-regulated in Transcription
  misc_feature: MA Experiment 20000234 PARAMETER Experiment Name: At_Siliques_P Parameter: Age (day) Value: 21
  misc_feature: MA Experiment 20000234 PARAMETER Experiment Name: At_Siliques_P Parameter: Organism Value: A. thaliana
  misc_feature: MA Experiment 20000234 PARAMETER Experiment Name: At_Siliques_P Parameter: Plant Line Value: WS
  misc_feature: MA Experiment 20000234 PARAMETER Experiment Name: At_Siliques_P Parameter: Tissue Value: Less Than 5mm Siliques vs. Whole Plant
  misc_feature: MA Experiment ID: 20000265 Result: Up-regulated in Transcription
  misc_feature: MA Experiment 20000265 PARAMETER Experiment Name: At_Open_Flower_P Parameter: Age (day) Value: 21
  misc_feature: MA Experiment 20000265 PARAMETER Experiment Name: At_Open_Flower_P Parameter: Plant Line Value: WS
  misc_feature: MA Experiment 20000265 PARAMETER Experiment Name: At_Open_Flower_P Parameter: Tissue Value: Closed Flower vs. Whole Plant
  misc_feature: MA Experiment ID: 20000286 Result: Up-regulated in Transcription
  misc_feature: MA Experiment 20000286 PARAMETER Experiment Name: At_Open_Flower_P Parameter: Age (day) Value: 21
  misc_feature: MA Experiment 20000286 PARAMETER Experiment Name: At_Open_Flower_P Parameter: Plant Line Value: WS
  misc_feature: MA Experiment 20000286 PARAMETER Experiment Name: At_Open_Flower_P Parameter: Tissue Value: Half Open vs. Whole Plant
  misc_feature: MA Experiment ID: 20001451 Result: Down-regulated in Transcription
  misc_feature: MA Experiment 20001451 PARAMETER Experiment Name: At_Far-red-induction_P Parameter: Age (day) Value: 7
  misc_feature: MA Experiment 20001451 PARAMETER Experiment Name: At_Far-red-induction_P Parameter: Light Value: Far-red vs. White
  misc_feature: MA Experiment 20001451 PARAMETER Experiment Name: At_Far-red-induction_P Parameter: Organism Value: A. thaliana
  misc_feature: MA Experiment 20001451 PARAMETER Experiment Name: At_Far-red-induction_P Parameter: Plant Line Value: Columbia
  misc_feature: MA Experiment 20001451 PARAMETER Experiment Name: At_Far-red-induction_P Parameter: Timepoint (hr) Value: 24
  misc_feature: MA Experiment 20001451 PARAMETER Experiment Name: At_Far-red-induction_P Parameter: Tissue Value: Whole Plant

SEQ ID NO: 93365 - protein, 1039 aa, Arabidopsis thaliana; identical to SEQ ID NO: 89609
  peptide (1)..(1039): Ceres Seq. ID no. 12719697
  misc_feature (408)..(970): Pfam Name: Myosin tail Pfam Description: Myosin tail
  misc_feature (9)..(1038): Homolog of NCBI NO: 15186760 NR Description: KRP120-2 [Daucus carota]
  misc_feature (7)..(1031): Homolog of NCBI NO: 15231259 NR Description: kinesin-related protein; protein id: At3g45850.1
  misc_feature (11)..(976): Homolog of NCBI NO: 15226915 NR Description: kinesin-related protein; protein id: At2g28620.1
  misc_feature (442)..(1039): Homolog of NCBI NO: 25408550 NR Description: probable kinesin heavy chain [imported] - thaliana >gi|4056495|gb|AAC98061.1| putative kinesin heavy chain
  misc_feature (44)..(1038): Homolog of NCBI NO: 11132775 NR Description: 125 kDa kinesin-related protein
  misc_feature (37)..(1037): Homolog of NCBI NO: 15227596 NR Description: kinesin-related protein; protein id: At2g36200.1
  misc_feature (18)..(955): Homolog of NCBI NO: 15208453 NR Description: kinesin heavy chain [Zea mays]
  misc_feature (275)..(1038): Homolog of NCBI NO: 15208459 NR Description: kinesin heavy chain [Zea mays]
  misc_feature (18)..(268): Homolog of NCBI NO: 15208459 NR Description: kinesin heavy chain [Zea mays]
  misc_feature (45)..(998): Homolog of NCBI NO: 12055369 NR Description: kinesin-like boursin [Paracentrotus lividus]

SEQ ID NO: 93366 - protein, 964 aa, Arabidopsis thaliana; identical to SEQ ID NO: 89610
  peptide (1)..(964): Ceres Seq. ID no. 12719698
  misc_feature (333)..(895): Pfam Name: Myosin tail Pfam Description: Myosin tail
  misc_feature (1)..(963): Homolog of NCBI NO: 15186760 NR Description: KRP120-2 [Daucus carota]
  misc_feature (1)..(956): Homolog of NCBI NO: 15231259 NR Description: kinesin-related protein; protein id: At3g45850.1
  misc_feature (1)..(901): Homolog of NCBI NO: 15226915 NR Description: kinesin-related protein; protein id: At2g28620.1
  misc_feature (367)..(964): Homolog of NCBI NO: 25408550 NR Description: probable kinesin heavy chain [imported] - thaliana >gi|4056495|gb|AAC98061.1| putative kinesin heavy chain
  misc_feature (1)..(963): Homolog of NCBI NO: 11132775 NR Description: 125 kDa kinesin-related protein
  misc_feature (1)..(962): Homolog of NCBI NO: 15227596 NR Description: kinesin-related protein; protein id: At2g36200.1
  misc_feature (1)..(880): Homolog of NCBI NO: 15208453 NR Description: kinesin heavy chain [Zea mays]
  misc_feature (200)..(963): Homolog of NCBI NO: 15208459 NR Description: kinesin heavy chain [Zea mays]
  misc_feature (1)..(193): Homolog of NCBI NO: 15208459 NR Description: kinesin heavy chain [Zea mays]
  misc_feature (1)..(923): Homolog of NCBI NO: 12055369 NR Description: kinesin-like boursin [Paracentrotus lividus]

SEQ ID NO: 93367 - protein, 896 aa, Arabidopsis thaliana; identical to SEQ ID NO: 89611
  peptide (1)..(896): Ceres Seq. ID no. 12719699
  misc_feature (265)..(827): Pfam Name: Myosin tail Pfam Description: Myosin tail
  misc_feature (1)..(895): Homolog of NCBI NO: 15186760 NR Description: KRP120-2 [Daucus carota]
  misc_feature (1)..(888): Homolog of NCBI NO: 15231259 NR Description: kinesin-related protein; protein id: At3g45850.1
  misc_feature (1)..(833): Homolog of NCBI NO: 15226915 NR Description: kinesin-related protein; protein id: At2g28620.1
  misc_feature (299)..(896): Homolog of NCBI NO: 25408550 NR Description: probable kinesin heavy chain [imported] - thaliana >gi|4056495|gb|AAC98061.1| putative kinesin heavy chain
  misc_feature (1)..(895): Homolog of NCBI NO: 11132775 NR Description: 125 kDa kinesin-related protein
  misc_feature (1)..(894): Homolog of NCBI NO: 15227596 NR Description: kinesin-related protein; protein id: At2g36200.1
  misc_feature (1)..(812): Homolog of NCBI NO: 15208453 NR Description: kinesin heavy chain [Zea mays]
  misc_feature (132)..(895): Homolog of NCBI NO: 15208459 NR Description: kinesin heavy chain [Zea mays]
  misc_feature (1)..(125): Homolog of NCBI NO: 15208459 NR Description: kinesin heavy chain [Zea mays]
  misc_feature (1)..(855): Homolog of NCBI NO: 12055369 NR Description: kinesin-like boursin [Paracentrotus lividus]

SEQ ID NO: 93368 - DNA, 950 bp, Arabidopsis thaliana; identical to SEQ ID NO: 89612
  misc_feature (1)..(950): Ceres Seq. ID no. 12719711
  misc_feature: MA Experiment ID: 20000306 Result: Up-regulated in Transcription
  misc_feature: MA Experiment 20000306 PARAMETER Experiment Name: At_Germinating_Seeds_Sub_P Parameter: Age (hr) Value: 6 vs. 0
  misc_feature: MA Experiment 20000306 PARAMETER Experiment Name: At_Germinating_Seeds_Sub_P Parameter: Organism Value: A. thaliana
  misc_feature: MA Experiment 20000306 PARAMETER Experiment Name: At_Germinating_Seeds_Sub_P Parameter: Plant Line Value: WS
  misc_feature: MA Experiment 20000306 PARAMETER Experiment Name: At_Germinating_Seeds_Sub_P Parameter: Tissue Value: Germinating Seeds
  misc_feature: MA Experiment ID: 20000307 Result: Up-regulated in Transcription
  misc_feature: MA Experiment 20000307 PARAMETER Experiment Name: At_Germinating_Seeds_Sub_P Parameter: Age (hr) Value: 24 vs. 0
  misc_feature: MA Experiment 20000307 PARAMETER Experiment Name: At_Germinating_Seeds_Sub_P Parameter: Organism Value: A. thaliana
  misc_feature: MA Experiment 20000307 PARAMETER Experiment Name: At_Germinating_Seeds_Sub_P Parameter: Plant Line Value: WS
  misc_feature: MA Experiment 20000307 PARAMETER Experiment Name: At_Germinating_Seeds_Sub_P Parameter: Tissue Value: Germinating Seeds
  misc_feature: MA Experiment ID: 20000328 Result: Down-regulated in Transcription
  misc_feature: MA Experiment 20000328 PARAMETER Experiment Name: At_42deg_Heat_Sub_P Parameter: Age (day) Value: 14
  misc_feature: MA Experiment 20000328 PARAMETER Experiment Name: At_42deg_Heat_Sub_P Parameter: Organism Value: A. thaliana
  misc_feature: MA Experiment 20000328 PARAMETER Experiment Name: At_42deg_Heat_Sub_P Parameter: Plant Line Value: WS
  misc_feature: MA Experiment 20000328 PARAMETER Experiment Name: At_42deg_Heat_Sub_P Parameter: Temperature (deg C) Value: 42 vs. 22
  misc_feature: MA Experiment 20000328 PARAMETER Experiment Name: At_42deg_Heat_Sub_P Parameter: Timepoint (hr) Value: 6
  misc_feature: MA Experiment 20000328 PARAMETER Experiment Name: At_42deg_Heat_Sub_P Parameter: Tissue Value: Aerial
  misc_feature: MA Experiment ID: 20000347 Result: Down-regulated in Transcription
  misc_feature: MA Experiment 20000347 PARAMETER Experiment Name: At_2mM_SA_Sub_P Parameter: Age (day) Value: 14
  misc_feature: MA Experiment 20000347 PARAMETER Experiment Name: At_2mM_SA_Sub_P Parameter: Organism Value: A. thaliana
  misc_feature: MA Experiment 20000347 PARAMETER Experiment Name: At_2mM_SA_Sub_P Parameter: Plant Line Value: WS
  misc_feature: MA Experiment 20000347 PARAMETER Experiment Name: At_2mM_SA_Sub_P Parameter: Timepoint (hr) Value: 6
  misc_feature: MA Experiment 20000347 PARAMETER Experiment Name: At_2mM_SA_Sub_P Parameter: Tissue Value: Aerial
  misc_feature: MA Experiment 20000347 PARAMETER Experiment Name: At_2mM_SA_Sub_P Parameter: Treatment Value: 2mM SA vs. No Treatment

SEQ ID NO: 93369 - protein, 297 aa, Arabidopsis thaliana; identical to SEQ ID NO: 89613
  peptide (1)..(297): Ceres Seq. ID no. 12719712
  misc_feature (130)..(260): Pfam Name: Integral membrane protein DUF6 Pfam Description: Integral membrane protein DUF6
  misc_feature (1)..(297): Homolog of NCBI NO: 18404429 NR Description: nodulin-like protein; protein id: At2g37450.1,
  misc_feature (13)..(297): Homolog of NCBI NO: 25408555 NR Description: nodulin-like protein [imported] - Arabidopsis
  misc_feature (5)..(280): Homolog of NCBI NO: 15224291 NR Description: nodulin-like protein; protein id: At2g37460.1, by cDNA: 16393., supported by cDNA: gi_14334857, supported by
  misc_feature (5)..(280): Homolog of NCBI NO: 21553757 NR Description: nodulin-like protein [Arabidopsis thaliana]
  misc_feature (61)..(277): Homolog of NCBI NO: 37532392 NR Description: putative nodulin-like protein [Oryza sativa
  misc_feature (13)..(61): Homolog of NCBI NO: 37532392 NR Description: putative nodulin-like protein [Oryza sativa
  misc_feature (5)..(282): Homolog of NCBI NO: 15225480 NR Description: nodulin-like protein; protein id: At2g39510.1
  misc_feature (61)..(265): Homolog of NCBI NO: 34908998 NR Description: nodulin-like protein [Oryza sativa (japonica
  misc_feature (4)..(61): Homolog of NCBI NO: 34908998 NR Description: nodulin-like protein [Oryza sativa (japonica
  misc_feature (7)..(293): Homolog of NCBI NO: 21593603 NR Description: nodulin-like protein [Arabidopsis thaliana]

SEQ ID NO: 93370 - protein, 294 aa, Arabidopsis thaliana; identical to SEQ ID NO: 89614
  peptide (1)..(294): Ceres Seq. ID no. 12719713
  misc_feature (127)..(257): Pfam Name: Integral membrane protein DUF6 Pfam Description: Integral membrane protein DUF6
  misc_feature (1)..(294): Homolog of NCBI NO: 18404429 NR Description: nodulin-like protein; protein id: At2g37450.1,
  misc_feature (10)..(294): Homolog of NCBI NO: 25408555 NR Description: nodulin-like protein [imported] - Arabidopsis
  misc_feature (2)..(277): Homolog of NCBI NO: 15224291 NR Description: nodulin-like protein; protein id: At2g37460.1, by cDNA: 16393., supported by cDNA: gi_14334857, supported by
  misc_feature (2)..(277): Homolog of NCBI NO: 21553757 NR Description: nodulin-like protein [Arabidopsis thaliana]
  misc_feature (58)..(274): Homolog of NCBI NO: 37532392 NR Description: putative nodulin-like protein [Oryza sativa
  misc_feature (10)..(58): Homolog of NCBI NO: 37532392 NR Description: putative nodulin-like protein [Oryza sativa
  misc_feature (2)..(279): Homolog of NCBI NO: 15225480 NR Description: nodulin-like protein; protein id: At2g39510.1
  misc_feature (58)..(262): Homolog of NCBI NO: 34908998 NR Description: nodulin-like protein [Oryza sativa (japonica
  misc_feature (1)..(58): Homolog of NCBI NO: 34908998 NR Description: nodulin-like protein [Oryza sativa (japonica
  misc_feature (4)..(290): Homolog of NCBI NO: 21593603 NR Description: nodulin-like protein [Arabidopsis thaliana]

SEQ ID NO: 93371 - protein, 285 aa, Arabidopsis thaliana; identical to SEQ ID NO: 89615
  peptide (1)..(285): Ceres Seq. ID no. 12719714
  misc_feature (118)..(248): Pfam Name: Integral membrane protein DUF6 Pfam Description: Integral membrane protein DUF6
  misc_feature (1)..(285): Homolog of NCBI NO: 18404429 NR Description: nodulin-like protein; protein id: At2g37450.1,
  misc_feature (1)..(285): Homolog of NCBI NO: 25408555 NR Description: nodulin-like protein [imported] - Arabidopsis
  misc_feature (1)..(268): Homolog of NCBI NO: 15224291 NR Description: nodulin-like protein; protein id: At2g37460.1, by cDNA: 16393., supported by cDNA: gi_14334857, supported by
  misc_feature (1)..(268): Homolog of NCBI NO: 21553757 NR Description: nodulin-like protein [Arabidopsis thaliana]
  misc_feature (49)..(265): Homolog of NCBI NO: 37532392 NR Description: putative nodulin-like protein [Oryza sativa
  misc_feature (1)..(49): Homolog of NCBI NO: 37532392 NR Description: putative nodulin-like protein [Oryza sativa
  misc_feature (1)..(270): Homolog of NCBI NO: 15225480 NR Description: nodulin-like protein; protein id: At2g39510.1
  misc_feature (49)..(253): Homolog of NCBI NO: 34908998 NR Description: nodulin-like protein [Oryza sativa (japonica
  misc_feature (1)..(49): Homolog of NCBI NO: 34908998 NR Description: nodulin-like protein [Oryza sativa (japonica
  misc_feature (1)..(281): Homolog of NCBI NO: 21593603 NR Description: nodulin-like protein [Arabidopsis thaliana]

SEQ ID NO: 93372 - DNA, 1896 bp, Arabidopsis thaliana; identical to SEQ ID NO: 89616
  misc_feature (1)..(1896): Ceres Seq. ID no. 12719715
  misc_feature: MA Experiment ID: 20000171 Result: Down-regulated in Transcription
  misc_feature: MA Experiment 20000171 PARAMETER Experiment Name: At_42deg_Heat_P Parameter: Age (day) Value: 14
  misc_feature: MA Experiment 20000171 PARAMETER Experiment Name: At_42deg_Heat_P Parameter: Organism Value: A. thaliana
  misc_feature: MA Experiment 20000171 PARAMETER Experiment Name: At_42deg_Heat_P Parameter: Plant Line Value: WS
  misc_feature: MA Experiment 20000171 PARAMETER Experiment Name: At_42deg_Heat_P Parameter: Temperature (deg C) Value: 42 vs. 22
  misc_feature: MA Experiment 20000171 PARAMETER Experiment Name: At_42deg_Heat_P Parameter: Timepoint (hr) Value: 1
  misc_feature: MA Experiment 20000171 PARAMETER Experiment Name: At_42deg_Heat_P Parameter: Tissue Value: Aerial
  misc_feature: MA Experiment ID: 20000438 Result: Up-regulated in Transcription
  misc_feature: MA Experiment 20000438 PARAMETER Experiment Name: At_Shoots__P Parameter: Age (day) Value: 14
  misc_feature: MA Experiment 20000438 PARAMETER Experiment Name: At_Shoots__P Parameter: Tissue Value: Shoots vs. Whole Plant

SEQ ID NO: 93373 - protein, 494 aa, Arabidopsis thaliana; identical to SEQ ID NO: 89617
  peptide (1)..(494): Ceres Seq. ID no. 12719716
  misc_feature (1)..(494): Homolog of NCBI NO: 18404463 NR Description: expressed protein; protein id: At2g37570.1, by cDNA: gi_11611668, supported by cDNA: gi_15451173, supported
  misc_feature (1)..(494): Homolog of NCBI NO: 11611667 NR Description: SLT1 protein [Nicotiana tabacum]
  misc_feature (1)..(487): Homolog of NCBI NO: 18413934 NR Description: putative protein; protein id: At5g02480.1, by cDNA: gi_13430449, supported by cDNA: gi_15724273 [Arabidopsis >gi|13430450|gb|AAK25847.1|AF360137_1 unknown protein
  misc_feature (1)..(487): Homolog of NCBI NO: 11280862 NR Description: hypothetical protein T22P11.70 - Arabidopsis >gi|7413637|emb|CAB85985.1| putative protein [Arabidopsis
  misc_feature (1)..(484): Homolog of NCBI NO: 18399669 NR Description: expressed protein; protein id: At3g12570.1, by cDNA: gi_13430761 [Arabidopsis thaliana] gene_id:T16H11.6~pir||T02523~strong similarity to unknown protein
  misc_feature (30)..(494): Homolog of NCBI NO: 34895866 NR Description: P0009G03.13 [Oryza sativa (japonica
  misc_feature (4)..(494): Homolog of NCBI NO: 34908142 NR Description: putative SLT1 protein (ion homeostasis related

SEQ ID NO: 93374 - protein, 483 aa, Arabidopsis thaliana; identical to SEQ ID NO: 89618
  peptide (1)..(483): Ceres Seq. ID no. 12719717
  misc_feature (1)..(483): Homolog of NCBI NO: 18404463 NR Description: expressed protein; protein id: At2g37570.1, by cDNA: gi_11611668, supported by cDNA: gi_15451173, supported
  misc_feature (1)..(483): Homolog of NCBI NO: 11611667 NR Description: SLT1 protein [Nicotiana tabacum]
  misc_feature (1)..(476): Homolog of NCBI NO: 18413934 NR Description: putative protein; protein id: At5g02480.1, by cDNA: gi_13430449, supported by cDNA: gi_15724273 [Arabidopsis >gi|13430450|gb|AAK25847.1|AF360137_1 unknown protein
  misc_feature (1)..(476): Homolog of NCBI NO: 11280862 NR Description: hypothetical protein T22P11.70 - Arabidopsis >gi|7413637|emb|CAB85985.1| putative protein [Arabidopsis
  misc_feature (1)..(473): Homolog of NCBI NO: 18399669 NR Description: expressed protein; protein id: At3g12570.1, by cDNA: gi_13430761 [Arabidopsis thaliana] gene_id:T16H11.6~pir||T02523~strong similarity to unknown protein
  misc_feature (19)..(483): Homolog of NCBI NO: 34895866 NR Description: P0009G03.13 [Oryza sativa (japonica
  misc_feature (1)..(483): Homolog of NCBI NO: 34908142 NR Description: putative SLT1 protein (ion homeostasis related

SEQ ID NO: 93375 - protein, 469 aa, Arabidopsis thaliana; identical to SEQ ID NO: 89619
  peptide (1)..(469): Ceres Seq. ID no. 12719718
  misc_feature (1)..(469): Homolog of NCBI NO: 18404463 NR Description: expressed protein; protein id: At2g37570.1, by cDNA: gi_11611668, supported by cDNA: gi_15451173, supported
  misc_feature (1)..(469): Homolog of NCBI NO: 11611667 NR Description: SLT1 protein [Nicotiana tabacum]
  misc_feature (1)..(462): Homolog of NCBI NO: 18413934 NR Description: putative protein; protein id: At5g02480.1, by cDNA: gi_13430449, supported by cDNA: gi_15724273 [Arabidopsis >gi|13430450|gb|AAK25847.1|AF360137_1 unknown protein
  misc_feature (1)..(462): Homolog of NCBI NO: 11280862 NR Description: hypothetical protein T22P11.70 - Arabidopsis >gi|7413637|emb|CAB85985.1| putative protein [Arabidopsis
  misc_feature (1)..(459): Homolog of NCBI NO: 18399669 NR Description: expressed protein; protein id: At3g12570.1, by cDNA: gi_13430761 [Arabidopsis thaliana] gene_id:T16H11.6~pir||T02523~strong similarity to unknown protein
  misc_feature (5)..(469): Homolog of NCBI NO: 34895866 NR Description: P0009G03.13 [Oryza sativa (japonica
  misc_feature (1)..(469): Homolog of NCBI NO: 34908142 NR Description: putative SLT1 protein (ion homeostasis related

SEQ ID NO: 93376 - DNA, 2260 bp, Arabidopsis thaliana; identical to SEQ ID NO: 89620
  misc_feature (1)..(2260): Ceres Seq. ID no. 12719727
  misc_feature: MA Experiment ID: 20000171 Result: Down-regulated in Transcription
  misc_feature: MA Experiment 20000171 PARAMETER Experiment Name: At_42deg_Heat_P Parameter: Age (day) Value: 14
  misc_feature: MA Experiment 20000171 PARAMETER Experiment Name: At_42deg_Heat_P Parameter: Organism Value: A. thaliana
  misc_feature: MA Experiment 20000171 PARAMETER Experiment Name: At_42deg_Heat_P Parameter: Plant Line Value: WS
  misc_feature: MA Experiment 20000171 PARAMETER Experiment Name: At_42deg_Heat_P Parameter: Temperature (deg C) Value: 42 vs. 22
  misc_feature: MA Experiment 20000171 PARAMETER Experiment Name: At_42deg_Heat_P Parameter: Timepoint (hr) Value: 1
  misc_feature: MA Experiment 20000171 PARAMETER Experiment Name: At_42deg_Heat_P Parameter: Tissue Value: Aerial
  misc_feature: MA Experiment ID: 20000173 Result: Down-regulated in Transcription
  misc_feature: MA Experiment 20000173 PARAMETER Experiment Name: At_42deg_Heat_P Parameter: Age (day) Value: 14
  misc_feature: MA Experiment 20000173 PARAMETER Experiment Name: At_42deg_Heat_P Parameter: Organism Value: A. thaliana
  misc_feature: MA Experiment 20000173 PARAMETER Experiment Name: At_42deg_Heat_P Parameter: Plant Line Value: WS
  misc_feature: MA Experiment 20000173 PARAMETER Experiment Name: At_42deg_Heat_P Parameter: Temperature (deg C) Value: 42 vs. 22
  misc_feature: MA Experiment 20000173 PARAMETER Experiment Name: At_42deg_Heat_P Parameter: Timepoint (hr) Value: 6
  misc_feature: MA Experiment 20000173 PARAMETER Experiment Name: At_42deg_Heat_P Parameter: Tissue Value: Aerial
  misc_feature: MA Experiment ID: 20000182 Result: Up-regulated in Transcription
  misc_feature: MA Experiment 20000182 PARAMETER Experiment Name: At_2mM_SA_P Parameter: Age (day) Value: 14
  misc_feature: MA Experiment 20000182 PARAMETER Experiment Name: At_2mM_SA_P Parameter: Organism Value: A. thaliana
  misc_feature: MA Experiment 20000182 PARAMETER Experiment Name: At_2mM_SA_P Parameter: Plant Line Value: WS
  misc_feature: MA Experiment 20000182 PARAMETER Experiment Name: At_2mM_SA_P Parameter: Timepoint (hr) Value: 6
  misc_feature: MA Experiment 20000182 PARAMETER Experiment Name: At_2mM_SA_P Parameter: Tissue Value: Aerial
  misc_feature: MA Experiment 20000182 PARAMETER Experiment Name: At_2mM_SA_P Parameter: Treatment Value: 2mM SA vs. No Treatment
  misc_feature: MA Experiment ID: 20000185 Result: Down-regulated in Transcription
  misc_feature: MA Experiment 20000185 PARAMETER Experiment Name: At_Roots__P Parameter: Age (day) Value: 7 vs. 21
  misc_feature: MA Experiment 20000185 PARAMETER Experiment Name: At_Roots__P Parameter: Organism Value: A. thaliana
  misc_feature: MA Experiment 20000185 PARAMETER Experiment Name: At_Roots__P Parameter: Tissue Value: Roots vs. Whole Plant
  misc_feature: MA Experiment ID: 20000213 Result: Up-regulated in Transcription
  misc_feature: MA Experiment 20000213 PARAMETER Experiment Name: At_4deg_Cold_P Parameter: Timepoint (hr) Value: 2
  misc_feature: MA Experiment ID: 20000227 Result: Down-regulated in Transcription
  misc_feature: MA Experiment 20000227 PARAMETER Experiment Name: At_Root-Tips-vs-Tops_P Parameter: Tissue Value: Root Tips vs. Root Tops
  misc_feature: MA Experiment ID: 20000234 Result: Down-regulated in Transcription
  misc_feature: MA Experiment 20000234 PARAMETER Experiment Name: At_Siliques_P Parameter: Age (day) Value: 21
  misc_feature: MA Experiment 20000234 PARAMETER Experiment Name: At_Siliques_P Parameter: Organism Value: A. thaliana
  misc_feature: MA Experiment 20000234 PARAMETER Experiment Name: At_Siliques_P Parameter: Plant Line Value: WS
  misc_feature: MA Experiment 20000234 PARAMETER Experiment Name: At_Siliques_P Parameter: Tissue Value: Less Than 5mm Siliques vs. Whole Plant
  misc_feature: MA Experiment ID: 20000264 Result: Down-regulated in Transcription
  misc_feature: MA Experiment 20000264 PARAMETER Experiment Name: At_Open_Flower_P Parameter: Age (day) Value: 21
  misc_feature: MA Experiment 20000264 PARAMETER Experiment Name: At_Open_Flower_P Parameter: Plant Line Value: WS
  misc_feature: MA Experiment 20000264 PARAMETER Experiment Name: At_Open_Flower_P Parameter: Tissue Value: Open Flower vs. Whole Plant
  misc_feature: MA Experiment ID: 20000265 Result: Down-regulated in Transcription
  misc_feature: MA Experiment 20000265 PARAMETER Experiment Name: At_Open_Flower_P Parameter: Age (day) Value: 21
  misc_feature: MA Experiment 20000265 PARAMETER Experiment Name: At_Open_Flower_P Parameter: Plant Line Value: WS
  misc_feature: MA Experiment 20000265 PARAMETER Experiment Name: At_Open_Flower_P Parameter: Tissue Value: Closed Flower vs. Whole Plant
  misc_feature: MA Experiment ID: 20000286 Result: Down-regulated in Transcription
  misc_feature: MA Experiment 20000286 PARAMETER Experiment Name: At_Open_Flower_P Parameter: Age (day) Value: 21
  misc_feature: MA Experiment 20000286 PARAMETER Experiment Name: At_Open_Flower_P Parameter: Plant Line Value: WS
  misc_feature: MA Experiment 20000286 PARAMETER Experiment Name: At_Open_Flower_P Parameter: Tissue Value: Half Open vs. Whole Plant
  misc_feature: MA Experiment ID: 20000527 Result: Down-regulated in Transcription
  misc_feature: MA Experiment 20000527 PARAMETER Experiment Name: At_10percent_PEG_P Parameter: Age (day) Value: 20
  misc_feature: MA Experiment 20000527 PARAMETER Experiment Name: At_10percent_PEG_P Parameter: Organism Value: A. thaliana
  misc_feature: MA Experiment 20000527 PARAMETER Experiment Name: At_10percent_PEG_P Parameter: Plant Line Value: WS
  misc_feature: MA Experiment 20000527 PARAMETER Experiment Name: At_10percent_PEG_P Parameter: Timepoint (day) Value: 20
  misc_feature: MA Experiment 20000527 PARAMETER Experiment Name: At_10percent_PEG_P Parameter: Tissue Value: Whole Plant
  misc_feature: MA Experiment 20000527 PARAMETER Experiment Name: At_10percent_PEG_P Parameter: Treatment Value: 10percent PEG vs. No Treatment
  misc_feature: MA Experiment ID: 20000573 Result: Down-regulated in Transcription
  misc_feature: MA Experiment 20000573 PARAMETER Experiment Name: At_100uM_ABA_Mutants__P Parameter: Organism Value: A. thaliana
  misc_feature: MA Experiment 20000573 PARAMETER Experiment Name: At_100uM_ABA_Mutants__P Parameter: Plant Line Value: CS22 vs. Ler wt
  misc_feature: MA Experiment 20000573 PARAMETER Experiment Name: At_100uM_ABA_Mutants__P Parameter: Timepoint (hr) Value: N/A
  misc_feature: MA Experiment 20000573 PARAMETER Experiment Name: At_100uM_ABA_Mutants__P Parameter: Tissue Value: Whole Plant
  misc_feature: MA Experiment 20000573 PARAMETER Experiment Name: At_100uM_ABA_Mutants__P Parameter: Treatment Value: None
  misc_feature: MA Experiment ID: 20000574 Result: Down-regulated in Transcription
  misc_feature: MA Experiment 20000574 PARAMETER Experiment Name: At_100uM_ABA_Mutants__P Parameter: Organism Value: A. thaliana
  misc_feature: MA Experiment 20000574 PARAMETER Experiment Name: At_100uM_ABA_Mutants__P Parameter: Plant Line Value: CS23 vs. Ler wt
  misc_feature: MA Experiment 20000574 PARAMETER Experiment Name: At_100uM_ABA_Mutants__P Parameter: Timepoint (hr) Value: N/A
  misc_feature: MA Experiment 20000574 PARAMETER Experiment Name: At_100uM_ABA_Mutants__P Parameter: Tissue Value: Whole Plant
  misc_feature: MA Experiment 20000574 PARAMETER Experiment Name: At_100uM_ABA_Mutants__P Parameter: Treatment Value: None
  misc_feature: MA Experiment ID: 20000709 Result: Down-regulated in Transcription
  misc_feature: MA Experiment 20000709 PARAMETER Experiment Name: At_15mM_NH4NO3_L-to-H_P Parameter: Age (hr) Value: 14
  misc_feature: MA Experiment 20000709 PARAMETER Experiment Name: At_15mM_NH4NO3_L-to-H_P Parameter: Organism Value: A. thaliana
  misc_feature: MA Experiment 20000709 PARAMETER Experiment Name: At_15mM_NH4NO3_L-to-H_P Parameter: Plant Line Value: WS
  misc_feature: MA Experiment 20000709 PARAMETER Experiment Name: At_15mM_NH4NO3_L-to-H_P Parameter: Timepoint (hr) Value: 4
  misc_feature: MA Experiment 20000709 PARAMETER Experiment Name: At_15mM_NH4NO3_L-to-H_P Parameter: Tissue Value: Aerial
  misc_feature: MA Experiment 20000709 PARAMETER Experiment Name: At_15mM_NH4NO3_L-to-H_P Parameter: Treatment Value: 15mM NH4NO3 vs. 30mM Mannitol
  misc_feature: MA Experiment ID: 20000794 Result: Down-regulated in Transcription
  misc_feature: MA Experiment 20000794 PARAMETER Experiment Name: At_Petals_P Parameter: Age (day) Value: 23-25 days
  misc_feature: MA Experiment 20000794 PARAMETER Experiment Name: At_Petals_P Parameter: Plant Line Value: WS
  misc_feature: MA Experiment 20000794 PARAMETER Experiment Name: At_Petals_P Parameter: Tissue Value: Petals vs. Whole plant
  misc_feature: MA Experiment ID: 20001248 Result: Down-regulated in Transcription
  misc_feature: MA Experiment 20001248 PARAMETER Experiment Name: At_Far-red-induction_P Parameter: Age (day) Value: 7
  misc_feature: MA Experiment 20001248 PARAMETER Experiment Name: At_Far-red-induction_P Parameter: Light Value: Far-red vs. White
  misc_feature: MA Experiment 20001248 PARAMETER Experiment Name: At_Far-red-induction_P Parameter: Organism Value: A. thaliana
  misc_feature: MA Experiment 20001248 PARAMETER Experiment Name: At_Far-red-induction_P Parameter: Plant Line Value: Columbia
  misc_feature: MA Experiment 20001248 PARAMETER Experiment Name: At_Far-red-induction_P Parameter: Timepoint (hr) Value: 4
  misc_feature: MA Experiment 20001248 PARAMETER Experiment Name: At_Far-red-induction_P Parameter: Tissue Value: Whole Plant
  misc_feature: MA Experiment ID: 20001555 Result: Down-regulated in Transcription
  misc_feature: MA Experiment 20001555 PARAMETER Experiment Name: At_Drought_Soil_Dry_P Parameter: Age (day) Value: 24
  misc_feature: MA Experiment 20001555 PARAMETER Experiment Name: At_Drought_Soil_Dry_P Parameter: Organism Value: A. thaliana
  misc_feature: MA Experiment 20001555 PARAMETER Experiment Name: At_Drought_Soil_Dry_P Parameter: Plant Line Value: WS
  misc_feature: MA Experiment 20001555 PARAMETER Experiment Name: At_Drought_Soil_Dry_P Parameter: Post Timepoint (hr) Value: None
  misc_feature: MA Experiment 20001555 PARAMETER Experiment Name: At_Drought_Soil_Dry_P Parameter: Post-Treatment Value: None
  misc_feature: MA Experiment 20001555 PARAMETER Experiment Name: At_Drought_Soil_Dry_P Parameter: Timepoint (day) Value: 10
  misc_feature: MA Experiment 20001555 PARAMETER Experiment Name: At_Drought_Soil_Dry_P Parameter: Treatment Value: Drought vs. No Drought
  misc_feature: MA Experiment ID: 20001556 Result: Down-regulated in Transcription
  misc_feature: MA Experiment 20001556 PARAMETER Experiment Name: At_Drought_Soil_Dry_P Parameter: Age (day) Value: 26
  misc_feature: MA Experiment 20001556 PARAMETER Experiment Name: At_Drought_Soil_Dry_P Parameter: Organism Value: A. thaliana
  misc_feature: MA Experiment 20001556 PARAMETER Experiment Name: At_Drought_Soil_Dry_P Parameter: Plant Line Value: WS
  misc_feature: MA Experiment 20001556 PARAMETER Experiment Name: At_Drought_Soil_Dry_P Parameter: Post Timepoint (hr) Value: None
  misc_feature: MA Experiment 20001556 PARAMETER Experiment Name: At_Drought_Soil_Dry_P Parameter: Post-Treatment Value: None
  misc_feature: MA Experiment 20001556 PARAMETER Experiment Name: At_Drought_Soil_Dry_P Parameter: Timepoint (day) Value: 12
  misc_feature: MA Experiment 20001556 PARAMETER Experiment Name: At_Drought_Soil_Dry_P Parameter: Treatment Value: Drought vs. No Drought
  misc_feature: MA Experiment ID: 20001557 Result: Down-regulated in Transcription
  misc_feature: MA Experiment 20001557 PARAMETER Experiment Name: At_Drought_Soil_Dry_P Parameter: Age (day) Value: 27
  misc_feature: MA Experiment 20001557 PARAMETER Experiment Name: At_Drought_Soil_Dry_P Parameter: Organism Value: A. thaliana
  misc_feature: MA Experiment 20001557 PARAMETER Experiment Name: At_Drought_Soil_Dry_P Parameter: Plant Line Value: WS
  misc_feature: MA Experiment 20001557 PARAMETER Experiment Name: At_Drought_Soil_Dry_P Parameter: Post Timepoint (hr) Value: 3
  misc_feature: MA Experiment 20001557 PARAMETER Experiment Name: At_Drought_Soil_Dry_P Parameter: Post-Treatment Value: Re-Water vs. No Drought
  misc_feature: MA Experiment 20001557 PARAMETER Experiment Name: At_Drought_Soil_Dry_P Parameter: Timepoint (day) Value: 13
  misc_feature: MA Experiment 20001557 PARAMETER Experiment Name: At_Drought_Soil_Dry_P Parameter: Treatment Value: Drought vs. No Drought
  misc_feature: MA Experiment ID: 20001558 Result: Down-regulated in Transcription
  misc_feature: MA Experiment 20001558 PARAMETER Experiment Name: At_Drought_Soil_Dry_P Parameter: Age (day) Value: 27
  misc_feature: MA Experiment 20001558 PARAMETER Experiment Name: At_Drought_Soil_Dry_P Parameter: Organism Value: A. thaliana
  misc_feature: MA Experiment 20001558 PARAMETER Experiment Name: At_Drought_Soil_Dry_P Parameter: Plant Line Value: WS
  misc_feature: MA Experiment 20001558 PARAMETER Experiment Name: At_Drought_Soil_Dry_P Parameter: Post Timepoint (hr) Value: 6
  misc_feature: MA Experiment 20001558 PARAMETER Experiment Name: At_Drought_Soil_Dry_P Parameter: Post-Treatment Value: Re-Water vs. No Drought
  misc_feature: MA Experiment 20001558 PARAMETER Experiment Name: At_Drought_Soil_Dry_P Parameter: Timepoint (day) Value: 13
  misc_feature: MA Experiment 20001558 PARAMETER Experiment Name: At_Drought_Soil_Dry_P Parameter: Treatment Value: Drought vs. No Drought
  misc_feature: MA Experiment ID: 20001560 Result: Down-regulated in Transcription
  misc_feature: MA Experiment 20001560 PARAMETER Experiment Name: At_Drought_Soil_Dry_P Parameter: Age (day) Value: 28
  misc_feature: MA Experiment 20001560 PARAMETER Experiment Name: At_Drought_Soil_Dry_P Parameter: Organism Value: A. thaliana
  misc_feature: MA Experiment 20001560 PARAMETER Experiment Name: At_Drought_Soil_Dry_P Parameter: Plant Line Value: WS
  misc_feature: MA Experiment 20001560 PARAMETER Experiment Name: At_Drought_Soil_Dry_P Parameter: Post Timepoint (hr) Value: None
  misc_feature: MA Experiment 20001560 PARAMETER Experiment Name: At_Drought_Soil_Dry_P Parameter: Post-Treatment Value: None
  misc_feature: MA Experiment 20001560 PARAMETER Experiment Name: At_Drought_Soil_Dry_P Parameter: Timepoint (day) Value: 14
  misc_feature: MA Experiment 20001560 PARAMETER Experiment Name: At_Drought_Soil_Dry_P Parameter: Treatment Value: Drought vs. No Drought
  misc_feature: MA Experiment ID: 20001904 Result: Down-regulated in Transcription
  misc_feature: MA Experiment 20001904 PARAMETER Experiment Name: At_Drought_Reproduction_P Parameter: Age (day) Value: 37
  misc_feature: MA Experiment 20001904 PARAMETER Experiment Name: At_Drought_Reproduction_P Parameter: Organism Value: A. thaliana
  misc_feature: MA Experiment 20001904 PARAMETER Experiment Name: At_Drought_Reproduction_P Parameter: Plant Line Value: WS
  misc_feature: MA Experiment 20001904 PARAMETER Experiment Name: At_Drought_Reproduction_P Parameter: Timepoint (day) Value: 7
  misc_feature: MA Experiment 20001904 PARAMETER Experiment Name: At_Drought_Reproduction_P Parameter: Tissue Value: Rosettes
  misc_feature: MA Experiment 20001904 PARAMETER Experiment Name: At_Drought_Reproduction_P Parameter: Treatment Value: Drought vs. No Drought
  misc_feature: MA Experiment ID: 20001905 Result: Down-regulated in Transcription
  misc_feature: MA Experiment 20001905 PARAMETER Experiment Name: At_Drought_Reproduction_P Parameter: Age (day) Value: 40
  misc_feature: MA Experiment 20001905 PARAMETER Experiment Name: At_Drought_Reproduction_P Parameter: Organism Value: A. thaliana
  misc_feature: MA Experiment 20001905 PARAMETER Experiment Name: At_Drought_Reproduction_P Parameter: Plant Line Value: WS
  misc_feature: MA Experiment 20001905 PARAMETER Experiment Name: At_Drought_Reproduction_P Parameter: Timepoint (day) Value: 10
  misc_feature: MA Experiment 20001905 PARAMETER Experiment Name: At_Drought_Reproduction_P Parameter: Tissue Value: Rosettes
  misc_feature: MA Experiment 20001905 PARAMETER Experiment Name: At_Drought_Reproduction_P Parameter: Treatment Value: Drought vs. No Drought

SEQ ID NO: 93377 - protein, 689 aa, Arabidopsis thaliana; identical to SEQ ID NO: 89621
  peptide (1)..(689): Ceres Seq. ID no. 12719728
  misc_feature (15)..(689): Homolog of NCBI NO: 15232332 NR Description: serine/threonine-specific kinase like protein;
  misc_feature (15)..(689): Homolog of NCBI NO: 28416699 NR Description: At3g53810 [Arabidopsis thaliana]
  misc_feature (16)..(689): Homolog of NCBI NO: 18411937 NR Description: contains similarity to a protein kinase domain score: 125.64) and legume lectins alpha domain [Arabidopsis
  misc_feature (15)..(689): Homolog of NCBI NO: 18411935 NR Description: contains similarity to a protein kinase domain pkinase.hmm, score: 166.20) and to legume lectins beta domain lectin_legB.hmm, score: 139.32); protein id: At4g02410.1,
  misc_feature (2)..(689): Homolog of NCBI NO: 34899508 NR Description: putative receptor-like protein kinase [Oryza
  misc_feature (19)..(689): Homolog of NCBI NO: 34395075 NR Description: putative receptor kinase Lecrk [Oryza sativa
  misc_feature (19)..(689): Homolog of NCBI NO: 22093630 NR Description: contains ESTs
  misc_feature (36)..(689): Homolog of NCBI NO: 34393465 NR Description: putative receptor-type protein kinase LRK1 [Oryza
  misc_feature (308)..(689): Homolog of NCBI NO: 34395078 NR Description: putative receptor kinase Lecrk [Oryza sativa
  misc_feature (20)..(292): Homolog of NCBI NO: 34395078 NR Description: putative receptor kinase Lecrk [Oryza sativa

SEQ ID NO: 93378 - protein, 675 aa, Arabidopsis thaliana; identical to SEQ ID NO: 89622
  peptide (1)..(675): Ceres Seq. ID no. 12719729
  misc_feature (1)..(675): Homolog of NCBI NO: 15232332 NR Description: serine/threonine-specific kinase like protein;
  misc_feature (1)..(675): Homolog of NCBI NO: 28416699 NR Description: At3g53810 [Arabidopsis thaliana]
  misc_feature (2)..(675): Homolog of NCBI NO: 18411937 NR Description: contains similarity to a protein kinase domain score: 125.64) and legume lectins alpha domain [Arabidopsis
  misc_feature (1)..(675): Homolog of NCBI NO: 18411935 NR Description: contains similarity to a protein kinase domain pkinase.hmm, score: 166.20) and to legume lectins beta domain lectin_legB.hmm, score: 139.32); protein id: At4g02410.1,
  misc_feature (1)..(675): Homolog of NCBI NO: 34899508 NR Description: putative receptor-like protein kinase [Oryza
  misc_feature (5)..(675): Homolog of NCBI NO: 34395075 NR Description: putative receptor kinase Lecrk [Oryza sativa
  misc_feature (5)..(675): Homolog of NCBI NO: 22093630 NR Description: contains ESTs
  misc_feature (22)..(675): Homolog of NCBI NO: 34393465 NR Description: putative receptor-type protein kinase LRK1 [Oryza
  misc_feature (294)..(675): Homolog of NCBI NO: 34395078 NR Description: putative receptor kinase Lecrk [Oryza sativa
  misc_feature (6)..(278): Homolog of NCBI NO: 34395078 NR Description: putative receptor kinase Lecrk [Oryza sativa

SEQ ID NO: 93379 - protein, 481 aa, Arabidopsis thaliana; identical to SEQ ID NO: 89623
  peptide (1)..(481): Ceres Seq. ID no. 12719730
  misc_feature (1)..(481): Homolog of NCBI NO: 15232332 NR Description: serine/threonine-specific kinase like protein;
  misc_feature (1)..(481): Homolog of NCBI NO: 28416699 NR Description: At3g53810 [Arabidopsis thaliana]
  misc_feature (1)..(481): Homolog of NCBI NO: 18411937 NR Description: contains similarity to a protein kinase domain score: 125.64) and legume lectins alpha domain [Arabidopsis
  misc_feature (1)..(481): Homolog of NCBI NO: 18411935 NR Description: contains similarity to a protein kinase domain pkinase.hmm, score: 166.20) and to legume lectins beta domain lectin_legB.hmm, score: 139.32); protein id: At4g02410.1,
  misc_feature (1)..(481): Homolog of NCBI NO: 34899508 NR Description: putative receptor-like protein kinase [Oryza
  misc_feature (1)..(481): Homolog of NCBI NO: 34395075 NR Description: putative receptor kinase Lecrk [Oryza sativa
  misc_feature (1)..(481): Homolog of NCBI NO: 22093630 NR Description: contains ESTs
  misc_feature (1)..(481): Homolog of NCBI NO: 34393465 NR Description: putative receptor-type protein kinase LRK1 [Oryza
  misc_feature (100)..(481): Homolog of NCBI NO: 34395078 NR Description: putative receptor kinase Lecrk [Oryza sativa
  misc_feature (1)..(84): Homolog of NCBI NO: 34395078 NR Description: putative receptor kinase Lecrk [Oryza sativa

SEQ ID NO: 93380 - DNA, 680 bp, Arabidopsis thaliana; identical to SEQ ID NO: 89624
  misc_feature (1)..(680): Ceres Seq. ID no. 12719780
  misc_feature: MA Experiment ID: 20000173 Result: Down-regulated in Transcription
  misc_feature: MA Experiment 20000173 PARAMETER Experiment Name: At_42deg_Heat_P Parameter: Age (day) Value: 14
  misc_feature: MA Experiment 20000173 PARAMETER Experiment Name: At_42deg_Heat_P Parameter: Organism Value: A. thaliana
  misc_feature: MA Experiment 20000173 PARAMETER Experiment Name: At_42deg_Heat_P Parameter: Plant Line Value: WS
  misc_feature: MA Experiment 20000173 PARAMETER Experiment Name: At_42deg_Heat_P Parameter: Temperature (deg C) Value: 42 vs. 22
  misc_feature: MA Experiment 20000173 PARAMETER Experiment Name: At_42deg_Heat_P Parameter: Timepoint (hr) Value: 6
  misc_feature: MA Experiment 20000173 PARAMETER Experiment Name: At_42deg_Heat_P Parameter: Tissue Value: Aerial
  misc_feature: MA Experiment ID: 20000180 Result: Up-regulated in Transcription
  misc_feature: MA Experiment 20000180 PARAMETER Experiment Name: At_Germinating_Seeds_P Parameter: Age (hr) Value: 24 vs. 0
  misc_feature: MA Experiment 20000180 PARAMETER Experiment Name: At_Germinating_Seeds_P Parameter: Tissue Value: Germinating Seeds
  misc_feature: MA Experiment ID: 20000182 Result: Down-regulated in Transcription
  misc_feature: MA Experiment 20000182 PARAMETER Experiment Name: At_2mM_SA_P Parameter: Age (day) Value: 14
  misc_feature: MA Experiment 20000182 PARAMETER Experiment Name: At_2mM_SA_P Parameter: Organism Value: A. thaliana
  misc_feature: MA Experiment 20000182 PARAMETER Experiment Name: At_2mM_SA_P Parameter: Plant Line Value: WS
  misc_feature: MA Experiment 20000182 PARAMETER Experiment Name: At_2mM_SA_P Parameter: Timepoint (hr) Value: 6
  misc_feature: MA Experiment 20000182 PARAMETER Experiment Name: At_2mM_SA_P Parameter: Tissue Value: Aerial
  misc_feature: MA Experiment 20000182 PARAMETER Experiment Name: At_2mM_SA_P Parameter: Treatment Value: 2mM SA vs. No Treatment
  misc_feature: MA Experiment ID: 20000185 Result: Down-regulated in Transcription
  misc_feature: MA Experiment 20000185 PARAMETER Experiment Name: At_Roots__P Parameter: Age (day) Value: 7 vs. 21
  misc_feature: MA Experiment 20000185 PARAMETER Experiment Name: At_Roots__P Parameter: Organism Value: A. thaliana
  misc_feature: MA Experiment 20000185 PARAMETER Experiment Name: At_Roots__P Parameter: Tissue Value: Roots vs. Whole Plant
  misc_feature: MA Experiment ID: 20000227 Result: Down-regulated in Transcription
  misc_feature: MA Experiment 20000227 PARAMETER Experiment Name: At_Root-Tips-vs-Tops_P Parameter: Tissue Value: Root Tips vs. Root Tops
  misc_feature: MA Experiment ID: 20000234 Result: Up-regulated in Transcription
  misc_feature: MA Experiment 20000234 PARAMETER Experiment Name: At_Siliques_P Parameter: Age (day) Value: 21
  misc_feature: MA Experiment 20000234 PARAMETER Experiment Name: At_Siliques_P Parameter: Organism Value: A. thaliana
  misc_feature: MA Experiment 20000234 PARAMETER Experiment Name: At_Siliques_P Parameter: Plant Line Value: WS
  misc_feature: MA Experiment 20000234 PARAMETER Experiment Name: At_Siliques_P Parameter: Tissue Value: Less Than 5mm Siliques vs. Whole Plant
  misc_feature: MA Experiment ID: 20000235 Result: Up-regulated in Transcription
  misc_feature: MA Experiment 20000235 PARAMETER Experiment Name: At_Siliques_P Parameter: Age (day) Value: 21
  misc_feature: MA Experiment 20000235 PARAMETER Experiment Name: At_Siliques_P Parameter: Organism Value: A. thaliana
  misc_feature: MA Experiment 20000235 PARAMETER Experiment Name: At_Siliques_P Parameter: Plant Line Value: WS
  misc_feature: MA Experiment 20000235 PARAMETER Experiment Name: At_Siliques_P Parameter: Tissue Value: 5-10mm Siliques vs. Whole Plant
  misc_feature: MA Experiment ID: 20000265 Result: Up-regulated in Transcription
  misc_feature: MA Experiment 20000265 PARAMETER Experiment Name: At_Open_Flower_P Parameter: Age (day) Value: 21
  misc_feature: MA Experiment 20000265 PARAMETER Experiment Name: At_Open_Flower_P Parameter: Plant Line Value: WS
  misc_feature: MA Experiment 20000265 PARAMETER Experiment Name: At_Open_Flower_P Parameter: Tissue Value: Closed Flower vs. Whole Plant
  misc_feature: MA Experiment ID: 20000436 Result: Down-regulated in Transcription
  misc_feature: MA Experiment 20000436 PARAMETER Experiment Name: At_Drought_P Parameter: Age (day) Value: 7
  misc_feature: MA Experiment 20000436 PARAMETER Experiment Name: At_Drought_P Parameter: Organism Value: A. thaliana
  misc_feature: MA Experiment 20000436 PARAMETER Experiment Name: At_Drought_P Parameter: Plant Line Value: WS
  misc_feature: MA Experiment 20000436 PARAMETER Experiment Name: At_Drought_P Parameter: Timepoint (hr) Value: 12
  misc_feature: MA Experiment 20000436 PARAMETER Experiment Name: At_Drought_P Parameter: Tissue Value: Whole Plant
  misc_feature: MA Experiment 20000436 PARAMETER Experiment Name: At_Drought_P Parameter: Treatment Value: Drought vs. No Drought
  misc_feature: MA Experiment ID: 20000439 Result: Down-regulated in Transcription
  misc_feature: MA Experiment 20000439 PARAMETER Experiment Name: At_Roots__P Parameter: Age (day) Value: 14 vs. 21
  misc_feature: MA Experiment 20000439 PARAMETER Experiment Name: At_Roots__P Parameter: Organism Value: A. thaliana
  misc_feature: MA Experiment 20000439 PARAMETER Experiment Name: At_Roots__P Parameter: Tissue Value: Roots vs. Whole Plant
  misc_feature: MA Experiment ID: 20000451 Result: Down-regulated in Transcription
  misc_feature: MA Experiment 20000451 PARAMETER Experiment Name: At_CS6879_Shoots-Roots_P Parameter: Age (day) Value: 14
  misc_feature: MA Experiment 20000451 PARAMETER Experiment Name: At_CS6879_Shoots-Roots_P Parameter: Organism Value: A. thaliana
  misc_feature: MA Experiment 20000451 PARAMETER Experiment Name: At_CS6879_Shoots-Roots_P Parameter: Plant Line Value: CS6879 vs. WS
  misc_feature: MA Experiment 20000451 PARAMETER Experiment Name: At_CS6879_Shoots-Roots_P Parameter: Tissue Value: Roots
  misc_feature: MA Experiment ID: 20000573 Result: Up-regulated in Transcription
  misc_feature: MA Experiment 20000573 PARAMETER Experiment Name: At_100uM_ABA_Mutants__P Parameter: Organism Value: A. thaliana
  misc_feature: MA Experiment 20000573 PARAMETER Experiment Name: At_100uM_ABA_Mutants__P Parameter: Plant Line Value: CS22 vs. Ler wt
  misc_feature: MA Experiment 20000573 PARAMETER Experiment Name: At_100uM_ABA_Mutants__P Parameter: Timepoint (hr) Value: N/A
  misc_feature: MA Experiment 20000573 PARAMETER Experiment Name: At_100uM_ABA_Mutants__P Parameter: Tissue Value: Whole Plant
  misc_feature: MA Experiment 20000573 PARAMETER Experiment Name: At_100uM_ABA_Mutants__P Parameter: Treatment Value: None
  misc_feature: MA Experiment ID: 20000574 Result: Up-regulated in Transcription
  misc_feature: MA Experiment 20000574 PARAMETER Experiment Name: At_100uM_ABA_Mutants__P Parameter: Organism Value: A. thaliana
  misc_feature: MA Experiment 20000574 PARAMETER Experiment Name: At_100uM_ABA_Mutants__P Parameter: Plant Line Value: CS23 vs. Ler wt
  misc_feature: MA Experiment 20000574 PARAMETER Experiment Name: At_100uM_ABA_Mutants__P Parameter: Timepoint (hr) Value: N/A
  misc_feature: MA Experiment 20000574 PARAMETER Experiment Name: At_100uM_ABA_Mutants__P Parameter: Tissue Value: Whole Plant
  misc_feature: MA Experiment 20000574 PARAMETER Experiment Name: At_100uM_ABA_Mutants__P Parameter: Treatment Value: None
  misc_feature: MA Experiment ID: 20001451 Result: Up-regulated in Transcription
  misc_feature: MA Experiment 20001451 PARAMETER Experiment Name: At_Far-red-induction_P Parameter: Age (day) Value: 7
  misc_feature: MA Experiment 20001451 PARAMETER Experiment Name: At_Far-red-induction_P Parameter: Light Value: Far-red vs. White
  misc_feature: MA Experiment 20001451 PARAMETER Experiment Name: At_Far-red-induction_P Parameter: Organism Value: A. thaliana
  misc_feature: MA Experiment 20001451 PARAMETER Experiment Name: At_Far-red-induction_P Parameter: Plant Line Value: Columbia
  misc_feature: MA Experiment 20001451 PARAMETER Experiment Name: At_Far-red-induction_P Parameter: Timepoint (hr) Value: 24
  misc_feature: MA Experiment 20001451 PARAMETER Experiment Name: At_Far-red-induction_P Parameter: Tissue Value: Whole Plant
  misc_feature: MA Experiment ID: 20001757 Result: Up-regulated in Transcription
  misc_feature: MA Experiment 20001757 PARAMETER Experiment Name: At_50mM_NH4NO3_L-to-H_P Parameter: Timepoint (hr) Value: 6
  misc_feature: MA Experiment 20001757 PARAMETER Experiment Name: At_50mM_NH4NO3_L-to-H_P Parameter: Tissue Value: Leaf
  misc_feature: MA Experiment 20001757 PARAMETER Experiment Name: At_50mM_NH4NO3_L-to-H_P Parameter: Treatment Value: 50mM NH4NO3 vs 100mM Mannitol
  misc_feature: MA Experiment ID: 20001906 Result: Down-regulated in Transcription
  misc_feature: MA Experiment 20001906 PARAMETER Experiment Name: At_Drought_Reproduction_P Parameter: Age (day) Value: 35
  misc_feature: MA Experiment 20001906 PARAMETER Experiment Name: At_Drought_Reproduction_P Parameter: Organism Value: A. thaliana
  misc_feature: MA Experiment 20001906 PARAMETER Experiment Name: At_Drought_Reproduction_P Parameter: Plant Line Value: WS
  misc_feature: MA Experiment 20001906 PARAMETER Experiment Name: At_Drought_Reproduction_P Parameter: Timepoint (day) Value: 5
  misc_feature: MA Experiment 20001906 PARAMETER Experiment Name: At_Drought_Reproduction_P Parameter: Tissue Value: Siliques
  misc_feature: MA Experiment 20001906 PARAMETER Experiment Name: At_Drought_Reproduction_P Parameter: Treatment Value: Drought vs. No Drought

SEQ ID NO: 93381 - protein, 71 aa, Arabidopsis thaliana; identical to SEQ ID NO: 89625
  peptide (1)..(71): Ceres Seq. ID no. 12719781

SEQ ID NO: 93382 - protein, 50 aa, Arabidopsis thaliana; identical to SEQ ID NO: 28366
  peptide (1)..(50): Ceres Seq. ID no. 12719782

SEQ ID NO: 93383 - protein, 46 aa, Arabidopsis thaliana; identical to SEQ ID NO: 28367
  peptide (1)..(46): Ceres Seq. ID no. 12719783
  misc_feature (1)..(46): Homolog of NCBI NO: 18422509 NR Description: expressed protein; protein id: At5g45040.1, by cDNA: gi_13926304, supported by cDNA: gi_16323249 [Arabidopsis
  misc_feature (1)..(46): Homolog of NCBI NO: 10177496 NR Description: gene_id:K21C13.23~unknown protein [Arabidopsis
  misc_feature (1)..(46): Homolog of NCBI NO: 34899810 NR Description: putative c6 type cytochrome [Oryza sativa
  misc_feature (1)..(46): Homolog of NCBI NO: 34393286 NR Description: cytochrome C6, chloroplast precursor-like protein
  misc_feature (1)..(40): Homolog of NCBI NO: 37521549 NR Description: cytochrome c6 [Gloeobacter violaceus]
  misc_feature (1)..(40): Homolog of NCBI NO: 117923 NR Description: Cytochrome C6 (Soluble cytochrome f) (Cytochrome
  misc_feature (1)..(40): Homolog of NCBI NO: 22652035 NR Description: putative cytochrome c6-2 [Synechococcus sp. PCC
  misc_feature (1)..(40): Homolog of NCBI NO: 20141074 NR Description: Cytochrome C6 precursor (Soluble cytochrome f)
  misc_feature (1)..(40): Homolog of NCBI NO: 23040173 NR Description: hypothetical protein [Trichodesmium erythraeum
  misc_feature (1)..(40): Homolog of NCBI NO: 22298826 NR Description: cytochrome c553 [Thermosynechococcus elongatus >gi|25014058|sp|P56534|CYC6_SYNEL Cytochrome C6 precursor

SEQ ID NO: 93384 - DNA, 1489 bp, Arabidopsis thaliana; identical to SEQ ID NO: 89628
  misc_feature (1)..(1489): Ceres Seq. ID no. 12719800
  misc_feature: MA Experiment ID: 20000169 Result: Up-regulated in Transcription
  misc_feature: MA Experiment 20000169 PARAMETER Experiment Name: At_100uM_ABA_P Parameter: Age (day) Value: 14
  misc_feature: MA Experiment 20000169 PARAMETER Experiment Name: At_100uM_ABA_P Parameter: Organism Value: A. thaliana
  misc_feature: MA Experiment 20000169 PARAMETER Experiment Name: At_100uM_ABA_P Parameter: Plant Line Value: WS
  misc_feature: MA Experiment 20000169 PARAMETER Experiment Name: At_100uM_ABA_P Parameter: Timepoint (hr) Value: 6
  misc_feature: MA Experiment 20000169 PARAMETER Experiment Name: At_100uM_ABA_P Parameter: Tissue Value: Aerial
  misc_feature: MA Experiment 20000169 PARAMETER Experiment Name: At_100uM_ABA_P Parameter: Treatment Value: 100uM ABA vs. No Treatment
  misc_feature: MA Experiment ID: 20000171 Result: Down-regulated in Transcription
  misc_feature: MA Experiment 20000171 PARAMETER Experiment Name: At_42deg_Heat_P Parameter: Age (day) Value: 14
  misc_feature: MA Experiment 20000171 PARAMETER Experiment Name: At_42deg_Heat_P Parameter: Organism Value: A. thaliana
  misc_feature: MA Experiment 20000171 PARAMETER Experiment Name: At_42deg_Heat_P Parameter: Plant Line Value: WS
  misc_feature: MA Experiment 20000171 PARAMETER Experiment Name: At_42deg_Heat_P Parameter: Temperature (deg C) Value: 42 vs. 22
  misc_feature: MA Experiment 20000171 PARAMETER Experiment Name: At_42deg_Heat_P Parameter: Timepoint (hr) Value: 1
  misc_feature: MA Experiment 20000171 PARAMETER Experiment Name: At_42deg_Heat_P Parameter: Tissue Value: Aerial
  misc_feature: MA Experiment ID: 20000173 Result: Down-regulated in Transcription
  misc_feature: MA Experiment 20000173 PARAMETER Experiment Name: At_42deg_Heat_P Parameter: Age (day) Value: 14
  misc_feature: MA Experiment 20000173 PARAMETER Experiment Name: At_42deg_Heat_P Parameter: Organism Value: A. thaliana
  misc_feature: MA Experiment 20000173 PARAMETER Experiment Name: At_42deg_Heat_P Parameter: Plant Line Value: WS
  misc_feature: MA Experiment 20000173 PARAMETER Experiment Name: At_42deg_Heat_P Parameter: Temperature (deg C) Value: 42 vs. 22
  misc_feature: MA Experiment 20000173 PARAMETER Experiment Name: At_42deg_Heat_P Parameter: Timepoint (hr) Value: 6
  misc_feature: MA Experiment 20000173 PARAMETER Experiment Name: At_42deg_Heat_P Parameter: Tissue Value: Aerial
  misc_feature: MA Experiment ID: 20000213 Result: Up-regulated in Transcription
  misc_feature: MA Experiment 20000213 PARAMETER Experiment Name: At_4deg_Cold_P Parameter: Timepoint (hr) Value: 2
  misc_feature: MA Experiment ID: 20000227 Result: Up-regulated in Transcription
  misc_feature: MA Experiment 20000227 PARAMETER Experiment Name: At_Root-Tips-vs-Tops_P Parameter: Tissue Value: Root Tips vs. Root Tops
  misc_feature: MA Experiment ID: 20000234 Result: Down-regulated in Transcription
  misc_feature: MA Experiment 20000234 PARAMETER Experiment Name: At_Siliques_P Parameter: Age (day) Value: 21
  misc_feature: MA Experiment 20000234 PARAMETER Experiment Name: At_Siliques_P Parameter: Organism Value: A. thaliana
  misc_feature: MA Experiment 20000234 PARAMETER Experiment Name: At_Siliques_P Parameter: Plant Line Value: WS
  misc_feature: MA Experiment 20000234 PARAMETER Experiment Name: At_Siliques_P Parameter: Tissue Value: Less Than 5mm Siliques vs. Whole Plant
  misc_feature: MA Experiment ID: 20000235 Result: Down-regulated in Transcription
  misc_feature: MA Experiment 20000235 PARAMETER Experiment Name: At_Siliques_P Parameter: Age (day) Value: 21
  misc_feature: MA Experiment 20000235 PARAMETER Experiment Name: At_Siliques_P Parameter: Organism Value: A. thaliana
  misc_feature: MA Experiment 20000235 PARAMETER Experiment Name: At_Siliques_P Parameter: Plant Line Value: WS
  misc_feature: MA Experiment 20000235 PARAMETER Experiment Name: At_Siliques_P Parameter: Tissue Value: 5-10mm Siliques vs. Whole Plant
  misc_feature: MA Experiment ID: 20001247 Result: Up-regulated in Transcription
  misc_feature: MA Experiment 20001247 PARAMETER Experiment Name: At_Far-red-induction_P Parameter: Age (day) Value: 7
  misc_feature: MA Experiment 20001247 PARAMETER Experiment Name: At_Far-red-induction_P Parameter: Light Value: Far-red vs. White
  misc_feature: MA Experiment 20001247 PARAMETER Experiment Name: At_Far-red-induction_P Parameter: Organism Value: A. thaliana
  misc_feature: MA Experiment 20001247 PARAMETER Experiment Name: At_Far-red-induction_P Parameter: Plant Line Value: Columbia
  misc_feature: MA Experiment 20001247 PARAMETER Experiment Name: At_Far-red-induction_P Parameter: Timepoint (hr) Value: 1
  misc_feature: MA Experiment 20001247 PARAMETER Experiment Name: At_Far-red-induction_P Parameter: Tissue Value: Whole Plant
  misc_feature: MA Experiment ID: 20001906 Result: Down-regulated in Transcription
  misc_feature: MA Experiment 20001906 PARAMETER Experiment Name: At_Drought_Reproduction_P Parameter: Age (day) Value: 35
  misc_feature: MA Experiment 20001906 PARAMETER Experiment Name: At_Drought_Reproduction_P Parameter: Organism Value: A. thaliana
  misc_feature: MA Experiment 20001906 PARAMETER Experiment Name: At_Drought_Reproduction_P Parameter: Plant Line Value: WS
  misc_feature: MA Experiment 20001906 PARAMETER Experiment Name: At_Drought_Reproduction_P Parameter: Timepoint (day) Value: 5
  misc_feature: MA Experiment 20001906 PARAMETER Experiment Name: At_Drought_Reproduction_P Parameter: Tissue Value: Siliques
  misc_feature: MA Experiment 20001906 PARAMETER Experiment Name: At_Drought_Reproduction_P Parameter: Treatment Value: Drought vs. No Drought
  misc_feature: MA Experiment ID: 20001907 Result: Down-regulated in Transcription
  misc_feature: MA Experiment 20001907 PARAMETER Experiment Name: At_Drought_Reproduction_P Parameter: Age (day) Value: 37
  misc_feature: MA Experiment 20001907 PARAMETER Experiment Name: At_Drought_Reproduction_P Parameter: Organism Value: A. thaliana
  misc_feature: MA Experiment 20001907 PARAMETER Experiment Name: At_Drought_Reproduction_P Parameter: Plant Line Value: WS
  misc_feature: MA Experiment 20001907 PARAMETER Experiment Name: At_Drought_Reproduction_P Parameter: Timepoint (day) Value: 7
  misc_feature: MA Experiment 20001907 PARAMETER Experiment Name: At_Drought_Reproduction_P Parameter: Tissue Value: Siliques
  misc_feature: MA Experiment 20001907 PARAMETER Experiment Name: At_Drought_Reproduction_P Parameter: Treatment Value: Drought vs. No Drought
  misc_feature: MA Experiment ID: 20001908 Result: Down-regulated in Transcription
  misc_feature: MA Experiment 20001908 PARAMETER Experiment Name: At_Drought_Reproduction_P Parameter: Age (day) Value: 40
  misc_feature: MA Experiment 20001908 PARAMETER Experiment Name: At_Drought_Reproduction_P Parameter: Organism Value: A. thaliana
  misc_feature: MA Experiment 20001908 PARAMETER Experiment Name: At_Drought_Reproduction_P Parameter: Plant Line Value: WS
  misc_feature: MA Experiment 20001908 PARAMETER Experiment Name: At_Drought_Reproduction_P Parameter: Timepoint (day) Value: 10
  misc_feature: MA Experiment 20001908 PARAMETER Experiment Name: At_Drought_Reproduction_P Parameter: Tissue Value: Siliques
  misc_feature: MA Experiment 20001908 PARAMETER Experiment Name: At_Drought_Reproduction_P Parameter: Treatment Value: Drought vs. No Drought
  misc_feature: MA Experiment ID: 20001911 Result: Down-regulated in Transcription
  misc_feature: MA Experiment 20001911 PARAMETER Experiment Name: At_Drought_Reproduction_P Parameter: Age (day) Value: 40
  misc_feature: MA Experiment 20001911 PARAMETER Experiment Name: At_Drought_Reproduction_P Parameter: Organism Value: A. thaliana
  misc_feature: MA Experiment 20001911 PARAMETER Experiment Name: At_Drought_Reproduction_P Parameter: Plant Line Value: WS
  misc_feature: MA Experiment 20001911 PARAMETER Experiment Name: At_Drought_Reproduction_P Parameter: Timepoint (day) Value: 10
  misc_feature: MA Experiment 20001911 PARAMETER Experiment Name: At_Drought_Reproduction_P Parameter: Tissue Value: Flowers
  misc_feature: MA Experiment 20001911 PARAMETER Experiment Name: At_Drought_Reproduction_P Parameter: Treatment Value: Drought vs. No Drought

SEQ ID NO: 93385 - protein, 370 aa, Arabidopsis thaliana; identical to SEQ ID NO: 89629
  peptide (1)..(370): Ceres Seq. ID no. 12719801
  misc_feature (10)..(305): Pfam Name: Pectinacetylesterase Pfam Description: Pectinacetylesterase
  misc_feature (1)..(305): Homolog of NCBI NO: 15242357 NR Description: pectinacetylesterase, putative; protein id: supported by cDNA: 39005., supported by cDNA: gi_16323122 thaliana] >gi|10176999|dbj|BAB10249.1| pectin acetylesterase
  misc_feature (1)..(305): Homolog of NCBI NO: 21593445 NR Description: pectin acetylesterase [Arabidopsis thaliana]
  misc_feature (1)..(370): Homolog of NCBI NO: 30694729 NR Description: pectinacetylesterase, putative [Arabidopsis >gi|15810319|gb|AAL07047.1| putative pectin acetylesterase thaliana] >gi|23297554|gb|AAN12894.1| putative pectin
  misc_feature (4)..(305): Homolog of NCBI NO: 18415308 NR Description: pectinacetylesterase, putative; protein id: supported by cDNA: 34674., supported by cDNA: gi_15450901, by cDNA: gi_17978690 [Arabidopsis thaliana]
  misc_feature (5)..(305): Homolog of NCBI NO: 7488883 NR Description: pectin acetylesterase (EC 3.1.1.-) precursor - bean >gi|1431629|emb|CAA67728.1| pectinacetylesterase precursor
  misc_feature (3)..(305): Homolog of NCBI NO: 38344147 NR Description: OSJNBa0041A02.14 [Oryza sativa (japonica
  misc_feature (4)..(306): Homolog of NCBI NO: 22328797 NR Description: pectinacetylesterase family; protein id:
  misc_feature (126)..(305): Homolog of NCBI NO: 7488140 NR Description: probable pectin acetylesterase (EC 3.1.1.-) - thaliana >gi|3080371|emb|CAA18628.1| putative protein [Arabidopsis thaliana] >gi|7268736|emb|CAB78943.1|
  misc_feature (24)..(306): Homolog of NCBI NO: 15226462 NR Description: pectinacetylesterase, putative; protein id: supported by cDNA: gi_15450606 [Arabidopsis thaliana]
  misc_feature (24)..(305): Homolog of NCBI NO: 25347293 NR Description: probable pectinacetylesterase precursor T8L23.6 - Arabidopsis thaliana >gi|12321351|gb|AAG50747.1|AC079733_15

SEQ ID NO: 93386 - protein, 364 aa, Arabidopsis thaliana; identical to SEQ ID NO: 89630
  peptide (1)..(364): Ceres Seq. ID no. 12719802
  misc_feature (4)..(299): Pfam Name: Pectinacetylesterase Pfam Description: Pectinacetylesterase
  misc_feature (1)..(299): Homolog of NCBI NO: 15242357 NR Description: pectinacetylesterase, putative; protein id: supported by cDNA: 39005., supported by cDNA: gi_16323122 thaliana] >gi|10176999|dbj|BAB10249.1| pectin acetylesterase
  misc_feature (1)..(299): Homolog of NCBI NO: 21593445 NR Description: pectin acetylesterase [Arabidopsis thaliana]
  misc_feature (1)..(364): Homolog of NCBI NO: 30694729 NR Description: pectinacetylesterase, putative [Arabidopsis >gi|15810319|gb|AAL07047.1| putative pectin acetylesterase thaliana] >gi|23297554|gb|AAN12894.1| putative pectin
  misc_feature (1)..(299): Homolog of NCBI NO: 18415308 NR Description: pectinacetylesterase, putative; protein id: supported by cDNA: 34674., supported by cDNA: gi_15450901, by cDNA: gi_17978690 [Arabidopsis thaliana]
  misc_feature (1)..(299): Homolog of NCBI NO: 7488883 NR Description: pectin acetylesterase (EC 3.1.1.-) precursor - bean >gi|1431629|emb|CAA67728.1| pectinacetylesterase precursor
  misc_feature (1)..(299): Homolog of NCBI NO: 38344147 NR Description: OSJNBa0041A02.14 [Oryza sativa (japonica
  misc_feature (1)..(300): Homolog of NCBI NO: 22328797 NR Description: pectinacetylesterase family; protein id:
  misc_feature (120)..(299): Homolog of NCBI NO: 7488140 NR Description: probable pectin acetylesterase (EC 3.1.1.-) - thaliana >gi|3080371|emb|CAA18628.1| putative protein [Arabidopsis thaliana] >gi|7268736|emb|CAB78943.1|
  misc_feature (18)..(300): Homolog of NCBI NO: 15226462 NR Description: pectinacetylesterase, putative; protein id: supported by cDNA: gi_15450606 [Arabidopsis thaliana]
  misc_feature (18)..(299): Homolog of NCBI NO: 25347293 NR Description: probable pectinacetylesterase precursor T8L23.6 - Arabidopsis thaliana >gi|12321351|gb|AAG50747.1|AC079733_15

SEQ ID NO: 93387 - protein, 307 aa, Arabidopsis thaliana; identical to SEQ ID NO: 89631
  peptide (1)..(307): Ceres Seq. ID no. 12719803
  misc_feature (1)..(242): Pfam Name: Pectinacetylesterase Pfam Description: Pectinacetylesterase
  misc_feature (1)..(242): Homolog of NCBI NO: 15242357 NR Description: pectinacetylesterase, putative; protein id: supported by cDNA: 39005., supported by cDNA: gi_16323122 thaliana] >gi|10176999|dbj|BAB10249.1| pectin acetylesterase
  misc_feature (1)..(242): Homolog of NCBI NO: 21593445 NR Description: pectin acetylesterase [Arabidopsis thaliana]
  misc_feature (1)..(307): Homolog of NCBI NO: 30694729 NR Description: pectinacetylesterase, putative [Arabidopsis >gi|15810319|gb|AAL07047.1| putative pectin acetylesterase thaliana] >gi|23297554|gb|AAN12894.1| putative pectin
  misc_feature (1)..(242): Homolog of NCBI NO: 18415308 NR Description: pectinacetylesterase, putative; protein id: supported by cDNA: 34674., supported by cDNA: gi_15450901, by cDNA: gi_17978690 [Arabidopsis thaliana]
  misc_feature (1)..(242): Homolog of NCBI NO: 7488883 NR Description: pectin acetylesterase (EC 3.1.1.-) precursor - bean >gi|1431629|emb|CAA67728.1| pectinacetylesterase precursor
  misc_feature (1)..(242): Homolog of NCBI NO: 38344147 NR Description: OSJNBa0041A02.14 [Oryza sativa (japonica
  misc_feature (1)..(243): Homolog of NCBI NO: 22328797 NR Description: pectinacetylesterase family; protein id:
  misc_feature (63)..(242): Homolog of NCBI NO: 7488140 NR Description: probable pectin acetylesterase (EC 3.1.1.-) - thaliana >gi|3080371|emb|CAA18628.1| putative protein [Arabidopsis thaliana] >gi|7268736|emb|CAB78943.1|
  misc_feature (1)..(243): Homolog of NCBI NO: 15226462 NR Description: pectinacetylesterase, putative; protein id: supported by cDNA: gi_15450606 [Arabidopsis thaliana]
  misc_feature (1)..(242): Homolog of NCBI NO: 25347293 NR Description: probable pectinacetylesterase precursor T8L23.6 - Arabidopsis thaliana >gi|12321351|gb|AAG50747.1|AC079733_15

SEQ ID NO: 93388 - DNA, 893 bp, Arabidopsis thaliana; identical to SEQ ID NO: 89632
  misc_feature (1)..(893): Ceres Seq. ID no. 12719804
  misc_feature: MA Experiment ID: 108488 Result: Down-regulated in Transcription
  misc_feature: MA Experiment ID: 108595 Result: Down-regulated in Transcription
  misc_feature: MA Experiment 108595 PARAMETER Experiment Name: At_Ler-pi_Ovule_cDNA_P Parameter: Plant Line Value: null
  misc_feature: MA Experiment ID: 20000224 Result: Down-regulated in Transcription
  misc_feature: MA Experiment ID: 20000315 Result: Down-regulated in Transcription
  misc_feature: MA Experiment 20000315 PARAMETER Experiment Name: At_14day_Shoots-Roots_Sub_P Parameter: Age (day) Value: 14
  misc_feature: MA Experiment 20000315 PARAMETER Experiment Name: At_14day_Shoots-Roots_Sub_P Parameter: Organism Value: A. thaliana
  misc_feature: MA Experiment 20000315 PARAMETER Experiment Name: At_14day_Shoots-Roots_Sub_P Parameter: Plant Line Value: WS
  misc_feature: MA Experiment 20000315 PARAMETER Experiment Name: At_14day_Shoots-Roots_Sub_P Parameter: Tissue Value: Shoots vs. Whole Plant

SEQ ID NO: 93389 - protein, 236 aa, Arabidopsis thaliana; identical to SEQ ID NO: 36283
  peptide (1)..(236): Ceres Seq. ID no. 12719805
  misc_feature (50)..(234): Pfam Name: Mob1/phocein family Pfam Description: Mob1/phocein family
  misc_feature (22)..(236): Homolog of NCBI NO: 15242430 NR Description: putative protein; protein id: At5g45550.1, by cDNA: 27099., supported by cDNA: gi_15028014 [Arabidopsis
  misc_feature (22)..(236): Homolog of NCBI NO: 32470635 NR Description: putative Mob1/phocein family protein [Solanum
  misc_feature (22)..(236): Homolog of NCBI NO: 32470654 NR Description: unknown [Solanum bulbocastanum]
  misc_feature (22)..(236): Homolog of NCBI NO: 26449776 NR Description: unknown protein [Arabidopsis thaliana]
  misc_feature (30)..(236): Homolog of NCBI NO: 15234110 NR Description: putative protein; protein id: At4g19050.1
  misc_feature (22)..(233): Homolog of NCBI NO: 19309913 NR Description: Mob1-like protein [Medicago sativa subsp. falcata]
  misc_feature (29)..(234): Homolog of NCBI NO: 37534032 NR Description: putative F-box protein family [Oryza sativa
  misc_feature (44)..(233): Homolog of NCBI NO: 10800806 NR Description: hypothetical protein [Cicer arietinum]
  misc_feature (24)..(234): Homolog of NCBI NO: 28277885 NR Description: Similar to hypothetical protein LOC92597 [Danio
  misc_feature (24)..(234): Homolog of NCBI NO: 27735029 NR Description: hypothetical protein LOC92597 [Homo sapiens] RIKEN cDNA 1110003E08 [Mus musculus] >gi|23271309|gb|AAH38112.1|

SEQ ID NO: 93390 - protein, 215 aa, Arabidopsis thaliana; identical to SEQ ID NO: 36284
  peptide (1)..(215): Ceres Seq. ID no. 12719806
  misc_feature (29)..(213): Pfam Name: Mob1/phocein family Pfam Description: Mob1/phocein family
  misc_feature (1)..(215): Homolog of NCBI NO: 15242430 NR Description: putative protein; protein id: At5g45550.1, by cDNA: 27099., supported by cDNA: gi_15028014 [Arabidopsis
  misc_feature (1)..(215): Homolog of NCBI NO: 32470635 NR Description: putative Mob1/phocein family protein [Solanum
  misc_feature (1)..(215): Homolog of NCBI NO: 32470654 NR Description: unknown [Solanum bulbocastanum]
  misc_feature (1)..(215): Homolog of NCBI NO: 26449776 NR Description: unknown protein [Arabidopsis thaliana]
  misc_feature (9)..(215): Homolog of NCBI NO: 15234110 NR Description: putative protein; protein id: At4g19050.1
  misc_feature (1)..(212): Homolog of NCBI NO: 19309913 NR Description: Mob1-like protein [Medicago sativa subsp. falcata]
  misc_feature (8)..(213): Homolog of NCBI NO: 37534032 NR Description: putative F-box protein family [Oryza sativa
  misc_feature (23)..(212): Homolog of NCBI NO: 10800806 NR Description: hypothetical protein [Cicer arietinum]
  misc_feature (3)..(213): Homolog of NCBI NO: 28277885 NR Description: Similar to hypothetical protein LOC92597 [Danio
  misc_feature (3)..(213): Homolog of NCBI NO: 27735029 NR Description: hypothetical protein LOC92597 [Homo sapiens] RIKEN cDNA 1110003E08 [Mus musculus] >gi|23271309|gb|AAH38112.1|

SEQ ID NO: 93391 - protein, 129 aa, Arabidopsis thaliana; identical to SEQ ID NO: 36285
  peptide (1)..(129): Ceres Seq. ID no. 12719807
  misc_feature (1)..(127): Pfam Name: Mob1/phocein family Pfam Description: Mob1/phocein family
  misc_feature (1)..(129): Homolog of NCBI NO: 15242430 NR Description: putative protein; protein id: At5g45550.1, by cDNA: 27099., supported by cDNA: gi_15028014 [Arabidopsis
  misc_feature (1)..(129): Homolog of NCBI NO: 32470635 NR Description: putative Mob1/phocein family protein [Solanum
  misc_feature (1)..(129): Homolog of NCBI NO: 32470654 NR Description: unknown [Solanum bulbocastanum]
  misc_feature (1)..(129): Homolog of NCBI NO: 26449776 NR Description: unknown protein [Arabidopsis thaliana]
  misc_feature (1)..(129): Homolog of NCBI NO: 15234110 NR Description: putative protein; protein id: At4g19050.1
  misc_feature (1)..(126): Homolog of NCBI NO: 19309913 NR Description: Mob1-like protein [Medicago sativa subsp. falcata]
  misc_feature (1)..(127): Homolog of NCBI NO: 37534032 NR Description: putative F-box protein family [Oryza sativa
  misc_feature (1)..(126): Homolog of NCBI NO: 10800806 NR Description: hypothetical protein [Cicer arietinum]
  misc_feature (1)..(127): Homolog of NCBI NO: 28277885 NR Description: Similar to hypothetical protein LOC92597 [Danio
  misc_feature (1)..(127): Homolog of NCBI NO: 27735029 NR Description: hypothetical protein LOC92597 [Homo sapiens] RIKEN cDNA 1110003E08 [Mus musculus] >gi|23271309|gb|AAH38112.1|

SEQ ID NO: 93392 - DNA, 705 bp, Arabidopsis thaliana; identical to SEQ ID NO: 89636
  misc_feature (1)..(705): Ceres Seq. ID no. 12719816
  misc_feature: MA Experiment ID: 20000355 Result: Down-regulated in Transcription
  misc_feature: MA Experiment 20000355 PARAMETER Experiment Name: At_Siliques_Sub_P Parameter: Age (day) Value: 21
  misc_feature: MA Experiment 20000355 PARAMETER Experiment Name: At_Siliques_Sub_P Parameter: Organism Value: A. thaliana
  misc_feature: MA Experiment 20000355 PARAMETER Experiment Name: At_Siliques_Sub_P Parameter: Plant Line Value: WS
  misc_feature: MA Experiment 20000355 PARAMETER Experiment Name: At_Siliques_Sub_P Parameter: Tissue Value: Less Than 5mm Siliques vs. Whole Plant

SEQ ID NO: 93393 - protein, 173 aa, Arabidopsis thaliana; identical to SEQ ID NO: 89637
  peptide (1)..(173): Ceres Seq. ID no. 12719817
  misc_feature (48)..(173): Pfam Name: Ribosomal protein L14p/L23e Pfam Description: Ribosomal protein L14p/L23e
  misc_feature (1)..(173): Homolog of NCBI NO: 30694896 NR Description: ribosomal protein L14p family [Arabidopsis >gi|16604452|gb|AAL24232.1| AT5g46160/MCL19_22 [Arabidopsis >gi|18140860|gb|AAL60452.1|AF402993_1 HUELLENLOS PARALOG
  misc_feature (1)..(173): Homolog of NCBI NO: 30694900 NR Description: ribosomal protein L14p family [Arabidopsis
  misc_feature (1)..(173): Homolog of NCBI NO: 20260394 NR Description: unknown protein [Arabidopsis thaliana]
  misc_feature (50)..(173): Homolog of NCBI NO: 9757736 NR Description: 50S ribosomal protein L14 [Arabidopsis thaliana]
  misc_feature (1)..(172): Homolog of NCBI NO: 18140856 NR Description: HUELLENLOS-like protein [Oryza sativa]
  misc_feature (1)..(136): Homolog of NCBI NO: 8778471 NR Description: F1L3.27 [Arabidopsis thaliana]
  misc_feature (1)..(136): Homolog of NCBI NO: 15220161 NR Description: ribosomal protein, putative; protein id: supported by cDNA: 28484. [Arabidopsis thaliana]
  misc_feature (1)..(136): Homolog of NCBI NO: 18140858 NR Description: HUELLENLOS [Arabidopsis thaliana]
  misc_feature (26)..(136): Homolog of NCBI NO: 21555596 NR Description: ribosomal protein, putative [Arabidopsis thaliana]
  misc_feature (48)..(172): Homolog of NCBI NO: 15889233 NR Description: AGR_C_3539p [Agrobacterium tumefaciens] >gi|25295210|pir||B97593 hypothetical protein AGR_C_3539

SEQ ID NO: 93394 - protein, 148 aa, Arabidopsis thaliana; identical to SEQ ID NO: 89638
  peptide (1)..(148): Ceres Seq. ID no. 12719818
  misc_feature (23)..(148): Pfam Name: Ribosomal protein L14p/L23e Pfam Description: Ribosomal protein L14p/L23e
  misc_feature (1)..(148): Homolog of NCBI NO: 30694896 NR Description: ribosomal protein L14p family [Arabidopsis >gi|16604452|gb|AAL24232.1| AT5g46160/MCL19_22 [Arabidopsis >gi|18140860|gb|AAL60452.1|AF402993_1 HUELLENLOS PARALOG
  misc_feature (1)..(148): Homolog of NCBI NO: 30694900 NR Description: ribosomal protein L14p family [Arabidopsis
  misc_feature (1)..(148): Homolog of NCBI NO: 20260394 NR Description: unknown protein [Arabidopsis thaliana]
  misc_feature (25)..(148): Homolog of NCBI NO: 9757736 NR Description: 50S ribosomal protein L14 [Arabidopsis thaliana]
  misc_feature (1)..(147): Homolog of NCBI NO: 18140856 NR Description: HUELLENLOS-like protein [Oryza sativa]
  misc_feature (1)..(111): Homolog of NCBI NO: 8778471 NR Description: F1L3.27 [Arabidopsis thaliana]
  misc_feature (1)..(111): Homolog of NCBI NO: 15220161 NR Description: ribosomal protein, putative; protein id: supported by cDNA: 28484. [Arabidopsis thaliana]
  misc_feature (1)..(111): Homolog of NCBI NO: 18140858 NR Description: HUELLENLOS [Arabidopsis thaliana]
  misc_feature (1)..(111): Homolog of NCBI NO: 21555596 NR Description: ribosomal protein, putative [Arabidopsis thaliana]
  misc_feature (23)..(147): Homolog of NCBI NO: 15889233 NR Description: AGR_C_3539p [Agrobacterium tumefaciens] >gi|25295210|pir||B97593 hypothetical protein AGR_C_3539

SEQ ID NO: 93395 - protein, 142 aa, Arabidopsis thaliana; identical to SEQ ID NO: 89639
  peptide (1)..(142): Ceres Seq. ID no. 12719819
  misc_feature (17)..(142): Pfam Name: Ribosomal protein L14p/L23e Pfam Description: Ribosomal protein L14p/L23e
  misc_feature (1)..(142): Homolog of NCBI NO: 30694896 NR Description: ribosomal protein L14p family [Arabidopsis >gi|16604452|gb|AAL24232.1| AT5g46160/MCL19_22 [Arabidopsis >gi|18140860|gb|AAL60452.1|AF402993_1 HUELLENLOS PARALOG
  misc_feature (1)..(142): Homolog of NCBI NO: 30694900 NR Description: ribosomal protein L14p family [Arabidopsis
  misc_feature (1)..(142): Homolog of NCBI NO: 20260394 NR Description: unknown protein [Arabidopsis thaliana]
  misc_feature (19)..(142): Homolog of NCBI NO: 9757736 NR Description: 50S ribosomal protein L14 [Arabidopsis thaliana]
  misc_feature (1)..(141): Homolog of NCBI NO: 18140856 NR Description: HUELLENLOS-like protein [Oryza sativa]
  misc_feature (1)..(105): Homolog of NCBI NO: 8778471 NR Description: F1L3.27 [Arabidopsis thaliana]
  misc_feature (1)..(105): Homolog of NCBI NO: 15220161 NR Description: ribosomal protein, putative; protein id: supported by cDNA: 28484. [Arabidopsis thaliana]
  misc_feature (1)..(105): Homolog of NCBI NO: 18140858 NR Description: HUELLENLOS [Arabidopsis thaliana]
  misc_feature (1)..(105): Homolog of NCBI NO: 21555596 NR Description: ribosomal protein, putative [Arabidopsis thaliana]
  misc_feature (17)..(141): Homolog of NCBI NO: 15889233 NR Description: AGR_C_3539p [Agrobacterium tumefaciens] >gi|25295210|pir||B97593 hypothetical protein AGR_C_3539

SEQ ID NO: 93396 - DNA, 853 bp, Arabidopsis thaliana; identical to SEQ ID NO: 89640
  misc_feature (1)..(853): Ceres Seq. ID no. 12719820
  misc_feature: MA Experiment ID: 108463 Result: Up-regulated in Transcription
  misc_feature: MA Experiment 108463 PARAMETER Experiment Name: At_Germinating_Seeds_cDNA_P Parameter: Age (day) Value: 3 vs. 0
  misc_feature: MA Experiment 108463 PARAMETER Experiment Name: At_Germinating_Seeds_cDNA_P Parameter: Tissue Value: Germinating Seeds
  misc_feature: MA Experiment ID: 108464 Result: Up-regulated in Transcription
  misc_feature: MA Experiment 108464 PARAMETER Experiment Name: At_Germinating_Seeds_cDNA_P Parameter: Age (day) Value: 4 vs. 0
  misc_feature: MA Experiment 108464 PARAMETER Experiment Name: At_Germinating_Seeds_cDNA_P Parameter: Tissue Value: Germinating Seeds
  misc_feature: MA Experiment ID: 108607 Result: Up-regulated in Transcription
  misc_feature: MA Experiment 108607 PARAMETER Experiment Name: At_100uM_ABA_cDNA_P Parameter: Timepoint (hr) Value: 4
  misc_feature: MA Experiment 108607 PARAMETER Experiment Name: At_100uM_ABA_cDNA_P Parameter: Tissue Value: Aerial
  misc_feature: MA Experiment 108607 PARAMETER Experiment Name: At_100uM_ABA_cDNA_P Parameter: Treatment Value: 100uM ABA vs. No Treatment
  misc_feature: MA Experiment ID: 20000113 Result: Down-regulated in Transcription
  misc_feature: MA Experiment 20000113 PARAMETER Experiment Name: At_42deg_Heat_cDNA_P Parameter: Temperature (deg C) Value: 42 vs. 22
  misc_feature: MA Experiment 20000113 PARAMETER Experiment Name: At_42deg_Heat_cDNA_P Parameter: Timepoint (hr) Value: 8
  misc_feature: MA Experiment 20000113 PARAMETER Experiment Name: At_42deg_Heat_cDNA_P Parameter: Tissue Value: Aerial
  misc_feature: MA Experiment ID: 20000173 Result: Down-regulated in Transcription
  misc_feature: MA Experiment 20000173 PARAMETER Experiment Name: At_42deg_Heat_P Parameter: Age (day) Value: 14
  misc_feature: MA Experiment 20000173 PARAMETER Experiment Name: At_42deg_Heat_P Parameter: Organism Value: A. thaliana
  misc_feature: MA Experiment 20000173 PARAMETER Experiment Name: At_42deg_Heat_P Parameter: Plant Line Value: WS
  misc_feature: MA Experiment 20000173 PARAMETER Experiment Name: At_42deg_Heat_P Parameter: Temperature (deg C) Value: 42 vs. 22
  misc_feature: MA Experiment 20000173 PARAMETER Experiment Name: At_42deg_Heat_P Parameter: Timepoint (hr) Value: 6
  misc_feature: MA Experiment 20000173 PARAMETER Experiment Name: At_42deg_Heat_P Parameter: Tissue Value: Aerial
  misc_feature: MA Experiment ID: 20000179 Result: Up-regulated in Transcription
  misc_feature: MA Experiment 20000179 PARAMETER Experiment Name: At_Germinating_Seeds_P Parameter: Age (hr) Value: 6 vs. 0
  misc_feature: MA Experiment 20000179 PARAMETER Experiment Name: At_Germinating_Seeds_P Parameter: Tissue Value: Germinating Seeds
  misc_feature: MA Experiment ID: 20000180 Result: Up-regulated in Transcription
  misc_feature: MA Experiment 20000180 PARAMETER Experiment Name: At_Germinating_Seeds_P Parameter: Age (hr) Value: 24 vs. 0
  misc_feature: MA Experiment 20000180 PARAMETER Experiment Name: At_Germinating_Seeds_P Parameter: Tissue Value: Germinating Seeds
  misc_feature: MA Experiment ID: 20000184 Result: Down-regulated in Transcription
  misc_feature: MA Experiment 20000184 PARAMETER Experiment Name: At_Shoots__P Parameter: Age (day) Value: 7
  misc_feature: MA Experiment 20000184 PARAMETER Experiment Name: At_Shoots__P Parameter: Tissue Value: Shoots vs. Whole Plant
  misc_feature: MA Experiment ID: 20000224 Result: Up-regulated in Transcription
  misc_feature: MA Experiment ID: 20000264 Result: Up-regulated in Transcription
  misc_feature: MA Experiment 20000264 PARAMETER Experiment Name: At_Open_Flower_P Parameter: Age (day) Value: 21
  misc_feature: MA Experiment 20000264 PARAMETER Experiment Name: At_Open_Flower_P Parameter: Plant Line Value: WS
  misc_feature: MA Experiment 20000264 PARAMETER Experiment Name: At_Open_Flower_P Parameter: Tissue Value: Open Flower vs. Whole Plant
  misc_feature: MA Experiment ID: 20000286 Result: Up-regulated in Transcription
  misc_feature: MA Experiment 20000286 PARAMETER Experiment Name: At_Open_Flower_P Parameter: Age (day) Value: 21
  misc_feature: MA Experiment 20000286 PARAMETER Experiment Name: At_Open_Flower_P Parameter: Plant Line Value: WS
  misc_feature: MA Experiment 20000286 PARAMETER Experiment Name: At_Open_Flower_P Parameter: Tissue Value: Half Open vs. Whole Plant
  misc_feature: MA Experiment ID: 20000573 Result: Down-regulated in Transcription
  misc_feature: MA Experiment 20000573 PARAMETER Experiment Name: At_100uM_ABA_Mutants__P Parameter: Organism Value: A. thaliana
  misc_feature: MA Experiment 20000573 PARAMETER Experiment Name: At_100uM_ABA_Mutants__P Parameter: Plant Line Value: CS22 vs. Ler wt
  misc_feature: MA Experiment 20000573 PARAMETER Experiment Name: At_100uM_ABA_Mutants__P Parameter: Timepoint (hr) Value: N/A
  misc_feature: MA Experiment 20000573 PARAMETER Experiment Name: At_100uM_ABA_Mutants__P Parameter: Tissue Value: Whole Plant
  misc_feature: MA Experiment 20000573 PARAMETER Experiment Name: At_100uM_ABA_Mutants__P Parameter: Treatment Value: None
  misc_feature: MA Experiment ID: 20000574 Result: Down-regulated in Transcription
  misc_feature: MA Experiment 20000574 PARAMETER Experiment Name: At_100uM_ABA_Mutants__P Parameter: Organism Value: A. thaliana
  misc_feature: MA Experiment 20000574 PARAMETER Experiment Name: At_100uM_ABA_Mutants__P Parameter: Plant Line Value: CS23 vs. Ler wt
  misc_feature: MA Experiment 20000574 PARAMETER Experiment Name: At_100uM_ABA_Mutants__P Parameter: Timepoint (hr) Value: N/A
  misc_feature: MA Experiment 20000574 PARAMETER Experiment Name: At_100uM_ABA_Mutants__P Parameter: Tissue Value: Whole Plant
  misc_feature: MA Experiment 20000574 PARAMETER Experiment Name: At_100uM_ABA_Mutants__P Parameter: Treatment Value: None
  misc_feature: MA Experiment ID: 20000794 Result: Up-regulated in Transcription
  misc_feature: MA Experiment 20000794 PARAMETER Experiment Name: At_Petals_P Parameter: Age (day) Value: 23-25 days
  misc_feature: MA Experiment 20000794 PARAMETER Experiment Name: At_Petals_P Parameter: Plant Line Value: WS
  misc_feature: MA Experiment 20000794 PARAMETER Experiment Name: At_Petals_P Parameter: Tissue Value: Petals vs. Whole plant
  misc_feature: MA Experiment ID: 20001911 Result: Down-regulated in Transcription
  misc_feature: MA Experiment 20001911 PARAMETER Experiment Name: At_Drought_Reproduction_P Parameter: Age (day) Value: 40
  misc_feature: MA Experiment 20001911 PARAMETER Experiment Name: At_Drought_Reproduction_P Parameter: Organism Value: A. thaliana
  misc_feature: MA Experiment 20001911 PARAMETER Experiment Name: At_Drought_Reproduction_P Parameter: Plant Line Value: WS
  misc_feature: MA Experiment 20001911 PARAMETER Experiment Name: At_Drought_Reproduction_P Parameter: Timepoint (day) Value: 10
  misc_feature: MA Experiment 20001911 PARAMETER Experiment Name: At_Drought_Reproduction_P Parameter: Tissue Value: Flowers
  misc_feature: MA Experiment 20001911 PARAMETER Experiment Name: At_Drought_Reproduction_P Parameter: Treatment Value: Drought vs. No Drought

SEQ ID NO: 93397 - protein, 222 aa, Arabidopsis thaliana; identical to SEQ ID NO: 74452
  peptide (1)..(222): Ceres Seq. ID no. 12719821
  misc_feature (32)..(170): Pfam Name: NUDIX domain Pfam Description: NUDIX domain
  misc_feature (1)..(222): Homolog of NCBI NO: 15242543 NR Description: putative protein; protein id: At5g45940.1, by cDNA: 141753. [Arabidopsis thaliana] gb|AAF24540.1~gene_id:K15I22.14~similar to unknown protein
  misc_feature (1)..(222): Homolog of NCBI NO: 21553389 NR Description: unknown [Arabidopsis thaliana]
  misc_feature (29)..(217): Homolog of NCBI NO: 18396900 NR Description: Expressed protein; protein id: At1g28960.1,
  misc_feature (29)..(217): Homolog of NCBI NO: 30690557 NR Description: MutT/nudix family protein [Arabidopsis thaliana]
  misc_feature (29)..(217): Homolog of NCBI NO: 26450576 NR Description: unknown protein [Arabidopsis thaliana]
  misc_feature (29)..(217): Homolog of NCBI NO: 10764850 NR Description: F1K23.5 [Arabidopsis thaliana]
  misc_feature (29)..(216): Homolog of NCBI NO: 18403412 NR Description: expressed protein; protein id: At2g33980.1, by cDNA: gi_13430755, supported by cDNA: gi_15293224 [Arabidopsis >gi|13430756|gb|AAK26000.1|AF360290_1 unknown protein
  misc_feature (29)..(221): Homolog of NCBI NO: 40253324 NR Description: putative phosphohydrolase [Oryza sativa (japonica group)] >gi|40253358|dbj|BAD05290.1| putative phosphohydrolase
  misc_feature (27)..(204): Homolog of NCBI NO: 23470438 NR Description: hypothetical protein [Pseudomonas syringae pv.
  misc_feature (28)..(211): Homolog of NCBI NO: 18859595 NR Description: nudix (nucleoside diphosphate linked moiety motif 7; RIKEN cDNA 1300007B24 gene; RIKEN cDNA 2210404C19 gene; A diphosphatase [Mus musculus]

SEQ ID NO: 93398 - DNA, 900 bp, Arabidopsis thaliana; identical to SEQ ID NO: 89642
  misc_feature (1)..(900): Ceres Seq. ID no. 12719830
  misc_feature: MA Experiment ID: 20000173 Result: Up-regulated in Transcription
  misc_feature: MA Experiment 20000173 PARAMETER Experiment Name: At_42deg_Heat_P Parameter: Age (day) Value: 14
  misc_feature: MA Experiment 20000173 PARAMETER Experiment Name: At_42deg_Heat_P Parameter: Organism Value: A. thaliana
  misc_feature: MA Experiment 20000173 PARAMETER Experiment Name: At_42deg_Heat_P Parameter: Plant Line Value: WS
  misc_feature: MA Experiment 20000173 PARAMETER Experiment Name: At_42deg_Heat_P Parameter: Temperature (deg C) Value: 42 vs. 22
  misc_feature: MA Experiment 20000173 PARAMETER Experiment Name: At_42deg_Heat_P Parameter: Timepoint (hr) Value: 6
  misc_feature: MA Experiment 20000173 PARAMETER Experiment Name: At_42deg_Heat_P Parameter: Tissue Value: Aerial
  misc_feature: MA Experiment ID: 20000182 Result: Up-regulated in Transcription
  misc_feature: MA Experiment 20000182 PARAMETER Experiment Name: At_2mM_SA_P Parameter: Age (day) Value: 14
  misc_feature: MA Experiment 20000182 PARAMETER Experiment Name: At_2mM_SA_P Parameter: Organism Value: A. thaliana
  misc_feature: MA Experiment 20000182 PARAMETER Experiment Name: At_2mM_SA_P Parameter: Plant Line Value: WS
  misc_feature: MA Experiment 20000182 PARAMETER Experiment Name: At_2mM_SA_P Parameter: Timepoint (hr) Value: 6
  misc_feature: MA Experiment 20000182 PARAMETER Experiment Name: At_2mM_SA_P Parameter: Tissue Value: Aerial
  misc_feature: MA Experiment 20000182 PARAMETER Experiment Name: At_2mM_SA_P Parameter: Treatment Value: 2mM SA vs. No Treatment
  misc_feature: MA Experiment ID: 20000184 Result: Down-regulated in Transcription
  misc_feature: MA Experiment 20000184 PARAMETER Experiment Name: At_Shoots__P Parameter: Age (day) Value: 7
  misc_feature: MA Experiment 20000184 PARAMETER Experiment Name: At_Shoots__P Parameter: Tissue Value: Shoots vs. Whole Plant
  misc_feature: MA Experiment ID: 20000234 Result: Down-regulated in Transcription
  misc_feature: MA Experiment 20000234 PARAMETER Experiment Name: At_Siliques_P Parameter: Age (day) Value: 21
  misc_feature: MA Experiment 20000234 PARAMETER Experiment Name: At_Siliques_P Parameter: Organism Value: A. thaliana
  misc_feature: MA Experiment 20000234 PARAMETER Experiment Name: At_Siliques_P Parameter: Plant Line Value: WS
  misc_feature: MA Experiment 20000234 PARAMETER Experiment Name: At_Siliques_P Parameter: Tissue Value: Less Than 5mm Siliques vs. Whole Plant
  misc_feature: MA Experiment ID: 20000264 Result: Down-regulated in Transcription
  misc_feature: MA Experiment 20000264 PARAMETER Experiment Name: At_Open_Flower_P Parameter: Age (day) Value: 21
  misc_feature: MA Experiment 20000264 PARAMETER Experiment Name: At_Open_Flower_P Parameter: Plant Line Value: WS
  misc_feature: MA Experiment 20000264 PARAMETER Experiment Name: At_Open_Flower_P Parameter: Tissue Value: Open Flower vs. Whole Plant
  misc_feature: MA Experiment ID: 20000265 Result: Down-regulated in Transcription
  misc_feature: MA Experiment 20000265 PARAMETER Experiment Name: At_Open_Flower_P Parameter: Age (day) Value: 21
  misc_feature: MA Experiment 20000265 PARAMETER Experiment Name: At_Open_Flower_P Parameter: Plant Line Value: WS
  misc_feature: MA Experiment 20000265 PARAMETER Experiment Name: At_Open_Flower_P Parameter: Tissue Value: Closed Flower vs. Whole Plant
  misc_feature: MA Experiment ID: 20000286 Result: Down-regulated in Transcription
  misc_feature: MA Experiment 20000286 PARAMETER Experiment Name: At_Open_Flower_P Parameter: Age (day) Value: 21
  misc_feature: MA Experiment 20000286 PARAMETER Experiment Name: At_Open_Flower_P Parameter: Plant Line Value: WS
  misc_feature: MA Experiment 20000286 PARAMETER Experiment Name: At_Open_Flower_P Parameter: Tissue Value: Half Open vs. Whole Plant
  misc_feature: MA Experiment ID: 20001558 Result: Down-regulated in Transcription
  misc_feature: MA Experiment 20001558 PARAMETER Experiment Name: At_Drought_Soil_Dry_P Parameter: Age (day) Value: 27
  misc_feature: MA Experiment 20001558 PARAMETER Experiment Name: At_Drought_Soil_Dry_P Parameter: Organism Value: A. thaliana
  misc_feature: MA Experiment 20001558 PARAMETER Experiment Name: At_Drought_Soil_Dry_P Parameter: Plant Line Value: WS
  misc_feature: MA Experiment 20001558 PARAMETER Experiment Name: At_Drought_Soil_Dry_P Parameter: Post Timepoint (hr) Value: 6
  misc_feature: MA Experiment 20001558 PARAMETER Experiment Name: At_Drought_Soil_Dry_P Parameter: Post-Treatment Value: Re-Water vs. No Drought
  misc_feature: MA Experiment 20001558 PARAMETER Experiment Name: At_Drought_Soil_Dry_P Parameter: Timepoint (day) Value: 13
  misc_feature: MA Experiment 20001558 PARAMETER Experiment Name: At_Drought_Soil_Dry_P Parameter: Treatment Value: Drought vs. No Drought

SEQ ID NO: 93399 - protein, 251 aa, Arabidopsis thaliana; identical to SEQ ID NO: 89643
  peptide (1)..(251): Ceres Seq. ID no. 12719831
  misc_feature (26)..(111): Pfam Name: RNA recognition motif. (a.k.a. RRM, RBD, or RNP domain) Pfam Description: RNA recognition motif. (a.k.a. RRM, RBD, or RNP
  misc_feature (1)..(251): Homolog of NCBI NO: 30694926 NR Description: RNA recognition motif (RRM)-containing protein
  misc_feature (1)..(251): Homolog of NCBI NO: 10177706 NR Description: contains similarity to RNA-binding
  misc_feature (1)..(251): Homolog of NCBI NO: 30694922 NR Description: RNA recognition motif (RRM)-containing protein thaliana] >gi|15215748|gb|AAK91419.1| AT5g46250/MPL12_3 thaliana] >gi|23308375|gb|AAN18157.1| At5g46250/MPL12_3
  misc_feature (1)..(237): Homolog of NCBI NO: 15230287 NR Description: RNA-binding protein, putative; protein id:
  misc_feature (1)..(239): Homolog of NCBI NO: 34394175 NR Description: putative RNA-binding protein homolog [Oryza
  misc_feature (1)..(238): Homolog of NCBI NO: 34909652 NR Description: RNA-binding protein-like [Oryza sativa (japonica
  misc_feature (2)..(241): Homolog of NCBI NO: 15724224 NR Description: At2g43970/F6E13.10 [Arabidopsis thaliana]
  misc_feature (2)..(241): Homolog of NCBI NO: 18406414 NR Description: VirF-interacting protein FIP1; protein id: supported by cDNA: gi_12744918, supported by cDNA: gi_14030638,
  misc_feature (1)..(130): Homolog of NCBI NO: 6449448 NR Description: RNA-binding protein homolog [Brassica napus]
  misc_feature (1)..(124): Homolog of NCBI NO: 34896588 NR Description: putative RNA-binding protein [Oryza sativa]

SEQ ID NO: 93400 - DNA, 1469 bp, Arabidopsis thaliana; identical to SEQ ID NO: 89644
  misc_feature (1)..(1469): Ceres Seq. ID no. 12719838
  misc_feature: MA Experiment ID: 108433 Result: Down-regulated in Transcription
  misc_feature: MA Experiment 108433 PARAMETER Experiment Name: At_rhl_Mutant2_cDNA_P Parameter: Age (day) Value: 7
  misc_feature: MA Experiment 108433 PARAMETER Experiment Name: At_rhl_Mutant2_cDNA_P Parameter: Organism Value: A. thaliana
  misc_feature: MA Experiment 108433 PARAMETER Experiment Name: At_rhl_Mutant2_cDNA_P Parameter: Plant Line Value: rhl Mutant vs. wt landsburg
  misc_feature: MA Experiment 108433 PARAMETER Experiment Name: At_rhl_Mutant2_cDNA_P Parameter: Tissue Value: Roots
  misc_feature: MA Experiment ID: 20000315 Result: Down-regulated in Transcription
  misc_feature: MA Experiment 20000315 PARAMETER Experiment Name: At_14day_Shoots-Roots_Sub_P Parameter: Age (day) Value: 14
  misc_feature: MA Experiment 20000315 PARAMETER Experiment Name: At_14day_Shoots-Roots_Sub_P Parameter: Organism Value: A. thaliana
  misc_feature: MA Experiment 20000315 PARAMETER Experiment Name: At_14day_Shoots-Roots_Sub_P Parameter: Plant Line Value: WS
  misc_feature: MA Experiment 20000315 PARAMETER Experiment Name: At_14day_Shoots-Roots_Sub_P Parameter: Tissue Value: Shoots vs. Whole Plant
  misc_feature: MA Experiment ID: 20000328 Result: Down-regulated in Transcription
  misc_feature: MA Experiment 20000328 PARAMETER Experiment Name: At_42deg_Heat_Sub_P Parameter: Age (day) Value: 14
  misc_feature: MA Experiment 20000328 PARAMETER Experiment Name: At_42deg_Heat_Sub_P Parameter: Organism Value: A. thaliana
  misc_feature: MA Experiment 20000328 PARAMETER Experiment Name: At_42deg_Heat_Sub_P Parameter: Plant Line Value: WS
  misc_feature: MA Experiment 20000328 PARAMETER Experiment Name: At_42deg_Heat_Sub_P Parameter: Temperature (deg C) Value: 42 vs. 22
  misc_feature: MA Experiment 20000328 PARAMETER Experiment Name: At_42deg_Heat_Sub_P Parameter: Timepoint (hr) Value: 6
  misc_feature: MA Experiment 20000328 PARAMETER Experiment Name: At_42deg_Heat_Sub_P Parameter: Tissue Value: Aerial

SEQ ID NO: 93401 - protein, 431 aa, Arabidopsis thaliana; identical to SEQ ID NO: 89645
  peptide (1)..(431): Ceres Seq. ID no. 12719839
  misc_feature (39)..(155): Pfam Name: Putative GTPase activating protein for Arf Pfam Description: Putative GTPase activating protein for Arf
  misc_feature (30)..(431): Homolog of NCBI NO: 15237500 NR Description: zinc finger protein Glo3-like; protein id:
  misc_feature (28)..(431): Homolog of NCBI NO: 7487780 NR Description: hypothetical protein T6K21.70 - Arabidopsis >gi|2894598|emb|CAA17132.1| putative protein [Arabidopsis >gi|7268541|emb|CAB78791.1| putative protein [Arabidopsis
  misc_feature (28)..(431): Homolog of NCBI NO: 18414983 NR Description: Expressed protein; protein id: At4g17890.1 thaliana] >gi|24030421|gb|AAN41368.1| unknown protein
  misc_feature (28)..(431): Homolog of NCBI NO: 13430530 NR Description: unknown protein [Arabidopsis thaliana]
  misc_feature (30)..(431): Homolog of NCBI NO: 37537094 NR Description: unknown protein [Oryza sativa (japonica
  misc_feature (30)..(423): Homolog of NCBI NO: 18403775 NR Description: expressed protein; protein id: At2g35210.1, by cDNA: 159093. [Arabidopsis thaliana] >gi|25408361|pir||H84765
  misc_feature (30)..(431): Homolog of NCBI NO: 29126345 NR Description: putative zinc finger protein [Oryza sativa
  misc_feature (180)..(429): Homolog of NCBI NO: 37362182 NR Description: ADP-ribosylation factor GTPase activating protein
  misc_feature (39)..(183): Homolog of NCBI NO: 37362182 NR Description: ADP-ribosylation factor GTPase activating protein
  misc_feature (217)..(429): Homolog of NCBI NO: 14042190 NR Description: unnamed protein product [Homo sapiens]

SEQ ID NO: 93402 - protein, 402 aa, Arabidopsis thaliana; identical to SEQ ID NO: 78261
  peptide (1)..(402): Ceres Seq. ID no. 12719840
  misc_feature (10)..(126): Pfam Name: Putative GTPase activating protein for Arf Pfam Description: Putative GTPase activating protein for Arf
  misc_feature (1)..(402): Homolog of NCBI NO: 15237500 NR Description: zinc finger protein Glo3-like; protein id:
  misc_feature (1)..(402): Homolog of NCBI NO: 7487780 NR Description: hypothetical protein T6K21.70 - Arabidopsis >gi|2894598|emb|CAA17132.1| putative protein [Arabidopsis >gi|7268541|emb|CAB78791.1| putative protein [Arabidopsis
  misc_feature (1)..(402): Homolog of NCBI NO: 18414983 NR Description: Expressed protein; protein id: At4g17890.1 thaliana] >gi|24030421|gb|AAN41368.1| unknown protein
  misc_feature (1)..(402): Homolog of NCBI NO: 13430530 NR Description: unknown protein [Arabidopsis thaliana]
  misc_feature (1)..(402): Homolog of NCBI NO: 37537094 NR Description: unknown protein [Oryza sativa (japonica
  misc_feature (1)..(394): Homolog of NCBI NO: 18403775 NR Description: expressed protein; protein id: At2g35210.1, by cDNA: 159093. [Arabidopsis thaliana] >gi|25408361|pir||H84765
  misc_feature (1)..(402): Homolog of NCBI NO: 29126345 NR Description: putative zinc finger protein [Oryza sativa
  misc_feature (151)..(400): Homolog of NCBI NO: 37362182 NR Description: ADP-ribosylation factor GTPase activating protein
  misc_feature (10)..(154): Homolog of NCBI NO: 37362182 NR Description: ADP-ribosylation factor GTPase activating protein
  misc_feature (188)..(400): Homolog of NCBI NO: 14042190 NR Description: unnamed protein product [Homo sapiens]

SEQ ID NO: 93403 - protein, 325 aa, Arabidopsis thaliana; identical to SEQ ID NO: 78262
  peptide (1)..(325): Ceres Seq. ID no. 12719841
  misc_feature (1)..(325): Homolog of NCBI NO: 15237500 NR Description: zinc finger protein Glo3-like; protein id:
  misc_feature (1)..(325): Homolog of NCBI NO: 7487780 NR Description: hypothetical protein T6K21.70 - Arabidopsis >gi|2894598|emb|CAA17132.1| putative protein [Arabidopsis >gi|7268541|emb|CAB78791.1| putative protein [Arabidopsis
  misc_feature (1)..(325): Homolog of NCBI NO: 18414983 NR Description: Expressed protein; protein id: At4g17890.1 thaliana] >gi|24030421|gb|AAN41368.1| unknown protein
  misc_feature (1)..(325): Homolog of NCBI NO: 13430530 NR Description: unknown protein [Arabidopsis thaliana]
  misc_feature (1)..(325): Homolog of NCBI NO: 37537094 NR Description: unknown protein [Oryza sativa (japonica
  misc_feature (1)..(317): Homolog of NCBI NO: 18403775 NR Description: expressed protein; protein id: At2g35210.1, by cDNA: 159093. [Arabidopsis thaliana] >gi|25408361|pir||H84765
  misc_feature (1)..(325): Homolog of NCBI NO: 29126345 NR Description: putative zinc finger protein [Oryza sativa
  misc_feature (74)..(323): Homolog of NCBI NO: 37362182 NR Description: ADP-ribosylation factor GTPase activating protein
  misc_feature (1)..(77): Homolog of NCBI NO: 37362182 NR Description: ADP-ribosylation factor GTPase activating protein
  misc_feature (111)..(323): Homolog of NCBI NO: 14042190 NR Description: unnamed protein product [Homo sapiens]

SEQ ID NO: 93404 - DNA, 1686 bp, Arabidopsis thaliana; identical to SEQ ID NO: 89648
  misc_feature (1)..(1686): Ceres Seq. ID no. 12719842
  misc_feature: MA Experiment ID: 20000173 Result: Down-regulated in Transcription
  misc_feature: MA Experiment 20000173 PARAMETER Experiment Name: At_42deg_Heat_P Parameter: Age (day) Value: 14
  misc_feature: MA Experiment 20000173 PARAMETER Experiment Name: At_42deg_Heat_P Parameter: Organism Value: A. thaliana
  misc_feature: MA Experiment 20000173 PARAMETER Experiment Name: At_42deg_Heat_P Parameter: Plant Line Value: WS
  misc_feature: MA Experiment 20000173 PARAMETER Experiment Name: At_42deg_Heat_P Parameter: Temperature (deg C) Value: 42 vs. 22
  misc_feature: MA Experiment 20000173 PARAMETER Experiment Name: At_42deg_Heat_P Parameter: Timepoint (hr) Value: 6
  misc_feature: MA Experiment 20000173 PARAMETER Experiment Name: At_42deg_Heat_P Parameter: Tissue Value: Aerial
  misc_feature: MA Experiment ID: 20000184 Result: Down-regulated in Transcription
  misc_feature: MA Experiment 20000184 PARAMETER Experiment Name: At_Shoots__P Parameter: Age (day) Value: 7
  misc_feature: MA Experiment 20000184 PARAMETER Experiment Name: At_Shoots__P Parameter: Tissue Value: Shoots vs. Whole Plant
  misc_feature: MA Experiment ID: 20000234 Result: Down-regulated in Transcription
  misc_feature: MA Experiment 20000234 PARAMETER Experiment Name: At_Siliques_P Parameter: Age (day) Value: 21
  misc_feature: MA Experiment 20000234 PARAMETER Experiment Name: At_Siliques_P Parameter: Organism Value: A. thaliana
  misc_feature: MA Experiment 20000234 PARAMETER Experiment Name: At_Siliques_P Parameter: Plant Line Value: WS
  misc_feature: MA Experiment 20000234 PARAMETER Experiment Name: At_Siliques_P Parameter: Tissue Value: Less Than 5mm Siliques vs. Whole Plant
  misc_feature: MA Experiment ID: 20000264 Result: Down-regulated in Transcription
  misc_feature: MA Experiment 20000264 PARAMETER Experiment Name: At_Open_Flower_P Parameter: Age (day) Value: 21
  misc_feature: MA Experiment 20000264 PARAMETER Experiment Name: At_Open_Flower_P Parameter: Plant Line Value: WS
  misc_feature: MA Experiment 20000264 PARAMETER Experiment Name: At_Open_Flower_P Parameter: Tissue Value: Open Flower vs. Whole Plant
  misc_feature: MA Experiment ID: 20000495 Result: Down-regulated in Transcription
  misc_feature: MA Experiment 20000495 PARAMETER Experiment Name: At_Guard_Cells_P Parameter: Harvest Date Value: 8/2/2002
  misc_feature: MA Experiment 20000495 PARAMETER Experiment Name: At_Guard_Cells_P Parameter: Organism Value: A. thaliana
  misc_feature: MA Experiment 20000495 PARAMETER Experiment Name: At_Guard_Cells_P Parameter: Tissue Value: Guard Cells vs. Leaves
  misc_feature: MA Experiment ID: 20000496 Result: Down-regulated in Transcription
  misc_feature: MA Experiment 20000496 PARAMETER Experiment Name: At_Guard_Cells_P Parameter: Harvest Date Value: 7/19/2002
  misc_feature: MA Experiment 20000496 PARAMETER Experiment Name: At_Guard_Cells_P Parameter: Organism Value: Canola
  misc_feature: MA Experiment 20000496 PARAMETER Experiment Name: At_Guard_Cells_P Parameter: Tissue Value: Guard Cells vs. Leaves
  misc_feature: MA Experiment ID: 20001451 Result: Down-regulated in Transcription
  misc_feature: MA Experiment 20001451 PARAMETER Experiment Name: At_Far-red-induction_P Parameter: Age (day) Value: 7
  misc_feature: MA Experiment 20001451 PARAMETER Experiment Name: At_Far-red-induction_P Parameter: Light Value: Far-red vs. White
  misc_feature: MA Experiment 20001451 PARAMETER Experiment Name: At_Far-red-induction_P Parameter: Organism Value: A. thaliana
  misc_feature: MA Experiment 20001451 PARAMETER Experiment Name: At_Far-red-induction_P Parameter: Plant Line Value: Columbia
  misc_feature: MA Experiment 20001451 PARAMETER Experiment Name: At_Far-red-induction_P Parameter: Timepoint (hr) Value: 24
  misc_feature: MA Experiment 20001451 PARAMETER Experiment Name: At_Far-red-induction_P Parameter: Tissue Value: Whole Plant
  misc_feature: MA Experiment ID: 20001560 Result: Down-regulated in Transcription
  misc_feature: MA Experiment 20001560 PARAMETER Experiment Name: At_Drought_Soil_Dry_P Parameter: Age (day) Value: 28
  misc_feature: MA Experiment 20001560 PARAMETER Experiment Name: At_Drought_Soil_Dry_P Parameter: Organism Value: A. thaliana
  misc_feature: MA Experiment 20001560 PARAMETER Experiment Name: At_Drought_Soil_Dry_P Parameter: Plant Line Value: WS
  misc_feature: MA Experiment 20001560 PARAMETER Experiment Name: At_Drought_Soil_Dry_P Parameter: Post Timepoint (hr) Value: None
  misc_feature: MA Experiment 20001560 PARAMETER Experiment Name: At_Drought_Soil_Dry_P Parameter: Post-Treatment Value: None
  misc_feature: MA Experiment 20001560 PARAMETER Experiment Name: At_Drought_Soil_Dry_P Parameter: Timepoint (day) Value: 14
  misc_feature: MA Experiment 20001560 PARAMETER Experiment Name: At_Drought_Soil_Dry_P Parameter: Treatment Value: Drought vs. No Drought

SEQ ID NO: 93405 - protein, 482 aa, Arabidopsis thaliana; identical to SEQ ID NO: 89649
  peptide (1)..(482): Ceres Seq. ID no. 12719843
  misc_feature (52)..(482): Pfam Name: Adaptor complexes medium subunit family Pfam Description: Adaptor complexes medium subunit family
  misc_feature (45)..(482): Homolog of NCBI NO: 15237475 NR Description: AP47/50p (gb|AAB88283.1); protein id: supported by cDNA: gi_14326519, supported by cDNA: gi_2271476 thaliana] >gi|2271477|gb|AAB88283.1| AP47/50p [Arabidopsis
  misc_feature (44)..(481): Homolog of NCBI NO: 28828638 NR Description: similar to Dictyostelium discoideum (Slime mold). coat assembly protein AP50 (Clathrin coat associated protein
  misc_feature (50)..(481): Homolog of NCBI NO: 1703328 NR Description: CLATHRIN COAT ASSEMBLY PROTEIN AP50 (CLATHRIN COAT
  misc_feature (52)..(482): Homolog of NCBI NO: 6753074 NR Description: adaptor-related protein complex AP-2, mu1;
  misc_feature (52)..(482): Homolog of NCBI NO: 40788880 NR Description: KIAA0109 [Homo sapiens]
  misc_feature (52)..(482): Homolog of NCBI NO: 22219429 NR Description: Chain M, Ap2 Clathrin Adaptor Core
  misc_feature (52)..(482): Homolog of NCBI NO: 7448828 NR Description: assembly protein 50 - human
  misc_feature (52)..(482): Homolog of NCBI NO: 38174423 NR Description: Unknown (protein for MGC:75936) [Silurana
  misc_feature (52)..(482): Homolog of NCBI NO: 28839636 NR Description: Unknown (protein for MGC:53076) [Xenopus laevis]
  misc_feature (50)..(481): Homolog of NCBI NO: 32419759 NR Description: hypothetical protein [Neurospora crassa]

SEQ ID NO: 93406 - protein, 438 aa, Arabidopsis thaliana; identical to SEQ ID NO: 76506
  peptide (1)..(438): Ceres Seq. ID no. 12719844
  misc_feature (8)..(438): Pfam Name: Adaptor complexes medium subunit family Pfam Description: Adaptor complexes medium subunit family
  misc_feature (1)..(438): Homolog of NCBI NO: 15237475 NR Description: AP47/50p (gb|AAB88283.1); protein id: supported by cDNA: gi_14326519, supported by cDNA: gi_2271476 thaliana] >gi|2271477|gb|AAB88283.1| AP47/50p [Arabidopsis
  misc_feature (1)..(437): Homolog of NCBI NO: 28828638 NR Description: similar to Dictyostelium discoideum (Slime mold). coat assembly protein AP50 (Clathrin coat associated protein
  misc_feature (6)..(437): Homolog of NCBI NO: 1703328 NR Description: CLATHRIN COAT ASSEMBLY PROTEIN AP50 (CLATHRIN COAT
  misc_feature (8)..(438): Homolog of NCBI NO: 6753074 NR Description: adaptor-related protein complex AP-2, mu1;
  misc_feature (8)..(438): Homolog of NCBI NO: 40788880 NR Description: KIAA0109 [Homo sapiens]
  misc_feature (8)..(438): Homolog of NCBI NO: 22219429 NR Description: Chain M, Ap2 Clathrin Adaptor Core
  misc_feature (8)..(438): Homolog of NCBI NO: 7448828 NR Description: assembly protein 50 - human
  misc_feature (8)..(438): Homolog of NCBI NO: 38174423 NR Description: Unknown (protein for MGC:75936) [Silurana
  misc_feature (8)..(438): Homolog of NCBI NO: 28839636 NR Description: Unknown (protein for MGC:53076) [Xenopus laevis]
  misc_feature (6)..(437): Homolog of NCBI NO: 32419759 NR Description: hypothetical protein [Neurospora crassa]

SEQ ID NO: 93407 - protein, 408 aa, Arabidopsis thaliana; identical to SEQ ID NO: 76507
  peptide (1)..(408): Ceres Seq. ID no. 12719845
  misc_feature (1)..(408): Pfam Name: Adaptor complexes medium subunit family Pfam Description: Adaptor complexes medium subunit family
  misc_feature (1)..(408): Homolog of NCBI NO: 15237475 NR Description: AP47/50p (gb|AAB88283.1); protein id: supported by cDNA: gi_14326519, supported by cDNA: gi_2271476 thaliana] >gi|2271477|gb|AAB88283.1| AP47/50p [Arabidopsis
  misc_feature (1)..(407): Homolog of NCBI NO: 28828638 NR Description: similar to Dictyostelium discoideum (Slime mold). coat assembly protein AP50 (Clathrin coat associated protein
  misc_feature (1)..(407): Homolog of NCBI NO: 1703328 NR Description: CLATHRIN COAT ASSEMBLY PROTEIN AP50 (CLATHRIN COAT
  misc_feature (1)..(408): Homolog of NCBI NO: 6753074 NR Description: adaptor-related protein complex AP-2, mu1;
  misc_feature (1)..(408): Homolog of NCBI NO: 40788880 NR Description: KIAA0109 [Homo sapiens]
  misc_feature (1)..(408): Homolog of NCBI NO: 22219429 NR Description: Chain M, Ap2 Clathrin Adaptor Core
  misc_feature (1)..(408): Homolog of NCBI NO: 7448828 NR Description: assembly protein 50 - human
  misc_feature (1)..(408): Homolog of NCBI NO: 38174423 NR Description: Unknown (protein for MGC:75936) [Silurana
  misc_feature (1)..(408): Homolog of NCBI NO: 28839636 NR Description: Unknown (protein for MGC:53076) [Xenopus laevis]
  misc_feature (1)..(407): Homolog of NCBI NO: 32419759 NR Description: hypothetical protein [Neurospora crassa]

SEQ ID NO: 93408 - DNA, 1632 bp, Arabidopsis thaliana; identical to SEQ ID NO: 89652
  misc_feature (1)..(1632): Ceres Seq. ID no. 12719846
  misc_feature: MA Experiment ID: 20000173 Result: Down-regulated in Transcription
  misc_feature: MA Experiment 20000173 PARAMETER Experiment Name: At_42deg_Heat_P Parameter: Age (day) Value: 14
  misc_feature: MA Experiment 20000173 PARAMETER Experiment Name: At_42deg_Heat_P Parameter: Organism Value: A. thaliana
  misc_feature: MA Experiment 20000173 PARAMETER Experiment Name: At_42deg_Heat_P Parameter: Plant Line Value: WS
  misc_feature: MA Experiment 20000173 PARAMETER Experiment Name: At_42deg_Heat_P Parameter: Temperature (deg C) Value: 42 vs. 22
  misc_feature: MA Experiment 20000173 PARAMETER Experiment Name: At_42deg_Heat_P Parameter: Timepoint (hr) Value: 6
  misc_feature: MA Experiment 20000173 PARAMETER Experiment Name: At_42deg_Heat_P Parameter: Tissue Value: Aerial
  misc_feature: MA Experiment ID: 20000184 Result: Down-regulated in Transcription
  misc_feature: MA Experiment 20000184 PARAMETER Experiment Name: At_Shoots__P Parameter: Age (day) Value: 7
  misc_feature: MA Experiment 20000184 PARAMETER Experiment Name: At_Shoots__P Parameter: Tissue Value: Shoots vs. Whole Plant
  misc_feature: MA Experiment ID: 20000234 Result: Down-regulated in Transcription
  misc_feature: MA Experiment 20000234 PARAMETER Experiment Name: At_Siliques_P Parameter: Age (day) Value: 21
  misc_feature: MA Experiment 20000234 PARAMETER Experiment Name: At_Siliques_P Parameter: Organism Value: A. thaliana
  misc_feature: MA Experiment 20000234 PARAMETER Experiment Name: At_Siliques_P Parameter: Plant Line Value: WS
  misc_feature: MA Experiment 20000234 PARAMETER Experiment Name: At_Siliques_P Parameter: Tissue Value: Less Than 5mm Siliques vs. Whole Plant
  misc_feature: MA Experiment ID: 20000264 Result: Down-regulated in Transcription
  misc_feature: MA Experiment 20000264 PARAMETER Experiment Name: At_Open_Flower_P Parameter: Age (day) Value: 21
  misc_feature: MA Experiment 20000264 PARAMETER Experiment Name: At_Open_Flower_P Parameter: Plant Line Value: WS
  misc_feature: MA Experiment 20000264 PARAMETER Experiment Name: At_Open_Flower_P Parameter: Tissue Value: Open Flower vs. Whole Plant
  misc_feature: MA Experiment ID: 20000495 Result: Down-regulated in Transcription
  misc_feature: MA Experiment 20000495 PARAMETER Experiment Name: At_Guard_Cells_P Parameter: Harvest Date Value: 8/2/2002
  misc_feature: MA Experiment 20000495 PARAMETER Experiment Name: At_Guard_Cells_P Parameter: Organism Value: A. thaliana
  misc_feature: MA Experiment 20000495 PARAMETER Experiment Name: At_Guard_Cells_P Parameter: Tissue Value: Guard Cells vs. Leaves
  misc_feature: MA Experiment ID: 20000496 Result: Down-regulated in Transcription
  misc_feature: MA Experiment 20000496 PARAMETER Experiment Name: At_Guard_Cells_P Parameter: Harvest Date Value: 7/19/2002
  misc_feature: MA Experiment 20000496 PARAMETER Experiment Name: At_Guard_Cells_P Parameter: Organism Value: Canola
  misc_feature: MA Experiment 20000496 PARAMETER Experiment Name: At_Guard_Cells_P Parameter: Tissue Value: Guard Cells vs. Leaves
  misc_feature: MA Experiment ID: 20001451 Result: Down-regulated in Transcription
  misc_feature: MA Experiment 20001451 PARAMETER Experiment Name: At_Far-red-induction_P Parameter: Age (day) Value: 7
  misc_feature: MA Experiment 20001451 PARAMETER Experiment Name: At_Far-red-induction_P Parameter: Light Value: Far-red vs. White
  misc_feature: MA Experiment 20001451 PARAMETER Experiment Name: At_Far-red-induction_P Parameter: Organism Value: A. thaliana
  misc_feature: MA Experiment 20001451 PARAMETER Experiment Name: At_Far-red-induction_P Parameter: Plant Line Value: Columbia
  misc_feature: MA Experiment 20001451 PARAMETER Experiment Name: At_Far-red-induction_P Parameter: Timepoint (hr) Value: 24
  misc_feature: MA Experiment 20001451 PARAMETER Experiment Name: At_Far-red-induction_P Parameter: Tissue Value: Whole Plant
  misc_feature: MA Experiment ID: 20001560 Result: Down-regulated in Transcription
  misc_feature: MA Experiment 20001560 PARAMETER Experiment Name: At_Drought_Soil_Dry_P Parameter: Age (day) Value: 28
  misc_feature: MA Experiment 20001560 PARAMETER Experiment Name: At_Drought_Soil_Dry_P Parameter: Organism Value: A. thaliana
  misc_feature: MA Experiment 20001560 PARAMETER Experiment Name: At_Drought_Soil_Dry_P Parameter: Plant Line Value: WS
  misc_feature: MA Experiment 20001560 PARAMETER Experiment Name: At_Drought_Soil_Dry_P Parameter: Post Timepoint (hr) Value: None
  misc_feature: MA Experiment 20001560 PARAMETER Experiment Name: At_Drought_Soil_Dry_P Parameter: Post-Treatment Value: None
  misc_feature: MA Experiment 20001560 PARAMETER Experiment Name: At_Drought_Soil_Dry_P Parameter: Timepoint (day) Value: 14
  misc_feature: MA Experiment 20001560 PARAMETER Experiment Name: At_Drought_Soil_Dry_P Parameter: Treatment Value: Drought vs. No Drought

SEQ ID NO: 93409 - protein, 477 aa, Arabidopsis thaliana; identical to SEQ ID NO: 89653
  peptide (1)..(477): Ceres Seq. ID no. 12719847
  misc_feature (47)..(477): Pfam Name: Adaptor complexes medium subunit family Pfam Description: Adaptor complexes medium subunit family
  misc_feature (40)..(477): Homolog of NCBI NO: 15237475 NR Description: AP47/50p (gb|AAB88283.1); protein id: supported by cDNA: gi_14326519, supported by cDNA: gi_2271476 thaliana] >gi|2271477|gb|AAB88283.1| AP47/50p [Arabidopsis
  misc_feature (39)..(476): Homolog of NCBI NO: 28828638 NR Description: similar to Dictyostelium discoideum (Slime mold). coat assembly protein AP50 (Clathrin coat associated protein
  misc_feature (45)..(476): Homolog of NCBI NO: 1703328 NR Description: CLATHRIN COAT ASSEMBLY PROTEIN AP50 (CLATHRIN COAT
  misc_feature (47)..(477): Homolog of NCBI NO: 6753074 NR Description: adaptor-related protein complex AP-2, mu1;
  misc_feature (47)..(477): Homolog of NCBI NO: 40788880 NR Description: KIAA0109 [Homo sapiens]
  misc_feature (47)..(477): Homolog of NCBI NO: 22219429 NR Description: Chain M, Ap2 Clathrin Adaptor Core
  misc_feature (47)..(477): Homolog of NCBI NO: 7448828 NR Description: assembly protein 50 - human
  misc_feature (47)..(477): Homolog of NCBI NO: 38174423 NR Description: Unknown (protein for MGC:75936) [Silurana
  misc_feature (47)..(477): Homolog of NCBI NO: 28839636 NR Description: Unknown (protein for MGC:53076) [Xenopus laevis]
  misc_feature (45)..(476): Homolog of NCBI NO: 32419759 NR Description: hypothetical protein [Neurospora crassa]

SEQ ID NO: 93410 - protein, 438 aa, Arabidopsis thaliana; identical to SEQ ID NO: 76506
  peptide (1)..(438): Ceres Seq. ID no. 12719848
  misc_feature (8)..(438): Pfam Name: Adaptor complexes medium subunit family Pfam Description: Adaptor complexes medium subunit family
  misc_feature (1)..(438): Homolog of NCBI NO: 15237475 NR Description: AP47/50p (gb|AAB88283.1); protein id: supported by cDNA: gi_14326519, supported by cDNA: gi_2271476 thaliana] >gi|2271477|gb|AAB88283.1| AP47/50p [Arabidopsis
  misc_feature (1)..(437): Homolog of NCBI NO: 28828638 NR Description: similar to Dictyostelium discoideum (Slime mold). coat assembly protein AP50 (Clathrin coat associated protein
  misc_feature (6)..(437): Homolog of NCBI NO: 1703328 NR Description: CLATHRIN COAT ASSEMBLY PROTEIN AP50 (CLATHRIN COAT
  misc_feature (8)..(438): Homolog of NCBI NO: 6753074 NR Description: adaptor-related protein complex AP-2, mu1;
  misc_feature (8)..(438): Homolog of NCBI NO: 40788880 NR Description: KIAA0109 [Homo sapiens]
  misc_feature (8)..(438): Homolog of NCBI NO: 22219429 NR Description: Chain M, Ap2 Clathrin Adaptor Core
  misc_feature (8)..(438): Homolog of NCBI NO: 7448828 NR Description: assembly protein 50 - human
  misc_feature (8)..(438): Homolog of NCBI NO: 38174423 NR Description: Unknown (protein for MGC:75936) [Silurana
  misc_feature (8)..(438): Homolog of NCBI NO: 28839636 NR Description: Unknown (protein for MGC:53076) [Xenopus laevis]
  misc_feature (6)..(437): Homolog of NCBI NO: 32419759 NR Description: hypothetical protein [Neurospora crassa]

SEQ ID NO: 93411 - protein, 408 aa, Arabidopsis thaliana; identical to SEQ ID NO: 76507
  peptide (1)..(408): Ceres Seq. ID no. 12719849
  misc_feature (1)..(408): Pfam Name: Adaptor complexes medium subunit family Pfam Description: Adaptor complexes medium subunit family
  misc_feature (1)..(408): Homolog of NCBI NO: 15237475 NR Description: AP47/50p (gb|AAB88283.1); protein id: supported by cDNA: gi_14326519, supported by cDNA: gi_2271476 thaliana] >gi|2271477|gb|AAB88283.1| AP47/50p [Arabidopsis
  misc_feature (1)..(407): Homolog of NCBI NO: 28828638 NR Description: similar to Dictyostelium discoideum (Slime mold). coat assembly protein AP50 (Clathrin coat associated protein
  misc_feature (1)..(407): Homolog of NCBI NO: 1703328 NR Description: CLATHRIN COAT ASSEMBLY PROTEIN AP50 (CLATHRIN COAT
  misc_feature (1)..(408): Homolog of NCBI NO: 6753074 NR Description: adaptor-related protein complex AP-2, mu1;
  misc_feature (1)..(408): Homolog of NCBI NO: 40788880 NR Description: KIAA0109 [Homo sapiens]
  misc_feature (1)..(408): Homolog of NCBI NO: 22219429 NR Description: Chain M, Ap2 Clathrin Adaptor Core
  misc_feature (1)..(408): Homolog of NCBI NO: 7448828 NR Description: assembly protein 50 - human
  misc_feature (1)..(408): Homolog of NCBI NO: 38174423 NR Description: Unknown (protein for MGC:75936) [Silurana
  misc_feature (1)..(408): Homolog of NCBI NO: 28839636 NR Description: Unknown (protein for MGC:53076) [Xenopus laevis]
  misc_feature (1)..(407): Homolog of NCBI NO: 32419759 NR Description: hypothetical protein [Neurospora crassa]

SEQ ID NO: 93412 - DNA, 1116 bp, Arabidopsis thaliana; identical to SEQ ID NO: 89656
  misc_feature (1)..(1116): Ceres Seq. ID no. 12719850
  misc_feature: MA Experiment ID: 20000185 Result: Down-regulated in Transcription
  misc_feature: MA Experiment 20000185 PARAMETER Experiment Name: At_Roots__P Parameter: Age (day) Value: 7 vs. 21
  misc_feature: MA Experiment 20000185 PARAMETER Experiment Name: At_Roots__P Parameter: Organism Value: A. thaliana
  misc_feature: MA Experiment 20000185 PARAMETER Experiment Name: At_Roots__P Parameter: Tissue Value: Roots vs. Whole Plant
  misc_feature: MA Experiment ID: 20000227 Result: Down-regulated in Transcription
  misc_feature: MA Experiment 20000227 PARAMETER Experiment Name: At_Root-Tips-vs-Tops_P Parameter: Tissue Value: Root Tips vs. Root Tops
  misc_feature: MA Experiment ID: 20000264 Result: Down-regulated in Transcription
  misc_feature: MA Experiment 20000264 PARAMETER Experiment Name: At_Open_Flower_P Parameter: Age (day) Value: 21
  misc_feature: MA Experiment 20000264 PARAMETER Experiment Name: At_Open_Flower_P Parameter: Plant Line Value: WS
  misc_feature: MA Experiment 20000264 PARAMETER Experiment Name: At_Open_Flower_P Parameter: Tissue Value: Open Flower vs. Whole Plant
  misc_feature: MA Experiment ID: 20000269 Result: Down-regulated in Transcription
  misc_feature: MA Experiment 20000269 PARAMETER Experiment Name: At_1mM_KNO3_L-vs-H_Roots_P Parameter: Age (day) Value: 7,10,12
  misc_feature: MA Experiment 20000269 PARAMETER Experiment Name: At_1mM_KNO3_L-vs-H_Roots_P Parameter: Organism Value: A. thaliana
  misc_feature: MA Experiment 20000269 PARAMETER Experiment Name: At_1mM_KNO3_L-vs-H_Roots_P Parameter: Plant Line Value: WS
  misc_feature: MA Experiment 20000269 PARAMETER Experiment Name: At_1mM_KNO3_L-vs-H_Roots_P Parameter: Timepoint (day) Value: 7,10,12
  misc_feature: MA Experiment 20000269 PARAMETER Experiment Name: At_1mM_KNO3_L-vs-H_Roots_P Parameter: Tissue Value: Roots
  misc_feature: MA Experiment 20000269 PARAMETER Experiment Name: At_1mM_KNO3_L-vs-H_Roots_P Parameter: Treatment Value: 1mM KNO3 vs. 50mM KNO3
  misc_feature: MA Experiment ID: 20000439 Result: Down-regulated in Transcription
  misc_feature: MA Experiment 20000439 PARAMETER Experiment Name: At_Roots__P Parameter: Age (day) Value: 14 vs. 21
  misc_feature: MA Experiment 20000439 PARAMETER Experiment Name: At_Roots__P Parameter: Organism Value: A. thaliana
  misc_feature: MA Experiment 20000439 PARAMETER Experiment Name: At_Roots__P Parameter: Tissue Value: Roots vs. Whole Plant
  misc_feature: MA Experiment ID: 20000794 Result: Down-regulated in Transcription
  misc_feature: MA Experiment 20000794 PARAMETER Experiment Name: At_Petals_P Parameter: Age (day) Value: 23-25 days
  misc_feature: MA Experiment 20000794 PARAMETER Experiment Name: At_Petals_P Parameter: Plant Line Value: WS
  misc_feature: MA Experiment 20000794 PARAMETER Experiment Name: At_Petals_P Parameter: Tissue Value: Petals vs. Whole plant
  misc_feature: MA Experiment ID: 20001904 Result: Down-regulated in Transcription
  misc_feature: MA Experiment 20001904 PARAMETER Experiment Name: At_Drought_Reproduction_P Parameter: Age (day) Value: 37
  misc_feature: MA Experiment 20001904 PARAMETER Experiment Name: At_Drought_Reproduction_P Parameter: Organism Value: A. thaliana
  misc_feature: MA Experiment 20001904 PARAMETER Experiment Name: At_Drought_Reproduction_P Parameter: Plant Line Value: WS
  misc_feature: MA Experiment 20001904 PARAMETER Experiment Name: At_Drought_Reproduction_P Parameter: Timepoint (day) Value: 7
  misc_feature: MA Experiment 20001904 PARAMETER Experiment Name: At_Drought_Reproduction_P Parameter: Tissue Value: Rosettes
  misc_feature: MA Experiment 20001904 PARAMETER Experiment Name: At_Drought_Reproduction_P Parameter: Treatment Value: Drought vs. No Drought
  misc_feature: MA Experiment ID: 20001905 Result: Down-regulated in Transcription
  misc_feature: MA Experiment 20001905 PARAMETER Experiment Name: At_Drought_Reproduction_P Parameter: Age (day) Value: 40
  misc_feature: MA Experiment 20001905 PARAMETER Experiment Name: At_Drought_Reproduction_P Parameter: Organism Value: A. thaliana
  misc_feature: MA Experiment 20001905 PARAMETER Experiment Name: At_Drought_Reproduction_P Parameter: Plant Line Value: WS
  misc_feature: MA Experiment 20001905 PARAMETER Experiment Name: At_Drought_Reproduction_P Parameter: Timepoint (day) Value: 10
  misc_feature: MA Experiment 20001905 PARAMETER Experiment Name: At_Drought_Reproduction_P Parameter: Tissue Value: Rosettes
  misc_feature: MA Experiment 20001905 PARAMETER Experiment Name: At_Drought_Reproduction_P Parameter: Treatment Value: Drought vs. No Drought
  misc_feature: Pfam Name: Chloroa_b-bind Pfam Description: Chlorophyll A-B binding protein

SEQ ID NO: 93413 - protein, 258 aa, Arabidopsis thaliana; identical to SEQ ID NO: 71157
  peptide (1)..(258): Ceres Seq. ID no. 12719851
  misc_feature: Pfam Name: Chloroa_b-bind Pfam Description: Chlorophyll A-B binding protein
  misc_feature (1)..(258): Homolog of NCBI NO: 30695110 NR Description: Lil3 protein [Arabidopsis thaliana]
  misc_feature (5)..(258): Homolog of NCBI NO: 8978078 NR Description: Lil3 protein [Arabidopsis thaliana]
  misc_feature (5)..(258): Homolog of NCBI NO: 21555799 NR Description: Lil3 protein [Arabidopsis thaliana]
  misc_feature (5)..(258): Homolog of NCBI NO: 7485188 NR Description: hypothetical protein - Arabidopsis thaliana hypothetical protein [Arabidopsis thaliana]
  misc_feature (5)..(258): Homolog of NCBI NO: 18414927 NR Description: Lil3 protein; protein id: At4g17600.1, supported cDNA: 29150., supported by cDNA: gi_14030672, supported by cDNA: supported by cDNA: gi_4741965 [Arabidopsis thaliana] thaliana

SEQ ID NO: 93414 - protein, 254 aa, Arabidopsis thaliana; identical to SEQ ID NO: 71158
  peptide (1)..(254): Ceres Seq. ID no. 12719852
  misc_feature: Pfam Name: Chloroa_b-bind Pfam Description: Chlorophyll A-B binding protein
  misc_feature (1)..(254): Homolog of NCBI NO: 30695110 NR Description: Lil3 protein [Arabidopsis thaliana]
  misc_feature (1)..(254): Homolog of NCBI NO: 8978078 NR Description: Lil3 protein [Arabidopsis thaliana]
  misc_feature (1)..(254): Homolog of NCBI NO: 21555799 NR Description: Lil3 protein [Arabidopsis thaliana]
  misc_feature (1)..(254): Homolog of NCBI NO: 7485188 NR Description: hypothetical protein - Arabidopsis thaliana hypothetical protein [Arabidopsis thaliana]
  misc_feature (1)..(254): Homolog of NCBI NO: 18414927 NR Description: Lil3 protein; protein id: At4g17600.1, supported cDNA: 29150., supported by cDNA: gi_14030672, supported by cDNA: supported by cDNA: gi_4741965 [Arabidopsis thaliana] thaliana

SEQ ID NO: 93415 - DNA, 1812 bp, Arabidopsis thaliana; identical to SEQ ID NO: 89659
  misc_feature (1)..(1812): Ceres Seq. ID no. 12719864
  misc_feature: MA Experiment ID: 108573 Result: Up-regulated in Transcription
  misc_feature: MA Experiment 108573 PARAMETER Experiment Name: At_Drought_cDNA_P Parameter: Timepoint (hr) Value: 6
  misc_feature: MA Experiment 108573 PARAMETER Experiment Name: At_Drought_cDNA_P Parameter: Tissue Value: Aerial
  misc_feature: MA Experiment 108573 PARAMETER Experiment Name: At_Drought_cDNA_P Parameter: Treatment Value: Drought vs. No Drought
  misc_feature: MA Experiment ID: 108595 Result: Down-regulated in Transcription
  misc_feature: MA Experiment 108595 PARAMETER Experiment Name: At_Ler-pi_Ovule_cDNA_P Parameter: Plant Line Value: null
  misc_feature: MA Experiment ID: 20000093 Result: Up-regulated in Transcription
  misc_feature: MA Experiment 20000093 PARAMETER Experiment Name: At_42deg_Heat_cDNA_P Parameter: Temperature (deg C) Value: 42 vs. 22
  misc_feature: MA Experiment 20000093 PARAMETER Experiment Name: At_42deg_Heat_cDNA_P Parameter: Timepoint (hr) Value: 0.5
  misc_feature: MA Experiment 20000093 PARAMETER Experiment Name: At_42deg_Heat_cDNA_P Parameter: Tissue Value: Aerial
  misc_feature: MA Experiment ID: 20000112 Result: Up-regulated in Transcription
  misc_feature: MA Experiment 20000112 PARAMETER Experiment Name: At_42deg_Heat_cDNA_P Parameter: Temperature (deg C) Value: 42 vs. 22
  misc_feature: MA Experiment 20000112 PARAMETER Experiment Name: At_42deg_Heat_cDNA_P Parameter: Timepoint (hr) Value: 2
  misc_feature: MA Experiment 20000112 PARAMETER Experiment Name: At_42deg_Heat_cDNA_P Parameter: Tissue Value: Aerial
  misc_feature: MA Experiment ID: 20000113 Result: Up-regulated in Transcription
  misc_feature: MA Experiment 20000113 PARAMETER Experiment Name: At_42deg_Heat_cDNA_P Parameter: Temperature (deg C) Value: 42 vs. 22
  misc_feature: MA Experiment 20000113 PARAMETER Experiment Name: At_42deg_Heat_cDNA_P Parameter: Timepoint (hr) Value: 8
  misc_feature: MA Experiment 20000113 PARAMETER Experiment Name: At_42deg_Heat_cDNA_P Parameter: Tissue Value: Aerial
  misc_feature: MA Experiment ID: 20000144 Result: Up-regulated in Transcription
  misc_feature: MA Experiment 20000144 PARAMETER Experiment Name: At_42deg_Heat_cDNA_P Parameter: Temperature (deg C) Value: 42 vs. 22
  misc_feature: MA Experiment 20000144 PARAMETER Experiment Name: At_42deg_Heat_cDNA_P Parameter: Timepoint (hr) Value: 1
  misc_feature: MA Experiment 20000144 PARAMETER Experiment Name: At_42deg_Heat_cDNA_P Parameter: Tissue Value: Aerial
  misc_feature: MA Experiment ID: 20000171 Result: Up-regulated in Transcription
  misc_feature: MA Experiment 20000171 PARAMETER Experiment Name: At_42deg_Heat_P Parameter: Age (day) Value: 14
  misc_feature: MA Experiment 20000171 PARAMETER Experiment Name: At_42deg_Heat_P Parameter: Organism Value: A. thaliana
  misc_feature: MA Experiment 20000171 PARAMETER Experiment Name: At_42deg_Heat_P Parameter: Plant Line Value: WS
  misc_feature: MA Experiment 20000171 PARAMETER Experiment Name: At_42deg_Heat_P Parameter: Temperature (deg C) Value: 42 vs. 22
  misc_feature: MA Experiment 20000171 PARAMETER Experiment Name: At_42deg_Heat_P Parameter: Timepoint (hr) Value: 1
  misc_feature: MA Experiment 20000171 PARAMETER Experiment Name: At_42deg_Heat_P Parameter: Tissue Value: Aerial
  misc_feature: MA Experiment ID: 20000286 Result: Up-regulated in Transcription
  misc_feature: MA Experiment 20000286 PARAMETER Experiment Name: At_Open_Flower_P Parameter: Age (day) Value: 21
  misc_feature: MA Experiment 20000286 PARAMETER Experiment Name: At_Open_Flower_P Parameter: Plant Line Value: WS
  misc_feature: MA Experiment 20000286 PARAMETER Experiment Name: At_Open_Flower_P Parameter: Tissue Value: Half Open vs. Whole Plant
  misc_feature: MA Experiment ID: 20000794 Result: Up-regulated in Transcription
  misc_feature: MA Experiment 20000794 PARAMETER Experiment Name: At_Petals_P Parameter: Age (day) Value: 23-25 days
  misc_feature: MA Experiment 20000794 PARAMETER Experiment Name: At_Petals_P Parameter: Plant Line Value: WS
  misc_feature: MA Experiment 20000794 PARAMETER Experiment Name: At_Petals_P Parameter: Tissue Value: Petals vs. Whole plant
  misc_feature: MA Experiment ID: 20001451 Result: Up-regulated in Transcription
  misc_feature: MA Experiment 20001451 PARAMETER Experiment Name: At_Far-red-induction_P Parameter: Age (day) Value: 7
  misc_feature: MA Experiment 20001451 PARAMETER Experiment Name: At_Far-red-induction_P Parameter: Light Value: Far-red vs. White
  misc_feature: MA Experiment 20001451 PARAMETER Experiment Name: At_Far-red-induction_P Parameter: Organism Value: A. thaliana
  misc_feature: MA Experiment 20001451 PARAMETER Experiment Name: At_Far-red-induction_P Parameter: Plant Line Value: Columbia
  misc_feature: MA Experiment 20001451 PARAMETER Experiment Name: At_Far-red-induction_P Parameter: Timepoint (hr) Value: 24
  misc_feature: MA Experiment 20001451 PARAMETER Experiment Name: At_Far-red-induction_P Parameter: Tissue Value: Whole Plant

SEQ ID NO: 93416 - protein, 431 aa, Arabidopsis thaliana; identical to SEQ ID NO: 26118
  peptide (1)..(431): Ceres Seq. ID no. 12719865
  misc_feature (108)..(178): Pfam Name: RNA recognition motif. (a.k.a. RRM, RBD, or RNP domain) Pfam Description: RNA recognition motif. (a.k.a. RRM, RBD, or RNP
  misc_feature (1)..(431): Homolog of NCBI NO: 18422817 NR Description: heterogeneous nuclear ribonucleoprotein (hnRNP), protein id: At5g47620.1, supported by cDNA: 1876. [Arabidopsis
  misc_feature (1)..(431): Homolog of NCBI NO: 21553963 NR Description: RNA-binding protein-like [Arabidopsis thaliana]
  misc_feature (1)..(357): Homolog of NCBI NO: 9758790 NR Description: RNA-binding protein-like [Arabidopsis thaliana]
  misc_feature (1)..(374): Homolog of NCBI NO: 6648193 NR Description: putative RNA-binding protein [Arabidopsis
  misc_feature (1)..(374): Homolog of NCBI NO: 15292697 NR Description: putative RNA-binding protein [Arabidopsis
  misc_feature (1)..(374): Homolog of NCBI NO: 30680456 NR Description: heterogeneous nuclear ribonucleoprotein (hnRNP),
  misc_feature (1)..(374): Homolog of NCBI NO: 18398061 NR Description: heterogeneous nuclear ribonucleoprotein (hnRNP), protein id: At3g07810.1, supported by cDNA: gi_15292696, by cDNA: gi_16930692 [Arabidopsis thaliana]
  misc_feature (1)..(380): Homolog of NCBI NO: 38175737 NR Description: putative heterogeneous nuclear ribonucleoprotein
  misc_feature (1)..(398): Homolog of NCBI NO: 18416794 NR Description: heterogeneous nuclear ribonucleoprotein (hnRNP), protein id: At4g26650.1, supported by cDNA: gi_16930502, by cDNA: gi_20453244 [Arabidopsis thaliana]
  misc_feature (7)..(398): Homolog of NCBI NO: 7487039 NR Description: hypothetical protein T15N24.100 - Arabidopsis

SEQ ID NO: 93417 - protein, 429 aa, Arabidopsis thaliana; identical to SEQ ID NO: 26119
  peptide (1)..(429): Ceres Seq. ID no. 12719866
  misc_feature (106)..(176): Pfam Name: RNA recognition motif. (a.k.a. RRM, RBD, or RNP domain) Pfam Description: RNA recognition motif. (a.k.a. RRM, RBD, or RNP
  misc_feature (1)..(429): Homolog of NCBI NO: 18422817 NR Description: heterogeneous nuclear ribonucleoprotein (hnRNP), protein id: At5g47620.1, supported by cDNA: 1876. [Arabidopsis
  misc_feature (1)..(429): Homolog of NCBI NO: 21553963 NR Description: RNA-binding protein-like [Arabidopsis thaliana]
  misc_feature (1)..(355): Homolog of NCBI NO: 9758790 NR Description: RNA-binding protein-like [Arabidopsis thaliana]
  misc_feature (1)..(372): Homolog of NCBI NO: 6648193 NR Description: putative RNA-binding protein [Arabidopsis
  misc_feature (1)..(372): Homolog of NCBI NO: 18398061 NR Description: heterogeneous nuclear ribonucleoprotein (hnRNP), protein id: At3g07810.1, supported by cDNA: gi_15292696, by cDNA: gi_16930692 [Arabidopsis thaliana]
  misc_feature (1)..(372): Homolog of NCBI NO: 30680456 NR Description: heterogeneous nuclear ribonucleoprotein (hnRNP),
  misc_feature (1)..(372): Homolog of NCBI NO: 15292697 NR Description: putative RNA-binding protein [Arabidopsis
  misc_feature (1)..(378): Homolog of NCBI NO: 38175737 NR Description: putative heterogeneous nuclear ribonucleoprotein
  misc_feature (1)..(396): Homolog of NCBI NO: 18416794 NR Description: heterogeneous nuclear ribonucleoprotein (hnRNP), protein id: At4g26650.1, supported by cDNA: gi_16930502, by cDNA: gi_20453244 [Arabidopsis thaliana]
  misc_feature (5)..(396): Homolog of NCBI NO: 7487039 NR Description: hypothetical protein T15N24.100 - Arabidopsis

SEQ ID NO: 93418 - protein, 394 aa, Arabidopsis thaliana; identical to SEQ ID NO: 26120
  peptide (1)..(394): Ceres Seq. ID no. 12719867
  misc_feature (71)..(141): Pfam Name: RNA recognition motif. (a.k.a. RRM, RBD, or RNP domain) Pfam Description: RNA recognition motif. (a.k.a. RRM, RBD, or RNP
  misc_feature (1)..(394): Homolog of NCBI NO: 18422817 NR Description: heterogeneous nuclear ribonucleoprotein (hnRNP), protein id: At5g47620.1, supported by cDNA: 1876. [Arabidopsis
  misc_feature (1)..(394): Homolog of NCBI NO: 21553963 NR Description: RNA-binding protein-like [Arabidopsis thaliana]
  misc_feature (1)..(320): Homolog of NCBI NO: 9758790 NR Description: RNA-binding protein-like [Arabidopsis thaliana]
  misc_feature (1)..(337): Homolog of NCBI NO: 6648193 NR Description: putative RNA-binding protein [Arabidopsis
  misc_feature (1)..(337): Homolog of NCBI NO: 18398061 NR Description: heterogeneous nuclear ribonucleoprotein (hnRNP), protein id: At3g07810.1, supported by cDNA: gi_15292696, by cDNA: gi_16930692 [Arabidopsis thaliana]
  misc_feature (1)..(337): Homolog of NCBI NO: 15292697 NR Description: putative RNA-binding protein [Arabidopsis
  misc_feature (1)..(337): Homolog of NCBI NO: 30680456 NR Description: heterogeneous nuclear ribonucleoprotein (hnRNP),
  misc_feature (1)..(343): Homolog of NCBI NO: 38175737 NR Description: putative heterogeneous nuclear ribonucleoprotein
  misc_feature (1)..(361): Homolog of NCBI NO: 18416794 NR Description: heterogeneous nuclear ribonucleoprotein (hnRNP), protein id: At4g26650.1, supported by cDNA: gi_16930502, by cDNA: gi_20453244 [Arabidopsis thaliana]
  misc_feature (1)..(361): Homolog of NCBI NO: 7487039 NR Description: hypothetical protein T15N24.100 - Arabidopsis

SEQ ID NO: 93419 - DNA, 942 bp, Arabidopsis thaliana; identical to SEQ ID NO: 89663
  misc_feature (1)..(942): Ceres Seq. ID no. 12719872
  misc_feature: MA Experiment ID: 108462 Result: Down-regulated in Transcription
  misc_feature: MA Experiment 108462 PARAMETER Experiment Name: At_Germinating_Seeds_cDNA_P Parameter: Age (day) Value: 2 vs. 0
  misc_feature: MA Experiment 108462 PARAMETER Experiment Name: At_Germinating_Seeds_cDNA_P Parameter: Tissue Value: Germinating Seeds
  misc_feature: MA Experiment ID: 108463 Result: Down-regulated in Transcription
  misc_feature: MA Experiment 108463 PARAMETER Experiment Name: At_Germinating_Seeds_cDNA_P Parameter: Age (day) Value: 3 vs. 0
  misc_feature: MA Experiment 108463 PARAMETER Experiment Name: At_Germinating_Seeds_cDNA_P Parameter: Tissue Value: Germinating Seeds
  misc_feature: MA Experiment ID: 108464 Result: Down-regulated in Transcription
  misc_feature: MA Experiment 108464 PARAMETER Experiment Name: At_Germinating_Seeds_cDNA_P Parameter: Age (day) Value: 4 vs. 0
  misc_feature: MA Experiment 108464 PARAMETER Experiment Name: At_Germinating_Seeds_cDNA_P Parameter: Tissue Value: Germinating Seeds
  misc_feature: MA Experiment ID: 108573 Result: Down-regulated in Transcription
  misc_feature: MA Experiment 108573 PARAMETER Experiment Name: At_Drought_cDNA_P Parameter: Timepoint (hr) Value: 6
  misc_feature: MA Experiment 108573 PARAMETER Experiment Name: At_Drought_cDNA_P Parameter: Tissue Value: Aerial
  misc_feature: MA Experiment 108573 PARAMETER Experiment Name: At_Drought_cDNA_P Parameter: Treatment Value: Drought vs. No Drought
  misc_feature: MA Experiment ID: 20000224 Result: Up-regulated in Transcription
  misc_feature: MA Experiment ID: 20000227 Result: Up-regulated in Transcription
  misc_feature: MA Experiment 20000227 PARAMETER Experiment Name: At_Root-Tips-vs-Tops_P Parameter: Tissue Value: Root Tips vs. Root Tops
  misc_feature: MA Experiment ID: 20000234 Result: Up-regulated in Transcription
  misc_feature: MA Experiment 20000234 PARAMETER Experiment Name: At_Siliques_P Parameter: Age (day) Value: 21
  misc_feature: MA Experiment 20000234 PARAMETER Experiment Name: At_Siliques_P Parameter: Organism Value: A. thaliana
  misc_feature: MA Experiment 20000234 PARAMETER Experiment Name: At_Siliques_P Parameter: Plant Line Value: WS
  misc_feature: MA Experiment 20000234 PARAMETER Experiment Name: At_Siliques_P Parameter: Tissue Value: Less Than 5mm Siliques vs. Whole Plant
  misc_feature: MA Experiment ID: 20001560 Result: Up-regulated in Transcription
  misc_feature: MA Experiment 20001560 PARAMETER Experiment Name: At_Drought_Soil_Dry_P Parameter: Age (day) Value: 28
  misc_feature: MA Experiment 20001560 PARAMETER Experiment Name: At_Drought_Soil_Dry_P Parameter: Organism Value: A. thaliana
  misc_feature: MA Experiment 20001560 PARAMETER Experiment Name: At_Drought_Soil_Dry_P Parameter: Plant Line Value: WS
  misc_feature: MA Experiment 20001560 PARAMETER Experiment Name: At_Drought_Soil_Dry_P Parameter: Post Timepoint (hr) Value: None
  misc_feature: MA Experiment 20001560 PARAMETER Experiment Name: At_Drought_Soil_Dry_P Parameter: Post-Treatment Value: None
  misc_feature: MA Experiment 20001560 PARAMETER Experiment Name: At_Drought_Soil_Dry_P Parameter: Timepoint (day) Value: 14
  misc_feature: MA Experiment 20001560 PARAMETER Experiment Name: At_Drought_Soil_Dry_P Parameter: Treatment Value: Drought vs. No Drought

SEQ ID NO: 93420 - protein, 212 aa, Arabidopsis thaliana; identical to SEQ ID NO: 25892
  peptide (1)..(212): Ceres Seq. ID no. 12719873
  misc_feature (134)..(208): Pfam Name: Ribosomal protein S19 Pfam Description: Ribosomal protein S19
  misc_feature (1)..(212): Homolog of NCBI NO: 8809615 NR Description: 40S ribosomal protein S19 [Arabidopsis thaliana]
  misc_feature (1)..(212): Homolog of NCBI NO: 18422781 NR Description: 40S ribosomal protein S19, mitochondrial protein id: At5g47320.1, supported by cDNA: gi_15028320, by cDNA: gi_20259154 [Arabidopsis thaliana]
  misc_feature (1)..(212): Homolog of NCBI NO: 2129722 NR Description: ribosomal protein S19 precursor, mitochondrial - thaliana >gi|457760|emb|CAA54951.1| ribosomal protein S19
  misc_feature (1)..(116): Homolog of NCBI NO: 15229525 NR Description: glycine-rich RNA-binding protein; protein id: supported by cDNA: 18903., supported by cDNA: gi_17979515,
  misc_feature (1)..(116): Homolog of NCBI NO: 21553972 NR Description: glycine-rich RNA binding protein, putative
  misc_feature (1)..(114): Homolog of NCBI NO: 2826811 NR Description: AtGRP2 [Arabidopsis thaliana]
  misc_feature (1)..(114): Homolog of NCBI NO: 15236359 NR Description: glycine-rich RNA-binding protein AtGRP2; protein At4g13850.1, supported by cDNA: 16314., supported by cDNA:
  misc_feature (1)..(114): Homolog of NCBI NO: 30682622 NR Description: glycine-rich RNA-binding protein (AtGRP2)
  misc_feature (1)..(114): Homolog of NCBI NO: 7439994 NR Description: glycine-rich RNA-binding protein - garden pea
  misc_feature (16)..(114): Homolog of NCBI NO: 322514 NR Description: glycine-rich RNA-binding protein (clone A81) -

SEQ ID NO: 93421 - protein, 191 aa, Arabidopsis thaliana; identical to SEQ ID NO: 25893
  peptide (1)..(191): Ceres Seq. ID no. 12719874
  misc_feature (113)..(187): Pfam Name: Ribosomal protein S19 Pfam Description: Ribosomal protein S19
  misc_feature (1)..(191): Homolog of NCBI NO: 8809615 NR Description: 40S ribosomal protein S19 [Arabidopsis thaliana]
  misc_feature (1)..(191): Homolog of NCBI NO: 18422781 NR Description: 40S ribosomal protein S19, mitochondrial protein id: At5g47320.1, supported by cDNA: gi_15028320, by cDNA: gi_20259154 [Arabidopsis thaliana]
  misc_feature (1)..(191): Homolog of NCBI NO: 2129722 NR Description: ribosomal protein S19 precursor, mitochondrial - thaliana >gi|457760|emb|CAA54951.1| ribosomal protein S19
  misc_feature (1)..(95): Homolog of NCBI NO: 15229525 NR Description: glycine-rich RNA-binding protein; protein id: supported by cDNA: 18903., supported by cDNA: gi_17979515,
  misc_feature (1)..(95): Homolog of NCBI NO: 21553972 NR Description: glycine-rich RNA binding protein, putative
  misc_feature (1)..(93): Homolog of NCBI NO: 2826811 NR Description: AtGRP2 [Arabidopsis thaliana]
  misc_feature (1)..(93): Homolog of NCBI NO: 15236359 NR Description: glycine-rich RNA-binding protein AtGRP2; protein At4g13850.1, supported by cDNA: 16314., supported by cDNA:
  misc_feature (1)..(93): Homolog of NCBI NO: 30682622 NR Description: glycine-rich RNA-binding protein (AtGRP2)
  misc_feature (1)..(93): Homolog of NCBI NO: 7439994 NR Description: glycine-rich RNA-binding protein - garden pea
  misc_feature (1)..(93): Homolog of NCBI NO: 322514 NR Description: glycine-rich RNA-binding protein (clone A81) -

SEQ ID NO: 93422 - protein, 184 aa, Arabidopsis thaliana; identical to SEQ ID NO: 25894
  peptide (1)..(184): Ceres Seq. ID no. 12719875
  misc_feature (106)..(180): Pfam Name: Ribosomal protein S19 Pfam Description: Ribosomal protein S19
  misc_feature (1)..(184): Homolog of NCBI NO: 8809615 NR Description: 40S ribosomal protein S19 [Arabidopsis thaliana]
  misc_feature (1)..(184): Homolog of NCBI NO: 18422781 NR Description: 40S ribosomal protein S19, mitochondrial protein id: At5g47320.1, supported by cDNA: gi_15028320, by cDNA: gi_20259154 [Arabidopsis thaliana]
  misc_feature (1)..(184): Homolog of NCBI NO: 2129722 NR Description: ribosomal protein S19 precursor, mitochondrial - thaliana >gi|457760|emb|CAA54951.1| ribosomal protein S19
  misc_feature (1)..(88): Homolog of NCBI NO: 15229525 NR Description: glycine-rich RNA-binding protein; protein id: supported by cDNA: 18903., supported by cDNA: gi_17979515,
  misc_feature (1)..(88): Homolog of NCBI NO: 21553972 NR Description: glycine-rich RNA binding protein, putative
  misc_feature (1)..(86): Homolog of NCBI NO: 2826811 NR Description: AtGRP2 [Arabidopsis thaliana]
  misc_feature (1)..(86): Homolog of NCBI NO: 15236359 NR Description: glycine-rich RNA-binding protein AtGRP2; protein At4g13850.1, supported by cDNA: 16314., supported by cDNA:
  misc_feature (1)..(86): Homolog of NCBI NO: 30682622 NR Description: glycine-rich RNA-binding protein (AtGRP2)
  misc_feature (1)..(86): Homolog of NCBI NO: 7439994 NR Description: glycine-rich RNA-binding protein - garden pea
  misc_feature (1)..(86): Homolog of NCBI NO: 322514 NR Description: glycine-rich RNA-binding protein (clone A81) -

SEQ ID NO: 93423 - DNA, 680 bp, Arabidopsis thaliana; identical to SEQ ID NO: 89667
  misc_feature (1)..(680): Ceres Seq. ID no. 12719880
  misc_feature: MA Experiment ID: 20000071 Result: Down-regulated in Transcription
  misc_feature: MA Experiment 20000071 PARAMETER Experiment Name: At_100uM_ABA_Mutants_cDNA_P Parameter: Plant Line Value: CS8104
  misc_feature: MA Experiment 20000071 PARAMETER Experiment Name: At_100uM_ABA_Mutants_cDNA_P Parameter: Timepoint (hr) Value: 6
  misc_feature: MA Experiment 20000071 PARAMETER Experiment Name: At_100uM_ABA_Mutants_cDNA_P Parameter: Tissue Value: Aerial
  misc_feature: MA Experiment 20000071 PARAMETER Experiment Name: At_100uM_ABA_Mutants_cDNA_P Parameter: Treatment Value: 100uM ABA vs. No Treatment
  misc_feature: MA Experiment ID: 20000437 Result: Down-regulated in Transcription
  misc_feature: MA Experiment 20000437 PARAMETER Experiment Name: At_Drought_P Parameter: Age (day) Value: 8
  misc_feature: MA Experiment 20000437 PARAMETER Experiment Name: At_Drought_P Parameter: Organism Value: A. thaliana
  misc_feature: MA Experiment 20000437 PARAMETER Experiment Name: At_Drought_P Parameter: Plant Line Value: WS
  misc_feature: MA Experiment 20000437 PARAMETER Experiment Name: At_Drought_P Parameter: Timepoint (hr) Value: 24
  misc_feature: MA Experiment 20000437 PARAMETER Experiment Name: At_Drought_P Parameter: Tissue Value: Whole Plant
  misc_feature: MA Experiment 20000437 PARAMETER Experiment Name: At_Drought_P Parameter: Treatment Value: Drought vs. No Drought
  misc_feature: MA Experiment ID: 20001557 Result: Up-regulated in Transcription
  misc_feature: MA Experiment 20001557 PARAMETER Experiment Name: At_Drought_Soil_Dry_P Parameter: Age (day) Value: 27
  misc_feature: MA Experiment 20001557 PARAMETER Experiment Name: At_Drought_Soil_Dry_P Parameter: Organism Value: A. thaliana
  misc_feature: MA Experiment 20001557 PARAMETER Experiment Name: At_Drought_Soil_Dry_P Parameter: Plant Line Value: WS
  misc_feature: MA Experiment 20001557 PARAMETER Experiment Name: At_Drought_Soil_Dry_P Parameter: Post Timepoint (hr) Value: 3
  misc_feature: MA Experiment 20001557 PARAMETER Experiment Name: At_Drought_Soil_Dry_P Parameter: Post-Treatment Value: Re-Water vs. No Drought
  misc_feature: MA Experiment 20001557 PARAMETER Experiment Name: At_Drought_Soil_Dry_P Parameter: Timepoint (day) Value: 13
  misc_feature: MA Experiment 20001557 PARAMETER Experiment Name: At_Drought_Soil_Dry_P Parameter: Treatment Value: Drought vs. No Drought
  misc_feature: MA Experiment ID: 20001558 Result: Up-regulated in Transcription
  misc_feature: MA Experiment 20001558 PARAMETER Experiment Name: At_Drought_Soil_Dry_P Parameter: Age (day) Value: 27
  misc_feature: MA Experiment 20001558 PARAMETER Experiment Name: At_Drought_Soil_Dry_P Parameter: Organism Value: A. thaliana
  misc_feature: MA Experiment 20001558 PARAMETER Experiment Name: At_Drought_Soil_Dry_P Parameter: Plant Line Value: WS
  misc_feature: MA Experiment 20001558 PARAMETER Experiment Name: At_Drought_Soil_Dry_P Parameter: Post Timepoint (hr) Value: 6
  misc_feature: MA Experiment 20001558 PARAMETER Experiment Name: At_Drought_Soil_Dry_P Parameter: Post-Treatment Value: Re-Water vs. No Drought
  misc_feature: MA Experiment 20001558 PARAMETER Experiment Name: At_Drought_Soil_Dry_P Parameter: Timepoint (day) Value: 13
  misc_feature: MA Experiment 20001558 PARAMETER Experiment Name: At_Drought_Soil_Dry_P Parameter: Treatment Value: Drought vs. No Drought

SEQ ID NO: 93424 - protein, 95 aa, Arabidopsis thaliana; identical to SEQ ID NO: 89668
  peptide (1)..(95): Ceres Seq. ID no. 12719881
  misc_feature (1)..(72): Homolog of NCBI NO: 15238039 NR Description: putative protein; protein id: At5g47210.1, by cDNA: 19104. [Arabidopsis thaliana] gene_id:MQL5.6~pir||G71444~similar to unknown protein
  misc_feature (1)..(72): Homolog of NCBI NO: 21553991 NR Description: nuclear RNA binding protein A-like protein
  misc_feature (1)..(84): Homolog of NCBI NO: 15236552 NR Description: nuclear RNA binding protein A-like protein; id: At4g17520.1, supported by cDNA: 35156., supported by cDNA: supported by cDNA: gi_19698830 [Arabidopsis thaliana]
  misc_feature (1)..(84): Homolog of NCBI NO: 21593013 NR Description: nuclear RNA binding protein A-like protein
  misc_feature (1)..(79): Homolog of NCBI NO: 15235894 NR Description: nuclear antigen homolog; protein id: At4g16830.1, by cDNA: 118826., supported by cDNA: gi_17380879, supported by gi_20465928 [Arabidopsis thaliana] >gi|7488137|pir||F71435
  misc_feature (1)..(78): Homolog of NCBI NO: 39725278 NR Description: salt tolerance protein 2 [Beta vulgaris]
  misc_feature (1)..(78): Homolog of NCBI NO: 6492266 NR Description: nuclear RNA binding protein A [Spinacia oleracea]
  misc_feature (1)..(79): Homolog of NCBI NO: 21537052 NR Description: nuclear antigen homolog [Arabidopsis thaliana]
  misc_feature (1)..(75): Homolog of NCBI NO: 7488863 NR Description: probable transcription factor - fava bean
  misc_feature (1)..(75): Homolog of NCBI NO: 39725276 NR Description: salt tolerance protein 1 [Beta vulgaris]

SEQ ID NO: 93425 - protein, 59 aa, Arabidopsis thaliana; identical to SEQ ID NO: 89669
  peptide (1)..(59): Ceres Seq. ID no. 12719882

SEQ ID NO: 93426 - DNA, 1077 bp, Arabidopsis thaliana; identical to SEQ ID NO: 89670
  misc_feature (1)..(1077): Ceres Seq. ID no. 12719900
  misc_feature: MA Experiment ID: 20000234 Result: Up-regulated in Transcription
  misc_feature: MA Experiment 20000234 PARAMETER Experiment Name: At_Siliques_P Parameter: Age (day) Value: 21
  misc_feature: MA Experiment 20000234 PARAMETER Experiment Name: At_Siliques_P Parameter: Organism Value: A. thaliana
  misc_feature: MA Experiment 20000234 PARAMETER Experiment Name: At_Siliques_P Parameter: Plant Line Value: WS
  misc_feature: MA Experiment 20000234 PARAMETER Experiment Name: At_Siliques_P Parameter: Tissue Value: Less Than 5mm Siliques vs. Whole Plant
  misc_feature: MA Experiment ID: 20000264 Result: Up-regulated in Transcription
  misc_feature: MA Experiment 20000264 PARAMETER Experiment Name: At_Open_Flower_P Parameter: Age (day) Value: 21
  misc_feature: MA Experiment 20000264 PARAMETER Experiment Name: At_Open_Flower_P Parameter: Plant Line Value: WS
  misc_feature: MA Experiment 20000264 PARAMETER Experiment Name: At_Open_Flower_P Parameter: Tissue Value: Open Flower vs. Whole Plant
  misc_feature: MA Experiment ID: 20000495 Result: Up-regulated in Transcription
  misc_feature: MA Experiment 20000495 PARAMETER Experiment Name: At_Guard_Cells_P Parameter: Harvest Date Value: 8/2/2002
  misc_feature: MA Experiment 20000495 PARAMETER Experiment Name: At_Guard_Cells_P Parameter: Organism Value: A. thaliana
  misc_feature: MA Experiment 20000495 PARAMETER Experiment Name: At_Guard_Cells_P Parameter: Tissue Value: Guard Cells vs. Leaves
  misc_feature: MA Experiment ID: 20001451 Result: Up-regulated in Transcription
  misc_feature: MA Experiment 20001451 PARAMETER Experiment Name: At_Far-red-induction_P Parameter: Age (day) Value: 7
  misc_feature: MA Experiment 20001451 PARAMETER Experiment Name: At_Far-red-induction_P Parameter: Light Value: Far-red vs. White
  misc_feature: MA Experiment 20001451 PARAMETER Experiment Name: At_Far-red-induction_P Parameter: Organism Value: A. thaliana
  misc_feature: MA Experiment 20001451 PARAMETER Experiment Name: At_Far-red-induction_P Parameter: Plant Line Value: Columbia
  misc_feature: MA Experiment 20001451 PARAMETER Experiment Name: At_Far-red-induction_P Parameter: Timepoint (hr) Value: 24
  misc_feature: MA Experiment 20001451 PARAMETER Experiment Name: At_Far-red-induction_P Parameter: Tissue Value: Whole Plant

SEQ ID NO: 93427 - protein, 358 aa, Arabidopsis thaliana; identical to SEQ ID NO: 89671
  peptide (1)..(358): Ceres Seq. ID no. 12719901
  misc_feature (155)..(347): Pfam Name: Domain of unknown function, DUF250 Pfam Description: Domain of unknown function, DUF250
  misc_feature (1)..(358): Homolog of NCBI NO: 30685825 NR Description: purine permease family [Arabidopsis thaliana]
  misc_feature (3)..(358): Homolog of NCBI NO: 25350217 NR Description: hypothetical protein At2g33750 [imported] - thaliana >gi|1707019|gb|AAC69140.1| hypothetical protein
  misc_feature (3)..(358): Homolog of NCBI NO: 15217873 NR Description: purine permease; protein id: At1g28230.1, by cDNA: gi_7620006 [Arabidopsis thaliana]
  misc_feature (3)..(358): Homolog of NCBI NO: 7620007 NR Description: purine permease [Arabidopsis thaliana]
  misc_feature (3)..(355): Homolog of NCBI NO: 15217872 NR Description: purine permease, putative; protein id: At1g28220.1
  misc_feature (5)..(344): Homolog of NCBI NO: 34902418 NR Description: Hypothetical protein [Oryza sativa (japonica group)] >gi|24756874|gb|AAN64138.1| Hypothetical protein [Oryza
  misc_feature (6)..(332): Homolog of NCBI NO: 15219436 NR Description: hypothetical protein; protein id: At1g44750.1, by cDNA: gi_17065411 [Arabidopsis thaliana]
  misc_feature (8)..(347): Homolog of NCBI NO: 18491221 NR Description: unknown protein [Arabidopsis thaliana]
  misc_feature (17)..(355): Homolog of NCBI NO: 15236799 NR Description: putative protein; protein id: At4g18220.1
  misc_feature (8)..(347): Homolog of NCBI NO: 15236796 NR Description: putative protein; protein id: At4g18200.1

SEQ ID NO: 93428 - protein, 356 aa, Arabidopsis thaliana; identical to SEQ ID NO: 89672
  peptide (1)..(356): Ceres Seq. ID no. 12719902
  misc_feature (153)..(345): Pfam Name: Domain of unknown function, DUF250 Pfam Description: Domain of unknown function, DUF250
  misc_feature (1)..(356): Homolog of NCBI NO: 30685825 NR Description: purine permease family [Arabidopsis thaliana]
  misc_feature (1)..(356): Homolog of NCBI NO: 25350217 NR Description: hypothetical protein At2g33750 [imported] - thaliana >gi|1707019|gb|AAC69140.1| hypothetical protein
  misc_feature (1)..(356): Homolog of NCBI NO: 15217873 NR Description: purine permease; protein id: At1g28230.1, by cDNA: gi_7620006 [Arabidopsis thaliana]
  misc_feature (1)..(356): Homolog of NCBI NO: 7620007 NR Description: purine permease [Arabidopsis thaliana]
  misc_feature (1)..(353): Homolog of NCBI NO: 15217872 NR Description: purine permease, putative; protein id: At1g28220.1
  misc_feature (3)..(342): Homolog of NCBI NO: 34902418 NR Description: Hypothetical protein [Oryza sativa (japonica group)] >gi|24756874|gb|AAN64138.1| Hypothetical protein [Oryza
  misc_feature (4)..(330): Homolog of NCBI NO: 15219436 NR Description: hypothetical protein; protein id: At1g44750.1, by cDNA: gi_17065411 [Arabidopsis thaliana]
  misc_feature (6)..(345): Homolog of NCBI NO: 18491221 NR Description: unknown protein [Arabidopsis thaliana]
  misc_feature (15)..(353): Homolog of NCBI NO: 15236799 NR Description: putative protein; protein id: At4g18220.1
  misc_feature (6)..(345): Homolog of NCBI NO: 15236796 NR Description: putative protein; protein id: At4g18200.1

SEQ ID NO: 93429 - protein, 334 aa, Arabidopsis thaliana; identical to SEQ ID NO: 89673
  peptide (1)..(334): Ceres Seq. ID no. 12719903
  misc_feature (131)..(323): Pfam Name: Domain of unknown function, DUF250 Pfam Description: Domain of unknown function, DUF250
  misc_feature (1)..(334): Homolog of NCBI NO: 30685825 NR Description: purine permease family [Arabidopsis thaliana]
  misc_feature (1)..(334): Homolog of NCBI NO: 25350217 NR Description: hypothetical protein At2g33750 [imported] - thaliana >gi|1707019|gb|AAC69140.1| hypothetical protein
  misc_feature (1)..(334): Homolog of NCBI NO: 15217873 NR Description: purine permease; protein id: At1g28230.1, by cDNA: gi_7620006 [Arabidopsis thaliana]
  misc_feature (1)..(334): Homolog of NCBI NO: 7620007 NR Description: purine permease [Arabidopsis thaliana]
  misc_feature (1)..(331): Homolog of NCBI NO: 15217872 NR Description: purine permease, putative; protein id: At1g28220.1
  misc_feature (1)..(320): Homolog of NCBI NO: 34902418 NR Description: Hypothetical protein [Oryza sativa (japonica group)] >gi|24756874|gb|AAN64138.1| Hypothetical protein [Oryza
  misc_feature (1)..(308): Homolog of NCBI NO: 15219436 NR Description: hypothetical protein; protein id: At1g44750.1, by cDNA: gi_17065411 [Arabidopsis thaliana]
  misc_feature (1)..(323): Homolog of NCBI NO: 18491221 NR Description: unknown protein [Arabidopsis thaliana]
  misc_feature (1)..(331): Homolog of NCBI NO: 15236799 NR Description: putative protein; protein id: At4g18220.1
  misc_feature (1)..(323): Homolog of NCBI NO: 15236796 NR Description: putative protein; protein id: At4g18200.1

SEQ ID NO: 93430 - DNA, 1752 bp, Arabidopsis thaliana; identical to SEQ ID NO: 89674
  misc_feature (1)..(1752): Ceres Seq. ID no. 12719904
  misc_feature: MA Experiment ID: 20000180 Result: Down-regulated in Transcription
  misc_feature: MA Experiment 20000180 PARAMETER Experiment Name: At_Germinating_Seeds_P Parameter: Age (hr) Value: 24 vs. 0
  misc_feature: MA Experiment 20000180 PARAMETER Experiment Name: At_Germinating_Seeds_P Parameter: Tissue Value: Germinating Seeds

SEQ ID NO: 93431 - protein, 583 aa, Arabidopsis thaliana; identical to SEQ ID NO: 89675
  peptide (1)..(583): Ceres Seq. ID no. 12719905
  misc_feature (275)..(309): Pfam Name: PPR repeat Pfam Description: PPR repeat
  misc_feature (1)..(583): Homolog of NCBI NO: 15226158 NR Description: hypothetical protein; protein id: At2g33760.1
  misc_feature (18)..(583): Homolog of NCBI NO: 34393394 NR Description: putative pentatricopeptide (PPR)
  misc_feature (22)..(568): Homolog of NCBI NO: 7486979 NR Description: hypothetical protein T13K14.230 - Arabidopsis
  misc_feature (20)..(583): Homolog of NCBI NO: 15234831 NR Description: putative protein; protein id: At4g30700.1
  misc_feature (15)..(583): Homolog of NCBI NO: 15226299 NR Description: hypothetical protein; protein id: At2g01510.1
  misc_feature (26)..(583): Homolog of NCBI NO: 15220337 NR Description: hypothetical protein; protein id: At1g11290.1
  misc_feature (26)..(583): Homolog of NCBI NO: 34897884 NR Description: Similar to Arabidopsis thaliana DNA chromosome 4,
  misc_feature (45)..(583): Homolog of NCBI NO: 15223099 NR Description: unknown protein; protein id: At1g08070.1 thaliana] >gi|8778839|gb|AAF79838.1|AC026875_18 T6D22.15
  misc_feature (22)..(583): Homolog of NCBI NO: 15227067 NR Description: hypothetical protein; protein id: At2g02980.1
  misc_feature (4)..(582): Homolog of NCBI NO: 37534806 NR Description: putative PPR-repeat containing protein [Oryza

SEQ ID NO: 93432 - protein, 486 aa, Arabidopsis thaliana; identical to SEQ ID NO: 89676
  peptide (1)..(486): Ceres Seq. ID no. 12719906
  misc_feature (178)..(212): Pfam Name: PPR repeat Pfam Description: PPR repeat
  misc_feature (1)..(486): Homolog of NCBI NO: 15226158 NR Description: hypothetical protein; protein id: At2g33760.1
  misc_feature (1)..(486): Homolog of NCBI NO: 34393394 NR Description: putative pentatricopeptide (PPR)
  misc_feature (1)..(471): Homolog of NCBI NO: 7486979 NR Description: hypothetical protein T13K14.230 - Arabidopsis
  misc_feature (1)..(486): Homolog of NCBI NO: 15234831 NR Description: putative protein; protein id: At4g30700.1
  misc_feature (1)..(486): Homolog of NCBI NO: 15226299 NR Description: hypothetical protein; protein id: At2g01510.1
  misc_feature (1)..(486): Homolog of NCBI NO: 15220337 NR Description: hypothetical protein; protein id: At1g11290.1
  misc_feature (1)..(486): Homolog of NCBI NO: 34897884 NR Description: Similar to Arabidopsis thaliana DNA chromosome 4,
  misc_feature (1)..(486): Homolog of NCBI NO: 15223099 NR Description: unknown protein; protein id: At1g08070.1 thaliana] >gi|8778839|gb|AAF79838.1|AC026875_18 T6D22.15
  misc_feature (1)..(486): Homolog of NCBI NO: 15227067 NR Description: hypothetical protein; protein id: At2g02980.1
  misc_feature (1)..(485): Homolog of NCBI NO: 37534806 NR Description: putative PPR-repeat containing protein [Oryza

SEQ ID NO: 93433 - protein, 426 aa, Arabidopsis thaliana; identical to SEQ ID NO: 89677
  peptide (1)..(426): Ceres Seq. ID no. 12719907
  misc_feature (118)..(152): Pfam Name: PPR repeat Pfam Description: PPR repeat
  misc_feature (1)..(426): Homolog of NCBI NO: 15226158 NR Description: hypothetical protein; protein id: At2g33760.1
  misc_feature (1)..(426): Homolog of NCBI NO: 34393394 NR Description: putative pentatricopeptide (PPR)
  misc_feature (1)..(411): Homolog of NCBI NO: 7486979 NR Description: hypothetical protein T13K14.230 - Arabidopsis
  misc_feature (1)..(426): Homolog of NCBI NO: 15234831 NR Description: putative protein; protein id: At4g30700.1
  misc_feature (1)..(426): Homolog of NCBI NO: 15226299 NR Description: hypothetical protein; protein id: At2g01510.1
  misc_feature (1)..(426): Homolog of NCBI NO: 15220337 NR Description: hypothetical protein; protein id: At1g11290.1
  misc_feature (1)..(426): Homolog of NCBI NO: 34897884 NR Description: Similar to Arabidopsis thaliana DNA chromosome 4,
  misc_feature (1)..(426): Homolog of NCBI NO: 15223099 NR Description: unknown protein; protein id: At1g08070.1 thaliana] >gi|8778839|gb|AAF79838.1|AC026875_18 T6D22.15
  misc_feature (1)..(426): Homolog of NCBI NO: 15227067 NR Description: hypothetical protein; protein id: At2g02980.1
  misc_feature (1)..(425): Homolog of NCBI NO: 37534806 NR Description: putative PPR-repeat containing protein [Oryza

SEQ ID NO: 93434 - DNA, 660 bp, Arabidopsis thaliana; identical to SEQ ID NO: 89678
  misc_feature (1)..(660): Ceres Seq. ID no. 12719936
  misc_feature: MA Experiment ID: 20000355 Result: Up-regulated in Transcription
  misc_feature: MA Experiment 20000355 PARAMETER Experiment Name: At_Siliques_Sub_P Parameter: Age (day) Value: 21
  misc_feature: MA Experiment 20000355 PARAMETER Experiment Name: At_Siliques_Sub_P Parameter: Organism Value: A. thaliana
  misc_feature: MA Experiment 20000355 PARAMETER Experiment Name: At_Siliques_Sub_P Parameter: Plant Line Value: WS
  misc_feature: MA Experiment 20000355 PARAMETER Experiment Name: At_Siliques_Sub_P Parameter: Tissue Value: Less Than 5mm Siliques vs. Whole Plant
  misc_feature: MA Experiment ID: 20000440 Result: Up-regulated in Transcription
  misc_feature: MA Experiment 20000440 PARAMETER Experiment Name: At_Closed-Flower__Sub_P Parameter: Tissue Value: Closed Flower vs. Whole Plant

SEQ ID NO: 93435 - protein, 219 aa, Arabidopsis thaliana; identical to SEQ ID NO: 89679
  peptide (1)..(219): Ceres Seq. ID no. 12719937
  misc_feature (15)..(177): Pfam Name: Ras family Pfam Description: Ras family
  misc_feature (1)..(219): Homolog of NCBI NO: 15226182 NR Description: GTP-binding protein, putative; protein id:
  misc_feature (1)..(218): Homolog of NCBI NO: 15218719 NR Description: GTP-binding protein, putative; protein id: [Arabidopsis thaliana] >gi|6560749|gb|AAF16749.1|AC010155_2
  misc_feature (1)..(218): Homolog of NCBI NO: 10764861 NR Description: F1K23.21 [Arabidopsis thaliana]
  misc_feature (1)..(218): Homolog of NCBI NO: 7438432 NR Description: GTP-binding protein - garden pea
  misc_feature (1)..(218): Homolog of NCBI NO: 15239462 NR Description: GTP-binding protein, putative; protein id:
  misc_feature (1)..(219): Homolog of NCBI NO: 15232477 NR Description: Ras family GTP-binding protein, putative; protein
  misc_feature (1)..(219): Homolog of NCBI NO: 1370156 NR Description: RAB11H [Lotus japonicus]
  misc_feature (2)..(219): Homolog of NCBI NO: 3024504 NR Description: RAS-RELATED PROTEIN RAB11B
  misc_feature (11)..(218): Homolog of NCBI NO: 7438389 NR Description: GTP-binding protein, ras-like (clone vfa-ypt3a) - bean (fragment) >gi|452357|emb|CAA82708.1| guanine nucleotide
  misc_feature (1)..(218): Homolog of NCBI NO: 15233873 NR Description: membrane-bound small GTP-binding - like protein;

SEQ ID NO: 93436 - DNA, 1969 bp, Arabidopsis thaliana; identical to SEQ ID NO: 89680
  misc_feature (1)..(1969): Ceres Seq. ID no. 12719938
  misc_feature: MA Experiment ID: 20000794 Result: Up-regulated in Transcription
  misc_feature: MA Experiment 20000794 PARAMETER Experiment Name: At_Petals_P Parameter: Age (day) Value: 23-25 days
  misc_feature: MA Experiment 20000794 PARAMETER Experiment Name: At_Petals_P Parameter: Plant Line Value: WS
  misc_feature: MA Experiment 20000794 PARAMETER Experiment Name: At_Petals_P Parameter: Tissue Value: Petals vs. Whole plant

SEQ ID NO: 93437 - protein, 302 aa, Arabidopsis thaliana; identical to SEQ ID NO: 89681
  peptide (1)..(302): Ceres Seq. ID no. 12719939
  misc_feature (74)..(207): Pfam Name: NUDIX domain Pfam Description: NUDIX domain
  misc_feature (1)..(302): Homolog of NCBI NO: 18403412 NR Description: expressed protein; protein id: At2g33980.1, by cDNA: gi_13430755, supported by cDNA: gi_15293224 [Arabidopsis >gi|13430756|gb|AAK26000.1|AF360290_1 unknown protein
  misc_feature (1)..(259): Homolog of NCBI NO: 18396900 NR Description: Expressed protein; protein id: At1g28960.1,
  misc_feature (1)..(259): Homolog of NCBI NO: 30690557 NR Description: MutT/nudix family protein [Arabidopsis thaliana]
  misc_feature (1)..(259): Homolog of NCBI NO: 26450576 NR Description: unknown protein [Arabidopsis thaliana]
  misc_feature (1)..(259): Homolog of NCBI NO: 10764850 NR Description: F1K23.5 [Arabidopsis thaliana]
  misc_feature (1)..(153): Homolog of NCBI NO: 25370770 NR Description: hypothetical protein At2g33980 [imported] -
  misc_feature (67)..(258): Homolog of NCBI NO: 40253324 NR Description: putative phosphohydrolase [Oryza sativa (japonica group)] >gi|40253358|dbj|BAD05290.1| putative phosphohydrolase
  misc_feature (71)..(253): Homolog of NCBI NO: 21553389 NR Description: unknown [Arabidopsis thaliana]
  misc_feature (71)..(253): Homolog of NCBI NO: 15242543 NR Description: putative protein; protein id: At5g45940.1, by cDNA: 141753. [Arabidopsis thaliana] gb|AAF24540.1~gene_id:K15I22.14~similar to unknown protein
  misc_feature (51)..(241): Homolog of NCBI NO: 23470438 NR Description: hypothetical protein [Pseudomonas syringae pv.

SEQ ID NO: 93438 - protein, 237 aa, Arabidopsis thaliana; identical to SEQ ID NO: 89682
  peptide (1)..(237): Ceres Seq. ID no. 12719940
  misc_feature (9)..(142): Pfam Name: NUDIX domain Pfam Description: NUDIX domain
  misc_feature (1)..(237): Homolog of NCBI NO: 18403412 NR Description: expressed protein; protein id: At2g33980.1, by cDNA: gi_13430755, supported by cDNA: gi_15293224 [Arabidopsis >gi|13430756|gb|AAK26000.1|AF360290_1 unknown protein
  misc_feature (1)..(194): Homolog of NCBI NO: 18396900 NR Description: Expressed protein; protein id: At1g28960.1,
  misc_feature (1)..(194): Homolog of NCBI NO: 30690557 NR Description: MutT/nudix family protein [Arabidopsis thaliana]
  misc_feature (1)..(194): Homolog of NCBI NO: 26450576 NR Description: unknown protein [Arabidopsis thaliana]
  misc_feature (1)..(194): Homolog of NCBI NO: 10764850 NR Description: F1K23.5 [Arabidopsis thaliana]
  misc_feature (1)..(88): Homolog of NCBI NO: 25370770 NR Description: hypothetical protein At2g33980 [imported] -
  misc_feature (2)..(193): Homolog of NCBI NO: 40253324 NR Description: putative phosphohydrolase [Oryza sativa (japonica group)] >gi|40253358|dbj|BAD05290.1| putative phosphohydrolase
  misc_feature (6)..(188): Homolog of NCBI NO: 21553389 NR Description: unknown [Arabidopsis thaliana]
  misc_feature (6)..(188): Homolog of NCBI NO: 15242543 NR Description: putative protein; protein id: At5g45940.1, by cDNA: 141753. [Arabidopsis thaliana] gb|AAF24540.1~gene_id:K15I22.14~similar to unknown protein
  misc_feature (1)..(176): Homolog of NCBI NO: 23470438 NR Description: hypothetical protein [Pseudomonas syringae pv.

SEQ ID NO: 93439 - DNA, 750 bp, Arabidopsis thaliana; identical to SEQ ID NO: 89683
  misc_feature (1)..(750): Ceres Seq. ID no. 12719941
  misc_feature: MA Experiment ID: 20000184 Result: Down-regulated in Transcription
  misc_feature: MA Experiment 20000184 PARAMETER Experiment Name: At_Shoots__P Parameter: Age (day) Value: 7
  misc_feature: MA Experiment 20000184 PARAMETER Experiment Name: At_Shoots__P Parameter: Tissue Value: Shoots vs. Whole Plant
  misc_feature: MA Experiment ID: 20000264 Result: Down-regulated in Transcription
  misc_feature: MA Experiment 20000264 PARAMETER Experiment Name: At_Open_Flower_P Parameter: Age (day) Value: 21
  misc_feature: MA Experiment 20000264 PARAMETER Experiment Name: At_Open_Flower_P Parameter: Plant Line Value: WS
  misc_feature: MA Experiment 20000264 PARAMETER Experiment Name: At_Open_Flower_P Parameter: Tissue Value: Open Flower vs. Whole Plant
  misc_feature: MA Experiment ID: 20000265 Result: Down-regulated in Transcription
  misc_feature: MA Experiment 20000265 PARAMETER Experiment Name: At_Open_Flower_P Parameter: Age (day) Value: 21
  misc_feature: MA Experiment 20000265 PARAMETER Experiment Name: At_Open_Flower_P Parameter: Plant Line Value: WS
  misc_feature: MA Experiment 20000265 PARAMETER Experiment Name: At_Open_Flower_P Parameter: Tissue Value: Closed Flower vs. Whole Plant
  misc_feature: MA Experiment ID: 20000286 Result: Down-regulated in Transcription
  misc_feature: MA Experiment 20000286 PARAMETER Experiment Name: At_Open_Flower_P Parameter: Age (day) Value: 21
  misc_feature: MA Experiment 20000286 PARAMETER Experiment Name: At_Open_Flower_P Parameter: Plant Line Value: WS
  misc_feature: MA Experiment 20000286 PARAMETER Experiment Name: At_Open_Flower_P Parameter: Tissue Value: Half Open vs. Whole Plant
  misc_feature: MA Experiment ID: 20000438 Result: Down-regulated in Transcription
  misc_feature: MA Experiment 20000438 PARAMETER Experiment Name: At_Shoots__P Parameter: Age (day) Value: 14
  misc_feature: MA Experiment 20000438 PARAMETER Experiment Name: At_Shoots__P Parameter: Tissue Value: Shoots vs. Whole Plant
  misc_feature: MA Experiment ID: 20000439 Result: Down-regulated in Transcription
  misc_feature: MA Experiment 20000439 PARAMETER Experiment Name: At_Roots__P Parameter: Age (day) Value: 14 vs. 21
  misc_feature: MA Experiment 20000439 PARAMETER Experiment Name: At_Roots__P Parameter: Organism Value: A. thaliana
  misc_feature: MA Experiment 20000439 PARAMETER Experiment Name: At_Roots__P Parameter: Tissue Value: Roots vs. Whole Plant
  misc_feature: MA Experiment ID: 20001247 Result: Up-regulated in Transcription
  misc_feature: MA Experiment 20001247 PARAMETER Experiment Name: At_Far-red-induction_P Parameter: Age (day) Value: 7
  misc_feature: MA Experiment 20001247 PARAMETER Experiment Name: At_Far-red-induction_P Parameter: Light Value: Far-red vs. White
  misc_feature: MA Experiment 20001247 PARAMETER Experiment Name: At_Far-red-induction_P Parameter: Organism Value: A. thaliana
  misc_feature: MA Experiment 20001247 PARAMETER Experiment Name: At_Far-red-induction_P Parameter: Plant Line Value: Columbia
  misc_feature: MA Experiment 20001247 PARAMETER Experiment Name: At_Far-red-induction_P Parameter: Timepoint (hr) Value: 1
  misc_feature: MA Experiment 20001247 PARAMETER Experiment Name: At_Far-red-induction_P Parameter: Tissue Value: Whole Plant
  misc_feature: MA Experiment ID: 20001451 Result: Up-regulated in Transcription
  misc_feature: MA Experiment 20001451 PARAMETER Experiment Name: At_Far-red-induction_P Parameter: Age (day) Value: 7
  misc_feature: MA Experiment 20001451 PARAMETER Experiment Name: At_Far-red-induction_P Parameter: Light Value: Far-red vs. White
  misc_feature: MA Experiment 20001451 PARAMETER Experiment Name: At_Far-red-induction_P Parameter: Organism Value: A. thaliana
  misc_feature: MA Experiment 20001451 PARAMETER Experiment Name: At_Far-red-induction_P Parameter: Plant Line Value: Columbia
  misc_feature: MA Experiment 20001451 PARAMETER Experiment Name: At_Far-red-induction_P Parameter: Timepoint (hr) Value: 24
  misc_feature: MA Experiment 20001451 PARAMETER Experiment Name: At_Far-red-induction_P Parameter: Tissue Value: Whole Plant
  misc_feature: MA Experiment ID: 20001905 Result: Down-regulated in Transcription
  misc_feature: MA Experiment 20001905 PARAMETER Experiment Name: At_Drought_Reproduction_P Parameter: Age (day) Value: 40
  misc_feature: MA Experiment 20001905 PARAMETER Experiment Name: At_Drought_Reproduction_P Parameter: Organism Value: A. thaliana
  misc_feature: MA Experiment 20001905 PARAMETER Experiment Name: At_Drought_Reproduction_P Parameter: Plant Line Value: WS
  misc_feature: MA Experiment 20001905 PARAMETER Experiment Name: At_Drought_Reproduction_P Parameter: Timepoint (day) Value: 10
  misc_feature: MA Experiment 20001905 PARAMETER Experiment Name: At_Drought_Reproduction_P Parameter: Tissue Value: Rosettes
  misc_feature: MA Experiment 20001905 PARAMETER Experiment Name: At_Drought_Reproduction_P Parameter: Treatment Value: Drought vs. No Drought

SEQ ID NO: 93440 - protein, 249 aa, Arabidopsis thaliana; identical to SEQ ID NO: 89684
  peptide (1)..(249): Ceres Seq. ID no. 12719942
  misc_feature (47)..(67): Pfam Name: IQ calmodulin-binding motif Pfam Description: IQ calmodulin-binding motif
  misc_feature (1)..(249): Homolog of NCBI NO: 15226186 NR Description: putative SF16 protein {Helianthus annuus}; id: At2g33990.1 [Arabidopsis thaliana] >gi|25408319|pir||A84751
  misc_feature (1)..(241): Homolog of NCBI NO: 15232474 NR Description: hypothetical protein; protein id: At3g15050.1 thaliana] >gi|8777488|dbj|BAA97068.1| contains similarity to SF16
  misc_feature (46)..(175): Homolog of NCBI NO: 15225258 NR Description: putative SF16 protein {Helianthus annuus}; id: At2g26180.1 [Arabidopsis thaliana] >gi|25367166|pir||D84657
  misc_feature (160)..(231): Homolog of NCBI NO: 15225258 NR Description: putative SF16 protein {Helianthus annuus}; id: At2g26180.1 [Arabidopsis thaliana] >gi|25367166|pir||D84657
  misc_feature (46)..(239): Homolog of NCBI NO: 11994738 NR Description: contains similarity to SF16
  misc_feature (45)..(222): Homolog of NCBI NO: 15982840 NR Description: AT5g03040/F15A17_70 [Arabidopsis thaliana]
  misc_feature (46)..(247): Homolog of NCBI NO: 15231175 NR Description: unknown protein; protein id: At3g52290.1
  misc_feature (45)..(196): Homolog of NCBI NO: 18414094 NR Description: putative protein; protein id: At5g03040.1,
  misc_feature (46)..(237): Homolog of NCBI NO: 15232741 NR Description: putative SF16 protein; protein id: At3g09710.1 thaliana] >gi|6682249|gb|AAF23301.1|AC016661_26 putative SF16
  misc_feature (45)..(215): Homolog of NCBI NO: 11292162 NR Description: hypothetical protein F15A17.70 - Arabidopsis >gi|7413581|emb|CAB86071.1| putative protein [Arabidopsis

SEQ ID NO: 93441 - protein, 138 aa, Arabidopsis thaliana; identical to SEQ ID NO: 89685
  peptide (1)..(138): Ceres Seq. ID no. 12719943
  misc_feature (1)..(138): Homolog of NCBI NO: 15226186 NR Description: putative SF16 protein {Helianthus annuus}; id: At2g33990.1 [Arabidopsis thaliana] >gi|25408319|pir||A84751
  misc_feature (1)..(130): Homolog of NCBI NO: 15232474 NR Description: hypothetical protein; protein id: At3g15050.1 thaliana] >gi|8777488|dbj|BAA97068.1| contains similarity to SF16
  misc_feature (1)..(64): Homolog of NCBI NO: 15225258 NR Description: putative SF16 protein {Helianthus annuus}; id: At2g26180.1 [Arabidopsis thaliana] >gi|25367166|pir||D84657
  misc_feature (49)..(120): Homolog of NCBI NO: 15225258 NR Description: putative SF16 protein {Helianthus annuus}; id: At2g26180.1 [Arabidopsis thaliana] >gi|25367166|pir||D84657
  misc_feature (1)..(128): Homolog of NCBI NO: 11994738 NR Description: contains similarity to SF16
  misc_feature (1)..(111): Homolog of NCBI NO: 15982840 NR Description: AT5g03040/F15A17_70 [Arabidopsis thaliana]
  misc_feature (1)..(136): Homolog of NCBI NO: 15231175 NR Description: unknown protein; protein id: At3g52290.1
  misc_feature (1)..(85): Homolog of NCBI NO: 18414094 NR Description: putative protein; protein id: At5g03040.1,
  misc_feature (1)..(126): Homolog of NCBI NO: 15232741 NR Description: putative SF16 protein; protein id: At3g09710.1 thaliana] >gi|6682249|gb|AAF23301.1|AC016661_26 putative SF16
  misc_feature (1)..(104): Homolog of NCBI NO: 11292162 NR Description: hypothetical protein F15A17.70 - Arabidopsis >gi|7413581|emb|CAB86071.1| putative protein [Arabidopsis

SEQ ID NO: 93442 - DNA, 1038 bp, Arabidopsis thaliana; identical to SEQ ID NO: 89686
  misc_feature (1)..(1038): Ceres Seq. ID no. 12719946
  misc_feature: MA Experiment ID: 20000306 Result: Up-regulated in Transcription
  misc_feature: MA Experiment 20000306 PARAMETER Experiment Name: At_Germinating_Seeds_Sub_P Parameter: Age (hr) Value: 6 vs. 0
  misc_feature: MA Experiment 20000306 PARAMETER Experiment Name: At_Germinating_Seeds_Sub_P Parameter: Organism Value: A. thaliana
  misc_feature: MA Experiment 20000306 PARAMETER Experiment Name: At_Germinating_Seeds_Sub_P Parameter: Plant Line Value: WS
  misc_feature: MA Experiment 20000306 PARAMETER Experiment Name: At_Germinating_Seeds_Sub_P Parameter: Tissue Value: Germinating Seeds
  misc_feature: MA Experiment ID: 20000307 Result: Up-regulated in Transcription
  misc_feature: MA Experiment 20000307 PARAMETER Experiment Name: At_Germinating_Seeds_Sub_P Parameter: Age (hr) Value: 24 vs. 0
  misc_feature: MA Experiment 20000307 PARAMETER Experiment Name: At_Germinating_Seeds_Sub_P Parameter: Organism Value: A. thaliana
  misc_feature: MA Experiment 20000307 PARAMETER Experiment Name: At_Germinating_Seeds_Sub_P Parameter: Plant Line Value: WS
  misc_feature: MA Experiment 20000307 PARAMETER Experiment Name: At_Germinating_Seeds_Sub_P Parameter: Tissue Value: Germinating Seeds
  misc_feature: MA Experiment ID: 20000314 Result: Up-regulated in Transcription
  misc_feature: MA Experiment 20000314 PARAMETER Experiment Name: At_14day_Shoots-Roots_Sub_P Parameter: Age (day) Value: 14
  misc_feature: MA Experiment 20000314 PARAMETER Experiment Name: At_14day_Shoots-Roots_Sub_P Parameter: Organism Value: A. thaliana
  misc_feature: MA Experiment 20000314 PARAMETER Experiment Name: At_14day_Shoots-Roots_Sub_P Parameter: Plant Line Value: WS
  misc_feature: MA Experiment 20000314 PARAMETER Experiment Name: At_14day_Shoots-Roots_Sub_P Parameter: Tissue Value: Roots vs. Whole Plant
  misc_feature: MA Experiment ID: 20000315 Result: Up-regulated in Transcription
  misc_feature: MA Experiment 20000315 PARAMETER Experiment Name: At_14day_Shoots-Roots_Sub_P Parameter: Age (day) Value: 14
  misc_feature: MA Experiment 20000315 PARAMETER Experiment Name: At_14day_Shoots-Roots_Sub_P Parameter: Organism Value: A. thaliana
  misc_feature: MA Experiment 20000315 PARAMETER Experiment Name: At_14day_Shoots-Roots_Sub_P Parameter: Plant Line Value: WS
  misc_feature: MA Experiment 20000315 PARAMETER Experiment Name: At_14day_Shoots-Roots_Sub_P Parameter: Tissue Value: Shoots vs. Whole Plant

SEQ ID NO: 93443 - protein, 345 aa, Arabidopsis thaliana; identical to SEQ ID NO: 89687
  peptide (1)..(345): Ceres Seq. ID no. 12719947
  misc_feature (130)..(344): Pfam Name: Papain family cysteine protease Pfam Description: Papain family cysteine protease
  misc_feature (1)..(345): Homolog of NCBI NO: 18403438 NR Description: cysteine proteinase; protein id: At2g34080.1
  misc_feature (1)..(345): Homolog of NCBI NO: 30690594 NR Description: cysteine proteinase [Arabidopsis thaliana]
  misc_feature (19)..(345): Homolog of NCBI NO: 25289991 NR Description: cysteine proteinase (EC 3.4.22.-) [similarity] - thaliana >gi|9502421|gb|AAF88120.1|AC021043_13 Putative cysteine
  misc_feature (1)..(345): Homolog of NCBI NO: 18396939 NR Description: cysteine protease; protein id: At1g29080.1
  misc_feature (1)..(345): Homolog of NCBI NO: 18401420 NR Description: cysteine proteinase; protein id: At2g27420.1, by cDNA: gi_17381153, supported by cDNA: gi_20465848 [Arabidopsis >gi|25289995|pir||F84672 probable cysteine proteinase cysteine
  misc_feature (164)..(344): Homolog of NCBI NO: 25289992 NR Description: probable cysteine proteinase [imported] - thaliana >gi|9502426|gb|AAF88125.1|AC021043_18 Putative cysteine
  misc_feature (1)..(151): Homolog of NCBI NO: 25289992 NR Description: probable cysteine proteinase [imported] - thaliana >gi|9502426|gb|AAF88125.1|AC021043_18 Putative cysteine
  misc_feature (1)..(344): Homolog of NCBI NO: 18396952 NR Description: cysteine proteinase; protein id: At1g29110.1
  misc_feature (7)..(345): Homolog of NCBI NO: 18408828 NR Description: cysteine protease; protein id: At3g49340.1
  misc_feature (2)..(345): Homolog of NCBI NO: 24285904 NR Description: cysteine proteinase precursor [Ipomoea batatas]

SEQ ID NO: 93444 - protein, 341 aa, Arabidopsis thaliana; identical to SEQ ID NO: 89688
  peptide (1)..(341): Ceres Seq. ID no. 12719948
  misc_feature (126)..(340): Pfam Name: Papain family cysteine protease Pfam Description: Papain family cysteine protease
  misc_feature (1)..(341): Homolog of NCBI NO: 18403438 NR Description: cysteine proteinase; protein id: At2g34080.1
  misc_feature (1)..(341): Homolog of NCBI NO: 30690594 NR Description: cysteine proteinase [Arabidopsis thaliana]
  misc_feature (15)..(341): Homolog of NCBI NO: 25289991 NR Description: cysteine proteinase (EC 3.4.22.-) [similarity] - thaliana >gi|9502421|gb|AAF88120.1|AC021043_13 Putative cysteine
  misc_feature (1)..(341): Homolog of NCBI NO: 18396939 NR Description: cysteine protease; protein id: At1g29080.1
  misc_feature (1)..(341): Homolog of NCBI NO: 18401420 NR Description: cysteine proteinase; protein id: At2g27420.1, by cDNA: gi_17381153, supported by cDNA: gi_20465848 [Arabidopsis >gi|25289995|pir||F84672 probable cysteine proteinase cysteine
  misc_feature (160)..(340): Homolog of NCBI NO: 25289992 NR Description: probable cysteine proteinase [imported] - thaliana >gi|9502426|gb|AAF88125.1|AC021043_18 Putative cysteine
  misc_feature (1)..(147): Homolog of NCBI NO: 25289992 NR Description: probable cysteine proteinase [imported] - thaliana >gi|9502426|gb|AAF88125.1|AC021043_18 Putative cysteine
  misc_feature (1)..(340): Homolog of NCBI NO: 18396952 NR Description: cysteine proteinase; protein id: At1g29110.1
  misc_feature (3)..(341): Homolog of NCBI NO: 18408828 NR Description: cysteine protease; protein id: At3g49340.1
  misc_feature (1)..(341): Homolog of NCBI NO: 24285904 NR Description: cysteine proteinase precursor [Ipomoea batatas]

SEQ ID NO: 93445 - protein, 311 aa, Arabidopsis thaliana; identical to SEQ ID NO: 89689
  peptide (1)..(311): Ceres Seq. ID no. 12719949
  misc_feature (96)..(310): Pfam Name: Papain family cysteine protease Pfam Description: Papain family cysteine protease
  misc_feature (1)..(311): Homolog of NCBI NO: 18403438 NR Description: cysteine proteinase; protein id: At2g34080.1
  misc_feature (1)..(311): Homolog of NCBI NO: 30690594 NR Description: cysteine proteinase [Arabidopsis thaliana]
  misc_feature (1)..(311): Homolog of NCBI NO: 25289991 NR Description: cysteine proteinase (EC 3.4.22.-) [similarity] - thaliana >gi|9502421|gb|AAF88120.1|AC021043_13 Putative cysteine
  misc_feature (1)..(311): Homolog of NCBI NO: 18396939 NR Description: cysteine protease; protein id: At1g29080.1
  misc_feature (1)..(311): Homolog of NCBI NO: 18401420 NR Description: cysteine proteinase; protein id: At2g27420.1, by cDNA: gi_17381153, supported by cDNA: gi_20465848 [Arabidopsis >gi|25289995|pir||F84672 probable cysteine proteinase cysteine
  misc_feature (130)..(310): Homolog of NCBI NO: 25289992 NR Description: probable cysteine proteinase [imported] - thaliana >gi|9502426|gb|AAF88125.1|AC021043_18 Putative cysteine
  misc_feature (1)..(117): Homolog of NCBI NO: 25289992 NR Description: probable cysteine proteinase [imported] - thaliana >gi|9502426|gb|AAF88125.1|AC021043_18 Putative cysteine
  misc_feature (1)..(310): Homolog of NCBI NO: 18396952 NR Description: cysteine proteinase; protein id: At1g29110.1
  misc_feature (1)..(311): Homolog of NCBI NO: 18408828 NR Description: cysteine protease; protein id: At3g49340.1
  misc_feature (1)..(311): Homolog of NCBI NO: 24285904 NR Description: cysteine proteinase precursor [Ipomoea batatas]

SEQ ID NO: 93446 - DNA, 1509 bp, Arabidopsis thaliana; identical to SEQ ID NO: 89690
  misc_feature (1)..(1509): Ceres Seq. ID no. 12719957
  misc_feature: MA Experiment ID: 20000227 Result: Down-regulated in Transcription
  misc_feature: MA Experiment 20000227 PARAMETER Experiment Name: At_Root-Tips-vs-Tops_P Parameter: Tissue Value: Root Tips vs. Root Tops
  misc_feature: MA Experiment ID: 20000451 Result: Down-regulated in Transcription
  misc_feature: MA Experiment 20000451 PARAMETER Experiment Name: At_CS6879_Shoots-Roots_P Parameter: Age (day) Value: 14
  misc_feature: MA Experiment 20000451 PARAMETER Experiment Name: At_CS6879_Shoots-Roots_P Parameter: Organism Value: A. thaliana
  misc_feature: MA Experiment 20000451 PARAMETER Experiment Name: At_CS6879_Shoots-Roots_P Parameter: Plant Line Value: CS6879 vs. WS
  misc_feature: MA Experiment 20000451 PARAMETER Experiment Name: At_CS6879_Shoots-Roots_P Parameter: Tissue Value: Roots
  misc_feature: MA Experiment ID: 20001248 Result: Up-regulated in Transcription
  misc_feature: MA Experiment 20001248 PARAMETER Experiment Name: At_Far-red-induction_P Parameter: Age (day) Value: 7
  misc_feature: MA Experiment 20001248 PARAMETER Experiment Name: At_Far-red-induction_P Parameter: Light Value: Far-red vs. White
  misc_feature: MA Experiment 20001248 PARAMETER Experiment Name: At_Far-red-induction_P Parameter: Organism Value: A. thaliana
  misc_feature: MA Experiment 20001248 PARAMETER Experiment Name: At_Far-red-induction_P Parameter: Plant Line Value: Columbia
  misc_feature: MA Experiment 20001248 PARAMETER Experiment Name: At_Far-red-induction_P Parameter: Timepoint (hr) Value: 4
  misc_feature: MA Experiment 20001248 PARAMETER Experiment Name: At_Far-red-induction_P Parameter: Tissue Value: Whole Plant

SEQ ID NO: 93447 - protein, 502 aa, Arabidopsis thaliana; identical to SEQ ID NO: 89691
  peptide (1)..(502): Ceres Seq. ID no. 12719958
  misc_feature (57)..(311): Pfam Name: Protein kinase domain Pfam Description: Protein kinase domain
  misc_feature (1)..(502): Homolog of NCBI NO: 15226241 NR Description: putative protein kinase; protein id: At2g34180.1, by cDNA: gi_13249124 [Arabidopsis thaliana]
  misc_feature (12)..(501): Homolog of NCBI NO: 15218854 NR Description: protein kinase PK4, putative; protein id: supported by cDNA: gi_14334387 [Arabidopsis thaliana]
  misc_feature (28)..(490): Homolog of NCBI NO: 15233981 NR Description: putative protein kinase; protein id: At4g18700.1, by cDNA: gi_13249122, supported by cDNA: gi_13448040, supported cDNA: gi_16648898 [Arabidopsis thaliana] >gi|7446437|pir||T04862
  misc_feature (51)..(497): Homolog of NCBI NO: 15242507 NR Description: serine threonine protein kinase; protein id: supported by cDNA: gi_14009295 [Arabidopsis thaliana]
  misc_feature (50)..(335): Homolog of NCBI NO: 6651177 NR Description: protein kinase PK4 [Zea mays]
  misc_feature (330)..(485): Homolog of NCBI NO: 6651177 NR Description: protein kinase PK4 [Zea mays]
  misc_feature (50)..(335): Homolog of NCBI NO: 5821067 NR Description: OsPK4 [Oryza sativa]
  misc_feature (329)..(485): Homolog of NCBI NO: 5821067 NR Description: OsPK4 [Oryza sativa]
  misc_feature (33)..(335): Homolog of NCBI NO: 3928519 NR Description: wpk4 protein kinase [Triticum aestivum]
  misc_feature (333)..(484): Homolog of NCBI NO: 3928519 NR Description: wpk4 protein kinase [Triticum aestivum]

SEQ ID NO: 93448 - protein, 483 aa, Arabidopsis thaliana; identical to SEQ ID NO: 89692
  peptide (1)..(483): Ceres Seq. ID no. 12719959
  misc_feature (38)..(292): Pfam Name: Protein kinase domain Pfam Description: Protein kinase domain
  misc_feature (1)..(483): Homolog of NCBI NO: 15226241 NR Description: putative protein kinase; protein id: At2g34180.1, by cDNA: gi_13249124 [Arabidopsis thaliana]
  misc_feature (1)..(482): Homolog of NCBI NO: 15218854 NR Description: protein kinase PK4, putative; protein id: supported by cDNA: gi_14334387 [Arabidopsis thaliana]
  misc_feature (9)..(471): Homolog of NCBI NO: 15233981 NR Description: putative protein kinase; protein id: At4g18700.1, by cDNA: gi_13249122, supported by cDNA: gi_13448040, supported cDNA: gi_16648898 [Arabidopsis thaliana] >gi|7446437|pir||T04862
  misc_feature (32)..(478): Homolog of NCBI NO: 15242507 NR Description: serine threonine protein kinase; protein id: supported by cDNA: gi_14009295 [Arabidopsis thaliana]
  misc_feature (31)..(316): Homolog of NCBI NO: 6651177 NR Description: protein kinase PK4 [Zea mays]
  misc_feature (311)..(466): Homolog of NCBI NO: 6651177 NR Description: protein kinase PK4 [Zea mays]
  misc_feature (31)..(316): Homolog of NCBI NO: 5821067 NR Description: OsPK4 [Oryza sativa]
  misc_feature (310)..(466): Homolog of NCBI NO: 5821067 NR Description: OsPK4 [Oryza sativa]
  misc_feature (14)..(316): Homolog of NCBI NO: 3928519 NR Description: wpk4 protein kinase [Triticum aestivum]
  misc_feature (314)..(465): Homolog of NCBI NO: 3928519 NR Description: wpk4 protein kinase [Triticum aestivum]

SEQ ID NO: 93449 - protein, 449 aa, Arabidopsis thaliana; identical to SEQ ID NO: 89693
  peptide (1)..(449): Ceres Seq. ID no. 12719960
  misc_feature (4)..(258): Pfam Name: Protein kinase domain Pfam Description: Protein kinase domain
  misc_feature (1)..(449): Homolog of NCBI NO: 15226241 NR Description: putative protein kinase; protein id: At2g34180.1, by cDNA: gi_13249124 [Arabidopsis thaliana]
  misc_feature (1)..(448): Homolog of NCBI NO: 15218854 NR Description: protein kinase PK4, putative; protein id: supported by cDNA: gi_14334387 [Arabidopsis thaliana]
  misc_feature (1)..(437): Homolog of NCBI NO: 15233981 NR Description: putative protein kinase; protein id: At4g18700.1, by cDNA: gi_13249122, supported by cDNA: gi_13448040, supported cDNA: gi_16648898 [Arabidopsis thaliana] >gi|7446437|pir||T04862
  misc_feature (1)..(444): Homolog of NCBI NO: 15242507 NR Description: serine threonine protein kinase; protein id: supported by cDNA: gi_14009295 [Arabidopsis thaliana]
  misc_feature (1)..(282): Homolog of NCBI NO: 6651177 NR Description: protein kinase PK4 [Zea mays]
  misc_feature (277)..(432): Homolog of NCBI NO: 6651177 NR Description: protein kinase PK4 [Zea mays]
  misc_feature (1)..(282): Homolog of NCBI NO: 5821067 NR Description: OsPK4 [Oryza sativa]
  misc_feature (276)..(432): Homolog of NCBI NO: 5821067 NR Description: OsPK4 [Oryza sativa]
  misc_feature (1)..(282): Homolog of NCBI NO: 3928519 NR Description: wpk4 protein kinase [Triticum aestivum]
  misc_feature (280)..(431): Homolog of NCBI NO: 3928519 NR Description: wpk4 protein kinase [Triticum aestivum]

SEQ ID NO: 93450 - DNA, 1003 bp, Arabidopsis thaliana; identical to SEQ ID NO: 89694
  misc_feature (1)..(1003): Ceres Seq. ID no. 12720005
  misc_feature: MA Experiment ID: 108434 Result: Down-regulated in Transcription
  misc_feature: MA Experiment 108434 PARAMETER Experiment Name: At_Root_Tips_cDNA_P Parameter: Tissue Value: Root Tips
  misc_feature: MA Experiment ID: 108461 Result: Up-regulated in Transcription
  misc_feature: MA Experiment 108461 PARAMETER Experiment Name: At_Germinating_Seeds_cDNA_P Parameter: Age (day) Value: 1 vs. 0
  misc_feature: MA Experiment 108461 PARAMETER Experiment Name: At_Germinating_Seeds_cDNA_P Parameter: Tissue Value: Germinating Seeds
  misc_feature: MA Experiment ID: 108462 Result: Up-regulated in Transcription
  misc_feature: MA Experiment 108462 PARAMETER Experiment Name: At_Germinating_Seeds_cDNA_P Parameter: Age (day) Value: 2 vs. 0
  misc_feature: MA Experiment 108462 PARAMETER Experiment Name: At_Germinating_Seeds_cDNA_P Parameter: Tissue Value: Germinating Seeds
  misc_feature: MA Experiment ID: 108464 Result: Up-regulated in Transcription
  misc_feature: MA Experiment 108464 PARAMETER Experiment Name: At_Germinating_Seeds_cDNA_P Parameter: Age (day) Value: 4 vs. 0
  misc_feature: MA Experiment 108464 PARAMETER Experiment Name: At_Germinating_Seeds_cDNA_P Parameter: Tissue Value: Germinating Seeds
  misc_feature: MA Experiment ID: 108488 Result: Up-regulated in Transcription
  misc_feature: MA Experiment ID: 108489 Result: Down-regulated in Transcription
  misc_feature: MA Experiment ID: 108594 Result: Down-regulated in Transcription
  misc_feature: MA Experiment 108594 PARAMETER Experiment Name: At_Ler-rhl_Root_cDNA_P Parameter: Plant Line Value: null
  misc_feature: MA Experiment ID: 108595 Result: Down-regulated in Transcription
  misc_feature: MA Experiment 108595 PARAMETER Experiment Name: At_Ler-pi_Ovule_cDNA_P Parameter: Plant Line Value: null
  misc_feature: MA Experiment ID: 20000180 Result: Up-regulated in Transcription
  misc_feature: MA Experiment 20000180 PARAMETER Experiment Name: At_Germinating_Seeds_P Parameter: Age (hr) Value: 24 vs. 0
  misc_feature: MA Experiment 20000180 PARAMETER Experiment Name: At_Germinating_Seeds_P Parameter: Tissue Value: Germinating Seeds
  misc_feature: MA Experiment ID: 20000185 Result: Down-regulated in Transcription
  misc_feature: MA Experiment 20000185 PARAMETER Experiment Name: At_Roots__P Parameter: Age (day) Value: 7 vs. 21
  misc_feature: MA Experiment 20000185 PARAMETER Experiment Name: At_Roots__P Parameter: Organism Value: A. thaliana
  misc_feature: MA Experiment 20000185 PARAMETER Experiment Name: At_Roots__P Parameter: Tissue Value: Roots vs. Whole Plant
  misc_feature: MA Experiment ID: 20000234 Result: Down-regulated in Transcription
  misc_feature: MA Experiment 20000234 PARAMETER Experiment Name: At_Siliques_P Parameter: Age (day) Value: 21
  misc_feature: MA Experiment 20000234 PARAMETER Experiment Name: At_Siliques_P Parameter: Organism Value: A. thaliana
  misc_feature: MA Experiment 20000234 PARAMETER Experiment Name: At_Siliques_P Parameter: Plant Line Value: WS
  misc_feature: MA Experiment 20000234 PARAMETER Experiment Name: At_Siliques_P Parameter: Tissue Value: Less Than 5mm Siliques vs. Whole Plant
  misc_feature: MA Experiment ID: 20000235 Result: Down-regulated in Transcription
  misc_feature: MA Experiment 20000235 PARAMETER Experiment Name: At_Siliques_P Parameter: Age (day) Value: 21
  misc_feature: MA Experiment 20000235 PARAMETER Experiment Name: At_Siliques_P Parameter: Organism Value: A. thaliana
  misc_feature: MA Experiment 20000235 PARAMETER Experiment Name: At_Siliques_P Parameter: Plant Line Value: WS
  misc_feature: MA Experiment 20000235 PARAMETER Experiment Name: At_Siliques_P Parameter: Tissue Value: 5-10mm Siliques vs. Whole Plant
  misc_feature: MA Experiment ID: 20000264 Result: Down-regulated in Transcription
  misc_feature: MA Experiment 20000264 PARAMETER Experiment Name: At_Open_Flower_P Parameter: Age (day) Value: 21
  misc_feature: MA Experiment 20000264 PARAMETER Experiment Name: At_Open_Flower_P Parameter: Plant Line Value: WS
  misc_feature: MA Experiment 20000264 PARAMETER Experiment Name: At_Open_Flower_P Parameter: Tissue Value: Open Flower vs. Whole Plant
  misc_feature: MA Experiment ID: 20000265 Result: Down-regulated in Transcription
  misc_feature: MA Experiment 20000265 PARAMETER Experiment Name: At_Open_Flower_P Parameter: Age (day) Value: 21
  misc_feature: MA Experiment 20000265 PARAMETER Experiment Name: At_Open_Flower_P Parameter: Plant Line Value: WS
  misc_feature: MA Experiment 20000265 PARAMETER Experiment Name: At_Open_Flower_P Parameter: Tissue Value: Closed Flower vs. Whole Plant
  misc_feature: MA Experiment ID: 20000286 Result: Down-regulated in Transcription
  misc_feature: MA Experiment 20000286 PARAMETER Experiment Name: At_Open_Flower_P Parameter: Age (day) Value: 21
  misc_feature: MA Experiment 20000286 PARAMETER Experiment Name: At_Open_Flower_P Parameter: Plant Line Value: WS
  misc_feature: MA Experiment 20000286 PARAMETER Experiment Name: At_Open_Flower_P Parameter: Tissue Value: Half Open vs. Whole Plant
  misc_feature: MA Experiment ID: 20000436 Result: Up-regulated in Transcription
  misc_feature: MA Experiment 20000436 PARAMETER Experiment Name: At_Drought_P Parameter: Age (day) Value: 7
  misc_feature: MA Experiment 20000436 PARAMETER Experiment Name: At_Drought_P Parameter: Organism Value: A. thaliana
  misc_feature: MA Experiment 20000436 PARAMETER Experiment Name: At_Drought_P Parameter: Plant Line Value: WS
  misc_feature: MA Experiment 20000436 PARAMETER Experiment Name: At_Drought_P Parameter: Timepoint (hr) Value: 12
  misc_feature: MA Experiment 20000436 PARAMETER Experiment Name: At_Drought_P Parameter: Tissue Value: Whole Plant
  misc_feature: MA Experiment 20000436 PARAMETER Experiment Name: At_Drought_P Parameter: Treatment Value: Drought vs. No Drought
  misc_feature: MA Experiment ID: 20000439 Result: Down-regulated in Transcription
  misc_feature: MA Experiment 20000439 PARAMETER Experiment Name: At_Roots__P Parameter: Age (day) Value: 14 vs. 21
  misc_feature: MA Experiment 20000439 PARAMETER Experiment Name: At_Roots__P Parameter: Organism Value: A. thaliana
  misc_feature: MA Experiment 20000439 PARAMETER Experiment Name: At_Roots__P Parameter: Tissue Value: Roots vs. Whole Plant
  misc_feature: MA Experiment ID: 20000441 Result: Up-regulated in Transcription
  misc_feature: MA Experiment 20000441 PARAMETER Experiment Name: At_1uM_BR-BRZ__P Parameter: Tissue Value: Shoot Apices
  misc_feature: MA Experiment 20000441 PARAMETER Experiment Name: At_1uM_BR-BRZ__P Parameter: Treatment Value: 1uM BR vs. No Treatment
  misc_feature: MA Experiment ID: 20000443 Result: Up-regulated in Transcription
  misc_feature: MA Experiment 20000443 PARAMETER Experiment Name: At_1uM_BR-BRZ__P Parameter: Tissue Value: Shoot Apices
  misc_feature: MA Experiment 20000443 PARAMETER Experiment Name: At_1uM_BR-BRZ__P Parameter: Treatment Value: 1uM BRZ vs. No Treatment
  misc_feature: MA Experiment ID: 20000794 Result: Down-regulated in Transcription
  misc_feature: MA Experiment 20000794 PARAMETER Experiment Name: At_Petals_P Parameter: Age (day) Value: 23-25 days
  misc_feature: MA Experiment 20000794 PARAMETER Experiment Name: At_Petals_P Parameter: Plant Line Value: WS
  misc_feature: MA Experiment 20000794 PARAMETER Experiment Name: At_Petals_P Parameter: Tissue Value: Petals vs. Whole plant
  misc_feature: MA Experiment ID: 20001450 Result: Up-regulated in Transcription
  misc_feature: MA Experiment 20001450 PARAMETER Experiment Name: At_Far-red-induction_P Parameter: Age (day) Value: 7
  misc_feature: MA Experiment 20001450 PARAMETER Experiment Name: At_Far-red-induction_P Parameter: Light Value: Far-red vs. White
  misc_feature: MA Experiment 20001450 PARAMETER Experiment Name: At_Far-red-induction_P Parameter: Organism Value: A. thaliana
  misc_feature: MA Experiment 20001450 PARAMETER Experiment Name: At_Far-red-induction_P Parameter: Plant Line Value: Columbia
  misc_feature: MA Experiment 20001450 PARAMETER Experiment Name: At_Far-red-induction_P Parameter: Timepoint (hr) Value: 8
  misc_feature: MA Experiment 20001450 PARAMETER Experiment Name: At_Far-red-induction_P Parameter: Tissue Value: Whole Plant
  misc_feature: MA Experiment ID: 20001451 Result: Up-regulated in Transcription
  misc_feature: MA Experiment 20001451 PARAMETER Experiment Name: At_Far-red-induction_P Parameter: Age (day) Value: 7
  misc_feature: MA Experiment 20001451 PARAMETER Experiment Name: At_Far-red-induction_P Parameter: Light Value: Far-red vs. White
  misc_feature: MA Experiment 20001451 PARAMETER Experiment Name: At_Far-red-induction_P Parameter: Organism Value: A. thaliana
  misc_feature: MA Experiment 20001451 PARAMETER Experiment Name: At_Far-red-induction_P Parameter: Plant Line Value: Columbia
  misc_feature: MA Experiment 20001451 PARAMETER Experiment Name: At_Far-red-induction_P Parameter: Timepoint (hr) Value: 24
  misc_feature: MA Experiment 20001451 PARAMETER Experiment Name: At_Far-red-induction_P Parameter: Tissue Value: Whole Plant
  misc_feature: MA Experiment ID: 20001459 Result: Down-regulated in Transcription
  misc_feature: MA Experiment 20001459 PARAMETER Experiment Name: At_50mM_NH4NO3_L-to-H_P Parameter: Age (day) Value: Undefined
  misc_feature: MA Experiment 20001459 PARAMETER Experiment Name: At_50mM_NH4NO3_L-to-H_P Parameter: Organism Value: Undefined
  misc_feature: MA Experiment 20001459 PARAMETER Experiment Name: At_50mM_NH4NO3_L-to-H_P Parameter: Plant Line Value: Undefined
  misc_feature: MA Experiment 20001459 PARAMETER Experiment Name: At_50mM_NH4NO3_L-to-H_P Parameter: Timepoint (hr) Value: 4
  misc_feature: MA Experiment 20001459 PARAMETER Experiment Name: At_50mM_NH4NO3_L-to-H_P Parameter: Tissue Value: Siliques
  misc_feature: MA Experiment 20001459 PARAMETER Experiment Name: At_50mM_NH4NO3_L-to-H_P Parameter: Treatment Value: 50mM NH4NO3 vs. 100mM Manitol
  misc_feature: MA Experiment ID: 20001556 Result: Down-regulated in Transcription
  misc_feature: MA Experiment 20001556 PARAMETER Experiment Name: At_Drought_Soil_Dry_P Parameter: Age (day) Value: 26
  misc_feature: MA Experiment 20001556 PARAMETER Experiment Name: At_Drought_Soil_Dry_P Parameter: Organism Value: A. thaliana
  misc_feature: MA Experiment 20001556 PARAMETER Experiment Name: At_Drought_Soil_Dry_P Parameter: Plant Line Value: WS
  misc_feature: MA Experiment 20001556 PARAMETER Experiment Name: At_Drought_Soil_Dry_P Parameter: Post Timepoint (hr) Value: None
  misc_feature: MA Experiment 20001556 PARAMETER Experiment Name: At_Drought_Soil_Dry_P Parameter: Post-Treatment Value: None
  misc_feature: MA Experiment 20001556 PARAMETER Experiment Name: At_Drought_Soil_Dry_P Parameter: Timepoint (day) Value: 12
  misc_feature: MA Experiment 20001556 PARAMETER Experiment Name: At_Drought_Soil_Dry_P Parameter: Treatment Value: Drought vs. No Drought
  misc_feature: MA Experiment ID: 20001557 Result: Down-regulated in Transcription
  misc_feature: MA Experiment 20001557 PARAMETER Experiment Name: At_Drought_Soil_Dry_P Parameter: Age (day) Value: 27
  misc_feature: MA Experiment 20001557 PARAMETER Experiment Name: At_Drought_Soil_Dry_P Parameter: Organism Value: A. thaliana
  misc_feature: MA Experiment 20001557 PARAMETER Experiment Name: At_Drought_Soil_Dry_P Parameter: Plant Line Value: WS
  misc_feature: MA Experiment 20001557 PARAMETER Experiment Name: At_Drought_Soil_Dry_P Parameter: Post Timepoint (hr) Value: 3
  misc_feature: MA Experiment 20001557 PARAMETER Experiment Name: At_Drought_Soil_Dry_P Parameter: Post-Treatment Value: Re-Water vs. No Drought
  misc_feature: MA Experiment 20001557 PARAMETER Experiment Name: At_Drought_Soil_Dry_P Parameter: Timepoint (day) Value: 13
  misc_feature: MA Experiment 20001557 PARAMETER Experiment Name: At_Drought_Soil_Dry_P Parameter: Treatment Value: Drought vs. No Drought
  misc_feature: MA Experiment ID: 20001558 Result: Down-regulated in Transcription
  misc_feature: MA Experiment 20001558 PARAMETER Experiment Name: At_Drought_Soil_Dry_P Parameter: Age (day) Value: 27
  misc_feature: MA Experiment 20001558 PARAMETER Experiment Name: At_Drought_Soil_Dry_P Parameter: Organism Value: A. thaliana
  misc_feature: MA Experiment 20001558 PARAMETER Experiment Name: At_Drought_Soil_Dry_P Parameter: Plant Line Value: WS
  misc_feature: MA Experiment 20001558 PARAMETER Experiment Name: At_Drought_Soil_Dry_P Parameter: Post Timepoint (hr) Value: 6
  misc_feature: MA Experiment 20001558 PARAMETER Experiment Name: At_Drought_Soil_Dry_P Parameter: Post-Treatment Value: Re-Water vs. No Drought
  misc_feature: MA Experiment 20001558 PARAMETER Experiment Name: At_Drought_Soil_Dry_P Parameter: Timepoint (day) Value: 13
  misc_feature: MA Experiment 20001558 PARAMETER Experiment Name: At_Drought_Soil_Dry_P Parameter: Treatment Value: Drought vs. No Drought
  misc_feature: MA Experiment ID: 20001559 Result: Down-regulated in Transcription
  misc_feature: MA Experiment 20001559 PARAMETER Experiment Name: At_Drought_Soil_Dry_P Parameter: Age (day) Value: 28
  misc_feature: MA Experiment 20001559 PARAMETER Experiment Name: At_Drought_Soil_Dry_P Parameter: Organism Value: A. thaliana
  misc_feature: MA Experiment 20001559 PARAMETER Experiment Name: At_Drought_Soil_Dry_P Parameter: Plant Line Value: WS
  misc_feature: MA Experiment 20001559 PARAMETER Experiment Name: At_Drought_Soil_Dry_P Parameter: Post Timepoint (hr) Value: 29
  misc_feature: MA Experiment 20001559 PARAMETER Experiment Name: At_Drought_Soil_Dry_P Parameter: Post-Treatment Value: Re-Water vs. No Drought
  misc_feature: MA Experiment 20001559 PARAMETER Experiment Name: At_Drought_Soil_Dry_P Parameter: Timepoint (day) Value: 14
  misc_feature: MA Experiment 20001559 PARAMETER Experiment Name: At_Drought_Soil_Dry_P Parameter: Treatment Value: Drought vs. No Drought
  misc_feature: MA Experiment ID: 20001755 Result: Down-regulated in Transcription
  misc_feature: MA Experiment 20001755 PARAMETER Experiment Name: At_50mM_NH4NO3_L-to-H_P Parameter: Timepoint (hr) Value: 2
  misc_feature: MA Experiment 20001755 PARAMETER Experiment Name: At_50mM_NH4NO3_L-to-H_P Parameter: Tissue Value: Leaf
  misc_feature: MA Experiment 20001755 PARAMETER Experiment Name: At_50mM_NH4NO3_L-to-H_P Parameter: Treatment Value: 50mM NH4NO3 vs 100mM Mannitol
  misc_feature: MA Experiment ID: 20001762 Result: Down-regulated in Transcription
  misc_feature: MA Experiment 20001762 PARAMETER Experiment Name: At_50mM_NH4NO3_L-to-H_P Parameter: Timepoint (hr) Value: 6
  misc_feature: MA Experiment 20001762 PARAMETER Experiment Name: At_50mM_NH4NO3_L-to-H_P Parameter: Tissue Value: Siliques
  misc_feature: MA Experiment 20001762 PARAMETER Experiment Name: At_50mM_NH4NO3_L-to-H_P Parameter: Treatment Value: 50mM NH4NO3 vs 100mM Mannitol
  misc_feature: MA Experiment ID: 20001772 Result: Down-regulated in Transcription
  misc_feature: MA Experiment 20001772 PARAMETER Experiment Name: At_Far-red-enriched-adult_P Parameter: Age (day) Value: 29
  misc_feature: MA Experiment 20001772 PARAMETER Experiment Name: At_Far-red-enriched-adult_P Parameter: Light Value: Far-red enriched vs. White
  misc_feature: MA Experiment 20001772 PARAMETER Experiment Name: At_Far-red-enriched-adult_P Parameter: Organism Value: A. thaliana
  misc_feature: MA Experiment 20001772 PARAMETER Experiment Name: At_Far-red-enriched-adult_P Parameter: Plant Line Value: Columbia
  misc_feature: MA Experiment 20001772 PARAMETER Experiment Name: At_Far-red-enriched-adult_P Parameter: Timepoint (hr) Value: 24
  misc_feature: MA Experiment 20001772 PARAMETER Experiment Name: At_Far-red-enriched-adult_P Parameter: Tissue Value: Aerial
  misc_feature: MA Experiment ID: 20001773 Result: Down-regulated in Transcription
  misc_feature: MA Experiment 20001773 PARAMETER Experiment Name: At_Far-red-enriched-adult_P Parameter: Age (day) Value: 30
  misc_feature: MA Experiment 20001773 PARAMETER Experiment Name: At_Far-red-enriched-adult_P Parameter: Light Value: Far-red enriched vs. White
  misc_feature: MA Experiment 20001773 PARAMETER Experiment Name: At_Far-red-enriched-adult_P Parameter: Organism Value: A. thaliana
  misc_feature: MA Experiment 20001773 PARAMETER Experiment Name: At_Far-red-enriched-adult_P Parameter: Plant Line Value: Columbia
  misc_feature: MA Experiment 20001773 PARAMETER Experiment Name: At_Far-red-enriched-adult_P Parameter: Timepoint (hr) Value: 48
  misc_feature: MA Experiment 20001773 PARAMETER Experiment Name: At_Far-red-enriched-adult_P Parameter: Tissue Value: Aerial
  misc_feature: MA Experiment ID: 20001774 Result: Down-regulated in Transcription
  misc_feature: MA Experiment 20001774 PARAMETER Experiment Name: At_Far-red-enriched-adult_P Parameter: Age (day) Value: 31
  misc_feature: MA Experiment 20001774 PARAMETER Experiment Name: At_Far-red-enriched-adult_P Parameter: Light Value: Far-red enriched vs. White
  misc_feature: MA Experiment 20001774 PARAMETER Experiment Name: At_Far-red-enriched-adult_P Parameter: Organism Value: A. thaliana
  misc_feature: MA Experiment 20001774 PARAMETER Experiment Name: At_Far-red-enriched-adult_P Parameter: Plant Line Value: Columbia
  misc_feature: MA Experiment 20001774 PARAMETER Experiment Name: At_Far-red-enriched-adult_P Parameter: Timepoint (hr) Value: 72
  misc_feature: MA Experiment 20001774 PARAMETER Experiment Name: At_Far-red-enriched-adult_P Parameter: Tissue Value: Aerial
  misc_feature: MA Experiment ID: 20001905 Result: Down-regulated in Transcription
  misc_feature: MA Experiment 20001905 PARAMETER Experiment Name: At_Drought_Reproduction_P Parameter: Age (day) Value: 40
  misc_feature: MA Experiment 20001905 PARAMETER Experiment Name: At_Drought_Reproduction_P Parameter: Organism Value: A. thaliana
  misc_feature: MA Experiment 20001905 PARAMETER Experiment Name: At_Drought_Reproduction_P Parameter: Plant Line Value: WS
  misc_feature: MA Experiment 20001905 PARAMETER Experiment Name: At_Drought_Reproduction_P Parameter: Timepoint (day) Value: 10
  misc_feature: MA Experiment 20001905 PARAMETER Experiment Name: At_Drought_Reproduction_P Parameter: Tissue Value: Rosettes
  misc_feature: MA Experiment 20001905 PARAMETER Experiment Name: At_Drought_Reproduction_P Parameter: Treatment Value: Drought vs. No Drought

SEQ ID NO: 93451 - protein, 266 aa, Arabidopsis thaliana; identical to SEQ ID NO: 89695
  peptide (1)..(266): Ceres Seq. ID no. 12720006
  misc_feature (64)..(233): Pfam Name: Chlorophyll A-B binding protein Pfam Description: Chlorophyll A-B binding protein
  misc_feature (1)..(266): Homolog of NCBI NO: 18403549 NR Description: photosystem II type I chlorophyll a /b binding protein id: At2g34430.1, supported by cDNA: 23727., supported by
  misc_feature (1)..(266): Homolog of NCBI NO: 21592428 NR Description: putative photosystem II type I chlorophyll a b
  misc_feature (1)..(266): Homolog of NCBI NO: 115778 NR Description: Chlorophyll A-B binding protein 1, chloroplast
  misc_feature (1)..(266): Homolog of NCBI NO: 18266039 NR Description: chlorophyll a/b binding protein [Brassica
  misc_feature (1)..(266): Homolog of NCBI NO: 15220615 NR Description: light-harvesting chlorophyll a/b binding protein; id: At1g29930.1, supported by cDNA: gi_15010743, supported by
  misc_feature (1)..(266): Homolog of NCBI NO: 18397286 NR Description: photosystem II type I chlorophyll a /b binding putative; protein id: At1g29910.1, supported by cDNA: gi_17473827
  misc_feature (1)..(266): Homolog of NCBI NO: 18403546 NR Description: photosystem II type I chlorophyll a /b binding protein id: At2g34420.1, supported by cDNA: gi_13926259, by cDNA: gi_14517451, supported by cDNA: gi_15027898, supported
  misc_feature (1)..(266): Homolog of NCBI NO: 17473828 NR Description: chlorophyll a/b-binding protein [Arabidopsis
  misc_feature (19)..(266): Homolog of NCBI NO: 12324161 NR Description: chlorophyll A-B-binding protein 2 precursor, 5'
  misc_feature (1)..(266): Homolog of NCBI NO: 115819 NR Description: Chlorophyll A-B binding protein 1B, chloroplast

SEQ ID NO: 93452 - protein, 261 aa, Arabidopsis thaliana; identical to SEQ ID NO: 89696
  peptide (1)..(261): Ceres Seq. ID no. 12720007
  misc_feature (59)..(228): Pfam Name: Chlorophyll A-B binding protein Pfam Description: Chlorophyll A-B binding protein
  misc_feature (1)..(261): Homolog of NCBI NO: 18403549 NR Description: photosystem II type I chlorophyll a /b binding protein id: At2g34430.1, supported by cDNA: 23727., supported by
  misc_feature (1)..(261): Homolog of NCBI NO: 21592428 NR Description: putative photosystem II type I chlorophyll a b
  misc_feature (1)..(261): Homolog of NCBI NO: 115778 NR Description: Chlorophyll A-B binding protein 1, chloroplast
  misc_feature (1)..(261): Homolog of NCBI NO: 18266039 NR Description: chlorophyll a/b binding protein [Brassica
  misc_feature (1)..(261): Homolog of NCBI NO: 15220615 NR Description: light-harvesting chlorophyll a/b binding protein; id: At1g29930.1, supported by cDNA: gi_15010743, supported by
  misc_feature (1)..(261): Homolog of NCBI NO: 18397286 NR Description: photosystem II type I chlorophyll a /b binding putative; protein id: At1g29910.1, supported by cDNA: gi_17473827
  misc_feature (1)..(261): Homolog of NCBI NO: 18403546 NR Description: photosystem II type I chlorophyll a /b binding protein id: At2g34420.1, supported by cDNA: gi_13926259, by cDNA: gi_14517451, supported by cDNA: gi_15027898, supported
  misc_feature (1)..(261): Homolog of NCBI NO: 17473828 NR Description: chlorophyll a/b-binding protein [Arabidopsis
  misc_feature (14)..(261): Homolog of NCBI NO: 12324161 NR Description: chlorophyll A-B-binding protein 2 precursor, 5'
  misc_feature (1)..(261): Homolog of NCBI NO: 115819 NR Description: Chlorophyll A-B binding protein 1B, chloroplast

SEQ ID NO: 93453 - protein, 232 aa, Arabidopsis thaliana; identical to SEQ ID NO: 89697
  peptide (1)..(232): Ceres Seq. ID no. 12720008
  misc_feature (30)..(199): Pfam Name: Chlorophyll A-B binding protein Pfam Description: Chlorophyll A-B binding protein
  misc_feature (1)..(232): Homolog of NCBI NO: 18403549 NR Description: photosystem II type I chlorophyll a /b binding protein id: At2g34430.1, supported by cDNA: 23727., supported by
  misc_feature (1)..(232): Homolog of NCBI NO: 21592428 NR Description: putative photosystem II type I chlorophyll a b
  misc_feature (1)..(232): Homolog of NCBI NO: 115778 NR Description: Chlorophyll A-B binding protein 1, chloroplast
  misc_feature (1)..(232): Homolog of NCBI NO: 18266039 NR Description: chlorophyll a/b binding protein [Brassica
  misc_feature (1)..(232): Homolog of NCBI NO: 15220615 NR Description: light-harvesting chlorophyll a/b binding protein; id: At1g29930.1, supported by cDNA: gi_15010743, supported by
  misc_feature (1)..(232): Homolog of NCBI NO: 18397286 NR Description: photosystem II type I chlorophyll a /b binding putative; protein id: At1g29910.1, supported by cDNA: gi_17473827
  misc_feature (1)..(232): Homolog of NCBI NO: 18403546 NR Description: photosystem II type I chlorophyll a /b binding protein id: At2g34420.1, supported by cDNA: gi_13926259, by cDNA: gi_14517451, supported by cDNA: gi_15027898, supported
  misc_feature (1)..(232): Homolog of NCBI NO: 17473828 NR Description: chlorophyll a/b-binding protein [Arabidopsis
  misc_feature (1)..(232): Homolog of NCBI NO: 12324161 NR Description: chlorophyll A-B-binding protein 2 precursor, 5'
  misc_feature (1)..(232): Homolog of NCBI NO: 115819 NR Description: Chlorophyll A-B binding protein 1B, chloroplast

SEQ ID NO: 93454 - DNA, 1925 bp, Arabidopsis thaliana; identical to SEQ ID NO: 89698
  misc_feature (1)..(1925): Ceres Seq. ID no. 12720085
  misc_feature: MA Experiment ID: 20000180 Result: Down-regulated in Transcription
  misc_feature: MA Experiment 20000180 PARAMETER Experiment Name: At_Germinating_Seeds_P Parameter: Age (hr) Value: 24 vs. 0
  misc_feature: MA Experiment 20000180 PARAMETER Experiment Name: At_Germinating_Seeds_P Parameter: Tissue Value: Germinating Seeds
  misc_feature: MA Experiment ID: 20000437 Result: Down-regulated in Transcription
  misc_feature: MA Experiment 20000437 PARAMETER Experiment Name: At_Drought_P Parameter: Age (day) Value: 8
  misc_feature: MA Experiment 20000437 PARAMETER Experiment Name: At_Drought_P Parameter: Organism Value: A. thaliana
  misc_feature: MA Experiment 20000437 PARAMETER Experiment Name: At_Drought_P Parameter: Plant Line Value: WS
  misc_feature: MA Experiment 20000437 PARAMETER Experiment Name: At_Drought_P Parameter: Timepoint (hr) Value: 24
  misc_feature: MA Experiment 20000437 PARAMETER Experiment Name: At_Drought_P Parameter: Tissue Value: Whole Plant
  misc_feature: MA Experiment 20000437 PARAMETER Experiment Name: At_Drought_P Parameter: Treatment Value: Drought vs. No Drought
  misc_feature: MA Experiment ID: 20000527 Result: Down-regulated in Transcription
  misc_feature: MA Experiment 20000527 PARAMETER Experiment Name: At_10percent_PEG_P Parameter: Age (day) Value: 20
  misc_feature: MA Experiment 20000527 PARAMETER Experiment Name: At_10percent_PEG_P Parameter: Organism Value: A. thaliana
  misc_feature: MA Experiment 20000527 PARAMETER Experiment Name: At_10percent_PEG_P Parameter: Plant Line Value: WS
  misc_feature: MA Experiment 20000527 PARAMETER Experiment Name: At_10percent_PEG_P Parameter: Timepoint (day) Value: 20
  misc_feature: MA Experiment 20000527 PARAMETER Experiment Name: At_10percent_PEG_P Parameter: Tissue Value: Whole Plant
  misc_feature: MA Experiment 20000527 PARAMETER Experiment Name: At_10percent_PEG_P Parameter: Treatment Value: 10percent PEG vs. No Treatment
  misc_feature: MA Experiment ID: 20001556 Result: Down-regulated in Transcription
  misc_feature: MA Experiment 20001556 PARAMETER Experiment Name: At_Drought_Soil_Dry_P Parameter: Age (day) Value: 26
  misc_feature: MA Experiment 20001556 PARAMETER Experiment Name: At_Drought_Soil_Dry_P Parameter: Organism Value: A. thaliana
  misc_feature: MA Experiment 20001556 PARAMETER Experiment Name: At_Drought_Soil_Dry_P Parameter: Plant Line Value: WS
  misc_feature: MA Experiment 20001556 PARAMETER Experiment Name: At_Drought_Soil_Dry_P Parameter: Post Timepoint (hr) Value: None
  misc_feature: MA Experiment 20001556 PARAMETER Experiment Name: At_Drought_Soil_Dry_P Parameter: Post-Treatment Value: None
  misc_feature: MA Experiment 20001556 PARAMETER Experiment Name: At_Drought_Soil_Dry_P Parameter: Timepoint (day) Value: 12
  misc_feature: MA Experiment 20001556 PARAMETER Experiment Name: At_Drought_Soil_Dry_P Parameter: Treatment Value: Drought vs. No Drought
  misc_feature: MA Experiment ID: 20001560 Result: Down-regulated in Transcription
  misc_feature: MA Experiment 20001560 PARAMETER Experiment Name: At_Drought_Soil_Dry_P Parameter: Age (day) Value: 28
  misc_feature: MA Experiment 20001560 PARAMETER Experiment Name: At_Drought_Soil_Dry_P Parameter: Organism Value: A. thaliana
  misc_feature: MA Experiment 20001560 PARAMETER Experiment Name: At_Drought_Soil_Dry_P Parameter: Plant Line Value: WS
  misc_feature: MA Experiment 20001560 PARAMETER Experiment Name: At_Drought_Soil_Dry_P Parameter: Post Timepoint (hr) Value: None
  misc_feature: MA Experiment 20001560 PARAMETER Experiment Name: At_Drought_Soil_Dry_P Parameter: Post-Treatment Value: None
  misc_feature: MA Experiment 20001560 PARAMETER Experiment Name: At_Drought_Soil_Dry_P Parameter: Timepoint (day) Value: 14
  misc_feature: MA Experiment 20001560 PARAMETER Experiment Name: At_Drought_Soil_Dry_P Parameter: Treatment Value: Drought vs. No Drought
  misc_feature: MA Experiment ID: 20001904 Result: Down-regulated in Transcription
  misc_feature: MA Experiment 20001904 PARAMETER Experiment Name: At_Drought_Reproduction_P Parameter: Age (day) Value: 37
  misc_feature: MA Experiment 20001904 PARAMETER Experiment Name: At_Drought_Reproduction_P Parameter: Organism Value: A. thaliana
  misc_feature: MA Experiment 20001904 PARAMETER Experiment Name: At_Drought_Reproduction_P Parameter: Plant Line Value: WS
  misc_feature: MA Experiment 20001904 PARAMETER Experiment Name: At_Drought_Reproduction_P Parameter: Timepoint (day) Value: 7
  misc_feature: MA Experiment 20001904 PARAMETER Experiment Name: At_Drought_Reproduction_P Parameter: Tissue Value: Rosettes
  misc_feature: MA Experiment 20001904 PARAMETER Experiment Name: At_Drought_Reproduction_P Parameter: Treatment Value: Drought vs. No Drought

SEQ ID NO: 93455 - protein, 569 aa, Arabidopsis thaliana; identical to SEQ ID NO: 89699
  peptide (1)..(569): Ceres Seq. ID no. 12720086
  misc_feature (1)..(569): Homolog of NCBI NO: 15226868 NR Description: putative amino acid transporter; protein id: supported by cDNA: gi_19699364 [Arabidopsis thaliana]
  misc_feature (114)..(569): Homolog of NCBI NO: 19699365 NR Description: At2g34960/F19I3.19 [Arabidopsis thaliana]
  misc_feature (4)..(562): Homolog of NCBI NO: 34903850 NR Description: unnamed protein product [Oryza sativa (japonica group)] >gi|8096566|dbj|BAA96139.1| unnamed protein product
  misc_feature (4)..(565): Homolog of NCBI NO: 15220035 NR Description: putative amino acid transporter; protein id: supported by cDNA: gi_18176203 [Arabidopsis thaliana] amino acid transporter homolog [imported] similar to amino acid
  misc_feature (12)..(561): Homolog of NCBI NO: 30685317 NR Description: amino acid transport protein AAT1 [Arabidopsis
  misc_feature (56)..(561): Homolog of NCBI NO: 1076291 NR Description: amino acid transport protein AAT1 - Arabidopsis >gi|2911069|emb|CAA17531.1| amino acid transport protein AAT1 thaliana] >gi|7268909|emb|CAB79112.1| amino acid transport
  misc_feature (21)..(559): Homolog of NCBI NO: 15238312 NR Description: amino acid transport - like protein; protein id: supported by cDNA: 158156., supported by cDNA: gi_13430547, by cDNA: gi_14532753 [Arabidopsis thaliana]
  misc_feature (19)..(559): Homolog of NCBI NO: 15228334 NR Description: putative amino acid transporter; protein id: [Arabidopsis thaliana] >gi|8567793|gb|AAF76365.1| amino acid putative [Arabidopsis thaliana]
  misc_feature (31)..(566): Homolog of NCBI NO: 38345948 NR Description: OSJNBb0103I08.20 [Oryza sativa (japonica
  misc_feature (61)..(437): Homolog of NCBI NO: 17533459 NR Description: Amino acid permease family member [Caenorhabditis

SEQ ID NO: 93456 - protein, 506 aa, Arabidopsis thaliana; identical to SEQ ID NO: 89700
  peptide (1)..(506): Ceres Seq. ID no. 12720087
  misc_feature (1)..(506): Homolog of NCBI NO: 15226868 NR Description: putative amino acid transporter; protein id: supported by cDNA: gi_19699364 [Arabidopsis thaliana]
  misc_feature (51)..(506): Homolog of NCBI NO: 19699365 NR Description: At2g34960/F19I3.19 [Arabidopsis thaliana]
  misc_feature (1)..(499): Homolog of NCBI NO: 34903850 NR Description: unnamed protein product [Oryza sativa (japonica group)] >gi|8096566|dbj|BAA96139.1| unnamed protein product
  misc_feature (1)..(502): Homolog of NCBI NO: 15220035 NR Description: putative amino acid transporter; protein id: supported by cDNA: gi_18176203 [Arabidopsis thaliana] amino acid transporter homolog [imported] similar to amino acid
  misc_feature (1)..(498): Homolog of NCBI NO: 30685317 NR Description: amino acid transport protein AAT1 [Arabidopsis
  misc_feature (1)..(498): Homolog of NCBI NO: 1076291 NR Description: amino acid transport protein AAT1 - Arabidopsis >gi|2911069|emb|CAA17531.1| amino acid transport protein AAT1 thaliana] >gi|7268909|emb|CAB79112.1| amino acid transport
  misc_feature (1)..(496): Homolog of NCBI NO: 15238312 NR Description: amino acid transport - like protein; protein id: supported by cDNA: 158156., supported by cDNA: gi_13430547, by cDNA: gi_14532753 [Arabidopsis thaliana]
  misc_feature (1)..(496): Homolog of NCBI NO: 15228334 NR Description: putative amino acid transporter; protein id: [Arabidopsis thaliana] >gi|8567793|gb|AAF76365.1| amino acid putative [Arabidopsis thaliana]
  misc_feature (1)..(503): Homolog of NCBI NO: 38345948 NR Description: OSJNBb0103I08.20 [Oryza sativa (japonica
  misc_feature (1)..(374): Homolog of NCBI NO: 17533459 NR Description: Amino acid permease family member [Caenorhabditis

SEQ ID NO: 93457 - protein, 456 aa, Arabidopsis thaliana; identical to SEQ ID NO: 89701
  peptide (1)..(456): Ceres Seq. ID no. 12720088
  misc_feature (1)..(456): Homolog of NCBI NO: 15226868 NR Description: putative amino acid transporter; protein id: supported by cDNA: gi_19699364 [Arabidopsis thaliana]
  misc_feature (1)..(456): Homolog of NCBI NO: 19699365 NR Description: At2g34960/F19I3.19 [Arabidopsis thaliana]
  misc_feature (1)..(449): Homolog of NCBI NO: 34903850 NR Description: unnamed protein product [Oryza sativa (japonica group)] >gi|8096566|dbj|BAA96139.1| unnamed protein product
  misc_feature (1)..(452): Homolog of NCBI NO: 15220035 NR Description: putative amino acid transporter; protein id: supported by cDNA: gi_18176203 [Arabidopsis thaliana] amino acid transporter homolog [imported] similar to amino acid
  misc_feature (1)..(448): Homolog of NCBI NO: 30685317 NR Description: amino acid transport protein AAT1 [Arabidopsis
  misc_feature (1)..(448): Homolog of NCBI NO: 1076291 NR Description: amino acid transport protein AAT1 - Arabidopsis >gi|2911069|emb|CAA17531.1| amino acid transport protein AAT1 thaliana] >gi|7268909|emb|CAB79112.1| amino acid transport
  misc_feature (1)..(446): Homolog of NCBI NO: 15238312 NR Description: amino acid transport - like protein; protein id: supported by cDNA: 158156., supported by cDNA: gi_13430547, by cDNA: gi_14532753 [Arabidopsis thaliana]
  misc_feature (1)..(446): Homolog of NCBI NO: 15228334 NR Description: putative amino acid transporter; protein id: [Arabidopsis thaliana] >gi|8567793|gb|AAF76365.1| amino acid putative [Arabidopsis thaliana]
  misc_feature (1)..(453): Homolog of NCBI NO: 38345948 NR Description: OSJNBb0103I08.20 [Oryza sativa (japonica
  misc_feature (1)..(324): Homolog of NCBI NO: 17533459 NR Description: Amino acid permease family member [Caenorhabditis

SEQ ID NO: 93458 - DNA, 1802 bp, Arabidopsis thaliana; identical to SEQ ID NO: 89702
  misc_feature (1)..(1802): Ceres Seq. ID no. 12720123
  misc_feature: MA Experiment ID: 20001248 Result: Up-regulated in Transcription
  misc_feature: MA Experiment 20001248 PARAMETER Experiment Name: At_Far-red-induction_P Parameter: Age (day) Value: 7
  misc_feature: MA Experiment 20001248 PARAMETER Experiment Name: At_Far-red-induction_P Parameter: Light Value: Far-red vs. White
  misc_feature: MA Experiment 20001248 PARAMETER Experiment Name: At_Far-red-induction_P Parameter: Organism Value: A. thaliana
  misc_feature: MA Experiment 20001248 PARAMETER Experiment Name: At_Far-red-induction_P Parameter: Plant Line Value: Columbia
  misc_feature: MA Experiment 20001248 PARAMETER Experiment Name: At_Far-red-induction_P Parameter: Timepoint (hr) Value: 4
  misc_feature: MA Experiment 20001248 PARAMETER Experiment Name: At_Far-red-induction_P Parameter: Tissue Value: Whole Plant
  misc_feature: MA Experiment ID: 20001450 Result: Up-regulated in Transcription
  misc_feature: MA Experiment 20001450 PARAMETER Experiment Name: At_Far-red-induction_P Parameter: Age (day) Value: 7
  misc_feature: MA Experiment 20001450 PARAMETER Experiment Name: At_Far-red-induction_P Parameter: Light Value: Far-red vs. White
  misc_feature: MA Experiment 20001450 PARAMETER Experiment Name: At_Far-red-induction_P Parameter: Organism Value: A. thaliana
  misc_feature: MA Experiment 20001450 PARAMETER Experiment Name: At_Far-red-induction_P Parameter: Plant Line Value: Columbia
  misc_feature: MA Experiment 20001450 PARAMETER Experiment Name: At_Far-red-induction_P Parameter: Timepoint (hr) Value: 8
  misc_feature: MA Experiment 20001450 PARAMETER Experiment Name: At_Far-red-induction_P Parameter: Tissue Value: Whole Plant
  misc_feature: MA Experiment ID: 20001451 Result: Up-regulated in Transcription
  misc_feature: MA Experiment 20001451 PARAMETER Experiment Name: At_Far-red-induction_P Parameter: Age (day) Value: 7
  misc_feature: MA Experiment 20001451 PARAMETER Experiment Name: At_Far-red-induction_P Parameter: Light Value: Far-red vs. White
  misc_feature: MA Experiment 20001451 PARAMETER Experiment Name: At_Far-red-induction_P Parameter: Organism Value: A. thaliana
  misc_feature: MA Experiment 20001451 PARAMETER Experiment Name: At_Far-red-induction_P Parameter: Plant Line Value: Columbia
  misc_feature: MA Experiment 20001451 PARAMETER Experiment Name: At_Far-red-induction_P Parameter: Timepoint (hr) Value: 24
  misc_feature: MA Experiment 20001451 PARAMETER Experiment Name: At_Far-red-induction_P Parameter: Tissue Value: Whole Plant

SEQ ID NO: 93459 - protein, 484 aa, Arabidopsis thaliana; identical to SEQ ID NO: 89703
  peptide (1)..(484): Ceres Seq. ID no. 12720124
  misc_feature (300)..(322): Pfam Name: MORN repeat Pfam Description: MORN repeat
  misc_feature (1)..(484): Homolog of NCBI NO: 18403768 NR Description: expressed protein; protein id: At2g35170.1, by cDNA: gi_16604413, supported by cDNA: gi_19699213 [Arabidopsis >gi|25370691|pir||E84765 hypothetical protein At2g35170
  misc_feature (67)..(479): Homolog of NCBI NO: 21928129 NR Description: AT4g17080/dl4570w [Arabidopsis thaliana]
  misc_feature (1)..(479): Homolog of NCBI NO: 15235967 NR Description: hypothetical protein; protein id: At4g17080.1
  misc_feature (117)..(480): Homolog of NCBI NO: 37536922 NR Description: putative phosphatidylinositol-4-phosphate
  misc_feature (121)..(471): Homolog of NCBI NO: 15219142 NR Description: phosphatidylinositol-4-phosphate 5-kinase, protein id: At1g21920.1, supported by cDNA: 37462., supported by gi_13878044 [Arabidopsis thaliana]
  misc_feature (147)..(471): Homolog of NCBI NO: 21593251 NR Description: phosphatidylinositol-4-phosphate 5-kinase,
  misc_feature (121)..(471): Homolog of NCBI NO: 15217439 NR Description: unknown protein; protein id: At1g77660.1
  misc_feature (219)..(398): Homolog of NCBI NO: 40062709 NR Description: MORN repeat protein [uncultured bacterium 314]
  misc_feature (195)..(399): Homolog of NCBI NO: 40062709 NR Description: MORN repeat protein [uncultured bacterium 314]
  misc_feature (203)..(399): Homolog of NCBI NO: 40062709 NR Description: MORN repeat protein [uncultured bacterium 314]

SEQ ID NO: 93460 - protein, 255 aa, Arabidopsis thaliana; identical to SEQ ID NO: 89704
  peptide (1)..(255): Ceres Seq. ID no. 12720125
  misc_feature (71)..(93): Pfam Name: MORN repeat Pfam Description: MORN repeat
  misc_feature (1)..(255): Homolog of NCBI NO: 18403768 NR Description: expressed protein; protein id: At2g35170.1, by cDNA: gi_16604413, supported by cDNA: gi_19699213 [Arabidopsis >gi|25370691|pir||E84765 hypothetical protein At2g35170
  misc_feature (1)..(250): Homolog of NCBI NO: 21928129 NR Description: AT4g17080/dl4570w [Arabidopsis thaliana]
  misc_feature (1)..(250): Homolog of NCBI NO: 15235967 NR Description: hypothetical protein; protein id: At4g17080.1
  misc_feature (1)..(251): Homolog of NCBI NO: 37536922 NR Description: putative phosphatidylinositol-4-phosphate
  misc_feature (1)..(242): Homolog of NCBI NO: 15219142 NR Description: phosphatidylinositol-4-phosphate 5-kinase, protein id: At1g21920.1, supported by cDNA: 37462., supported by gi_13878044 [Arabidopsis thaliana]
  misc_feature (1)..(242): Homolog of NCBI NO: 21593251 NR Description: phosphatidylinositol-4-phosphate 5-kinase,
  misc_feature (1)..(242): Homolog of NCBI NO: 15217439 NR Description: unknown protein; protein id: At1g77660.1
  misc_feature (1)..(169): Homolog of NCBI NO: 40062709 NR Description: MORN repeat protein [uncultured bacterium 314]
  misc_feature (1)..(170): Homolog of NCBI NO: 40062709 NR Description: MORN repeat protein [uncultured bacterium 314]
  misc_feature (1)..(170): Homolog of NCBI NO: 40062709 NR Description: MORN repeat protein [uncultured bacterium 314]

SEQ ID NO: 93461 - DNA, 858 bp, Arabidopsis thaliana; identical to SEQ ID NO: 89705
  misc_feature (1)..(858): Ceres Seq. ID no. 12720130
  misc_feature: MA Experiment ID: 20000184 Result: Up-regulated in Transcription
  misc_feature: MA Experiment 20000184 PARAMETER Experiment Name: At_Shoots__P Parameter: Age (day) Value: 7
  misc_feature: MA Experiment 20000184 PARAMETER Experiment Name: At_Shoots__P Parameter: Tissue Value: Shoots vs. Whole Plant
  misc_feature: MA Experiment ID: 20000185 Result: Up-regulated in Transcription
  misc_feature: MA Experiment 20000185 PARAMETER Experiment Name: At_Roots__P Parameter: Age (day) Value: 7 vs. 21
  misc_feature: MA Experiment 20000185 PARAMETER Experiment Name: At_Roots__P Parameter: Organism Value: A. thaliana
  misc_feature: MA Experiment 20000185 PARAMETER Experiment Name: At_Roots__P Parameter: Tissue Value: Roots vs. Whole Plant
  misc_feature: MA Experiment ID: 20000436 Result: Down-regulated in Transcription
  misc_feature: MA Experiment 20000436 PARAMETER Experiment Name: At_Drought_P Parameter: Age (day) Value: 7
  misc_feature: MA Experiment 20000436 PARAMETER Experiment Name: At_Drought_P Parameter: Organism Value: A. thaliana
  misc_feature: MA Experiment 20000436 PARAMETER Experiment Name: At_Drought_P Parameter: Plant Line Value: WS
  misc_feature: MA Experiment 20000436 PARAMETER Experiment Name: At_Drought_P Parameter: Timepoint (hr) Value: 12
  misc_feature: MA Experiment 20000436 PARAMETER Experiment Name: At_Drought_P Parameter: Tissue Value: Whole Plant
  misc_feature: MA Experiment 20000436 PARAMETER Experiment Name: At_Drought_P Parameter: Treatment Value: Drought vs. No Drought
  misc_feature: MA Experiment ID: 20000437 Result: Down-regulated in Transcription
  misc_feature: MA Experiment 20000437 PARAMETER Experiment Name: At_Drought_P Parameter: Age (day) Value: 8
  misc_feature: MA Experiment 20000437 PARAMETER Experiment Name: At_Drought_P Parameter: Organism Value: A. thaliana
  misc_feature: MA Experiment 20000437 PARAMETER Experiment Name: At_Drought_P Parameter: Plant Line Value: WS
  misc_feature: MA Experiment 20000437 PARAMETER Experiment Name: At_Drought_P Parameter: Timepoint (hr) Value: 24
  misc_feature: MA Experiment 20000437 PARAMETER Experiment Name: At_Drought_P Parameter: Tissue Value: Whole Plant
  misc_feature: MA Experiment 20000437 PARAMETER Experiment Name: At_Drought_P Parameter: Treatment Value: Drought vs. No Drought
  misc_feature: MA Experiment ID: 20000439 Result: Up-regulated in Transcription
  misc_feature: MA Experiment 20000439 PARAMETER Experiment Name: At_Roots__P Parameter: Age (day) Value: 14 vs. 21
  misc_feature: MA Experiment 20000439 PARAMETER Experiment Name: At_Roots__P Parameter: Organism Value: A. thaliana
  misc_feature: MA Experiment 20000439 PARAMETER Experiment Name: At_Roots__P Parameter: Tissue Value: Roots vs. Whole Plant
  misc_feature: MA Experiment ID: 20001451 Result: Up-regulated in Transcription
  misc_feature: MA Experiment 20001451 PARAMETER Experiment Name: At_Far-red-induction_P Parameter: Age (day) Value: 7
  misc_feature: MA Experiment 20001451 PARAMETER Experiment Name: At_Far-red-induction_P Parameter: Light Value: Far-red vs. White
  misc_feature: MA Experiment 20001451 PARAMETER Experiment Name: At_Far-red-induction_P Parameter: Organism Value: A. thaliana
  misc_feature: MA Experiment 20001451 PARAMETER Experiment Name: At_Far-red-induction_P Parameter: Plant Line Value: Columbia
  misc_feature: MA Experiment 20001451 PARAMETER Experiment Name: At_Far-red-induction_P Parameter: Timepoint (hr) Value: 24
  misc_feature: MA Experiment 20001451 PARAMETER Experiment Name: At_Far-red-induction_P Parameter: Tissue Value: Whole Plant

SEQ ID NO: 93462 - protein, 285 aa, Arabidopsis thaliana; identical to SEQ ID NO: 89706
  peptide (1)..(285): Ceres Seq. ID no. 12720131
  misc_feature (1)..(285): Homolog of NCBI NO: 15226945 NR Description: putative AT-hook DNA-binding protein; protein id:
  misc_feature (1)..(285): Homolog of NCBI NO: 15236657 NR Description: hypothetical protein; protein id: At4g17800.1, by cDNA: gi_17933298, supported by cDNA: gi_20453386 [Arabidopsis
  misc_feature (1)..(285): Homolog of NCBI NO: 38346718 NR Description: OSJNBa0086O06.16 [Oryza sativa (japonica
  misc_feature (23)..(257): Homolog of NCBI NO: 15234404 NR Description: putative DNA-binding protein; protein id:
  misc_feature (31)..(247): Homolog of NCBI NO: 15235815 NR Description: putative DNA binding protein; protein id:
  misc_feature (1)..(279): Homolog of NCBI NO: 34905212 NR Description: P0672D01.8 [Oryza sativa (japonica
  misc_feature (44)..(279): Homolog of NCBI NO: 18396925 NR Description: expressed protein; protein id: At3g04570.1, by cDNA: 15781. [Arabidopsis thaliana] hypothetical protein [Arabidopsis thaliana]
  misc_feature (48)..(254): Homolog of NCBI NO: 15225475 NR Description: putative AT-hook DNA-binding protein; protein id:
  misc_feature (34)..(284): Homolog of NCBI NO: 34902080 NR Description: unknown protein [Oryza sativa (japonica >gi|34902088|ref|NP_912390.1| hypothetical protein [Oryza sativa
  misc_feature (32)..(285): Homolog of NCBI NO: 18414224 NR Description: Expressed protein; protein id: At4g14465.1, by cDNA: 36844. [Arabidopsis thaliana]

SEQ ID NO: 93463 - protein, 209 aa, Arabidopsis thaliana; identical to SEQ ID NO: 89707
  peptide (1)..(209): Ceres Seq. ID no. 12720132
  misc_feature (1)..(209): Homolog of NCBI NO: 15226945 NR Description: putative AT-hook DNA-binding protein; protein id:
  misc_feature (1)..(209): Homolog of NCBI NO: 15236657 NR Description: hypothetical protein; protein id: At4g17800.1, by cDNA: gi_17933298, supported by cDNA: gi_20453386 [Arabidopsis
  misc_feature (1)..(209): Homolog of NCBI NO: 38346718 NR Description: OSJNBa0086O06.16 [Oryza sativa (japonica
  misc_feature (1)..(181): Homolog of NCBI NO: 15234404 NR Description: putative DNA-binding protein; protein id:
  misc_feature (1)..(171): Homolog of NCBI NO: 15235815 NR Description: putative DNA binding protein; protein id:
  misc_feature (1)..(203): Homolog of NCBI NO: 34905212 NR Description: P0672D01.8 [Oryza sativa (japonica
  misc_feature (1)..(203): Homolog of NCBI NO: 18396925 NR Description: expressed protein; protein id: At3g04570.1, by cDNA: 15781. [Arabidopsis thaliana] hypothetical protein [Arabidopsis thaliana]
  misc_feature (1)..(178): Homolog of NCBI NO: 15225475 NR Description: putative AT-hook DNA-binding protein; protein id:
  misc_feature (1)..(208): Homolog of NCBI NO: 34902080 NR Description: unknown protein [Oryza sativa (japonica >gi|34902088|ref|NP_912390.1| hypothetical protein [Oryza sativa
  misc_feature (1)..(209): Homolog of NCBI NO: 18414224 NR Description: Expressed protein; protein id: At4g14465.1, by cDNA: 36844. [Arabidopsis thaliana]

SEQ ID NO: 93464 - DNA, 585 bp, Arabidopsis thaliana; identical to SEQ ID NO: 89708
  misc_feature (1)..(585): Ceres Seq. ID no. 12720172

SEQ ID NO: 93465 - protein, 194 aa, Arabidopsis thaliana; identical to SEQ ID NO: 89709
  peptide (1)..(194): Ceres Seq. ID no. 12720173
  misc_feature (42)..(106): Pfam Name: AP2 domain Pfam Description: AP2 domain
  misc_feature (1)..(194): Homolog of NCBI NO: 15227471 NR Description: putative AP2 domain transcription factor; protein At2g35700.1 [Arabidopsis thaliana] >gi|25350648|pir||H84771
  misc_feature (10)..(194): Homolog of NCBI NO: 15235858 NR Description: AP2 domain TINY-related protein; protein id: [Arabidopsis thaliana] >gi|25350649|pir||F85186 apetala2 domain
  misc_feature (41)..(194): Homolog of NCBI NO: 38605844 NR Description: OSJNBb0034G17.2 [Oryza sativa (japonica
  misc_feature (41)..(182): Homolog of NCBI NO: 14140155 NR Description: putative AP2 domain transcription factor [Oryza
  misc_feature (26)..(174): Homolog of NCBI NO: 14140163 NR Description: putative AP2 domain containing protein [Oryza
  misc_feature (5)..(174): Homolog of NCBI NO: 38605848 NR Description: OSJNBb0034G17.6 [Oryza sativa (japonica
  misc_feature (22)..(163): Homolog of NCBI NO: 21908034 NR Description: DRE binding factor 2 [Zea mays]
  misc_feature (22)..(163): Homolog of NCBI NO: 25990951 NR Description: DREB-like protein [Zea mays]
  misc_feature (27)..(145): Homolog of NCBI NO: 38605845 NR Description: OSJNBb0034G17.3 [Oryza sativa (japonica
  misc_feature (27)..(160): Homolog of NCBI NO: 37536842 NR Description: putative DNA binding protein [Oryza sativa

SEQ ID NO: 93466 - protein, 145 aa, Arabidopsis thaliana; identical to SEQ ID NO: 89710
  peptide (1)..(145): Ceres Seq. ID no. 12720174
  misc_feature (1)..(57): Pfam Name: AP2 domain Pfam Description: AP2 domain
  misc_feature (1)..(145): Homolog of NCBI NO: 15227471 NR Description: putative AP2 domain transcription factor; protein At2g35700.1 [Arabidopsis thaliana] >gi|25350648|pir||H84771
  misc_feature (1)..(145): Homolog of NCBI NO: 15235858 NR Description: AP2 domain TINY-related protein; protein id: [Arabidopsis thaliana] >gi|25350649|pir||F85186 apetala2 domain
  misc_feature (1)..(145): Homolog of NCBI NO: 38605844 NR Description: OSJNBb0034G17.2 [Oryza sativa (japonica
  misc_feature (1)..(133): Homolog of NCBI NO: 14140155 NR Description: putative AP2 domain transcription factor [Oryza
  misc_feature (1)..(125): Homolog of NCBI NO: 14140163 NR Description: putative AP2 domain containing protein [Oryza
  misc_feature (1)..(125): Homolog of NCBI NO: 38605848 NR Description: OSJNBb0034G17.6 [Oryza sativa (japonica
  misc_feature (1)..(114): Homolog of NCBI NO: 21908034 NR Description: DRE binding factor 2 [Zea mays]
  misc_feature (1)..(114): Homolog of NCBI NO: 25990951 NR Description: DREB-like protein [Zea mays]
  misc_feature (1)..(96): Homolog of NCBI NO: 38605845 NR Description: OSJNBb0034G17.3 [Oryza sativa (japonica
  misc_feature (1)..(111): Homolog of NCBI NO: 37536842 NR Description: putative DNA binding protein [Oryza sativa

SEQ ID NO: 93467 - protein, 116 aa, Arabidopsis thaliana; identical to SEQ ID NO: 89711
  peptide (1)..(116): Ceres Seq. ID no. 12720175
  misc_feature (1)..(116): Homolog of NCBI NO: 15227471 NR Description: putative AP2 domain transcription factor; protein At2g35700.1 [Arabidopsis thaliana] >gi|25350648|pir||H84771
  misc_feature (1)..(116): Homolog of NCBI NO: 15235858 NR Description: AP2 domain TINY-related protein; protein id: [Arabidopsis thaliana] >gi|25350649|pir||F85186 apetala2 domain
  misc_feature (1)..(116): Homolog of NCBI NO: 38605844 NR Description: OSJNBb0034G17.2 [Oryza sativa (japonica
  misc_feature (1)..(104): Homolog of NCBI NO: 14140155 NR Description: putative AP2 domain transcription factor [Oryza
  misc_feature (1)..(96): Homolog of NCBI NO: 14140163 NR Description: putative AP2 domain containing protein [Oryza
  misc_feature (1)..(96): Homolog of NCBI NO: 38605848 NR Description: OSJNBb0034G17.6 [Oryza sativa (japonica
  misc_feature (1)..(85): Homolog of NCBI NO: 21908034 NR Description: DRE binding factor 2 [Zea mays]
  misc_feature (1)..(85): Homolog of NCBI NO: 25990951 NR Description: DREB-like protein [Zea mays]
  misc_feature (1)..(67): Homolog of NCBI NO: 38605845 NR Description: OSJNBb0034G17.3 [Oryza sativa (japonica
  misc_feature (1)..(82): Homolog of NCBI NO: 37536842 NR Description: putative DNA binding protein [Oryza sativa

SEQ ID NO: 93468 - DNA, 1344 bp, Arabidopsis thaliana; identical to SEQ ID NO: 89712
  misc_feature (1)..(1344): Ceres Seq. ID no. 12720190
  misc_feature: MA Experiment ID: 20000314 Result: Up-regulated in Transcription
  misc_feature: MA Experiment 20000314 PARAMETER Experiment Name: At_14day_Shoots-Roots_Sub_P Parameter: Age (day) Value: 14
  misc_feature: MA Experiment 20000314 PARAMETER Experiment Name: At_14day_Shoots-Roots_Sub_P Parameter: Organism Value: A. thaliana
  misc_feature: MA Experiment 20000314 PARAMETER Experiment Name: At_14day_Shoots-Roots_Sub_P Parameter: Plant Line Value: WS
  misc_feature: MA Experiment 20000314 PARAMETER Experiment Name: At_14day_Shoots-Roots_Sub_P Parameter: Tissue Value: Roots vs. Whole Plant
  misc_feature: MA Experiment ID: 20000315 Result: Up-regulated in Transcription
  misc_feature: MA Experiment 20000315 PARAMETER Experiment Name: At_14day_Shoots-Roots_Sub_P Parameter: Age (day) Value: 14
  misc_feature: MA Experiment 20000315 PARAMETER Experiment Name: At_14day_Shoots-Roots_Sub_P Parameter: Organism Value: A. thaliana
  misc_feature: MA Experiment 20000315 PARAMETER Experiment Name: At_14day_Shoots-Roots_Sub_P Parameter: Plant Line Value: WS
  misc_feature: MA Experiment 20000315 PARAMETER Experiment Name: At_14day_Shoots-Roots_Sub_P Parameter: Tissue Value: Shoots vs. Whole Plant

SEQ ID NO: 93469 - protein, 447 aa, Arabidopsis thaliana; identical to SEQ ID NO: 89713
  peptide (1)..(447): Ceres Seq. ID no. 12720191
  misc_feature (27)..(439): Pfam Name: Serine carboxypeptidase Pfam Description: Serine carboxypeptidase
  misc_feature (1)..(447): Homolog of NCBI NO: 15227492 NR Description: putative serine carboxypeptidase II; protein id: [Arabidopsis thaliana] >gi|25289794|pir||G84772 probable serine
  misc_feature (1)..(443): Homolog of NCBI NO: 15231911 NR Description: putative serine carboxypeptidase II; protein id: [Arabidopsis thaliana] >gi|6648211|gb|AAF21209.1|AC013483_33
  misc_feature (1)..(444): Homolog of NCBI NO: 34908012 NR Description: putative carboxypeptidase D [Oryza sativa
  misc_feature (14)..(443): Homolog of NCBI NO: 15227493 NR Description: putative serine carboxypeptidase II; protein id:
  misc_feature (12)..(443): Homolog of NCBI NO: 34895992 NR Description: putative carboxypeptidase D [Oryza sativa
  misc_feature (21)..(443): Homolog of NCBI NO: 20455471 NR Description: Serine carboxypeptidase II precursor
  misc_feature (1)..(445): Homolog of NCBI NO: 13877871 NR Description: putative serine carboxypeptidase II [Arabidopsis
  misc_feature (1)..(445): Homolog of NCBI NO: 15234795 NR Description: SERINE CARBOXYPEPTIDASE II-like protein; protein At4g30610.1, supported by cDNA: gi_13877870 [Arabidopsis
  misc_feature (21)..(443): Homolog of NCBI NO: 7428204 NR Description: carboxypeptidase D (EC 3.4.16.6) precursor -
  misc_feature (21)..(443): Homolog of NCBI NO: 7428205 NR Description: carboxypeptidase D (EC 3.4.16.6) - wheat

SEQ ID NO: 93470 - protein, 429 aa, Arabidopsis thaliana; identical to SEQ ID NO: 89714
  peptide (1)..(429): Ceres Seq. ID no. 12720192
  misc_feature (9)..(421): Pfam Name: Serine carboxypeptidase Pfam Description: Serine carboxypeptidase
  misc_feature (1)..(429): Homolog of NCBI NO: 15227492 NR Description: putative serine carboxypeptidase II; protein id: [Arabidopsis thaliana] >gi|25289794|pir||G84772 probable serine
  misc_feature (1)..(425): Homolog of NCBI NO: 15231911 NR Description: putative serine carboxypeptidase II; protein id: [Arabidopsis thaliana] >gi|6648211|gb|AAF21209.1|AC013483_33
  misc_feature (1)..(426): Homolog of NCBI NO: 34908012 NR Description: putative carboxypeptidase D [Oryza sativa
  misc_feature (1)..(425): Homolog of NCBI NO: 15227493 NR Description: putative serine carboxypeptidase II; protein id:
  misc_feature (1)..(425): Homolog of NCBI NO: 34895992 NR Description: putative carboxypeptidase D [Oryza sativa
  misc_feature (3)..(425): Homolog of NCBI NO: 20455471 NR Description: Serine carboxypeptidase II precursor
  misc_feature (1)..(427): Homolog of NCBI NO: 13877871 NR Description: putative serine carboxypeptidase II [Arabidopsis
  misc_feature (1)..(427): Homolog of NCBI NO: 15234795 NR Description: SERINE CARBOXYPEPTIDASE II-like protein; protein At4g30610.1, supported by cDNA: gi_13877870 [Arabidopsis
  misc_feature (3)..(425): Homolog of NCBI NO: 7428204 NR Description: carboxypeptidase D (EC 3.4.16.6) precursor -
  misc_feature (3)..(425): Homolog of NCBI NO: 7428205 NR Description: carboxypeptidase D (EC 3.4.16.6) - wheat

SEQ ID NO: 93471 - protein, 245 aa, Arabidopsis thaliana; identical to SEQ ID NO: 89715
  peptide (1)..(245): Ceres Seq. ID no. 12720193
  misc_feature (1)..(237): Pfam Name: Serine carboxypeptidase Pfam Description: Serine carboxypeptidase
  misc_feature (1)..(245): Homolog of NCBI NO: 15227492 NR Description: putative serine carboxypeptidase II; protein id: [Arabidopsis thaliana] >gi|25289794|pir||G84772 probable serine
  misc_feature (1)..(241): Homolog of NCBI NO: 15231911 NR Description: putative serine carboxypeptidase II; protein id: [Arabidopsis thaliana] >gi|6648211|gb|AAF21209.1|AC013483_33
  misc_feature (1)..(242): Homolog of NCBI NO: 34908012 NR Description: putative carboxypeptidase D [Oryza sativa
  misc_feature (1)..(241): Homolog of NCBI NO: 15227493 NR Description: putative serine carboxypeptidase II; protein id:
  misc_feature (1)..(241): Homolog of NCBI NO: 34895992 NR Description: putative carboxypeptidase D [Oryza sativa
  misc_feature (1)..(241): Homolog of NCBI NO: 20455471 NR Description: Serine carboxypeptidase II precursor
  misc_feature (1)..(243): Homolog of NCBI NO: 13877871 NR Description: putative serine carboxypeptidase II [Arabidopsis
  misc_feature (1)..(243): Homolog of NCBI NO: 15234795 NR Description: SERINE CARBOXYPEPTIDASE II-like protein; protein At4g30610.1, supported by cDNA: gi_13877870 [Arabidopsis
  misc_feature (1)..(241): Homolog of NCBI NO: 7428204 NR Description: carboxypeptidase D (EC 3.4.16.6) precursor -
  misc_feature (1)..(241): Homolog of NCBI NO: 7428205 NR Description: carboxypeptidase D (EC 3.4.16.6) - wheat

SEQ ID NO: 93472 - DNA, 636 bp, Arabidopsis thaliana; identical to SEQ ID NO: 89716
  misc_feature (1)..(636): Ceres Seq. ID no. 12720202
  misc_feature: MA Experiment ID: 20000315 Result: Up-regulated in Transcription
  misc_feature: MA Experiment 20000315 PARAMETER Experiment Name: At_14day_Shoots-Roots_Sub_P Parameter: Age (day) Value: 14
  misc_feature: MA Experiment 20000315 PARAMETER Experiment Name: At_14day_Shoots-Roots_Sub_P Parameter: Organism Value: A. thaliana
  misc_feature: MA Experiment 20000315 PARAMETER Experiment Name: At_14day_Shoots-Roots_Sub_P Parameter: Plant Line Value: WS
  misc_feature: MA Experiment 20000315 PARAMETER Experiment Name: At_14day_Shoots-Roots_Sub_P Parameter: Tissue Value: Shoots vs. Whole Plant

SEQ ID NO: 93473 - protein, 211 aa, Arabidopsis thaliana; identical to SEQ ID NO: 89717
  peptide (1)..(211): Ceres Seq. ID no. 12720203
  misc_feature (1)..(211): Homolog of NCBI NO: 15227540 NR Description: hairpin-induced protein, putative (HIN1); protein
  misc_feature (1)..(211): Homolog of NCBI NO: 15233951 NR Description: hairpin-induced protein, putative (HIN1); protein At4g09590.1 [Arabidopsis thaliana] >gi|25354574|pir||A85098
  misc_feature (1)..(210): Homolog of NCBI NO: 15227538 NR Description: hairpin-induced protein, putative (HIN1); protein
  misc_feature (3)..(210): Homolog of NCBI NO: 15231227 NR Description: hairpin-induced protein, putative (HIN1); protein At3g52470.1, supported by cDNA: 92178., supported by cDNA: supported by cDNA: gi_21281063 [Arabidopsis thaliana]
  misc_feature (4)..(210): Homolog of NCBI NO: 18399308 NR Description: VAMP protein SEC22; protein id: At3g11660.1, by cDNA: 8166., supported by cDNA: gi_9502171 [Arabidopsis
  misc_feature (4)..(210): Homolog of NCBI NO: 28392929 NR Description: putative VAMP protein SEC22 [Arabidopsis thaliana]
  misc_feature (1)..(210): Homolog of NCBI NO: 15240001 NR Description: hairpin-induced protein, putative (HIN1); protein
  misc_feature (1)..(210): Homolog of NCBI NO: 15229906 NR Description: hairpin-induced protein, putative (HIN1); protein At3g44220.1 [Arabidopsis thaliana] >gi|11282595|pir||T49138
  misc_feature (1)..(210): Homolog of NCBI NO: 22326984 NR Description: similar to hairpin-induced protein, putative
  misc_feature (21)..(195): Homolog of NCBI NO: 38344036 NR Description: OJ991214_12.17 [Oryza sativa (japonica

SEQ ID NO: 93474 - protein, 177 aa, Arabidopsis thaliana; identical to SEQ ID NO: 89718
  peptide (1)..(177): Ceres Seq. ID no. 12720204
  misc_feature (1)..(177): Homolog of NCBI NO: 15227540 NR Description: hairpin-induced protein, putative (HIN1); protein
  misc_feature (1)..(177): Homolog of NCBI NO: 15233951 NR Description: hairpin-induced protein, putative (HIN1); protein At4g09590.1 [Arabidopsis thaliana] >gi|25354574|pir||A85098
  misc_feature (1)..(176): Homolog of NCBI NO: 15227538 NR Description: hairpin-induced protein, putative (HIN1); protein
  misc_feature (1)..(176): Homolog of NCBI NO: 15231227 NR Description: hairpin-induced protein, putative (HIN1); protein At3g52470.1, supported by cDNA: 92178., supported by cDNA: supported by cDNA: gi_21281063 [Arabidopsis thaliana]
  misc_feature (1)..(176): Homolog of NCBI NO: 18399308 NR Description: VAMP protein SEC22; protein id: At3g11660.1, by cDNA: 8166., supported by cDNA: gi_9502171 [Arabidopsis
  misc_feature (1)..(176): Homolog of NCBI NO: 28392929 NR Description: putative VAMP protein SEC22 [Arabidopsis thaliana]
  misc_feature (1)..(176): Homolog of NCBI NO: 15240001 NR Description: hairpin-induced protein, putative (HIN1); protein
  misc_feature (1)..(176): Homolog of NCBI NO: 15229906 NR Description: hairpin-induced protein, putative (HIN1); protein At3g44220.1 [Arabidopsis thaliana] >gi|11282595|pir||T49138
  misc_feature (1)..(176): Homolog of NCBI NO: 22326984 NR Description: similar to hairpin-induced protein, putative
  misc_feature (1)..(161): Homolog of NCBI NO: 38344036 NR Description: OJ991214_12.17 [Oryza sativa (japonica

SEQ ID NO: 93475 - DNA, 1035 bp, Arabidopsis thaliana; identical to SEQ ID NO: 89719
  misc_feature (1)..(1035): Ceres Seq. ID no. 12720209
  misc_feature: MA Experiment ID: 20000265 Result: Down-regulated in Transcription
  misc_feature: MA Experiment 20000265 PARAMETER Experiment Name: At_Open_Flower_P Parameter: Age (day) Value: 21
  misc_feature: MA Experiment 20000265 PARAMETER Experiment Name: At_Open_Flower_P Parameter: Plant Line Value: WS
  misc_feature: MA Experiment 20000265 PARAMETER Experiment Name: At_Open_Flower_P Parameter: Tissue Value: Closed Flower vs. Whole Plant
  misc_feature: MA Experiment ID: 20000439 Result: Down-regulated in Transcription
  misc_feature: MA Experiment 20000439 PARAMETER Experiment Name: At_Roots__P Parameter: Age (day) Value: 14 vs. 21
  misc_feature: MA Experiment 20000439 PARAMETER Experiment Name: At_Roots__P Parameter: Organism Value: A. thaliana
  misc_feature: MA Experiment 20000439 PARAMETER Experiment Name: At_Roots__P Parameter: Tissue Value: Roots vs. Whole Plant
  misc_feature: MA Experiment ID: 20000794 Result: Down-regulated in Transcription
  misc_feature: MA Experiment 20000794 PARAMETER Experiment Name: At_Petals_P Parameter: Age (day) Value: 23-25 days
  misc_feature: MA Experiment 20000794 PARAMETER Experiment Name: At_Petals_P Parameter: Plant Line Value: WS
  misc_feature: MA Experiment 20000794 PARAMETER Experiment Name: At_Petals_P Parameter: Tissue Value: Petals vs. Whole plant

SEQ ID NO: 93476 - protein, 344 aa, Arabidopsis thaliana; identical to SEQ ID NO: 89720
  peptide (1)..(344): Ceres Seq. ID no. 12720210
  misc_feature (36)..(335): Pfam Name: GDSL-like Lipase/Acylhydrolase Pfam Description: GDSL-like Lipase/Acylhydrolase
  misc_feature (1)..(344): Homolog of NCBI NO: 15219505 NR Description: putative lipase/acylhydrolase; protein id: [Arabidopsis thaliana] >gi|25336263|pir||A96763 protein
  misc_feature (1)..(344): Homolog of NCBI NO: 15220775 NR Description: hypothetical protein; protein id: At1g23500.1
  misc_feature (1)..(344): Homolog of NCBI NO: 15242657 NR Description: lipase/acylhydrolase-like protein; protein id:
  misc_feature (4)..(333): Homolog of NCBI NO: 25511649 NR Description: T20H2.9 protein - Arabidopsis thaliana
  misc_feature (5)..(344): Homolog of NCBI NO: 15222902 NR Description: family II extracellular lipase 4 (EXL4); protein At1g75910.1, supported by cDNA: gi_15054387 [Arabidopsis
  misc_feature (30)..(344): Homolog of NCBI NO: 25404994 NR Description: protein T4O12.13 [imported] - Arabidopsis >gi|8778808|gb|AAF79815.1|AC007396_8 T4O12.13 [Arabidopsis
  misc_feature (5)..(344): Homolog of NCBI NO: 15054388 NR Description: family II lipase EXL4 [Arabidopsis thaliana]
  misc_feature (4)..(291): Homolog of NCBI NO: 15223790 NR Description: anter-specific proline-rich protein APG
  misc_feature (5)..(344): Homolog of NCBI NO: 15222904 NR Description: family II extracellular lipase 6 (EXL6); protein At1g75930.1, supported by cDNA: gi_15054389 [Arabidopsis >gi|15054390|gb|AAK30021.1| family II lipase EXL6 [Arabidopsis
  misc_feature (5)..(329): Homolog of NCBI NO: 25404995 NR Description: protein T4O12.15 [imported] - Arabidopsis >gi|8778810|gb|AAF26759.2|AC007396_8 T4O12.15 [Arabidopsis

SEQ ID NO: 93477 - protein, 340 aa, Arabidopsis thaliana; identical to SEQ ID NO: 89721
  peptide (1)..(340): Ceres Seq. ID no. 12720211
  misc_feature (32)..(331): Pfam Name: GDSL-like Lipase/Acylhydrolase Pfam Description: GDSL-like Lipase/Acylhydrolase
  misc_feature (1)..(340): Homolog of NCBI NO: 15219505 NR Description: putative lipase/acylhydrolase; protein id: [Arabidopsis thaliana] >gi|25336263|pir||A96763 protein
  misc_feature (1)..(340): Homolog of NCBI NO: 15220775 NR Description: hypothetical protein; protein id: At1g23500.1
  misc_feature (1)..(340): Homolog of NCBI NO: 15242657 NR Description: lipase/acylhydrolase-like protein; protein id:
  misc_feature (1)..(329): Homolog of NCBI NO: 25511649 NR Description: T20H2.9 protein - Arabidopsis thaliana
  misc_feature (1)..(340): Homolog of NCBI NO: 15222902 NR Description: family II extracellular lipase 4 (EXL4); protein At1g75910.1, supported by cDNA: gi_15054387 [Arabidopsis
  misc_feature (26)..(340): Homolog of NCBI NO: 25404994 NR Description: protein T4O12.13 [imported] - Arabidopsis >gi|8778808|gb|AAF79815.1|AC007396_8 T4O12.13 [Arabidopsis
  misc_feature (1)..(340): Homolog of NCBI NO: 15054388 NR Description: family II lipase EXL4 [Arabidopsis thaliana]
  misc_feature (1)..(287): Homolog of NCBI NO: 15223790 NR Description: anter-specific proline-rich protein APG
  misc_feature (1)..(340): Homolog of NCBI NO: 15222904 NR Description: family II extracellular lipase 6 (EXL6); protein At1g75930.1, supported by cDNA: gi_15054389 [Arabidopsis >gi|15054390|gb|AAK30021.1| family II lipase EXL6 [Arabidopsis
  misc_feature (1)..(325): Homolog of NCBI NO: 25404995 NR Description: protein T4O12.15 [imported] - Arabidopsis >gi|8778810|gb|AAF26759.2|AC007396_8 T4O12.15 [Arabidopsis

SEQ ID NO: 93478 - protein, 336 aa, Arabidopsis thaliana; identical to SEQ ID NO: 89722
  peptide (1)..(336): Ceres Seq. ID no. 12720212
  misc_feature (28)..(327): Pfam Name: GDSL-like Lipase/Acylhydrolase Pfam Description: GDSL-like Lipase/Acylhydrolase
  misc_feature (1)..(336): Homolog of NCBI NO: 15219505 NR Description: putative lipase/acylhydrolase; protein id: [Arabidopsis thaliana] >gi|25336263|pir||A96763 protein
  misc_feature (1)..(336): Homolog of NCBI NO: 15220775 NR Description: hypothetical protein; protein id: At1g23500.1
  misc_feature (1)..(336): Homolog of NCBI NO: 15242657 NR Description: lipase/acylhydrolase-like protein; protein id:
  misc_feature (1)..(325): Homolog of NCBI NO: 25511649 NR Description: T20H2.9 protein - Arabidopsis thaliana
  misc_feature (1)..(336): Homolog of NCBI NO: 15222902 NR Description: family II extracellular lipase 4 (EXL4); protein At1g75910.1, supported by cDNA: gi_15054387 [Arabidopsis
  misc_feature (22)..(336): Homolog of NCBI NO: 25404994 NR Description: protein T4O12.13 [imported] - Arabidopsis >gi|8778808|gb|AAF79815.1|AC007396_8 T4O12.13 [Arabidopsis
  misc_feature (1)..(336): Homolog of NCBI NO: 15054388 NR Description: family II lipase EXL4 [Arabidopsis thaliana]
  misc_feature (1)..(283): Homolog of NCBI NO: 15223790 NR Description: anter-specific proline-rich protein APG
  misc_feature (1)..(336): Homolog of NCBI NO: 15222904 NR Description: family II extracellular lipase 6 (EXL6); protein At1g75930.1, supported by cDNA: gi_15054389 [Arabidopsis >gi|15054390|gb|AAK30021.1| family II lipase EXL6 [Arabidopsis
  misc_feature (1)..(321): Homolog of NCBI NO: 25404995 NR Description: protein T4O12.15 [imported] - Arabidopsis >gi|8778810|gb|AAF26759.2|AC007396_8 T4O12.15 [Arabidopsis

SEQ ID NO: 93479 - DNA, 3769 bp, Arabidopsis thaliana; identical to SEQ ID NO: 89723
  misc_feature (1)..(3769): Ceres Seq. ID no. 12720213
  misc_feature: MA Experiment ID: 20000185 Result: Up-regulated in Transcription
  misc_feature: MA Experiment 20000185 PARAMETER Experiment Name: At_Roots__P Parameter: Age (day) Value: 7 vs. 21
  misc_feature: MA Experiment 20000185 PARAMETER Experiment Name: At_Roots__P Parameter: Organism Value: A. thaliana
  misc_feature: MA Experiment 20000185 PARAMETER Experiment Name: At_Roots__P Parameter: Tissue Value: Roots vs. Whole Plant
  misc_feature: MA Experiment ID: 20000438 Result: Up-regulated in Transcription
  misc_feature: MA Experiment 20000438 PARAMETER Experiment Name: At_Shoots__P Parameter: Age (day) Value: 14
  misc_feature: MA Experiment 20000438 PARAMETER Experiment Name: At_Shoots__P Parameter: Tissue Value: Shoots vs. Whole Plant
  misc_feature: MA Experiment ID: 20000439 Result: Up-regulated in Transcription
  misc_feature: MA Experiment 20000439 PARAMETER Experiment Name: At_Roots__P Parameter: Age (day) Value: 14 vs. 21
  misc_feature: MA Experiment 20000439 PARAMETER Experiment Name: At_Roots__P Parameter: Organism Value: A. thaliana
  misc_feature: MA Experiment 20000439 PARAMETER Experiment Name: At_Roots__P Parameter: Tissue Value: Roots vs. Whole Plant
  misc_feature: MA Experiment ID: 20000441 Result: Up-regulated in Transcription
  misc_feature: MA Experiment 20000441 PARAMETER Experiment Name: At_1uM_BR-BRZ__P Parameter: Tissue Value: Shoot Apices
  misc_feature: MA Experiment 20000441 PARAMETER Experiment Name: At_1uM_BR-BRZ__P Parameter: Treatment Value: 1uM BR vs. No Treatment
  misc_feature: MA Experiment ID: 20000443 Result: Up-regulated in Transcription
  misc_feature: MA Experiment 20000443 PARAMETER Experiment Name: At_1uM_BR-BRZ__P Parameter: Tissue Value: Shoot Apices
  misc_feature: MA Experiment 20000443 PARAMETER Experiment Name: At_1uM_BR-BRZ__P Parameter: Treatment Value: 1uM BRZ vs. No Treatment
  misc_feature: MA Experiment ID: 20000794 Result: Up-regulated in Transcription
  misc_feature: MA Experiment 20000794 PARAMETER Experiment Name: At_Petals_P Parameter: Age (day) Value: 23-25 days
  misc_feature: MA Experiment 20000794 PARAMETER Experiment Name: At_Petals_P Parameter: Plant Line Value: WS
  misc_feature: MA Experiment 20000794 PARAMETER Experiment Name: At_Petals_P Parameter: Tissue Value: Petals vs. Whole plant
  misc_feature: MA Experiment ID: 20001450 Result: Up-regulated in Transcription
  misc_feature: MA Experiment 20001450 PARAMETER Experiment Name: At_Far-red-induction_P Parameter: Age (day) Value: 7
  misc_feature: MA Experiment 20001450 PARAMETER Experiment Name: At_Far-red-induction_P Parameter: Light Value: Far-red vs. White
  misc_feature: MA Experiment 20001450 PARAMETER Experiment Name: At_Far-red-induction_P Parameter: Organism Value: A. thaliana
  misc_feature: MA Experiment 20001450 PARAMETER Experiment Name: At_Far-red-induction_P Parameter: Plant Line Value: Columbia
  misc_feature: MA Experiment 20001450 PARAMETER Experiment Name: At_Far-red-induction_P Parameter: Timepoint (hr) Value: 8
  misc_feature: MA Experiment 20001450 PARAMETER Experiment Name: At_Far-red-induction_P Parameter: Tissue Value: Whole Plant
  misc_feature: MA Experiment ID: 20001556 Result: Down-regulated in Transcription
  misc_feature: MA Experiment 20001556 PARAMETER Experiment Name: At_Drought_Soil_Dry_P Parameter: Age (day) Value: 26
  misc_feature: MA Experiment 20001556 PARAMETER Experiment Name: At_Drought_Soil_Dry_P Parameter: Organism Value: A. thaliana
  misc_feature: MA Experiment 20001556 PARAMETER Experiment Name: At_Drought_Soil_Dry_P Parameter: Plant Line Value: WS
  misc_feature: MA Experiment 20001556 PARAMETER Experiment Name: At_Drought_Soil_Dry_P Parameter: Post Timepoint (hr) Value: None
  misc_feature: MA Experiment 20001556 PARAMETER Experiment Name: At_Drought_Soil_Dry_P Parameter: Post-Treatment Value: None
  misc_feature: MA Experiment 20001556 PARAMETER Experiment Name: At_Drought_Soil_Dry_P Parameter: Timepoint (day) Value: 12
  misc_feature: MA Experiment 20001556 PARAMETER Experiment Name: At_Drought_Soil_Dry_P Parameter: Treatment Value: Drought vs. No Drought
  misc_feature: MA Experiment ID: 20001904 Result: Down-regulated in Transcription
  misc_feature: MA Experiment 20001904 PARAMETER Experiment Name: At_Drought_Reproduction_P Parameter: Age (day) Value: 37
  misc_feature: MA Experiment 20001904 PARAMETER Experiment Name: At_Drought_Reproduction_P Parameter: Organism Value: A. thaliana
  misc_feature: MA Experiment 20001904 PARAMETER Experiment Name: At_Drought_Reproduction_P Parameter: Plant Line Value: WS
  misc_feature: MA Experiment 20001904 PARAMETER Experiment Name: At_Drought_Reproduction_P Parameter: Timepoint (day) Value: 7
  misc_feature: MA Experiment 20001904 PARAMETER Experiment Name: At_Drought_Reproduction_P Parameter: Tissue Value: Rosettes
  misc_feature: MA Experiment 20001904 PARAMETER Experiment Name: At_Drought_Reproduction_P Parameter: Treatment Value: Drought vs. No Drought

SEQ ID NO: 93480 - protein, 1030 aa, Arabidopsis thaliana; identical to SEQ ID NO: 89724
  peptide (1)..(1030): Ceres Seq. ID no. 12720214
  misc_feature (748)..(1000): Pfam Name: Protein kinase domain Pfam Description: Protein kinase domain
  misc_feature (25)..(112): Homolog of NCBI NO: 32527767 NR Description: shoot regeneration-related mitogen activated
  misc_feature (33)..(552): Homolog of NCBI NO: 22326737 NR Description: MAP3K delta-1 protein kinase; protein id: supported by cDNA: gi_18700074 [Arabidopsis thaliana]
  misc_feature (711)..(1022): Homolog of NCBI NO: 22326737 NR Description: MAP3K delta-1 protein kinase; protein id: supported by cDNA: gi_18700074 [Arabidopsis thaliana]
  misc_feature (119)..(552): Homolog of NCBI NO: 11358502 NR Description: MAP3K delta-1 protein kinase - Arabidopsis
  misc_feature (711)..(985): Homolog of NCBI NO: 11358502 NR Description: MAP3K delta-1 protein kinase - Arabidopsis
  misc_feature (33)..(386): Homolog of NCBI NO: 7489058 NR Description: probable protein kinase TCTR2 - tomato
  misc_feature (736)..(1025): Homolog of NCBI NO: 7489058 NR Description: probable protein kinase TCTR2 - tomato
  misc_feature (139)..(446): Homolog of NCBI NO: 7488198 NR Description: probable serine/threonine-specific protein kinase
  misc_feature (139)..(446): Homolog of NCBI NO: 18390931 NR Description: putative protein kinase; protein id: At1g08720.1, by cDNA: gi_11127924 [Arabidopsis thaliana]
  misc_feature (696)..(1007): Homolog of NCBI NO: 7488198 NR Description: probable serine/threonine-specific protein kinase

SEQ ID NO: 93481 - protein, 1002 aa, Arabidopsis thaliana; identical to SEQ ID NO: 88587
  peptide (1)..(1002): Ceres Seq. ID no. 12720215
  misc_feature (720)..(972): Pfam Name: Protein kinase domain Pfam Description: Protein kinase domain
  misc_feature (1)..(84): Homolog of NCBI NO: 32527767 NR Description: shoot regeneration-related mitogen activated
  misc_feature (5)..(524): Homolog of NCBI NO: 22326737 NR Description: MAP3K delta-1 protein kinase; protein id: supported by cDNA: gi_18700074 [Arabidopsis thaliana]
  misc_feature (683)..(994): Homolog of NCBI NO: 22326737 NR Description: MAP3K delta-1 protein kinase; protein id: supported by cDNA: gi_18700074 [Arabidopsis thaliana]
  misc_feature (91)..(524): Homolog of NCBI NO: 11358502 NR Description: MAP3K delta-1 protein kinase - Arabidopsis
  misc_feature (683)..(957): Homolog of NCBI NO: 11358502 NR Description: MAP3K delta-1 protein kinase - Arabidopsis
  misc_feature (5)..(358): Homolog of NCBI NO: 7489058 NR Description: probable protein kinase TCTR2 - tomato
  misc_feature (708)..(997): Homolog of NCBI NO: 7489058 NR Description: probable protein kinase TCTR2 - tomato
  misc_feature (111)..(418): Homolog of NCBI NO: 7488198 NR Description: probable serine/threonine-specific protein kinase
  misc_feature (111)..(418): Homolog of NCBI NO: 18390931 NR Description: putative protein kinase; protein id: At1g08720.1, by cDNA: gi_11127924 [Arabidopsis thaliana]
  misc_feature (668)..(979): Homolog of NCBI NO: 7488198 NR Description: probable serine/threonine-specific protein kinase

SEQ ID NO: 93482 - protein, 1000 aa, Arabidopsis thaliana; identical to SEQ ID NO: 88588
  peptide (1)..(1000): Ceres Seq. ID no. 12720216
  misc_feature (718)..(970): Pfam Name: Protein kinase domain Pfam Description: Protein kinase domain
  misc_feature (1)..(82): Homolog of NCBI NO: 32527767 NR Description: shoot regeneration-related mitogen activated
  misc_feature (3)..(522): Homolog of NCBI NO: 22326737 NR Description: MAP3K delta-1 protein kinase; protein id: supported by cDNA: gi_18700074 [Arabidopsis thaliana]
  misc_feature (681)..(992): Homolog of NCBI NO: 22326737 NR Description: MAP3K delta-1 protein kinase; protein id: supported by cDNA: gi_18700074 [Arabidopsis thaliana]
  misc_feature (89)..(522): Homolog of NCBI NO: 11358502 NR Description: MAP3K delta-1 protein kinase - Arabidopsis
  misc_feature (681)..(955): Homolog of NCBI NO: 11358502 NR Description: MAP3K delta-1 protein kinase - Arabidopsis
  misc_feature (3)..(356): Homolog of NCBI NO: 7489058 NR Description: probable protein kinase TCTR2 - tomato
  misc_feature (706)..(995): Homolog of NCBI NO: 7489058 NR Description: probable protein kinase TCTR2 - tomato
  misc_feature (109)..(416): Homolog of NCBI NO: 7488198 NR Description: probable serine/threonine-specific protein kinase
  misc_feature (109)..(416): Homolog of NCBI NO: 18390931 NR Description: putative protein kinase; protein id: At1g08720.1, by cDNA: gi_11127924 [Arabidopsis thaliana]
  misc_feature (666)..(977): Homolog of NCBI NO: 7488198 NR Description: probable serine/threonine-specific protein kinase

SEQ ID NO: 93483 - DNA, 1525 bp, Arabidopsis thaliana; identical to SEQ ID NO: 89727
  misc_feature (1)..(1525): Ceres Seq. ID no. 12720236
  misc_feature: MA Experiment ID: 20000171 Result: Up-regulated in Transcription
  misc_feature: MA Experiment 20000171 PARAMETER Experiment Name: At_42deg_Heat_P Parameter: Age (day) Value: 14
  misc_feature: MA Experiment 20000171 PARAMETER Experiment Name: At_42deg_Heat_P Parameter: Organism Value: A. thaliana
  misc_feature: MA Experiment 20000171 PARAMETER Experiment Name: At_42deg_Heat_P Parameter: Plant Line Value: WS
  misc_feature: MA Experiment 20000171 PARAMETER Experiment Name: At_42deg_Heat_P Parameter: Temperature (deg C) Value: 42 vs. 22
  misc_feature: MA Experiment 20000171 PARAMETER Experiment Name: At_42deg_Heat_P Parameter: Timepoint (hr) Value: 1
  misc_feature: MA Experiment 20000171 PARAMETER Experiment Name: At_42deg_Heat_P Parameter: Tissue Value: Aerial
  misc_feature: MA Experiment ID: 20000184 Result: Down-regulated in Transcription
  misc_feature: MA Experiment 20000184 PARAMETER Experiment Name: At_Shoots__P Parameter: Age (day) Value: 7
  misc_feature: MA Experiment 20000184 PARAMETER Experiment Name: At_Shoots__P Parameter: Tissue Value: Shoots vs. Whole Plant
  misc_feature: MA Experiment ID: 20000185 Result: Down-regulated in Transcription
  misc_feature: MA Experiment 20000185 PARAMETER Experiment Name: At_Roots__P Parameter: Age (day) Value: 7 vs. 21
  misc_feature: MA Experiment 20000185 PARAMETER Experiment Name: At_Roots__P Parameter: Organism Value: A. thaliana
  misc_feature: MA Experiment 20000185 PARAMETER Experiment Name: At_Roots__P Parameter: Tissue Value: Roots vs. Whole Plant
  misc_feature: MA Experiment ID: 20000227 Result: Down-regulated in Transcription
  misc_feature: MA Experiment 20000227 PARAMETER Experiment Name: At_Root-Tips-vs-Tops_P Parameter: Tissue Value: Root Tips vs. Root Tops
  misc_feature: MA Experiment ID: 20000234 Result: Down-regulated in Transcription
  misc_feature: MA Experiment 20000234 PARAMETER Experiment Name: At_Siliques_P Parameter: Age (day) Value: 21
  misc_feature: MA Experiment 20000234 PARAMETER Experiment Name: At_Siliques_P Parameter: Organism Value: A. thaliana
  misc_feature: MA Experiment 20000234 PARAMETER Experiment Name: At_Siliques_P Parameter: Plant Line Value: WS
  misc_feature: MA Experiment 20000234 PARAMETER Experiment Name: At_Siliques_P Parameter: Tissue Value: Less Than 5mm Siliques vs. Whole Plant
  misc_feature: MA Experiment ID: 20000264 Result: Up-regulated in Transcription
  misc_feature: MA Experiment 20000264 PARAMETER Experiment Name: At_Open_Flower_P Parameter: Age (day) Value: 21
  misc_feature: MA Experiment 20000264 PARAMETER Experiment Name: At_Open_Flower_P Parameter: Plant Line Value: WS
  misc_feature: MA Experiment 20000264 PARAMETER Experiment Name: At_Open_Flower_P Parameter: Tissue Value: Open Flower vs. Whole Plant
  misc_feature: MA Experiment ID: 20000794 Result: Up-regulated in Transcription
  misc_feature: MA Experiment 20000794 PARAMETER Experiment Name: At_Petals_P Parameter: Age (day) Value: 23-25 days
  misc_feature: MA Experiment 20000794 PARAMETER Experiment Name: At_Petals_P Parameter: Plant Line Value: WS
  misc_feature: MA Experiment 20000794 PARAMETER Experiment Name: At_Petals_P Parameter: Tissue Value: Petals vs. Whole plant
  misc_feature: MA Experiment ID: 20001248 Result: Down-regulated in Transcription
  misc_feature: MA Experiment 20001248 PARAMETER Experiment Name: At_Far-red-induction_P Parameter: Age (day) Value: 7
  misc_feature: MA Experiment 20001248 PARAMETER Experiment Name: At_Far-red-induction_P Parameter: Light Value: Far-red vs. White
  misc_feature: MA Experiment 20001248 PARAMETER Experiment Name: At_Far-red-induction_P Parameter: Organism Value: A. thaliana
  misc_feature: MA Experiment 20001248 PARAMETER Experiment Name: At_Far-red-induction_P Parameter: Plant Line Value: Columbia
  misc_feature: MA Experiment 20001248 PARAMETER Experiment Name: At_Far-red-induction_P Parameter: Timepoint (hr) Value: 4
  misc_feature: MA Experiment 20001248 PARAMETER Experiment Name: At_Far-red-induction_P Parameter: Tissue Value: Whole Plant
  misc_feature: MA Experiment ID: 20001451 Result: Down-regulated in Transcription
  misc_feature: MA Experiment 20001451 PARAMETER Experiment Name: At_Far-red-induction_P Parameter: Age (day) Value: 7
  misc_feature: MA Experiment 20001451 PARAMETER Experiment Name: At_Far-red-induction_P Parameter: Light Value: Far-red vs. White
  misc_feature: MA Experiment 20001451 PARAMETER Experiment Name: At_Far-red-induction_P Parameter: Organism Value: A. thaliana
  misc_feature: MA Experiment 20001451 PARAMETER Experiment Name: At_Far-red-induction_P Parameter: Plant Line Value: Columbia
  misc_feature: MA Experiment 20001451 PARAMETER Experiment Name: At_Far-red-induction_P Parameter: Timepoint (hr) Value: 24
  misc_feature: MA Experiment 20001451 PARAMETER Experiment Name: At_Far-red-induction_P Parameter: Tissue Value: Whole Plant
  misc_feature: MA Experiment ID: 20001557 Result: Down-regulated in Transcription
  misc_feature: MA Experiment 20001557 PARAMETER Experiment Name: At_Drought_Soil_Dry_P Parameter: Age (day) Value: 27
  misc_feature: MA Experiment 20001557 PARAMETER Experiment Name: At_Drought_Soil_Dry_P Parameter: Organism Value: A. thaliana
  misc_feature: MA Experiment 20001557 PARAMETER Experiment Name: At_Drought_Soil_Dry_P Parameter: Plant Line Value: WS
  misc_feature: MA Experiment 20001557 PARAMETER Experiment Name: At_Drought_Soil_Dry_P Parameter: Post Timepoint (hr) Value: 3
  misc_feature: MA Experiment 20001557 PARAMETER Experiment Name: At_Drought_Soil_Dry_P Parameter: Post-Treatment Value: Re-Water vs. No Drought
  misc_feature: MA Experiment 20001557 PARAMETER Experiment Name: At_Drought_Soil_Dry_P Parameter: Timepoint (day) Value: 13
  misc_feature: MA Experiment 20001557 PARAMETER Experiment Name: At_Drought_Soil_Dry_P Parameter: Treatment Value: Drought vs. No Drought
  misc_feature: MA Experiment ID: 20001558 Result: Down-regulated in Transcription
  misc_feature: MA Experiment 20001558 PARAMETER Experiment Name: At_Drought_Soil_Dry_P Parameter: Age (day) Value: 27
  misc_feature: MA Experiment 20001558 PARAMETER Experiment Name: At_Drought_Soil_Dry_P Parameter: Organism Value: A. thaliana
  misc_feature: MA Experiment 20001558 PARAMETER Experiment Name: At_Drought_Soil_Dry_P Parameter: Plant Line Value: WS
  misc_feature: MA Experiment 20001558 PARAMETER Experiment Name: At_Drought_Soil_Dry_P Parameter: Post Timepoint (hr) Value: 6
  misc_feature: MA Experiment 20001558 PARAMETER Experiment Name: At_Drought_Soil_Dry_P Parameter: Post-Treatment Value: Re-Water vs. No Drought
  misc_feature: MA Experiment 20001558 PARAMETER Experiment Name: At_Drought_Soil_Dry_P Parameter: Timepoint (day) Value: 13
  misc_feature: MA Experiment 20001558 PARAMETER Experiment Name: At_Drought_Soil_Dry_P Parameter: Treatment Value: Drought vs. No Drought
  misc_feature: MA Experiment ID: 20001560 Result: Down-regulated in Transcription
  misc_feature: MA Experiment 20001560 PARAMETER Experiment Name: At_Drought_Soil_Dry_P Parameter: Age (day) Value: 28
  misc_feature: MA Experiment 20001560 PARAMETER Experiment Name: At_Drought_Soil_Dry_P Parameter: Organism Value: A. thaliana
  misc_feature: MA Experiment 20001560 PARAMETER Experiment Name: At_Drought_Soil_Dry_P Parameter: Plant Line Value: WS
  misc_feature: MA Experiment 20001560 PARAMETER Experiment Name: At_Drought_Soil_Dry_P Parameter: Post Timepoint (hr) Value: None
  misc_feature: MA Experiment 20001560 PARAMETER Experiment Name: At_Drought_Soil_Dry_P Parameter: Post-Treatment Value: None
  misc_feature: MA Experiment 20001560 PARAMETER Experiment Name: At_Drought_Soil_Dry_P Parameter: Timepoint (day) Value: 14
  misc_feature: MA Experiment 20001560 PARAMETER Experiment Name: At_Drought_Soil_Dry_P Parameter: Treatment Value: Drought vs. No Drought
  misc_feature: MA Experiment ID: 20001768 Result: Up-regulated in Transcription
  misc_feature: MA Experiment 20001768 PARAMETER Experiment Name: At_Far-red-enriched-adult_P Parameter: Age (day) Value: 28
  misc_feature: MA Experiment 20001768 PARAMETER Experiment Name: At_Far-red-enriched-adult_P Parameter: Light Value: Far-red enriched vs. White
  misc_feature: MA Experiment 20001768 PARAMETER Experiment Name: At_Far-red-enriched-adult_P Parameter: Organism Value: A. thaliana
  misc_feature: MA Experiment 20001768 PARAMETER Experiment Name: At_Far-red-enriched-adult_P Parameter: Plant Line Value: Columbia
  misc_feature: MA Experiment 20001768 PARAMETER Experiment Name: At_Far-red-enriched-adult_P Parameter: Timepoint (hr) Value: 1
  misc_feature: MA Experiment 20001768 PARAMETER Experiment Name: At_Far-red-enriched-adult_P Parameter: Tissue Value: Aerial
  misc_feature: MA Experiment ID: 20001905 Result: Up-regulated in Transcription
  misc_feature: MA Experiment 20001905 PARAMETER Experiment Name: At_Drought_Reproduction_P Parameter: Age (day) Value: 40
  misc_feature: MA Experiment 20001905 PARAMETER Experiment Name: At_Drought_Reproduction_P Parameter: Organism Value: A. thaliana
  misc_feature: MA Experiment 20001905 PARAMETER Experiment Name: At_Drought_Reproduction_P Parameter: Plant Line Value: WS
  misc_feature: MA Experiment 20001905 PARAMETER Experiment Name: At_Drought_Reproduction_P Parameter: Timepoint (day) Value: 10
  misc_feature: MA Experiment 20001905 PARAMETER Experiment Name: At_Drought_Reproduction_P Parameter: Tissue Value: Rosettes
  misc_feature: MA Experiment 20001905 PARAMETER Experiment Name: At_Drought_Reproduction_P Parameter: Treatment Value: Drought vs. No Drought

SEQ ID NO: 93484 - protein, 452 aa, Arabidopsis thaliana; identical to SEQ ID NO: 89728
  peptide (1)..(452): Ceres Seq. ID no. 12720237
  misc_feature (1)..(452): Homolog of NCBI NO: 18410446 NR Description: expressed protein; protein id: At1g73750.1, by cDNA: gi_16930504 [Arabidopsis thaliana] At1g73750/F25P22_17 [Arabidopsis thaliana]
  misc_feature (1)..(452): Homolog of NCBI NO: 25372838 NR Description: unknown protein F25P22.17 [imported] -
  misc_feature (154)..(452): Homolog of NCBI NO: 19699290 NR Description: At1g15070/F9L1_1 [Arabidopsis thaliana]
  misc_feature (46)..(136): Homolog of NCBI NO: 19699290 NR Description: At1g15070/F9L1_1 [Arabidopsis thaliana]
  misc_feature (154)..(432): Homolog of NCBI NO: 15220945 NR Description: hypothetical protein; protein id: At1g15060.1, by cDNA: gi_19699289, supported by cDNA: gi_19699289 [Arabidopsis
  misc_feature (46)..(136): Homolog of NCBI NO: 15220945 NR Description: hypothetical protein; protein id: At1g15060.1, by cDNA: gi_19699289, supported by cDNA: gi_19699289 [Arabidopsis
  misc_feature (134)..(451): Homolog of NCBI NO: 38637529 NR Description: unknown protein [Oryza sativa (japonica
  misc_feature (49)..(155): Homolog of NCBI NO: 38637529 NR Description: unknown protein [Oryza sativa (japonica
  misc_feature (154)..(398): Homolog of NCBI NO: 25372839 NR Description: F9L1.1 protein - Arabidopsis thaliana
  misc_feature (46)..(136): Homolog of NCBI NO: 25372839 NR Description: F9L1.1 protein - Arabidopsis thaliana

SEQ ID NO: 93485 - protein, 336 aa, Arabidopsis thaliana; identical to SEQ ID NO: 89729
  peptide (1)..(336): Ceres Seq. ID no. 12720238
  misc_feature (1)..(336): Homolog of NCBI NO: 18410446 NR Description: expressed protein; protein id: At1g73750.1, by cDNA: gi_16930504 [Arabidopsis thaliana] At1g73750/F25P22_17 [Arabidopsis thaliana]
  misc_feature (1)..(336): Homolog of NCBI NO: 25372838 NR Description: unknown protein F25P22.17 [imported] -
  misc_feature (38)..(336): Homolog of NCBI NO: 19699290 NR Description: At1g15070/F9L1_1 [Arabidopsis thaliana]
  misc_feature (1)..(20): Homolog of NCBI NO: 19699290 NR Description: At1g15070/F9L1_1 [Arabidopsis thaliana]
  misc_feature (38)..(316): Homolog of NCBI NO: 15220945 NR Description: hypothetical protein; protein id: At1g15060.1, by cDNA: gi_19699289, supported by cDNA: gi_19699289 [Arabidopsis
  misc_feature (1)..(20): Homolog of NCBI NO: 15220945 NR Description: hypothetical protein; protein id: At1g15060.1, by cDNA: gi_19699289, supported by cDNA: gi_19699289 [Arabidopsis
  misc_feature (18)..(335): Homolog of NCBI NO: 38637529 NR Description: unknown protein [Oryza sativa (japonica
  misc_feature (1)..(39): Homolog of NCBI NO: 38637529 NR Description: unknown protein [Oryza sativa (japonica
  misc_feature (38)..(282): Homolog of NCBI NO: 25372839 NR Description: F9L1.1 protein - Arabidopsis thaliana
  misc_feature (1)..(20): Homolog of NCBI NO: 25372839 NR Description: F9L1.1 protein - Arabidopsis thaliana

SEQ ID NO: 93486 - protein, 273 aa, Arabidopsis thaliana; identical to SEQ ID NO: 89730
  peptide (1)..(273): Ceres Seq. ID no. 12720239
  misc_feature (1)..(273): Homolog of NCBI NO: 18410446 NR Description: expressed protein; protein id: At1g73750.1, by cDNA: gi_16930504 [Arabidopsis thaliana] At1g73750/F25P22_17 [Arabidopsis thaliana]
  misc_feature (1)..(273): Homolog of NCBI NO: 25372838 NR Description: unknown protein F25P22.17 [imported] -
  misc_feature (1)..(273): Homolog of NCBI NO: 19699290 NR Description: At1g15070/F9L1_1 [Arabidopsis thaliana]
  misc_feature (1)..(253): Homolog of NCBI NO: 15220945 NR Description: hypothetical protein; protein id: At1g15060.1, by cDNA: gi_19699289, supported by cDNA: gi_19699289 [Arabidopsis
  misc_feature (1)..(272): Homolog of NCBI NO: 38637529 NR Description: unknown protein [Oryza sativa (japonica
  misc_feature (1)..(219): Homolog of NCBI NO: 25372839 NR Description: F9L1.1 protein - Arabidopsis thaliana
  misc_feature (1)..(72): Homolog of NCBI NO: 34911394 NR Description: similar to Arabidopsis thaliana chromosome 1,
  misc_feature (121)..(260): Homolog of NCBI NO: 34911394 NR Description: similar to Arabidopsis thaliana chromosome 1,
  misc_feature (169)..(272): Homolog of NCBI NO: 7489376 NR Description: hypothetical protein - barley (fragment)
  misc_feature (221)..(273): Homolog of NCBI NO: 25518030 NR Description: T15D22.11 protein - Arabidopsis thaliana Contains similarity to unknown stress inducible protein product

SEQ ID NO: 93487 - DNA, 1260 bp, Arabidopsis thaliana; identical to SEQ ID NO: 89731
  misc_feature (1)..(1260): Ceres Seq. ID no. 12720240
  misc_feature: MA Experiment ID: 108488 Result: Down-regulated in Transcription
  misc_feature: MA Experiment ID: 108573 Result: Up-regulated in Transcription
  misc_feature: MA Experiment 108573 PARAMETER Experiment Name: At_Drought_cDNA_P Parameter: Timepoint (hr) Value: 6
  misc_feature: MA Experiment 108573 PARAMETER Experiment Name: At_Drought_cDNA_P Parameter: Tissue Value: Aerial
  misc_feature: MA Experiment 108573 PARAMETER Experiment Name: At_Drought_cDNA_P Parameter: Treatment Value: Drought vs. No Drought
  misc_feature: MA Experiment ID: 108577 Result: Down-regulated in Transcription
  misc_feature: MA Experiment 108577 PARAMETER Experiment Name: At_42deg_Heat_cDNA_P Parameter: Temperature (deg C) Value: 42 vs. 22
  misc_feature: MA Experiment 108577 PARAMETER Experiment Name: At_42deg_Heat_cDNA_P Parameter: Timepoint (hr) Value: 6
  misc_feature: MA Experiment 108577 PARAMETER Experiment Name: At_42deg_Heat_cDNA_P Parameter: Tissue Value: Aerial
  misc_feature: MA Experiment ID: 20000069 Result: Up-regulated in Transcription
  misc_feature: MA Experiment 20000069 PARAMETER Experiment Name: At_100uM_ABA_Mutants_cDNA_P Parameter: Plant Line Value: CS23
  misc_feature: MA Experiment 20000069 PARAMETER Experiment Name: At_100uM_ABA_Mutants_cDNA_P Parameter: Timepoint (hr) Value: 6
  misc_feature: MA Experiment 20000069 PARAMETER Experiment Name: At_100uM_ABA_Mutants_cDNA_P Parameter: Tissue Value: Aerial
  misc_feature: MA Experiment 20000069 PARAMETER Experiment Name: At_100uM_ABA_Mutants_cDNA_P Parameter: Treatment Value: 100uM ABA vs. No Treatment
  misc_feature: MA Experiment ID: 20000070 Result: Up-regulated in Transcription
  misc_feature: MA Experiment 20000070 PARAMETER Experiment Name: At_100uM_ABA_Mutants_cDNA_P Parameter: Plant Line Value: CS24
  misc_feature: MA Experiment 20000070 PARAMETER Experiment Name: At_100uM_ABA_Mutants_cDNA_P Parameter: Timepoint (hr) Value: 6
  misc_feature: MA Experiment 20000070 PARAMETER Experiment Name: At_100uM_ABA_Mutants_cDNA_P Parameter: Tissue Value: Aerial
  misc_feature: MA Experiment 20000070 PARAMETER Experiment Name: At_100uM_ABA_Mutants_cDNA_P Parameter: Treatment Value: 100uM ABA vs. No Treatment
  misc_feature: MA Experiment ID: 20000071 Result: Up-regulated in Transcription
  misc_feature: MA Experiment 20000071 PARAMETER Experiment Name: At_100uM_ABA_Mutants_cDNA_P Parameter: Plant Line Value: CS8104
  misc_feature: MA Experiment 20000071 PARAMETER Experiment Name: At_100uM_ABA_Mutants_cDNA_P Parameter: Timepoint (hr) Value: 6
  misc_feature: MA Experiment 20000071 PARAMETER Experiment Name: At_100uM_ABA_Mutants_cDNA_P Parameter: Tissue Value: Aerial
  misc_feature: MA Experiment 20000071 PARAMETER Experiment Name: At_100uM_ABA_Mutants_cDNA_P Parameter: Treatment Value: 100uM ABA vs. No Treatment
  misc_feature: MA Experiment ID: 20000072 Result: Up-regulated in Transcription
  misc_feature: MA Experiment 20000072 PARAMETER Experiment Name: At_100uM_ABA_Mutants_cDNA_P Parameter: Plant Line Value: CS8105
  misc_feature: MA Experiment 20000072 PARAMETER Experiment Name: At_100uM_ABA_Mutants_cDNA_P Parameter: Timepoint (hr) Value: 6
  misc_feature: MA Experiment 20000072 PARAMETER Experiment Name: At_100uM_ABA_Mutants_cDNA_P Parameter: Tissue Value: Aerial
  misc_feature: MA Experiment 20000072 PARAMETER Experiment Name: At_100uM_ABA_Mutants_cDNA_P Parameter: Treatment Value: 100uM ABA vs. No Treatment
  misc_feature: MA Experiment ID: 20000086 Result: Up-regulated in Transcription
  misc_feature: MA Experiment 20000086 PARAMETER Experiment Name: At_100uM_ABA_Mutants_cDNA_P Parameter: Plant Line Value: CS22
  misc_feature: MA Experiment 20000086 PARAMETER Experiment Name: At_100uM_ABA_Mutants_cDNA_P Parameter: Timepoint (hr) Value: 6
  misc_feature: MA Experiment 20000086 PARAMETER Experiment Name: At_100uM_ABA_Mutants_cDNA_P Parameter: Tissue Value: Aerial
  misc_feature: MA Experiment 20000086 PARAMETER Experiment Name: At_100uM_ABA_Mutants_cDNA_P Parameter: Treatment Value: 100uM ABA vs. No Treatment
  misc_feature: MA Experiment ID: 20000087 Result: Up-regulated in Transcription
  misc_feature: MA Experiment 20000087 PARAMETER Experiment Name: At_100uM_ABA_Mutants_cDNA_P Parameter: Plant Line Value: WS
  misc_feature: MA Experiment 20000087 PARAMETER Experiment Name: At_100uM_ABA_Mutants_cDNA_P Parameter: Timepoint (hr) Value: 6
  misc_feature: MA Experiment 20000087 PARAMETER Experiment Name: At_100uM_ABA_Mutants_cDNA_P Parameter: Tissue Value: Aerial
  misc_feature: MA Experiment 20000087 PARAMETER Experiment Name: At_100uM_ABA_Mutants_cDNA_P Parameter: Treatment Value: 100uM ABA vs. No Treatment
  misc_feature: MA Experiment ID: 20000088 Result: Up-regulated in Transcription
  misc_feature: MA Experiment 20000088 PARAMETER Experiment Name: At_100uM_ABA_Mutants_cDNA_P Parameter: Plant Line Value: Landsberg
  misc_feature: MA Experiment 20000088 PARAMETER Experiment Name: At_100uM_ABA_Mutants_cDNA_P Parameter: Timepoint (hr) Value: 6
  misc_feature: MA Experiment 20000088 PARAMETER Experiment Name: At_100uM_ABA_Mutants_cDNA_P Parameter: Tissue Value: Aerial
  misc_feature: MA Experiment 20000088 PARAMETER Experiment Name: At_100uM_ABA_Mutants_cDNA_P Parameter: Treatment Value: 100uM ABA vs. No Treatment
  misc_feature: MA Experiment ID: 20000111 Result: Down-regulated in Transcription
  misc_feature: MA Experiment 20000111 PARAMETER Experiment Name: At_42deg_Heat_cDNA_P Parameter: Temperature (deg C) Value: 42 vs. 22
  misc_feature: MA Experiment 20000111 PARAMETER Experiment Name: At_42deg_Heat_cDNA_P Parameter: Timepoint (hr) Value: 6
  misc_feature: MA Experiment 20000111 PARAMETER Experiment Name: At_42deg_Heat_cDNA_P Parameter: Tissue Value: Aerial
  misc_feature: MA Experiment ID: 20000113 Result: Down-regulated in Transcription
  misc_feature: MA Experiment 20000113 PARAMETER Experiment Name: At_42deg_Heat_cDNA_P Parameter: Temperature (deg C) Value: 42 vs. 22
  misc_feature: MA Experiment 20000113 PARAMETER Experiment Name: At_42deg_Heat_cDNA_P Parameter: Timepoint (hr) Value: 8
  misc_feature: MA Experiment 20000113 PARAMETER Experiment Name: At_42deg_Heat_cDNA_P Parameter: Tissue Value: Aerial
  misc_feature: MA Experiment ID: 20000224 Result: Down-regulated in Transcription

SEQ ID NO: 93488 - protein, 382 aa, Arabidopsis thaliana; identical to SEQ ID NO: 89732
  peptide (1)..(382): Ceres Seq. ID no. 12720241
  misc_feature (334)..(374): Pfam Name: Zinc finger, C3HC4 type (RING finger) Pfam Description: Zinc finger, C3HC4 type (RING finger)
  misc_feature (16)..(382): Homolog of NCBI NO: 15219544 NR Description: putative RING zinc finger protein; protein id: [Arabidopsis thaliana] >gi|25406292|pir||H96764 protein RING zinc
  misc_feature (26)..(381): Homolog of NCBI NO: 15220912 NR Description: zinc-finger protein (C-terminal), putative; id: At1g17970.1, supported by cDNA: 261272., supported by cDNA: [Arabidopsis thaliana] >gi|16226279|gb|AAL16122.1|AF428290_1
  misc_feature (26)..(381): Homolog of NCBI NO: 21554695 NR Description: zinc-finger protein (C-terminal), putative
  misc_feature (75)..(381): Homolog of NCBI NO: 25511721 NR Description: F2H15.19 protein - Arabidopsis thaliana
  misc_feature (72)..(319): Homolog of NCBI NO: 34911396 NR Description: RING zinc finger protein-like [Oryza sativa
  misc_feature (338)..(376): Homolog of NCBI NO: 34911396 NR Description: RING zinc finger protein-like [Oryza sativa
  misc_feature (241)..(382): Homolog of NCBI NO: 7486381 NR Description: hypothetical protein F3L17.20 - Arabidopsis >gi|5262756|emb|CAB45904.1| putative protein [Arabidopsis >gi|7270048|emb|CAB79863.1| putative protein [Arabidopsis
  misc_feature (241)..(382): Homolog of NCBI NO: 18417809 NR Description: putative protein; protein id: At4g31450.1, by cDNA: gi_15983461 [Arabidopsis thaliana] AT4g31450/F3L17_20 [Arabidopsis thaliana]
  misc_feature (197)..(380): Homolog of NCBI NO: 15220067 NR Description: hypothetical protein; protein id: At1g45180.1 thaliana] >gi|7767667|gb|AAF69164.1|AC007915_16 F27F5.26
  misc_feature (270)..(378): Homolog of NCBI NO: 38345496 NR Description: OSJNBa0010D21.9 [Oryza sativa (japonica

SEQ ID NO: 93489 - protein, 367 aa, Arabidopsis thaliana; identical to SEQ ID NO: 89733
  peptide (1)..(367): Ceres Seq. ID no. 12720242
  misc_feature (319)..(359): Pfam Name: Zinc finger, C3HC4 type (RING finger) Pfam Description: Zinc finger, C3HC4 type (RING finger)
  misc_feature (1)..(367): Homolog of NCBI NO: 15219544 NR Description: putative RING zinc finger protein; protein id: [Arabidopsis thaliana] >gi|25406292|pir||H96764 protein RING zinc
  misc_feature (11)..(366): Homolog of NCBI NO: 15220912 NR Description: zinc-finger protein (C-terminal), putative; id: At1g17970.1, supported by cDNA: 261272., supported by cDNA: [Arabidopsis thaliana] >gi|16226279|gb|AAL16122.1|AF428290_1
  misc_feature (11)..(366): Homolog of NCBI NO: 21554695 NR Description: zinc-finger protein (C-terminal), putative
  misc_feature (60)..(366): Homolog of NCBI NO: 25511721 NR Description: F2H15.19 protein - Arabidopsis thaliana
  misc_feature (57)..(304): Homolog of NCBI NO: 34911396 NR Description: RING zinc finger protein-like [Oryza sativa
  misc_feature (323)..(361): Homolog of NCBI NO: 34911396 NR Description: RING zinc finger protein-like [Oryza sativa
  misc_feature (226)..(367): Homolog of NCBI NO: 7486381 NR Description: hypothetical protein F3L17.20 - Arabidopsis >gi|5262756|emb|CAB45904.1| putative protein [Arabidopsis >gi|7270048|emb|CAB79863.1| putative protein [Arabidopsis
  misc_feature (226)..(367): Homolog of NCBI NO: 18417809 NR Description: putative protein; protein id: At4g31450.1, by cDNA: gi_15983461 [Arabidopsis thaliana] AT4g31450/F3L17_20 [Arabidopsis thaliana]
  misc_feature (182)..(365): Homolog of NCBI NO: 15220067 NR Description: hypothetical protein; protein id: At1g45180.1 thaliana] >gi|7767667|gb|AAF69164.1|AC007915_16 F27F5.26
  misc_feature (255)..(363): Homolog of NCBI NO: 38345496 NR Description: OSJNBa0010D21.9 [Oryza sativa (japonica

SEQ ID NO: 93490 - protein, 349 aa, Arabidopsis thaliana; identical to SEQ ID NO: 89734
  peptide (1)..(349): Ceres Seq. ID no. 12720243
  misc_feature (301)..(341): Pfam Name: Zinc finger, C3HC4 type (RING finger) Pfam Description: Zinc finger, C3HC4 type (RING finger)
  misc_feature (1)..(349): Homolog of NCBI NO: 15219544 NR Description: putative RING zinc finger protein; protein id: [Arabidopsis thaliana] >gi|25406292|pir||H96764 protein RING zinc
  misc_feature (1)..(348): Homolog of NCBI NO: 15220912 NR Description: zinc-finger protein (C-terminal), putative; id: At1g17970.1, supported by cDNA: 261272., supported by cDNA: [Arabidopsis thaliana] >gi|16226279|gb|AAL16122.1|AF428290_1
  misc_feature (1)..(348): Homolog of NCBI NO: 21554695 NR Description: zinc-finger protein (C-terminal), putative
  misc_feature (42)..(348): Homolog of NCBI NO: 25511721 NR Description: F2H15.19 protein - Arabidopsis thaliana
  misc_feature (39)..(286): Homolog of NCBI NO: 34911396 NR Description: RING zinc finger protein-like [Oryza sativa
  misc_feature (305)..(343): Homolog of NCBI NO: 34911396 NR Description: RING zinc finger protein-like [Oryza sativa
  misc_feature (208)..(349): Homolog of NCBI NO: 7486381 NR Description: hypothetical protein F3L17.20 - Arabidopsis >gi|5262756|emb|CAB45904.1| putative protein [Arabidopsis >gi|7270048|emb|CAB79863.1| putative protein [Arabidopsis
  misc_feature (208)..(349): Homolog of NCBI NO: 18417809 NR Description: putative protein; protein id: At4g31450.1, by cDNA: gi_15983461 [Arabidopsis thaliana] AT4g31450/F3L17_20 [Arabidopsis thaliana]
  misc_feature (164)..(347): Homolog of NCBI NO: 15220067 NR Description: hypothetical protein; protein id: At1g45180.1 thaliana] >gi|7767667|gb|AAF69164.1|AC007915_16 F27F5.26
  misc_feature (237)..(345): Homolog of NCBI NO: 38345496 NR Description: OSJNBa0010D21.9 [Oryza sativa (japonica

SEQ ID NO: 93491 - DNA, 3093 bp, Arabidopsis thaliana; identical to SEQ ID NO: 89735
  misc_feature (1)..(3093): Ceres Seq. ID no. 12720262
  misc_feature: MA Experiment ID: 20000180 Result: Up-regulated in Transcription
  misc_feature: MA Experiment 20000180 PARAMETER Experiment Name: At_Germinating_Seeds_P Parameter: Age (hr) Value: 24 vs. 0
  misc_feature: MA Experiment 20000180 PARAMETER Experiment Name: At_Germinating_Seeds_P Parameter: Tissue Value: Germinating Seeds
  misc_feature: MA Experiment ID: 20000185 Result: Up-regulated in Transcription
  misc_feature: MA Experiment 20000185 PARAMETER Experiment Name: At_Roots__P Parameter: Age (day) Value: 7 vs. 21
  misc_feature: MA Experiment 20000185 PARAMETER Experiment Name: At_Roots__P Parameter: Organism Value: A. thaliana
  misc_feature: MA Experiment 20000185 PARAMETER Experiment Name: At_Roots__P Parameter: Tissue Value: Roots vs. Whole Plant
  misc_feature: MA Experiment ID: 20000235 Result: Up-regulated in Transcription
  misc_feature: MA Experiment 20000235 PARAMETER Experiment Name: At_Siliques_P Parameter: Age (day) Value: 21
  misc_feature: MA Experiment 20000235 PARAMETER Experiment Name: At_Siliques_P Parameter: Organism Value: A. thaliana
  misc_feature: MA Experiment 20000235 PARAMETER Experiment Name: At_Siliques_P Parameter: Plant Line Value: WS
  misc_feature: MA Experiment 20000235 PARAMETER Experiment Name: At_Siliques_P Parameter: Tissue Value: 5-10mm Siliques vs. Whole Plant
  misc_feature: MA Experiment ID: 20000264 Result: Up-regulated in Transcription
  misc_feature: MA Experiment 20000264 PARAMETER Experiment Name: At_Open_Flower_P Parameter: Age (day) Value: 21
  misc_feature: MA Experiment 20000264 PARAMETER Experiment Name: At_Open_Flower_P Parameter: Plant Line Value: WS
  misc_feature: MA Experiment 20000264 PARAMETER Experiment Name: At_Open_Flower_P Parameter: Tissue Value: Open Flower vs. Whole Plant
  misc_feature: MA Experiment ID: 20000794 Result: Up-regulated in Transcription
  misc_feature: MA Experiment 20000794 PARAMETER Experiment Name: At_Petals_P Parameter: Age (day) Value: 23-25 days
  misc_feature: MA Experiment 20000794 PARAMETER Experiment Name: At_Petals_P Parameter: Plant Line Value: WS
  misc_feature: MA Experiment 20000794 PARAMETER Experiment Name: At_Petals_P Parameter: Tissue Value: Petals vs. Whole plant
  misc_feature: MA Experiment ID: 20001910 Result: Up-regulated in Transcription
  misc_feature: MA Experiment 20001910 PARAMETER Experiment Name: At_Drought_Reproduction_P Parameter: Age (day) Value: 37
  misc_feature: MA Experiment 20001910 PARAMETER Experiment Name: At_Drought_Reproduction_P Parameter: Organism Value: A. thaliana
  misc_feature: MA Experiment 20001910 PARAMETER Experiment Name: At_Drought_Reproduction_P Parameter: Plant Line Value: WS
  misc_feature: MA Experiment 20001910 PARAMETER Experiment Name: At_Drought_Reproduction_P Parameter: Timepoint (day) Value: 7
  misc_feature: MA Experiment 20001910 PARAMETER Experiment Name: At_Drought_Reproduction_P Parameter: Tissue Value: Flowers
  misc_feature: MA Experiment 20001910 PARAMETER Experiment Name: At_Drought_Reproduction_P Parameter: Treatment Value: Drought vs. No Drought

SEQ ID NO: 93492 - protein, 1030 aa, Arabidopsis thaliana; identical to SEQ ID NO: 89736
  peptide (1)..(1030): Ceres Seq. ID no. 12720263
  misc_feature (111)..(504): Pfam Name: Myosin tail Pfam Description: Myosin tail
  misc_feature (6)..(1030): Homolog of NCBI NO: 6714287 NR Description: F15H18.10 [Arabidopsis thaliana]
  misc_feature (289)..(969): Homolog of NCBI NO: 25404429 NR Description: kinesin-like protein, 73641-79546 [imported] -
  misc_feature (289)..(969): Homolog of NCBI NO: 30696876 NR Description: kinesin-related protein [Arabidopsis thaliana]
  misc_feature (569)..(969): Homolog of NCBI NO: 6633835 NR Description: F2K11.1 [Arabidopsis thaliana]
  misc_feature (327)..(567): Homolog of NCBI NO: 6633835 NR Description: F2K11.1 [Arabidopsis thaliana]
  misc_feature (91)..(294): Homolog of NCBI NO: 6633835 NR Description: F2K11.1 [Arabidopsis thaliana]
  misc_feature (343)..(638): Homolog of NCBI NO: 34909422 NR Description: putative kinesin-like protein [Oryza sativa
  misc_feature (707)..(948): Homolog of NCBI NO: 34909422 NR Description: putative kinesin-like protein [Oryza sativa
  misc_feature (312)..(921): Homolog of NCBI NO: 18421069 NR Description: kinesin-related protein; protein id: At5g27000.1
  misc_feature (312)..(921): Homolog of NCBI NO: 11358474 NR Description: kinesin-like heavy chain [validated] -

SEQ ID NO: 93493 - protein, 1027 aa, Arabidopsis thaliana; identical to SEQ ID NO: 89737
  peptide (1)..(1027): Ceres Seq. ID no. 12720264
  misc_feature (108)..(501): Pfam Name: Myosin tail Pfam Description: Myosin tail
  misc_feature (3)..(1027): Homolog of NCBI NO: 6714287 NR Description: F15H18.10 [Arabidopsis thaliana]
  misc_feature (286)..(966): Homolog of NCBI NO: 25404429 NR Description: kinesin-like protein, 73641-79546 [imported] -
  misc_feature (286)..(966): Homolog of NCBI NO: 30696876 NR Description: kinesin-related protein [Arabidopsis thaliana]
  misc_feature (566)..(966): Homolog of NCBI NO: 6633835 NR Description: F2K11.1 [Arabidopsis thaliana]
  misc_feature (324)..(564): Homolog of NCBI NO: 6633835 NR Description: F2K11.1 [Arabidopsis thaliana]
  misc_feature (88)..(291): Homolog of NCBI NO: 6633835 NR Description: F2K11.1 [Arabidopsis thaliana]
  misc_feature (340)..(635): Homolog of NCBI NO: 34909422 NR Description: putative kinesin-like protein [Oryza sativa
  misc_feature (704)..(945): Homolog of NCBI NO: 34909422 NR Description: putative kinesin-like protein [Oryza sativa
  misc_feature (309)..(918): Homolog of NCBI NO: 18421069 NR Description: kinesin-related protein; protein id: At5g27000.1
  misc_feature (309)..(918): Homolog of NCBI NO: 11358474 NR Description: kinesin-like heavy chain [validated] -

SEQ ID NO: 93494 - protein, 947 aa, Arabidopsis thaliana; identical to SEQ ID NO: 89738
  peptide (1)..(947): Ceres Seq. ID no. 12720265
  misc_feature (28)..(421): Pfam Name: Myosin tail Pfam Description: Myosin tail
  misc_feature (1)..(947): Homolog of NCBI NO: 6714287 NR Description: F15H18.10 [Arabidopsis thaliana]
  misc_feature (206)..(886): Homolog of NCBI NO: 25404429 NR Description: kinesin-like protein, 73641-79546 [imported] -
  misc_feature (206)..(886): Homolog of NCBI NO: 30696876 NR Description: kinesin-related protein [Arabidopsis thaliana]
  misc_feature (486)..(886): Homolog of NCBI NO: 6633835 NR Description: F2K11.1 [Arabidopsis thaliana]
  misc_feature (244)..(484): Homolog of NCBI NO: 6633835 NR Description: F2K11.1 [Arabidopsis thaliana]
  misc_feature (8)..(211): Homolog of NCBI NO: 6633835 NR Description: F2K11.1 [Arabidopsis thaliana]
  misc_feature (260)..(555): Homolog of NCBI NO: 34909422 NR Description: putative kinesin-like protein [Oryza sativa
  misc_feature (624)..(865): Homolog of NCBI NO: 34909422 NR Description: putative kinesin-like protein [Oryza sativa
  misc_feature (229)..(838): Homolog of NCBI NO: 18421069 NR Description: kinesin-related protein; protein id: At5g27000.1
  misc_feature (229)..(838): Homolog of NCBI NO: 11358474 NR Description: kinesin-like heavy chain [validated] -

SEQ ID NO: 93495 - DNA, 1635 bp, Arabidopsis thaliana; identical to SEQ ID NO: 89739
  misc_feature (1)..(1635): Ceres Seq. ID no. 12720272
  misc_feature: MA Experiment ID: 20000306 Result: Down-regulated in Transcription
  misc_feature: MA Experiment 20000306 PARAMETER Experiment Name: At_Germinating_Seeds_Sub_P Parameter: Age (hr) Value: 6 vs. 0
  misc_feature: MA Experiment 20000306 PARAMETER Experiment Name: At_Germinating_Seeds_Sub_P Parameter: Organism Value: A. thaliana
  misc_feature: MA Experiment 20000306 PARAMETER Experiment Name: At_Germinating_Seeds_Sub_P Parameter: Plant Line Value: WS
  misc_feature: MA Experiment 20000306 PARAMETER Experiment Name: At_Germinating_Seeds_Sub_P Parameter: Tissue Value: Germinating Seeds
  misc_feature: MA Experiment ID: 20000307 Result: Down-regulated in Transcription
  misc_feature: MA Experiment 20000307 PARAMETER Experiment Name: At_Germinating_Seeds_Sub_P Parameter: Age (hr) Value: 24 vs. 0
  misc_feature: MA Experiment 20000307 PARAMETER Experiment Name: At_Germinating_Seeds_Sub_P Parameter: Organism Value: A. thaliana
  misc_feature: MA Experiment 20000307 PARAMETER Experiment Name: At_Germinating_Seeds_Sub_P Parameter: Plant Line Value: WS
  misc_feature: MA Experiment 20000307 PARAMETER Experiment Name: At_Germinating_Seeds_Sub_P Parameter: Tissue Value: Germinating Seeds
  misc_feature: MA Experiment ID: 20000328 Result: Up-regulated in Transcription
  misc_feature: MA Experiment 20000328 PARAMETER Experiment Name: At_42deg_Heat_Sub_P Parameter: Age (day) Value: 14
  misc_feature: MA Experiment 20000328 PARAMETER Experiment Name: At_42deg_Heat_Sub_P Parameter: Organism Value: A. thaliana
  misc_feature: MA Experiment 20000328 PARAMETER Experiment Name: At_42deg_Heat_Sub_P Parameter: Plant Line Value: WS
  misc_feature: MA Experiment 20000328 PARAMETER Experiment Name: At_42deg_Heat_Sub_P Parameter: Temperature (deg C) Value: 42 vs. 22
  misc_feature: MA Experiment 20000328 PARAMETER Experiment Name: At_42deg_Heat_Sub_P Parameter: Timepoint (hr) Value: 6
  misc_feature: MA Experiment 20000328 PARAMETER Experiment Name: At_42deg_Heat_Sub_P Parameter: Tissue Value: Aerial
  misc_feature: MA Experiment ID: 20000347 Result: Up-regulated in Transcription
  misc_feature: MA Experiment 20000347 PARAMETER Experiment Name: At_2mM_SA_Sub_P Parameter: Age (day) Value: 14
  misc_feature: MA Experiment 20000347 PARAMETER Experiment Name: At_2mM_SA_Sub_P Parameter: Organism Value: A. thaliana
  misc_feature: MA Experiment 20000347 PARAMETER Experiment Name: At_2mM_SA_Sub_P Parameter: Plant Line Value: WS
  misc_feature: MA Experiment 20000347 PARAMETER Experiment Name: At_2mM_SA_Sub_P Parameter: Timepoint (hr) Value: 6
  misc_feature: MA Experiment 20000347 PARAMETER Experiment Name: At_2mM_SA_Sub_P Parameter: Tissue Value: Aerial
  misc_feature: MA Experiment 20000347 PARAMETER Experiment Name: At_2mM_SA_Sub_P Parameter: Treatment Value: 2mM SA vs. No Treatment
  misc_feature: MA Experiment ID: 20000352 Result: Up-regulated in Transcription
  misc_feature: MA Experiment 20000352 PARAMETER Experiment Name: At_Drought_Sub_P Parameter: Age (day) Value: 7
  misc_feature: MA Experiment 20000352 PARAMETER Experiment Name: At_Drought_Sub_P Parameter: Organism Value: A. thaliana
  misc_feature: MA Experiment 20000352 PARAMETER Experiment Name: At_Drought_Sub_P Parameter: Plant Line Value: WS
  misc_feature: MA Experiment 20000352 PARAMETER Experiment Name: At_Drought_Sub_P Parameter: Timepoint (hr) Value: 6
  misc_feature: MA Experiment 20000352 PARAMETER Experiment Name: At_Drought_Sub_P Parameter: Tissue Value: Whole Plant
  misc_feature: MA Experiment 20000352 PARAMETER Experiment Name: At_Drought_Sub_P Parameter: Treatment Value: Drought vs. No Drought
  misc_feature: MA Experiment ID: 20001807 Result: Down-regulated in Transcription
  misc_feature: MA Experiment 20001807 PARAMETER Experiment Name: At_50mM_NH4NO3_L-to-H_Sub_P Parameter: Timepoint (hr) Value: 6
  misc_feature: MA Experiment 20001807 PARAMETER Experiment Name: At_50mM_NH4NO3_L-to-H_Sub_P Parameter: Tissue Value: Leaf
  misc_feature: MA Experiment 20001807 PARAMETER Experiment Name: At_50mM_NH4NO3_L-to-H_Sub_P Parameter: Treatment Value: 50mM NH4NO3 vs 100mM Mannitol

SEQ ID NO: 93496 - protein, 489 aa, Arabidopsis thaliana; identical to SEQ ID NO: 89740
  peptide (1)..(489): Ceres Seq. ID no. 12720273
  misc_feature (17)..(489): Homolog of NCBI NO: 22330612 NR Description: putative glucosyltransferase; protein id:
  misc_feature (17)..(482): Homolog of NCBI NO: 25406301 NR Description: protein glucosyltransferase F2P9.25 [imported] - thaliana >gi|12325153|gb|AAG52529.1|AC016662_23 putative
  misc_feature (42)..(489): Homolog of NCBI NO: 20260128 NR Description: putative glucosyltransferase [Arabidopsis
  misc_feature (28)..(457): Homolog of NCBI NO: 15223779 NR Description: putative glucosyl transferase; protein id: [Arabidopsis thaliana] >gi|25286807|pir||H96549 hypothetical
  misc_feature (15)..(480): Homolog of NCBI NO: 15242769 NR Description: putative protein; protein id: At5g03490.1
  misc_feature (43)..(489): Homolog of NCBI NO: 19911191 NR Description: glucosyltransferase like protein [Vigna angularis]
  misc_feature (23)..(485): Homolog of NCBI NO: 2232354 NR Description: UDPG glucosyltransferase [Solanum berthaultii]
  misc_feature (52)..(485): Homolog of NCBI NO: 10241430 NR Description: putative glucosyltransferase [Oryza sativa
  misc_feature (222)..(479): Homolog of NCBI NO: 21536579 NR Description: unknown [Arabidopsis thaliana]
  misc_feature (28)..(176): Homolog of NCBI NO: 21536579 NR Description: unknown [Arabidopsis thaliana]

SEQ ID NO: 93497 - protein, 473 aa, Arabidopsis thaliana; identical to SEQ ID NO: 89741
  peptide (1)..(473): Ceres Seq. ID no. 12720274
  misc_feature (1)..(473): Homolog of NCBI NO: 22330612 NR Description: putative glucosyltransferase; protein id:
  misc_feature (1)..(466): Homolog of NCBI NO: 25406301 NR Description: protein glucosyltransferase F2P9.25 [imported] - thaliana >gi|12325153|gb|AAG52529.1|AC016662_23 putative
  misc_feature (26)..(473): Homolog of NCBI NO: 20260128 NR Description: putative glucosyltransferase [Arabidopsis
  misc_feature (12)..(441): Homolog of NCBI NO: 15223779 NR Description: putative glucosyl transferase; protein id: [Arabidopsis thaliana] >gi|25286807|pir||H96549 hypothetical
  misc_feature (1)..(464): Homolog of NCBI NO: 15242769 NR Description: putative protein; protein id: At5g03490.1
  misc_feature (27)..(473): Homolog of NCBI NO: 19911191 NR Description: glucosyltransferase like protein [Vigna angularis]
  misc_feature (7)..(469): Homolog of NCBI NO: 2232354 NR Description: UDPG glucosyltransferase [Solanum berthaultii]
  misc_feature (36)..(469): Homolog of NCBI NO: 10241430 NR Description: putative glucosyltransferase [Oryza sativa
  misc_feature (206)..(463): Homolog of NCBI NO: 21536579 NR Description: unknown [Arabidopsis thaliana]
  misc_feature (12)..(160): Homolog of NCBI NO: 21536579 NR Description: unknown [Arabidopsis thaliana]

SEQ ID NO: 93498 - protein, 448 aa, Arabidopsis thaliana; identical to SEQ ID NO: 89742
  peptide (1)..(448): Ceres Seq. ID no. 12720275
  misc_feature (1)..(448): Homolog of NCBI NO: 22330612 NR Description: putative glucosyltransferase; protein id:
  misc_feature (1)..(441): Homolog of NCBI NO: 25406301 NR Description: protein glucosyltransferase F2P9.25 [imported] - thaliana >gi|12325153|gb|AAG52529.1|AC016662_23 putative
  misc_feature (1)..(448): Homolog of NCBI NO: 20260128 NR Description: putative glucosyltransferase [Arabidopsis
  misc_feature (1)..(416): Homolog of NCBI NO: 15223779 NR Description: putative glucosyl transferase; protein id: [Arabidopsis thaliana] >gi|25286807|pir||H96549 hypothetical
  misc_feature (1)..(439): Homolog of NCBI NO: 15242769 NR Description: putative protein; protein id: At5g03490.1
  misc_feature (2)..(448): Homolog of NCBI NO: 19911191 NR Description: glucosyltransferase like protein [Vigna angularis]
  misc_feature (1)..(444): Homolog of NCBI NO: 2232354 NR Description: UDPG glucosyltransferase [Solanum berthaultii]
  misc_feature (11)..(444): Homolog of NCBI NO: 10241430 NR Description: putative glucosyltransferase [Oryza sativa
  misc_feature (181)..(438): Homolog of NCBI NO: 21536579 NR Description: unknown [Arabidopsis thaliana]
  misc_feature (1)..(135): Homolog of NCBI NO: 21536579 NR Description: unknown [Arabidopsis thaliana]

SEQ ID NO: 93499 - DNA, 1581 bp, Arabidopsis thaliana; identical to SEQ ID NO: 89743
  misc_feature (1)..(1581): Ceres Seq. ID no. 12720281
  misc_feature: MA Experiment ID: 20000185 Result: Up-regulated in Transcription
  misc_feature: MA Experiment 20000185 PARAMETER Experiment Name: At_Roots__P Parameter: Age (day) Value: 7 vs. 21
  misc_feature: MA Experiment 20000185 PARAMETER Experiment Name: At_Roots__P Parameter: Organism Value: A. thaliana
  misc_feature: MA Experiment 20000185 PARAMETER Experiment Name: At_Roots__P Parameter: Tissue Value: Roots vs. Whole Plant
  misc_feature: MA Experiment ID: 20000439 Result: Up-regulated in Transcription
  misc_feature: MA Experiment 20000439 PARAMETER Experiment Name: At_Roots__P Parameter: Age (day) Value: 14 vs. 21
  misc_feature: MA Experiment 20000439 PARAMETER Experiment Name: At_Roots__P Parameter: Organism Value: A. thaliana
  misc_feature: MA Experiment 20000439 PARAMETER Experiment Name: At_Roots__P Parameter: Tissue Value: Roots vs. Whole Plant

SEQ ID NO: 93500 - protein, 526 aa, Arabidopsis thaliana; identical to SEQ ID NO: 89744
  peptide (1)..(526): Ceres Seq. ID no. 12720282
  misc_feature (254)..(276): Pfam Name: Leucine Rich Repeat Pfam Description: Leucine Rich Repeat
  misc_feature (1)..(526): Homolog of NCBI NO: 15227838 NR Description: unknown protein; protein id: At2g17440.1
  misc_feature (1)..(524): Homolog of NCBI NO: 15237011 NR Description: putative protein; protein id: At4g35470.1, by cDNA: gi_18252196 [Arabidopsis thaliana]
  misc_feature (1)..(522): Homolog of NCBI NO: 20148766 NR Description: PSR9 [Brassica nigra]
  misc_feature (1)..(524): Homolog of NCBI NO: 37537048 NR Description: putative leucine-rich repeat protein [Oryza
  misc_feature (146)..(493): Homolog of NCBI NO: 22330985 NR Description: hypothetical protein; protein id: At3g11330.1, by cDNA: gi_18175637 [Arabidopsis thaliana] unknown protein [Arabidopsis thaliana]
  misc_feature (228)..(493): Homolog of NCBI NO: 30688342 NR Description: leucine rich repeat protein family [Arabidopsis
  misc_feature (168)..(493): Homolog of NCBI NO: 15239256 NR Description: putative protein; protein id: At5g05850.1 thaliana] >gi|9759110|dbj|BAB09679.1|
  misc_feature (193)..(481): Homolog of NCBI NO: 24216020 NR Description: Leucine-rich repeat containing protein interrogans serovar lai str. 56601]
  misc_feature (101)..(504): Homolog of NCBI NO: 18391461 NR Description: expressed protein; protein id: At1g12970.1, by cDNA: gi_17063164 [Arabidopsis thaliana] At1g12970/F13K23_18 [Arabidopsis thaliana]
  misc_feature (199)..(509): Homolog of NCBI NO: 24215150 NR Description: putative outermembrane protein [Leptospira serovar lai str. 56601] >gi|24196220|gb|AAN49649.1|AE011413_3 outermembrane protein [Leptospira interrogans serovar lai str.

SEQ ID NO: 93501 - protein, 521 aa, Arabidopsis thaliana; identical to SEQ ID NO: 89745
  peptide (1)..(521): Ceres Seq. ID no. 12720283
  misc_feature (249)..(271): Pfam Name: Leucine Rich Repeat Pfam Description: Leucine Rich Repeat
  misc_feature (1)..(521): Homolog of NCBI NO: 15227838 NR Description: unknown protein; protein id: At2g17440.1
  misc_feature (1)..(519): Homolog of NCBI NO: 15237011 NR Description: putative protein; protein id: At4g35470.1, by cDNA: gi_18252196 [Arabidopsis thaliana]
  misc_feature (1)..(517): Homolog of NCBI NO: 20148766 NR Description: PSR9 [Brassica nigra]
  misc_feature (1)..(519): Homolog of NCBI NO: 37537048 NR Description: putative leucine-rich repeat protein [Oryza
  misc_feature (141)..(488): Homolog of NCBI NO: 22330985 NR Description: hypothetical protein; protein id: At3g11330.1, by cDNA: gi_18175637 [Arabidopsis thaliana] unknown protein [Arabidopsis thaliana]
  misc_feature (223)..(488): Homolog of NCBI NO: 30688342 NR Description: leucine rich repeat protein family [Arabidopsis
  misc_feature (163)..(488): Homolog of NCBI NO: 15239256 NR Description: putative protein; protein id: At5g05850.1 thaliana] >gi|9759110|dbj|BAB09679.1|
  misc_feature (188)..(476): Homolog of NCBI NO: 24216020 NR Description: Leucine-rich repeat containing protein interrogans serovar lai str. 56601]
  misc_feature (96)..(499): Homolog of NCBI NO: 18391461 NR Description: expressed protein; protein id: At1g12970.1, by cDNA: gi_17063164 [Arabidopsis thaliana] At1g12970/F13K23_18 [Arabidopsis thaliana]
  misc_feature (194)..(504): Homolog of NCBI NO: 24215150 NR Description: putative outermembrane protein [Leptospira serovar lai str. 56601] >gi|24196220|gb|AAN49649.1|AE011413_3 outermembrane protein [Leptospira interrogans serovar lai str.

SEQ ID NO: 93502 - protein, 515 aa, Arabidopsis thaliana; identical to SEQ ID NO: 89746
  peptide (1)..(515): Ceres Seq. ID no. 12720284
  misc_feature (243)..(265): Pfam Name: Leucine Rich Repeat Pfam Description: Leucine Rich Repeat
  misc_feature (1)..(515): Homolog of NCBI NO: 15227838 NR Description: unknown protein; protein id: At2g17440.1
  misc_feature (1)..(513): Homolog of NCBI NO: 15237011 NR Description: putative protein; protein id: At4g35470.1, by cDNA: gi_18252196 [Arabidopsis thaliana]
  misc_feature (1)..(511): Homolog of NCBI NO: 20148766 NR Description: PSR9 [Brassica nigra]
  misc_feature (1)..(513): Homolog of NCBI NO: 37537048 NR Description: putative leucine-rich repeat protein [Oryza
  misc_feature (135)..(482): Homolog of NCBI NO: 22330985 NR Description: hypothetical protein; protein id: At3g11330.1, by cDNA: gi_18175637 [Arabidopsis thaliana] unknown protein [Arabidopsis thaliana]
  misc_feature (217)..(482): Homolog of NCBI NO: 30688342 NR Description: leucine rich repeat protein family [Arabidopsis
  misc_feature (157)..(482): Homolog of NCBI NO: 15239256 NR Description: putative protein; protein id: At5g05850.1 thaliana] >gi|9759110|dbj|BAB09679.1|
  misc_feature (182)..(470): Homolog of NCBI NO: 24216020 NR Description: Leucine-rich repeat containing protein interrogans serovar lai str. 56601]
  misc_feature (90)..(493): Homolog of NCBI NO: 18391461 NR Description: expressed protein; protein id: At1g12970.1, by cDNA: gi_17063164 [Arabidopsis thaliana] At1g12970/F13K23_18 [Arabidopsis thaliana]
  misc_feature (188)..(498): Homolog of NCBI NO: 24215150 NR Description: putative outermembrane protein [Leptospira serovar lai str. 56601] >gi|24196220|gb|AAN49649.1|AE011413_3 outermembrane protein [Leptospira interrogans serovar lai str.

SEQ ID NO: 93503 - DNA, 1305 bp, Arabidopsis thaliana; identical to SEQ ID NO: 89747
  misc_feature (1)..(1305): Ceres Seq. ID no. 12720301
  misc_feature: MA Experiment ID: 20000184 Result: Down-regulated in Transcription
  misc_feature: MA Experiment 20000184 PARAMETER Experiment Name: At_Shoots__P Parameter: Age (day) Value: 7
  misc_feature: MA Experiment 20000184 PARAMETER Experiment Name: At_Shoots__P Parameter: Tissue Value: Shoots vs. Whole Plant
  misc_feature: MA Experiment ID: 20000286 Result: Down-regulated in Transcription
  misc_feature: MA Experiment 20000286 PARAMETER Experiment Name: At_Open_Flower_P Parameter: Age (day) Value: 21
  misc_feature: MA Experiment 20000286 PARAMETER Experiment Name: At_Open_Flower_P Parameter: Plant Line Value: WS
  misc_feature: MA Experiment 20000286 PARAMETER Experiment Name: At_Open_Flower_P Parameter: Tissue Value: Half Open vs. Whole Plant
  misc_feature: MA Experiment ID: 20000437 Result: Up-regulated in Transcription
  misc_feature: MA Experiment 20000437 PARAMETER Experiment Name: At_Drought_P Parameter: Age (day) Value: 8
  misc_feature: MA Experiment 20000437 PARAMETER Experiment Name: At_Drought_P Parameter: Organism Value: A. thaliana
  misc_feature: MA Experiment 20000437 PARAMETER Experiment Name: At_Drought_P Parameter: Plant Line Value: WS
  misc_feature: MA Experiment 20000437 PARAMETER Experiment Name: At_Drought_P Parameter: Timepoint (hr) Value: 24
  misc_feature: MA Experiment 20000437 PARAMETER Experiment Name: At_Drought_P Parameter: Tissue Value: Whole Plant
  misc_feature: MA Experiment 20000437 PARAMETER Experiment Name: At_Drought_P Parameter: Treatment Value: Drought vs. No Drought
  misc_feature: MA Experiment ID: 20001248 Result: Up-regulated in Transcription
  misc_feature: MA Experiment 20001248 PARAMETER Experiment Name: At_Far-red-induction_P Parameter: Age (day) Value: 7
  misc_feature: MA Experiment 20001248 PARAMETER Experiment Name: At_Far-red-induction_P Parameter: Light Value: Far-red vs. White
  misc_feature: MA Experiment 20001248 PARAMETER Experiment Name: At_Far-red-induction_P Parameter: Organism Value: A. thaliana
  misc_feature: MA Experiment 20001248 PARAMETER Experiment Name: At_Far-red-induction_P Parameter: Plant Line Value: Columbia
  misc_feature: MA Experiment 20001248 PARAMETER Experiment Name: At_Far-red-induction_P Parameter: Timepoint (hr) Value: 4
  misc_feature: MA Experiment 20001248 PARAMETER Experiment Name: At_Far-red-induction_P Parameter: Tissue Value: Whole Plant
  misc_feature: MA Experiment ID: 20001450 Result: Up-regulated in Transcription
  misc_feature: MA Experiment 20001450 PARAMETER Experiment Name: At_Far-red-induction_P Parameter: Age (day) Value: 7
  misc_feature: MA Experiment 20001450 PARAMETER Experiment Name: At_Far-red-induction_P Parameter: Light Value: Far-red vs. White
  misc_feature: MA Experiment 20001450 PARAMETER Experiment Name: At_Far-red-induction_P Parameter: Organism Value: A. thaliana
  misc_feature: MA Experiment 20001450 PARAMETER Experiment Name: At_Far-red-induction_P Parameter: Plant Line Value: Columbia
  misc_feature: MA Experiment 20001450 PARAMETER Experiment Name: At_Far-red-induction_P Parameter: Timepoint (hr) Value: 8
  misc_feature: MA Experiment 20001450 PARAMETER Experiment Name: At_Far-red-induction_P Parameter: Tissue Value: Whole Plant

SEQ ID NO: 93504 - protein, 295 aa, Arabidopsis thaliana; identical to SEQ ID NO: 89748
  peptide (1)..(295): Ceres Seq. ID no. 12720302
  misc_feature (46)..(290): Pfam Name: Putative undecaprenyl diphosphate synthase Pfam Description: Putative undecaprenyl diphosphate synthase
  misc_feature (1)..(295): Homolog of NCBI NO: 18398467 NR Description: undecaprenyl pyrophosphate synthetase (UPP family; protein id: At2g17570.1, supported by cDNA: gi_14423545, by cDNA: gi_20336658 [Arabidopsis thaliana]
  misc_feature (1)..(295): Homolog of NCBI NO: 20336659 NR Description: hypothetical protein [Arabidopsis thaliana]
  misc_feature (36)..(295): Homolog of NCBI NO: 25314045 NR Description: hypothetical protein At2g17570 [imported] -
  misc_feature (75)..(295): Homolog of NCBI NO: 14423546 NR Description: Unknown protein [Arabidopsis thaliana]
  misc_feature (16)..(294): Homolog of NCBI NO: 23491567 NR Description: cis-prenyltransferase [Periploca sepium]
  misc_feature (25)..(295): Homolog of NCBI NO: 16751459 NR Description: cis-prenyltransferase [Hevea brasiliensis]
  misc_feature (25)..(295): Homolog of NCBI NO: 20563020 NR Description: cis-prenyltransferase1 [Hevea brasiliensis]
  misc_feature (17)..(295): Homolog of NCBI NO: 22213587 NR Description: cis-prenyltransferase 2 [Hevea brasiliensis]
  misc_feature (25)..(295): Homolog of NCBI NO: 20563022 NR Description: cis-prenyltransferase2 [Hevea brasiliensis]
  misc_feature (25)..(295): Homolog of NCBI NO: 22213585 NR Description: cis-prenyltransferase 1 [Hevea brasiliensis]

SEQ ID NO: 93505 - protein, 281 aa, Arabidopsis thaliana; identical to SEQ ID NO: 89749
  peptide (1)..(281): Ceres Seq. ID no. 12720303
  misc_feature (32)..(276): Pfam Name: Putative undecaprenyl diphosphate synthase Pfam Description: Putative undecaprenyl diphosphate synthase
  misc_feature (1)..(281): Homolog of NCBI NO: 18398467 NR Description: undecaprenyl pyrophosphate synthetase (UPP family; protein id: At2g17570.1, supported by cDNA: gi_14423545, by cDNA: gi_20336658 [Arabidopsis thaliana]
  misc_feature (1)..(281): Homolog of NCBI NO: 20336659 NR Description: hypothetical protein [Arabidopsis thaliana]
  misc_feature (22)..(281): Homolog of NCBI NO: 25314045 NR Description: hypothetical protein At2g17570 [imported] -
  misc_feature (61)..(281): Homolog of NCBI NO: 14423546 NR Description: Unknown protein [Arabidopsis thaliana]
  misc_feature (2)..(280): Homolog of NCBI NO: 23491567 NR Description: cis-prenyltransferase [Periploca sepium]
  misc_feature (11)..(281): Homolog of NCBI NO: 16751459 NR Description: cis-prenyltransferase [Hevea brasiliensis]
  misc_feature (11)..(281): Homolog of NCBI NO: 20563020 NR Description: cis-prenyltransferase1 [Hevea brasiliensis]
  misc_feature (3)..(281): Homolog of NCBI NO: 22213587 NR Description: cis-prenyltransferase 2 [Hevea brasiliensis]
  misc_feature (11)..(281): Homolog of NCBI NO: 20563022 NR Description: cis-prenyltransferase2 [Hevea brasiliensis]
  misc_feature (11)..(281): Homolog of NCBI NO: 22213585 NR Description: cis-prenyltransferase 1 [Hevea brasiliensis]

SEQ ID NO: 93506 - protein, 260 aa, Arabidopsis thaliana; identical to SEQ ID NO: 89750
  peptide (1)..(260): Ceres Seq. ID no. 12720304
  misc_feature (11)..(255): Pfam Name: Putative undecaprenyl diphosphate synthase Pfam Description: Putative undecaprenyl diphosphate synthase
  misc_feature (1)..(260): Homolog of NCBI NO: 18398467 NR Description: undecaprenyl pyrophosphate synthetase (UPP family; protein id: At2g17570.1, supported by cDNA: gi_14423545, by cDNA: gi_20336658 [Arabidopsis thaliana]
  misc_feature (1)..(260): Homolog of NCBI NO: 20336659 NR Description: hypothetical protein [Arabidopsis thaliana]
  misc_feature (1)..(260): Homolog of NCBI NO: 25314045 NR Description: hypothetical protein At2g17570 [imported] -
  misc_feature (40)..(260): Homolog of NCBI NO: 14423546 NR Description: Unknown protein [Arabidopsis thaliana]
  misc_feature (1)..(259): Homolog of NCBI NO: 23491567 NR Description: cis-prenyltransferase [Periploca sepium]
  misc_feature (1)..(260): Homolog of NCBI NO: 16751459 NR Description: cis-prenyltransferase [Hevea brasiliensis]
  misc_feature (1)..(260): Homolog of NCBI NO: 20563020 NR Description: cis-prenyltransferase1 [Hevea brasiliensis]
  misc_feature (1)..(260): Homolog of NCBI NO: 22213587 NR Description: cis-prenyltransferase 2 [Hevea brasiliensis]
  misc_feature (1)..(260): Homolog of NCBI NO: 20563022 NR Description: cis-prenyltransferase2 [Hevea brasiliensis]
  misc_feature (1)..(260): Homolog of NCBI NO: 22213585 NR Description: cis-prenyltransferase 1 [Hevea brasiliensis]

SEQ ID NO: 93507 - DNA, 1114 bp, Arabidopsis thaliana; identical to SEQ ID NO: 89751
  misc_feature (1)..(1114): Ceres Seq. ID no. 12720313
  misc_feature: MA Experiment ID: 20000184 Result: Down-regulated in Transcription
  misc_feature: MA Experiment 20000184 PARAMETER Experiment Name: At_Shoots__P Parameter: Age (day) Value: 7
  misc_feature: MA Experiment 20000184 PARAMETER Experiment Name: At_Shoots__P Parameter: Tissue Value: Shoots vs. Whole Plant
  misc_feature: MA Experiment ID: 20000227 Result: Down-regulated in Transcription
  misc_feature: MA Experiment 20000227 PARAMETER Experiment Name: At_Root-Tips-vs-Tops_P Parameter: Tissue Value: Root Tips vs. Root Tops
  misc_feature: MA Experiment ID: 20000794 Result: Up-regulated in Transcription
  misc_feature: MA Experiment 20000794 PARAMETER Experiment Name: At_Petals_P Parameter: Age (day) Value: 23-25 days
  misc_feature: MA Experiment 20000794 PARAMETER Experiment Name: At_Petals_P Parameter: Plant Line Value: WS
  misc_feature: MA Experiment 20000794 PARAMETER Experiment Name: At_Petals_P Parameter: Tissue Value: Petals vs. Whole plant

SEQ ID NO: 93508 - protein, 330 aa, Arabidopsis thaliana; identical to SEQ ID NO: 89752
  peptide (1)..(330): Ceres Seq. ID no. 12720314
  misc_feature (1)..(330): Homolog of NCBI NO: 5597011 NR Description: serine acetyltranferase 2 [Arabidopsis thaliana]
  misc_feature (8)..(330): Homolog of NCBI NO: 18398491 NR Description: expressed protein; protein id: At2g17640.1, by cDNA: gi_4406383 [Arabidopsis thaliana]
  misc_feature (8)..(292): Homolog of NCBI NO: 20198259 NR Description: serine acetyltransferase (GB:AF112303)
  misc_feature (8)..(292): Homolog of NCBI NO: 25286519 NR Description: probable serine acetyltransferase [imported] -
  misc_feature (8)..(292): Homolog of NCBI NO: 7433701 NR Description: serine O-acetyltransferase (EC 2.3.1.30)
  misc_feature (10)..(325): Homolog of NCBI NO: 17225592 NR Description: serine acetyltransferase [Arabidopsis thaliana] unknown protein [Arabidopsis thaliana]
  misc_feature (16)..(312): Homolog of NCBI NO: 22758278 NR Description: Putative serine acetyltransferase [Oryza sativa
  misc_feature (43)..(292): Homolog of NCBI NO: 1361979 NR Description: serine O-acetyltransferase (EC 2.3.1.30) - >gi|1350550|dbj|BAA12843.1| serine acetyltransferase [Citrullus >gi|1841312|dbj|BAA08479.1| serine acetyltransferase. [Citrullus
  misc_feature (27)..(292): Homolog of NCBI NO: 23028301 NR Description: hypothetical protein [Microbulbifer degradans
  misc_feature (37)..(292): Homolog of NCBI NO: 15241928 NR Description: serine O-acetyltransferase (EC 2.3.1.30) Sat-52 protein id: At5g56760.1, supported by cDNA: 119783., supported by gi_14517553, supported by cDNA: gi_905390 [Arabidopsis

SEQ ID NO: 93509 - protein, 323 aa, Arabidopsis thaliana; identical to SEQ ID NO: 89753
  peptide (1)..(323): Ceres Seq. ID no. 12720315
  misc_feature (1)..(323): Homolog of NCBI NO: 5597011 NR Description: serine acetyltranferase 2 [Arabidopsis thaliana]
  misc_feature (1)..(323): Homolog of NCBI NO: 18398491 NR Description: expressed protein; protein id: At2g17640.1, by cDNA: gi_4406383 [Arabidopsis thaliana]
  misc_feature (1)..(285): Homolog of NCBI NO: 20198259 NR Description: serine acetyltransferase (GB:AF112303)
  misc_feature (1)..(285): Homolog of NCBI NO: 25286519 NR Description: probable serine acetyltransferase [imported] -
  misc_feature (1)..(285): Homolog of NCBI NO: 7433701 NR Description: serine O-acetyltransferase (EC 2.3.1.30)
  misc_feature (3)..(318): Homolog of NCBI NO: 17225592 NR Description: serine acetyltransferase [Arabidopsis thaliana] unknown protein [Arabidopsis thaliana]
  misc_feature (9)..(305): Homolog of NCBI NO: 22758278 NR Description: Putative serine acetyltransferase [Oryza sativa
  misc_feature (36)..(285): Homolog of NCBI NO: 1361979 NR Description: serine O-acetyltransferase (EC 2.3.1.30) - >gi|1350550|dbj|BAA12843.1| serine acetyltransferase [Citrullus >gi|1841312|dbj|BAA08479.1| serine acetyltransferase. [Citrullus
  misc_feature (20)..(285): Homolog of NCBI NO: 23028301 NR Description: hypothetical protein [Microbulbifer degradans
  misc_feature (30)..(285): Homolog of NCBI NO: 15241928 NR Description: serine O-acetyltransferase (EC 2.3.1.30) Sat-52 protein id: At5g56760.1, supported by cDNA: 119783., supported by gi_14517553, supported by cDNA: gi_905390 [Arabidopsis

SEQ ID NO: 93510 - protein, 226 aa, Arabidopsis thaliana; identical to SEQ ID NO: 89754
  peptide (1)..(226): Ceres Seq. ID no. 12720316
  misc_feature (1)..(226): Homolog of NCBI NO: 5597011 NR Description: serine acetyltranferase 2 [Arabidopsis thaliana]
  misc_feature (1)..(226): Homolog of NCBI NO: 18398491 NR Description: expressed protein; protein id: At2g17640.1, by cDNA: gi_4406383 [Arabidopsis thaliana]
  misc_feature (1)..(188): Homolog of NCBI NO: 20198259 NR Description: serine acetyltransferase (GB:AF112303)
  misc_feature (1)..(188): Homolog of NCBI NO: 25286519 NR Description: probable serine acetyltransferase [imported] -
  misc_feature (1)..(188): Homolog of NCBI NO: 7433701 NR Description: serine O-acetyltransferase (EC 2.3.1.30)
  misc_feature (1)..(221): Homolog of NCBI NO: 17225592 NR Description: serine acetyltransferase [Arabidopsis thaliana] unknown protein [Arabidopsis thaliana]
  misc_feature (1)..(208): Homolog of NCBI NO: 22758278 NR Description: Putative serine acetyltransferase [Oryza sativa
  misc_feature (1)..(188): Homolog of NCBI NO: 1361979 NR Description: serine O-acetyltransferase (EC 2.3.1.30) - >gi|1350550|dbj|BAA12843.1| serine acetyltransferase [Citrullus >gi|1841312|dbj|BAA08479.1| serine acetyltransferase. [Citrullus
  misc_feature (1)..(188): Homolog of NCBI NO: 23028301 NR Description: hypothetical protein [Microbulbifer degradans
  misc_feature (1)..(188): Homolog of NCBI NO: 15241928 NR Description: serine O-acetyltransferase (EC 2.3.1.30) Sat-52 protein id: At5g56760.1, supported by cDNA: 119783., supported by gi_14517553, supported by cDNA: gi_905390 [Arabidopsis

SEQ ID NO: 93511 - DNA, 2104 bp, Arabidopsis thaliana; identical to SEQ ID NO: 89755
  misc_feature (1)..(2104): Ceres Seq. ID no. 12720327
  misc_feature: MA Experiment ID: 20000173 Result: Down-regulated in Transcription
  misc_feature: MA Experiment 20000173 PARAMETER Experiment Name: At_42deg_Heat_P Parameter: Age (day) Value: 14
  misc_feature: MA Experiment 20000173 PARAMETER Experiment Name: At_42deg_Heat_P Parameter: Organism Value: A. thaliana
  misc_feature: MA Experiment 20000173 PARAMETER Experiment Name: At_42deg_Heat_P Parameter: Plant Line Value: WS
  misc_feature: MA Experiment 20000173 PARAMETER Experiment Name: At_42deg_Heat_P Parameter: Temperature (deg C) Value: 42 vs. 22
  misc_feature: MA Experiment 20000173 PARAMETER Experiment Name: At_42deg_Heat_P Parameter: Timepoint (hr) Value: 6
  misc_feature: MA Experiment 20000173 PARAMETER Experiment Name: At_42deg_Heat_P Parameter: Tissue Value: Aerial
  misc_feature: MA Experiment ID: 20000184 Result: Down-regulated in Transcription
  misc_feature: MA Experiment 20000184 PARAMETER Experiment Name: At_Shoots__P Parameter: Age (day) Value: 7
  misc_feature: MA Experiment 20000184 PARAMETER Experiment Name: At_Shoots__P Parameter: Tissue Value: Shoots vs. Whole Plant
  misc_feature: MA Experiment ID: 20000496 Result: Up-regulated in Transcription
  misc_feature: MA Experiment 20000496 PARAMETER Experiment Name: At_Guard_Cells_P Parameter: Harvest Date Value: 7/19/2002
  misc_feature: MA Experiment 20000496 PARAMETER Experiment Name: At_Guard_Cells_P Parameter: Organism Value: Canola
  misc_feature: MA Experiment 20000496 PARAMETER Experiment Name: At_Guard_Cells_P Parameter: Tissue Value: Guard Cells vs. Leaves

SEQ ID NO: 93512 - protein, 546 aa, Arabidopsis thaliana; identical to SEQ ID NO: 89756
  peptide (1)..(546): Ceres Seq. ID no. 12720328
  misc_feature (173)..(246): Pfam Name: ACT domain Pfam Description: ACT domain
  misc_feature (1)..(546): Homolog of NCBI NO: 15227883 NR Description: putative protein kinase; protein id: At2g17700.1, by cDNA: gi_17979170, supported by cDNA: gi_20465914 [Arabidopsis >gi|25411811|pir||D84555 probable protein kinase putative protein
  misc_feature (1)..(542): Homolog of NCBI NO: 22329194 NR Description: putative protein; protein id: At4g35780.1, by cDNA: gi_20260235 [Arabidopsis thaliana] putative protein [Arabidopsis thaliana]
  misc_feature (1)..(542): Homolog of NCBI NO: 7486654 NR Description: hypothetical protein F8D20.290 - Arabidopsis >gi|3367596|emb|CAA20048.1| putative protein [Arabidopsis >gi|7270530|emb|CAB81487.1| putative protein [Arabidopsis
  misc_feature (3)..(542): Homolog of NCBI NO: 18420244 NR Description: protein kinase like protein; protein id:
  misc_feature (2)..(542): Homolog of NCBI NO: 32490474 NR Description: putative serine/threonine-protein kinase ctr1
  misc_feature (1)..(374): Homolog of NCBI NO: 7486398 NR Description: hypothetical protein F4B14.50 - Arabidopsis
  misc_feature (384)..(478): Homolog of NCBI NO: 7486398 NR Description: hypothetical protein F4B14.50 - Arabidopsis
  misc_feature (496)..(542): Homolog of NCBI NO: 7486398 NR Description: hypothetical protein F4B14.50 - Arabidopsis
  misc_feature (139)..(543): Homolog of NCBI NO: 34901608 NR Description: P0571D04.18 [Oryza sativa (japonica
  misc_feature (7)..(132): Homolog of NCBI NO: 34901608 NR Description: P0571D04.18 [Oryza sativa (japonica

SEQ ID NO: 93513 - protein, 518 aa, Arabidopsis thaliana; identical to SEQ ID NO: 89757
  peptide (1)..(518): Ceres Seq. ID no. 12720329
  misc_feature (145)..(218): Pfam Name: ACT domain Pfam Description: ACT domain
  misc_feature (1)..(518): Homolog of NCBI NO: 15227883 NR Description: putative protein kinase; protein id: At2g17700.1, by cDNA: gi_17979170, supported by cDNA: gi_20465914 [Arabidopsis >gi|25411811|pir||D84555 probable protein kinase putative protein
  misc_feature (1)..(514): Homolog of NCBI NO: 22329194 NR Description: putative protein; protein id: At4g35780.1, by cDNA: gi_20260235 [Arabidopsis thaliana] putative protein [Arabidopsis thaliana]
  misc_feature (1)..(514): Homolog of NCBI NO: 7486654 NR Description: hypothetical protein F8D20.290 - Arabidopsis >gi|3367596|emb|CAA20048.1| putative protein [Arabidopsis >gi|7270530|emb|CAB81487.1| putative protein [Arabidopsis
  misc_feature (1)..(514): Homolog of NCBI NO: 18420244 NR Description: protein kinase like protein; protein id:
  misc_feature (1)..(514): Homolog of NCBI NO: 32490474 NR Description: putative serine/threonine-protein kinase ctr1
  misc_feature (1)..(346): Homolog of NCBI NO: 7486398 NR Description: hypothetical protein F4B14.50 - Arabidopsis
  misc_feature (356)..(450): Homolog of NCBI NO: 7486398 NR Description: hypothetical protein F4B14.50 - Arabidopsis
  misc_feature (468)..(514): Homolog of NCBI NO: 7486398 NR Description: hypothetical protein F4B14.50 - Arabidopsis
  misc_feature (111)..(515): Homolog of NCBI NO: 34901608 NR Description: P0571D04.18 [Oryza sativa (japonica
  misc_feature (1)..(104): Homolog of NCBI NO: 34901608 NR Description: P0571D04.18 [Oryza sativa (japonica

SEQ ID NO: 93514 - protein, 375 aa, Arabidopsis thaliana; identical to SEQ ID NO: 89758
  peptide (1)..(375): Ceres Seq. ID no. 12720330
  misc_feature (2)..(75): Pfam Name: ACT domain Pfam Description: ACT domain
  misc_feature (1)..(375): Homolog of NCBI NO: 15227883 NR Description: putative protein kinase; protein id: At2g17700.1, by cDNA: gi_17979170, supported by cDNA: gi_20465914 [Arabidopsis >gi|25411811|pir||D84555 probable protein kinase putative protein
  misc_feature (1)..(371): Homolog of NCBI NO: 22329194 NR Description: putative protein; protein id: At4g35780.1, by cDNA: gi_20260235 [Arabidopsis thaliana] putative protein [Arabidopsis thaliana]
  misc_feature (1)..(371): Homolog of NCBI NO: 7486654 NR Description: hypothetical protein F8D20.290 - Arabidopsis >gi|3367596|emb|CAA20048.1| putative protein [Arabidopsis >gi|7270530|emb|CAB81487.1| putative protein [Arabidopsis
  misc_feature (1)..(371): Homolog of NCBI NO: 18420244 NR Description: protein kinase like protein; protein id:
  misc_feature (1)..(371): Homolog of NCBI NO: 32490474 NR Description: putative serine/threonine-protein kinase ctr1
  misc_feature (1)..(203): Homolog of NCBI NO: 7486398 NR Description: hypothetical protein F4B14.50 - Arabidopsis
  misc_feature (213)..(307): Homolog of NCBI NO: 7486398 NR Description: hypothetical protein F4B14.50 - Arabidopsis
  misc_feature (325)..(371): Homolog of NCBI NO: 7486398 NR Description: hypothetical protein F4B14.50 - Arabidopsis
  misc_feature (1)..(372): Homolog of NCBI NO: 34901608 NR Description: P0571D04.18 [Oryza sativa (japonica
  misc_feature (130)..(370): Homolog of NCBI NO: 7485889 NR Description: hypothetical protein F20M13.30 - Arabidopsis >gi|4467134|emb|CAB37503.1| protein kinase like protein thaliana] >gi|7270830|emb|CAB80511.1| protein kinase like protein

SEQ ID NO: 93515 - DNA, 1098 bp, Arabidopsis thaliana; identical to SEQ ID NO: 89759
  misc_feature (1)..(1098): Ceres Seq. ID no. 12720381
  misc_feature: MA Experiment ID: 20000227 Result: Up-regulated in Transcription
  misc_feature: MA Experiment 20000227 PARAMETER Experiment Name: At_Root-Tips-vs-Tops_P Parameter: Tissue Value: Root Tips vs. Root Tops
  misc_feature: MA Experiment ID: 20000234 Result: Up-regulated in Transcription
  misc_feature: MA Experiment 20000234 PARAMETER Experiment Name: At_Siliques_P Parameter: Age (day) Value: 21
  misc_feature: MA Experiment 20000234 PARAMETER Experiment Name: At_Siliques_P Parameter: Organism Value: A. thaliana
  misc_feature: MA Experiment 20000234 PARAMETER Experiment Name: At_Siliques_P Parameter: Plant Line Value: WS
  misc_feature: MA Experiment 20000234 PARAMETER Experiment Name: At_Siliques_P Parameter: Tissue Value: Less Than 5mm Siliques vs. Whole Plant
  misc_feature: MA Experiment ID: 20000235 Result: Up-regulated in Transcription
  misc_feature: MA Experiment 20000235 PARAMETER Experiment Name: At_Siliques_P Parameter: Age (day) Value: 21
  misc_feature: MA Experiment 20000235 PARAMETER Experiment Name: At_Siliques_P Parameter: Organism Value: A. thaliana
  misc_feature: MA Experiment 20000235 PARAMETER Experiment Name: At_Siliques_P Parameter: Plant Line Value: WS
  misc_feature: MA Experiment 20000235 PARAMETER Experiment Name: At_Siliques_P Parameter: Tissue Value: 5-10mm Siliques vs. Whole Plant
  misc_feature: MA Experiment ID: 20000495 Result: Up-regulated in Transcription
  misc_feature: MA Experiment 20000495 PARAMETER Experiment Name: At_Guard_Cells_P Parameter: Harvest Date Value: 8/2/2002
  misc_feature: MA Experiment 20000495 PARAMETER Experiment Name: At_Guard_Cells_P Parameter: Organism Value: A. thaliana
  misc_feature: MA Experiment 20000495 PARAMETER Experiment Name: At_Guard_Cells_P Parameter: Tissue Value: Guard Cells vs. Leaves

SEQ ID NO: 93516 - protein, 365 aa, Arabidopsis thaliana; identical to SEQ ID NO: 89760
  peptide (1)..(365): Ceres Seq. ID no. 12720382
  misc_feature (9)..(138): Pfam Name: No apical meristem (NAM) protein Pfam Description: No apical meristem (NAM) protein
  misc_feature (1)..(365): Homolog of NCBI NO: 15227958 NR Description: putative NAM (no apical meristem)-like protein; id: At2g18060.1 [Arabidopsis thaliana] >gi|25352296|pir||G84559
  misc_feature (1)..(358): Homolog of NCBI NO: 15234325 NR Description: NAM like protein; protein id: At4g36160.1
  misc_feature (4)..(364): Homolog of NCBI NO: 34902254 NR Description: Putative NAM-like protein [Oryza sativa (japonica
  misc_feature (6)..(267): Homolog of NCBI NO: 15239338 NR Description: NAM (no apical meristem)-like protein; protein At5g66300.1 [Arabidopsis thaliana] >gi|10177424|dbj|BAB10709.1|
  misc_feature (5)..(308): Homolog of NCBI NO: 24413978 NR Description: NAM-like protein [Oryza sativa (japonica
  misc_feature (4)..(199): Homolog of NCBI NO: 15221256 NR Description: unknown protein; protein id: At1g12260.1
  misc_feature (1)..(269): Homolog of NCBI NO: 15217612 NR Description: NAM-like protein; protein id: At1g71930.1,
  misc_feature (4)..(178): Homolog of NCBI NO: 15221554 NR Description: unknown protein; protein id: At1g62700.1
  misc_feature (4)..(146): Homolog of NCBI NO: 37536380 NR Description: putative NAM (no apical meristem) protein [Oryza
  misc_feature (4)..(199): Homolog of NCBI NO: 25402716 NR Description: hypothetical protein [imported] - Arabidopsis >gi|10086508|gb|AAG12568.1|AC022522_1 Hypothetical protein

SEQ ID NO: 93517 - protein, 362 aa, Arabidopsis thaliana; identical to SEQ ID NO: 89761
  peptide (1)..(362): Ceres Seq. ID no. 12720383
  misc_feature (6)..(135): Pfam Name: No apical meristem (NAM) protein Pfam Description: No apical meristem (NAM) protein
  misc_feature (1)..(362): Homolog of NCBI NO: 15227958 NR Description: putative NAM (no apical meristem)-like protein; id: At2g18060.1 [Arabidopsis thaliana] >gi|25352296|pir||G84559
  misc_feature (1)..(355): Homolog of NCBI NO: 15234325 NR Description: NAM like protein; protein id: At4g36160.1
  misc_feature (1)..(361): Homolog of NCBI NO: 34902254 NR Description: Putative NAM-like protein [Oryza sativa (japonica
  misc_feature (3)..(264): Homolog of NCBI NO: 15239338 NR Description: NAM (no apical meristem)-like protein; protein At5g66300.1 [Arabidopsis thaliana] >gi|10177424|dbj|BAB10709.1|
  misc_feature (2)..(305): Homolog of NCBI NO: 24413978 NR Description: NAM-like protein [Oryza sativa (japonica
  misc_feature (1)..(196): Homolog of NCBI NO: 15221256 NR Description: unknown protein; protein id: At1g12260.1
  misc_feature (1)..(266): Homolog of NCBI NO: 15217612 NR Description: NAM-like protein; protein id: At1g71930.1,
  misc_feature (1)..(175): Homolog of NCBI NO: 15221554 NR Description: unknown protein; protein id: At1g62700.1
  misc_feature (1)..(143): Homolog of NCBI NO: 37536380 NR Description: putative NAM (no apical meristem) protein [Oryza
  misc_feature (1)..(196): Homolog of NCBI NO: 25402716 NR Description: hypothetical protein [imported] - Arabidopsis >gi|10086508|gb|AAG12568.1|AC022522_1 Hypothetical protein

SEQ ID NO: 93518 - protein, 277 aa, Arabidopsis thaliana; identical to SEQ ID NO: 89762
  peptide (1)..(277): Ceres Seq. ID no. 12720384
  misc_feature (1)..(277): Homolog of NCBI NO: 15227958 NR Description: putative NAM (no apical meristem)-like protein; id: At2g18060.1 [Arabidopsis thaliana] >gi|25352296|pir||G84559
  misc_feature (1)..(270): Homolog of NCBI NO: 15234325 NR Description: NAM like protein; protein id: At4g36160.1
  misc_feature (1)..(276): Homolog of NCBI NO: 34902254 NR Description: Putative NAM-like protein [Oryza sativa (japonica
  misc_feature (1)..(179): Homolog of NCBI NO: 15239338 NR Description: NAM (no apical meristem)-like protein; protein At5g66300.1 [Arabidopsis thaliana] >gi|10177424|dbj|BAB10709.1|
  misc_feature (1)..(220): Homolog of NCBI NO: 24413978 NR Description: NAM-like protein [Oryza sativa (japonica
  misc_feature (1)..(111): Homolog of NCBI NO: 15221256 NR Description: unknown protein; protein id: At1g12260.1
  misc_feature (1)..(181): Homolog of NCBI NO: 15217612 NR Description: NAM-like protein; protein id: At1g71930.1,
  misc_feature (1)..(90): Homolog of NCBI NO: 15221554 NR Description: unknown protein; protein id: At1g62700.1
  misc_feature (1)..(58): Homolog of NCBI NO: 37536380 NR Description: putative NAM (no apical meristem) protein [Oryza
  misc_feature (1)..(111): Homolog of NCBI NO: 25402716 NR Description: hypothetical protein [imported] - Arabidopsis >gi|10086508|gb|AAG12568.1|AC022522_1 Hypothetical protein

SEQ ID NO: 93519 - DNA, 1014 bp, Arabidopsis thaliana; identical to SEQ ID NO: 89763
  misc_feature (1)..(1014): Ceres Seq. ID no. 12720392
  misc_feature: MA Experiment ID: 20000184 Result: Up-regulated in Transcription
  misc_feature: MA Experiment 20000184 PARAMETER Experiment Name: At_Shoots__P Parameter: Age (day) Value: 7
  misc_feature: MA Experiment 20000184 PARAMETER Experiment Name: At_Shoots__P Parameter: Tissue Value: Shoots vs. Whole Plant

SEQ ID NO: 93520 - protein, 337 aa, Arabidopsis thaliana; identical to SEQ ID NO: 89764
  peptide (1)..(337): Ceres Seq. ID no. 12720393
  misc_feature (51)..(299): Pfam Name: Peroxidase Pfam Description: Peroxidase
  misc_feature (1)..(337): Homolog of NCBI NO: 15224114 NR Description: peroxidase, putative; protein id: At2g18140.1 thaliana] >gi|25453216|sp|Q9SI17|PE14_ARATH Peroxidase 14 (Atperox P14) >gi|25285614|pir||G84560 probable peroxidase
  misc_feature (1)..(337): Homolog of NCBI NO: 21537275 NR Description: putative peroxidase [Arabidopsis thaliana]
  misc_feature (1)..(337): Homolog of NCBI NO: 15224116 NR Description: peroxidase, putative; protein id: At2g18150.1, by cDNA: 126030., supported by cDNA: gi_19698902 [Arabidopsis >gi|25453215|sp|Q9SI16|PE15_ARATH Peroxidase 15 precursor
  misc_feature (1)..(336): Homolog of NCBI NO: 15234394 NR Description: peroxidase, putative; protein id: At4g36430.1, by cDNA: gi_17530561, supported by cDNA: gi_18377685 [Arabidopsis
  misc_feature (1)..(337): Homolog of NCBI NO: 15239370 NR Description: peroxidase, putative; protein id: At5g66390.1 thaliana] >gi|26397792|sp|Q9FJZ9|PE72_ARATH Peroxidase 72 (Atperox P72) (PRXR8) (ATP6a) >gi|10177520|dbj|BAB10915.1|
  misc_feature (1)..(337): Homolog of NCBI NO: 1402918 NR Description: peroxidase [Arabidopsis thaliana]
  misc_feature (7)..(336): Homolog of NCBI NO: 7658147 NR Description: peroxidase [Asparagus officinalis]
  misc_feature (8)..(336): Homolog of NCBI NO: 34903044 NR Description: unnamed protein product [Oryza sativa (japonica group)] >gi|7242902|dbj|BAA92500.1| unnamed protein product
  misc_feature (1)..(335): Homolog of NCBI NO: 7453855 NR Description: peroxidase prx15 precursor [Spinacia oleracea]
  misc_feature (1)..(335): Homolog of NCBI NO: 7453853 NR Description: peroxidase prx14 precursor [Spinacia oleracea]

SEQ ID NO: 93521 - protein, 273 aa, Arabidopsis thaliana; identical to SEQ ID NO: 89765
  peptide (1)..(273): Ceres Seq. ID no. 12720394
  misc_feature (1)..(235): Pfam Name: Peroxidase Pfam Description: Peroxidase
  misc_feature (1)..(273): Homolog of NCBI NO: 15224114 NR Description: peroxidase, putative; protein id: At2g18140.1 thaliana] >gi|25453216|sp|Q9SI17|PE14_ARATH Peroxidase 14 (Atperox P14) >gi|25285614|pir||G84560 probable peroxidase
  misc_feature (1)..(273): Homolog of NCBI NO: 21537275 NR Description: putative peroxidase [Arabidopsis thaliana]
  misc_feature (1)..(273): Homolog of NCBI NO: 15224116 NR Description: peroxidase, putative; protein id: At2g18150.1, by cDNA: 126030., supported by cDNA: gi_19698902 [Arabidopsis >gi|25453215|sp|Q9SI16|PE15_ARATH Peroxidase 15 precursor
  misc_feature (1)..(272): Homolog of NCBI NO: 15234394 NR Description: peroxidase, putative; protein id: At4g36430.1, by cDNA: gi_17530561, supported by cDNA: gi_18377685 [Arabidopsis
  misc_feature (1)..(273): Homolog of NCBI NO: 15239370 NR Description: peroxidase, putative; protein id: At5g66390.1 thaliana] >gi|26397792|sp|Q9FJZ9|PE72_ARATH Peroxidase 72 (Atperox P72) (PRXR8) (ATP6a) >gi|10177520|dbj|BAB10915.1|
  misc_feature (1)..(273): Homolog of NCBI NO: 1402918 NR Description: peroxidase [Arabidopsis thaliana]
  misc_feature (1)..(272): Homolog of NCBI NO: 7658147 NR Description: peroxidase [Asparagus officinalis]
  misc_feature (1)..(272): Homolog of NCBI NO: 34903044 NR Description: unnamed protein product [Oryza sativa (japonica group)] >gi|7242902|dbj|BAA92500.1| unnamed protein product
  misc_feature (1)..(271): Homolog of NCBI NO: 7453855 NR Description: peroxidase prx15 precursor [Spinacia oleracea]
  misc_feature (1)..(271): Homolog of NCBI NO: 7453853 NR Description: peroxidase prx14 precursor [Spinacia oleracea]

SEQ ID NO: 93522 - protein, 268 aa, Arabidopsis thaliana; identical to SEQ ID NO: 89766
  peptide (1)..(268): Ceres Seq. ID no. 12720395
  misc_feature (1)..(230): Pfam Name: Peroxidase Pfam Description: Peroxidase
  misc_feature (1)..(268): Homolog of NCBI NO: 15224114 NR Description: peroxidase, putative; protein id: At2g18140.1 thaliana] >gi|25453216|sp|Q9SI17|PE14_ARATH Peroxidase 14 (Atperox P14) >gi|25285614|pir||G84560 probable peroxidase
  misc_feature (1)..(268): Homolog of NCBI NO: 21537275 NR Description: putative peroxidase [Arabidopsis thaliana]
  misc_feature (1)..(268): Homolog of NCBI NO: 15224116 NR Description: peroxidase, putative; protein id: At2g18150.1, by cDNA: 126030., supported by cDNA: gi_19698902 [Arabidopsis >gi|25453215|sp|Q9SI16|PE15_ARATH Peroxidase 15 precursor
  misc_feature (1)..(267): Homolog of NCBI NO: 15234394 NR Description: peroxidase, putative; protein id: At4g36430.1, by cDNA: gi_17530561, supported by cDNA: gi_18377685 [Arabidopsis
  misc_feature (1)..(268): Homolog of NCBI NO: 15239370 NR Description: peroxidase, putative; protein id: At5g66390.1 thaliana] >gi|26397792|sp|Q9FJZ9|PE72_ARATH Peroxidase 72 (Atperox P72) (PRXR8) (ATP6a) >gi|10177520|dbj|BAB10915.1|
  misc_feature (1)..(268): Homolog of NCBI NO: 1402918 NR Description: peroxidase [Arabidopsis thaliana]
  misc_feature (1)..(267): Homolog of NCBI NO: 7658147 NR Description: peroxidase [Asparagus officinalis]
  misc_feature (1)..(267): Homolog of NCBI NO: 34903044 NR Description: unnamed protein product [Oryza sativa (japonica group)] >gi|7242902|dbj|BAA92500.1| unnamed protein product
  misc_feature (1)..(266): Homolog of NCBI NO: 7453855 NR Description: peroxidase prx15 precursor [Spinacia oleracea]
  misc_feature (1)..(266): Homolog of NCBI NO: 7453853 NR Description: peroxidase prx14 precursor [Spinacia oleracea]

SEQ ID NO: 93523 - DNA, 531 bp, Arabidopsis thaliana; identical to SEQ ID NO: 89767
  misc_feature (1)..(531): Ceres Seq. ID no. 12720402
  misc_feature: MA Experiment ID: 20000315 Result: Down-regulated in Transcription
  misc_feature: MA Experiment 20000315 PARAMETER Experiment Name: At_14day_Shoots-Roots_Sub_P Parameter: Age (day) Value: 14
  misc_feature: MA Experiment 20000315 PARAMETER Experiment Name: At_14day_Shoots-Roots_Sub_P Parameter: Organism Value: A. thaliana
  misc_feature: MA Experiment 20000315 PARAMETER Experiment Name: At_14day_Shoots-Roots_Sub_P Parameter: Plant Line Value: WS
  misc_feature: MA Experiment 20000315 PARAMETER Experiment Name: At_14day_Shoots-Roots_Sub_P Parameter: Tissue Value: Shoots vs. Whole Plant

SEQ ID NO: 93524 - protein, 176 aa, Arabidopsis thaliana; identical to SEQ ID NO: 89768
  peptide (1)..(176): Ceres Seq. ID no. 12720403
  misc_feature (1)..(176): Homolog of NCBI NO: 15224138 NR Description: hypothetical protein; protein id: At2g18250.1
  misc_feature (2)..(173): Homolog of NCBI NO: 34393473 NR Description: bifunctional phosphopantetheine adenylyl
  misc_feature (4)..(169): Homolog of NCBI NO: 39589394 NR Description: Hypothetical protein CBG22156 [Caenorhabditis
  misc_feature (8)..(158): Homolog of NCBI NO: 25143409 NR Description: Cytidylyltransferase and Dephospho-CoA kinase kD) [Caenorhabditis elegans] >gi|25167211|gb|AAK29952.3|
  misc_feature (7)..(158): Homolog of NCBI NO: 27229125 NR Description: CoA synthase; 4'-phosphopantetheine
  misc_feature (7)..(158): Homolog of NCBI NO: 40555799 NR Description: 1300003G02Rik protein [Mus musculus]
  misc_feature (12)..(170): Homolog of NCBI NO: 6321716 NR Description: Protein required for cell viability; Ygr277cp cerevisiae] >gi|1723781|sp|P53332|YG5T_YEAST HYPOTHETICAL 34.3 KD
  misc_feature (16)..(158): Homolog of NCBI NO: 20465246 NR Description: bifunctional phosphopantetheine adenylyl
  misc_feature (2)..(158): Homolog of NCBI NO: 17981025 NR Description: phosphopantetheine adenylyltransferase /
  misc_feature (2)..(158): Homolog of NCBI NO: 22095395 NR Description: nucleotide binding protein; phosphopantetheine / dephosphocoenzyme A kinase; coenzyme A synthase [Homo sapiens] bifunctional phosphopantetheine adenylyl transferase / dephospho

SEQ ID NO: 93525 - protein, 168 aa, Arabidopsis thaliana; identical to SEQ ID NO: 89769
  peptide (1)..(168): Ceres Seq. ID no. 12720404
  misc_feature (1)..(168): Homolog of NCBI NO: 15224138 NR Description: hypothetical protein; protein id: At2g18250.1
  misc_feature (1)..(165): Homolog of NCBI NO: 34393473 NR Description: bifunctional phosphopantetheine adenylyl
  misc_feature (1)..(161): Homolog of NCBI NO: 39589394 NR Description: Hypothetical protein CBG22156 [Caenorhabditis
  misc_feature (1)..(150): Homolog of NCBI NO: 25143409 NR Description: Cytidylyltransferase and Dephospho-CoA kinase kD) [Caenorhabditis elegans] >gi|25167211|gb|AAK29952.3|
  misc_feature (1)..(150): Homolog of NCBI NO: 27229125 NR Description: CoA synthase; 4'-phosphopantetheine
  misc_feature (1)..(150): Homolog of NCBI NO: 40555799 NR Description: 1300003G02Rik protein [Mus musculus]
  misc_feature (4)..(162): Homolog of NCBI NO: 6321716 NR Description: Protein required for cell viability; Ygr277cp cerevisiae] >gi|1723781|sp|P53332|YG5T_YEAST HYPOTHETICAL 34.3 KD
  misc_feature (8)..(150): Homolog of NCBI NO: 20465246 NR Description: bifunctional phosphopantetheine adenylyl
  misc_feature (1)..(150): Homolog of NCBI NO: 17981025 NR Description: phosphopantetheine adenylyltransferase /
  misc_feature (1)..(150): Homolog of NCBI NO: 22095395 NR Description: nucleotide binding protein; phosphopantetheine / dephosphocoenzyme A kinase; coenzyme A synthase [Homo sapiens] bifunctional phosphopantetheine adenylyl transferase / dephospho

SEQ ID NO: 93526 - protein, 144 aa, Arabidopsis thaliana; identical to SEQ ID NO: 89770
  peptide (1)..(144): Ceres Seq. ID no. 12720405
  misc_feature (1)..(144): Homolog of NCBI NO: 15224138 NR Description: hypothetical protein; protein id: At2g18250.1
  misc_feature (1)..(141): Homolog of NCBI NO: 34393473 NR Description: bifunctional phosphopantetheine adenylyl
  misc_feature (1)..(137): Homolog of NCBI NO: 39589394 NR Description: Hypothetical protein CBG22156 [Caenorhabditis
  misc_feature (1)..(126): Homolog of NCBI NO: 25143409 NR Description: Cytidylyltransferase and Dephospho-CoA kinase kD) [Caenorhabditis elegans] >gi|25167211|gb|AAK29952.3|
  misc_feature (1)..(126): Homolog of NCBI NO: 27229125 NR Description: CoA synthase; 4'-phosphopantetheine
  misc_feature (1)..(126): Homolog of NCBI NO: 40555799 NR Description: 1300003G02Rik protein [Mus musculus]
  misc_feature (1)..(138): Homolog of NCBI NO: 6321716 NR Description: Protein required for cell viability; Ygr277cp cerevisiae] >gi|1723781|sp|P53332|YG5T_YEAST HYPOTHETICAL 34.3 KD
  misc_feature (1)..(126): Homolog of NCBI NO: 20465246 NR Description: bifunctional phosphopantetheine adenylyl
  misc_feature (1)..(126): Homolog of NCBI NO: 17981025 NR Description: phosphopantetheine adenylyltransferase /
  misc_feature (1)..(126): Homolog of NCBI NO: 22095395 NR Description: nucleotide binding protein; phosphopantetheine / dephosphocoenzyme A kinase; coenzyme A synthase [Homo sapiens] bifunctional phosphopantetheine adenylyl transferase / dephospho

SEQ ID NO: 93527 - DNA, 624 bp, Arabidopsis thaliana; identical to SEQ ID NO: 89771
  misc_feature (1)..(624): Ceres Seq. ID no. 12720414
  misc_feature: MA Experiment ID: 20000355 Result: Up-regulated in Transcription
  misc_feature: MA Experiment 20000355 PARAMETER Experiment Name: At_Siliques_Sub_P Parameter: Age (day) Value: 21
  misc_feature: MA Experiment 20000355 PARAMETER Experiment Name: At_Siliques_Sub_P Parameter: Organism Value: A. thaliana
  misc_feature: MA Experiment 20000355 PARAMETER Experiment Name: At_Siliques_Sub_P Parameter: Plant Line Value: WS
  misc_feature: MA Experiment 20000355 PARAMETER Experiment Name: At_Siliques_Sub_P Parameter: Tissue Value: Less Than 5mm Siliques vs. Whole Plant

SEQ ID NO: 93528 - protein, 207 aa, Arabidopsis thaliana; identical to SEQ ID NO: 89772
  peptide (1)..(207): Ceres Seq. ID no. 12720415
  misc_feature (1)..(207): Homolog of NCBI NO: 15224164 NR Description: GATA zinc finger protein; protein id: At2g18380.1
  misc_feature (9)..(206): Homolog of NCBI NO: 15234463 NR Description: GATA zinc finger protein; protein id: At4g36620.1
  misc_feature (83)..(192): Homolog of NCBI NO: 7488381 NR Description: transcription factor homolog F18B3.150 -
  misc_feature (83)..(192): Homolog of NCBI NO: 18409199 NR Description: GATA zinc finger protein; protein id:
  misc_feature (83)..(192): Homolog of NCBI NO: 21555178 NR Description: transcription factor-like protein [Arabidopsis
  misc_feature (6)..(80): Homolog of NCBI NO: 7488381 NR Description: transcription factor homolog F18B3.150 -
  misc_feature (6)..(80): Homolog of NCBI NO: 21555178 NR Description: transcription factor-like protein [Arabidopsis
  misc_feature (6)..(80): Homolog of NCBI NO: 18409199 NR Description: GATA zinc finger protein; protein id:
  misc_feature (31)..(131): Homolog of NCBI NO: 34912080 NR Description: P0671D01.19 [Oryza sativa (japonica
  misc_feature (73)..(112): Homolog of NCBI NO: 5091599 NR Description: 10A19I.2 [Oryza sativa]

SEQ ID NO: 93529 - protein, 197 aa, Arabidopsis thaliana; identical to SEQ ID NO: 89773
  peptide (1)..(197): Ceres Seq. ID no. 12720416
  misc_feature (1)..(197): Homolog of NCBI NO: 15224164 NR Description: GATA zinc finger protein; protein id: At2g18380.1
  misc_feature (1)..(196): Homolog of NCBI NO: 15234463 NR Description: GATA zinc finger protein; protein id: At4g36620.1
  misc_feature (73)..(182): Homolog of NCBI NO: 7488381 NR Description: transcription factor homolog F18B3.150 -
  misc_feature (73)..(182): Homolog of NCBI NO: 18409199 NR Description: GATA zinc finger protein; protein id:
  misc_feature (73)..(182): Homolog of NCBI NO: 21555178 NR Description: transcription factor-like protein [Arabidopsis
  misc_feature (1)..(70): Homolog of NCBI NO: 7488381 NR Description: transcription factor homolog F18B3.150 -
  misc_feature (1)..(70): Homolog of NCBI NO: 18409199 NR Description: GATA zinc finger protein; protein id:
  misc_feature (1)..(70): Homolog of NCBI NO: 21555178 NR Description: transcription factor-like protein [Arabidopsis
  misc_feature (21)..(121): Homolog of NCBI NO: 34912080 NR Description: P0671D01.19 [Oryza sativa (japonica
  misc_feature (63)..(102): Homolog of NCBI NO: 5091599 NR Description: 10A19I.2 [Oryza sativa]

SEQ ID NO: 93530 - protein, 133 aa, Arabidopsis thaliana; identical to SEQ ID NO: 89774
  peptide (1)..(133): Ceres Seq. ID no. 12720417

SEQ ID NO: 93531 - DNA, 663 bp, Arabidopsis thaliana; identical to SEQ ID NO: 89775
  misc_feature (1)..(663): Ceres Seq. ID no. 12720425
  misc_feature: MA Experiment ID: 20000169 Result: Up-regulated in Transcription
  misc_feature: MA Experiment 20000169 PARAMETER Experiment Name: At_100uM_ABA_P Parameter: Age (day) Value: 14
  misc_feature: MA Experiment 20000169 PARAMETER Experiment Name: At_100uM_ABA_P Parameter: Organism Value: A. thaliana
  misc_feature: MA Experiment 20000169 PARAMETER Experiment Name: At_100uM_ABA_P Parameter: Plant Line Value: WS
  misc_feature: MA Experiment 20000169 PARAMETER Experiment Name: At_100uM_ABA_P Parameter: Timepoint (hr) Value: 6
  misc_feature: MA Experiment 20000169 PARAMETER Experiment Name: At_100uM_ABA_P Parameter: Tissue Value: Aerial
  misc_feature: MA Experiment 20000169 PARAMETER Experiment Name: At_100uM_ABA_P Parameter: Treatment Value: 100uM ABA vs. No Treatment
  misc_feature: MA Experiment ID: 20000182 Result: Up-regulated in Transcription
  misc_feature: MA Experiment 20000182 PARAMETER Experiment Name: At_2mM_SA_P Parameter: Age (day) Value: 14
  misc_feature: MA Experiment 20000182 PARAMETER Experiment Name: At_2mM_SA_P Parameter: Organism Value: A. thaliana
  misc_feature: MA Experiment 20000182 PARAMETER Experiment Name: At_2mM_SA_P Parameter: Plant Line Value: WS
  misc_feature: MA Experiment 20000182 PARAMETER Experiment Name: At_2mM_SA_P Parameter: Timepoint (hr) Value: 6
  misc_feature: MA Experiment 20000182 PARAMETER Experiment Name: At_2mM_SA_P Parameter: Tissue Value: Aerial
  misc_feature: MA Experiment 20000182 PARAMETER Experiment Name: At_2mM_SA_P Parameter: Treatment Value: 2mM SA vs. No Treatment
  misc_feature: MA Experiment ID: 20000184 Result: Down-regulated in Transcription
  misc_feature: MA Experiment 20000184 PARAMETER Experiment Name: At_Shoots__P Parameter: Age (day) Value: 7
  misc_feature: MA Experiment 20000184 PARAMETER Experiment Name: At_Shoots__P Parameter: Tissue Value: Shoots vs. Whole Plant
  misc_feature: MA Experiment ID: 20000185 Result: Down-regulated in Transcription
  misc_feature: MA Experiment 20000185 PARAMETER Experiment Name: At_Roots__P Parameter: Age (day) Value: 7 vs. 21
  misc_feature: MA Experiment 20000185 PARAMETER Experiment Name: At_Roots__P Parameter: Organism Value: A. thaliana
  misc_feature: MA Experiment 20000185 PARAMETER Experiment Name: At_Roots__P Parameter: Tissue Value: Roots vs. Whole Plant
  misc_feature: MA Experiment ID: 20000436 Result: Up-regulated in Transcription
  misc_feature: MA Experiment 20000436 PARAMETER Experiment Name: At_Drought_P Parameter: Age (day) Value: 7
  misc_feature: MA Experiment 20000436 PARAMETER Experiment Name: At_Drought_P Parameter: Organism Value: A. thaliana
  misc_feature: MA Experiment 20000436 PARAMETER Experiment Name: At_Drought_P Parameter: Plant Line Value: WS
  misc_feature: MA Experiment 20000436 PARAMETER Experiment Name: At_Drought_P Parameter: Timepoint (hr) Value: 12
  misc_feature: MA Experiment 20000436 PARAMETER Experiment Name: At_Drought_P Parameter: Tissue Value: Whole Plant
  misc_feature: MA Experiment 20000436 PARAMETER Experiment Name: At_Drought_P Parameter: Treatment Value: Drought vs. No Drought
  misc_feature: MA Experiment ID: 20000437 Result: Up-regulated in Transcription
  misc_feature: MA Experiment 20000437 PARAMETER Experiment Name: At_Drought_P Parameter: Age (day) Value: 8
  misc_feature: MA Experiment 20000437 PARAMETER Experiment Name: At_Drought_P Parameter: Organism Value: A. thaliana
  misc_feature: MA Experiment 20000437 PARAMETER Experiment Name: At_Drought_P Parameter: Plant Line Value: WS
  misc_feature: MA Experiment 20000437 PARAMETER Experiment Name: At_Drought_P Parameter: Timepoint (hr) Value: 24
  misc_feature: MA Experiment 20000437 PARAMETER Experiment Name: At_Drought_P Parameter: Tissue Value: Whole Plant
  misc_feature: MA Experiment 20000437 PARAMETER Experiment Name: At_Drought_P Parameter: Treatment Value: Drought vs. No Drought
  misc_feature: MA Experiment ID: 20000438 Result: Down-regulated in Transcription
  misc_feature: MA Experiment 20000438 PARAMETER Experiment Name: At_Shoots__P Parameter: Age (day) Value: 14
  misc_feature: MA Experiment 20000438 PARAMETER Experiment Name: At_Shoots__P Parameter: Tissue Value: Shoots vs. Whole Plant
  misc_feature: MA Experiment ID: 20000439 Result: Down-regulated in Transcription
  misc_feature: MA Experiment 20000439 PARAMETER Experiment Name: At_Roots__P Parameter: Age (day) Value: 14 vs. 21
  misc_feature: MA Experiment 20000439 PARAMETER Experiment Name: At_Roots__P Parameter: Organism Value: A. thaliana
  misc_feature: MA Experiment 20000439 PARAMETER Experiment Name: At_Roots__P Parameter: Tissue Value: Roots vs. Whole Plant
  misc_feature: MA Experiment ID: 20000451 Result: Up-regulated in Transcription
  misc_feature: MA Experiment 20000451 PARAMETER Experiment Name: At_CS6879_Shoots-Roots_P Parameter: Age (day) Value: 14
  misc_feature: MA Experiment 20000451 PARAMETER Experiment Name: At_CS6879_Shoots-Roots_P Parameter: Organism Value: A. thaliana
  misc_feature: MA Experiment 20000451 PARAMETER Experiment Name: At_CS6879_Shoots-Roots_P Parameter: Plant Line Value: CS6879 vs. WS
  misc_feature: MA Experiment 20000451 PARAMETER Experiment Name: At_CS6879_Shoots-Roots_P Parameter: Tissue Value: Roots
  misc_feature: MA Experiment ID: 20000453 Result: Up-regulated in Transcription
  misc_feature: MA Experiment 20000453 PARAMETER Experiment Name: At_100uM_ABA_P Parameter: Age (day) Value: 15
  misc_feature: MA Experiment 20000453 PARAMETER Experiment Name: At_100uM_ABA_P Parameter: Organism Value: A. thaliana
  misc_feature: MA Experiment 20000453 PARAMETER Experiment Name: At_100uM_ABA_P Parameter: Plant Line Value: WS
  misc_feature: MA Experiment 20000453 PARAMETER Experiment Name: At_100uM_ABA_P Parameter: Timepoint (hr) Value: 24
  misc_feature: MA Experiment 20000453 PARAMETER Experiment Name: At_100uM_ABA_P Parameter: Tissue Value: Aerial
  misc_feature: MA Experiment 20000453 PARAMETER Experiment Name: At_100uM_ABA_P Parameter: Treatment Value: 100uM ABA vs. No Treatment
  misc_feature: MA Experiment ID: 20000794 Result: Up-regulated in Transcription
  misc_feature: MA Experiment 20000794 PARAMETER Experiment Name: At_Petals_P Parameter: Age (day) Value: 23-25 days
  misc_feature: MA Experiment 20000794 PARAMETER Experiment Name: At_Petals_P Parameter: Plant Line Value: WS
  misc_feature: MA Experiment 20000794 PARAMETER Experiment Name: At_Petals_P Parameter: Tissue Value: Petals vs. Whole plant
  misc_feature: MA Experiment ID: 20001554 Result: Up-regulated in Transcription
  misc_feature: MA Experiment 20001554 PARAMETER Experiment Name: At_Drought_Soil_Dry_P Parameter: Age (day) Value: 21
  misc_feature: MA Experiment 20001554 PARAMETER Experiment Name: At_Drought_Soil_Dry_P Parameter: Organism Value: A. thaliana
  misc_feature: MA Experiment 20001554 PARAMETER Experiment Name: At_Drought_Soil_Dry_P Parameter: Plant Line Value: WS
  misc_feature: MA Experiment 20001554 PARAMETER Experiment Name: At_Drought_Soil_Dry_P Parameter: Post Timepoint (hr) Value: None
  misc_feature: MA Experiment 20001554 PARAMETER Experiment Name: At_Drought_Soil_Dry_P Parameter: Post-Treatment Value: None
  misc_feature: MA Experiment 20001554 PARAMETER Experiment Name: At_Drought_Soil_Dry_P Parameter: Timepoint (day) Value: 7
  misc_feature: MA Experiment 20001554 PARAMETER Experiment Name: At_Drought_Soil_Dry_P Parameter: Treatment Value: Drought vs. No Drought
  misc_feature: MA Experiment ID: 20001905 Result: Up-regulated in Transcription
  misc_feature: MA Experiment 20001905 PARAMETER Experiment Name: At_Drought_Reproduction_P Parameter: Age (day) Value: 40
  misc_feature: MA Experiment 20001905 PARAMETER Experiment Name: At_Drought_Reproduction_P Parameter: Organism Value: A. thaliana
  misc_feature: MA Experiment 20001905 PARAMETER Experiment Name: At_Drought_Reproduction_P Parameter: Plant Line Value: WS
  misc_feature: MA Experiment 20001905 PARAMETER Experiment Name: At_Drought_Reproduction_P Parameter: Timepoint (day) Value: 10
  misc_feature: MA Experiment 20001905 PARAMETER Experiment Name: At_Drought_Reproduction_P Parameter: Tissue Value: Rosettes
  misc_feature: MA Experiment 20001905 PARAMETER Experiment Name: At_Drought_Reproduction_P Parameter: Treatment Value: Drought vs. No Drought
  misc_feature: MA Experiment ID: 20001906 Result: Up-regulated in Transcription
  misc_feature: MA Experiment 20001906 PARAMETER Experiment Name: At_Drought_Reproduction_P Parameter: Age (day) Value: 35
  misc_feature: MA Experiment 20001906 PARAMETER Experiment Name: At_Drought_Reproduction_P Parameter: Organism Value: A. thaliana
  misc_feature: MA Experiment 20001906 PARAMETER Experiment Name: At_Drought_Reproduction_P Parameter: Plant Line Value: WS
  misc_feature: MA Experiment 20001906 PARAMETER Experiment Name: At_Drought_Reproduction_P Parameter: Timepoint (day) Value: 5
  misc_feature: MA Experiment 20001906 PARAMETER Experiment Name: At_Drought_Reproduction_P Parameter: Tissue Value: Siliques
  misc_feature: MA Experiment 20001906 PARAMETER Experiment Name: At_Drought_Reproduction_P Parameter: Treatment Value: Drought vs. No Drought
  misc_feature: MA Experiment ID: 20001907 Result: Up-regulated in Transcription
  misc_feature: MA Experiment 20001907 PARAMETER Experiment Name: At_Drought_Reproduction_P Parameter: Age (day) Value: 37
  misc_feature: MA Experiment 20001907 PARAMETER Experiment Name: At_Drought_Reproduction_P Parameter: Organism Value: A. thaliana
  misc_feature: MA Experiment 20001907 PARAMETER Experiment Name: At_Drought_Reproduction_P Parameter: Plant Line Value: WS
  misc_feature: MA Experiment 20001907 PARAMETER Experiment Name: At_Drought_Reproduction_P Parameter: Timepoint (day) Value: 7
  misc_feature: MA Experiment 20001907 PARAMETER Experiment Name: At_Drought_Reproduction_P Parameter: Tissue Value: Siliques
  misc_feature: MA Experiment 20001907 PARAMETER Experiment Name: At_Drought_Reproduction_P Parameter: Treatment Value: Drought vs. No Drought
  misc_feature: MA Experiment ID: 20001908 Result: Up-regulated in Transcription
  misc_feature: MA Experiment 20001908 PARAMETER Experiment Name: At_Drought_Reproduction_P Parameter: Age (day) Value: 40
  misc_feature: MA Experiment 20001908 PARAMETER Experiment Name: At_Drought_Reproduction_P Parameter: Organism Value: A. thaliana
  misc_feature: MA Experiment 20001908 PARAMETER Experiment Name: At_Drought_Reproduction_P Parameter: Plant Line Value: WS
  misc_feature: MA Experiment 20001908 PARAMETER Experiment Name: At_Drought_Reproduction_P Parameter: Timepoint (day) Value: 10
  misc_feature: MA Experiment 20001908 PARAMETER Experiment Name: At_Drought_Reproduction_P Parameter: Tissue Value: Siliques
  misc_feature: MA Experiment 20001908 PARAMETER Experiment Name: At_Drought_Reproduction_P Parameter: Treatment Value: Drought vs. No Drought
  misc_feature: MA Experiment ID: 20001909 Result: Up-regulated in Transcription
  misc_feature: MA Experiment 20001909 PARAMETER Experiment Name: At_Drought_Reproduction_P Parameter: Age (day) Value: 35
  misc_feature: MA Experiment 20001909 PARAMETER Experiment Name: At_Drought_Reproduction_P Parameter: Organism Value: A. thaliana
  misc_feature: MA Experiment 20001909 PARAMETER Experiment Name: At_Drought_Reproduction_P Parameter: Plant Line Value: WS
  misc_feature: MA Experiment 20001909 PARAMETER Experiment Name: At_Drought_Reproduction_P Parameter: Timepoint (day) Value: 5
  misc_feature: MA Experiment 20001909 PARAMETER Experiment Name: At_Drought_Reproduction_P Parameter: Tissue Value: Flowers
  misc_feature: MA Experiment 20001909 PARAMETER Experiment Name: At_Drought_Reproduction_P Parameter: Treatment Value: Drought vs. No Drought
  misc_feature: MA Experiment ID: 20001910 Result: Up-regulated in Transcription
  misc_feature: MA Experiment 20001910 PARAMETER Experiment Name: At_Drought_Reproduction_P Parameter: Age (day) Value: 37
  misc_feature: MA Experiment 20001910 PARAMETER Experiment Name: At_Drought_Reproduction_P Parameter: Organism Value: A. thaliana
  misc_feature: MA Experiment 20001910 PARAMETER Experiment Name: At_Drought_Reproduction_P Parameter: Plant Line Value: WS
  misc_feature: MA Experiment 20001910 PARAMETER Experiment Name: At_Drought_Reproduction_P Parameter: Timepoint (day) Value: 7
  misc_feature: MA Experiment 20001910 PARAMETER Experiment Name: At_Drought_Reproduction_P Parameter: Tissue Value: Flowers
  misc_feature: MA Experiment 20001910 PARAMETER Experiment Name: At_Drought_Reproduction_P Parameter: Treatment Value: Drought vs. No Drought
  misc_feature: MA Experiment ID: 20001911 Result: Up-regulated in Transcription
  misc_feature: MA Experiment 20001911 PARAMETER Experiment Name: At_Drought_Reproduction_P Parameter: Age (day) Value: 40
  misc_feature: MA Experiment 20001911 PARAMETER Experiment Name: At_Drought_Reproduction_P Parameter: Organism Value: A. thaliana
  misc_feature: MA Experiment 20001911 PARAMETER Experiment Name: At_Drought_Reproduction_P Parameter: Plant Line Value: WS
  misc_feature: MA Experiment 20001911 PARAMETER Experiment Name: At_Drought_Reproduction_P Parameter: Timepoint (day) Value: 10
  misc_feature: MA Experiment 20001911 PARAMETER Experiment Name: At_Drought_Reproduction_P Parameter: Tissue Value: Flowers
  misc_feature: MA Experiment 20001911 PARAMETER Experiment Name: At_Drought_Reproduction_P Parameter: Treatment Value: Drought vs. No Drought

SEQ ID NO: 93532 - protein, 220 aa, Arabidopsis thaliana; identical to SEQ ID NO: 89776
  peptide (1)..(220): Ceres Seq. ID no. 12720426
  misc_feature (62)..(115): Pfam Name: Homeobox domain Pfam Description: Homeobox domain
  misc_feature (1)..(220): Homolog of NCBI NO: 15224190 NR Description: homeodomain protein; protein id: At2g18550.1 thaliana] >gi|25411880|pir||F84565 probable homeodomain
  misc_feature (3)..(220): Homolog of NCBI NO: 15234508 NR Description: homeodomain protein; protein id: At4g36740.1
  misc_feature (1)..(213): Homolog of NCBI NO: 15240052 NR Description: homeodomain transcription factor-like; protein At5g66700.1 [Arabidopsis thaliana] >gi|8843728|dbj|BAA97276.1|
  misc_feature (31)..(160): Homolog of NCBI NO: 33146844 NR Description: homeodomain protein-like [Oryza sativa (japonica
  misc_feature (105)..(216): Homolog of NCBI NO: 11231049 NR Description: homeobox-leucine zipper protein [Zinnia elegans]
  misc_feature (39)..(165): Homolog of NCBI NO: 3868839 NR Description: CRHB6 [Ceratopteris richardii]
  misc_feature (50)..(157): Homolog of NCBI NO: 7415622 NR Description: homeobox protein PpHB5 [Physcomitrella patens]
  misc_feature (39)..(158): Homolog of NCBI NO: 3868849 NR Description: CRHB11 [Ceratopteris richardii]
  misc_feature (48)..(192): Homolog of NCBI NO: 5006853 NR Description: homeodomain leucine zipper protein [Oryza sativa]
  misc_feature (32)..(180): Homolog of NCBI NO: 3868841 NR Description: CRHB7 [Ceratopteris richardii]

SEQ ID NO: 93533 - protein, 149 aa, Arabidopsis thaliana; identical to SEQ ID NO: 89777
  peptide (1)..(149): Ceres Seq. ID no. 12720427
  misc_feature (1)..(44): Pfam Name: Homeobox domain Pfam Description: Homeobox domain
  misc_feature (1)..(149): Homolog of NCBI NO: 15224190 NR Description: homeodomain protein; protein id: At2g18550.1 thaliana] >gi|25411880|pir||F84565 probable homeodomain
  misc_feature (1)..(149): Homolog of NCBI NO: 15234508 NR Description: homeodomain protein; protein id: At4g36740.1
  misc_feature (1)..(142): Homolog of NCBI NO: 15240052 NR Description: homeodomain transcription factor-like; protein At5g66700.1 [Arabidopsis thaliana] >gi|8843728|dbj|BAA97276.1|
  misc_feature (1)..(89): Homolog of NCBI NO: 33146844 NR Description: homeodomain protein-like [Oryza sativa (japonica
  misc_feature (34)..(145): Homolog of NCBI NO: 11231049 NR Description: homeobox-leucine zipper protein [Zinnia elegans]
  misc_feature (1)..(94): Homolog of NCBI NO: 3868839 NR Description: CRHB6 [Ceratopteris richardii]
  misc_feature (1)..(86): Homolog of NCBI NO: 7415622 NR Description: homeobox protein PpHB5 [Physcomitrella patens]
  misc_feature (1)..(87): Homolog of NCBI NO: 3868849 NR Description: CRHB11 [Ceratopteris richardii]
  misc_feature (1)..(121): Homolog of NCBI NO: 5006853 NR Description: homeodomain leucine zipper protein [Oryza sativa]
  misc_feature (1)..(109): Homolog of NCBI NO: 3868841 NR Description: CRHB7 [Ceratopteris richardii]

SEQ ID NO: 93534 - DNA, 1335 bp, Arabidopsis thaliana; identical to SEQ ID NO: 89778
  misc_feature (1)..(1335): Ceres Seq. ID no. 12720428
  misc_feature: MA Experiment ID: 20000355 Result: Down-regulated in Transcription
  misc_feature: MA Experiment 20000355 PARAMETER Experiment Name: At_Siliques_Sub_P Parameter: Age (day) Value: 21
  misc_feature: MA Experiment 20000355 PARAMETER Experiment Name: At_Siliques_Sub_P Parameter: Organism Value: A. thaliana
  misc_feature: MA Experiment 20000355 PARAMETER Experiment Name: At_Siliques_Sub_P Parameter: Plant Line Value: WS
  misc_feature: MA Experiment 20000355 PARAMETER Experiment Name: At_Siliques_Sub_P Parameter: Tissue Value: Less Than 5mm Siliques vs. Whole Plant
  misc_feature: MA Experiment ID: 20001807 Result: Up-regulated in Transcription
  misc_feature: MA Experiment 20001807 PARAMETER Experiment Name: At_50mM_NH4NO3_L-to-H_Sub_P Parameter: Timepoint (hr) Value: 6
  misc_feature: MA Experiment 20001807 PARAMETER Experiment Name: At_50mM_NH4NO3_L-to-H_Sub_P Parameter: Tissue Value: Leaf
  misc_feature: MA Experiment 20001807 PARAMETER Experiment Name: At_50mM_NH4NO3_L-to-H_Sub_P Parameter: Treatment Value: 50mM NH4NO3 vs 100mM Mannitol

SEQ ID NO: 93535 - protein, 444 aa, Arabidopsis thaliana; identical to SEQ ID NO: 89779
  peptide (1)..(444): Ceres Seq. ID no. 12720429
  misc_feature (5)..(444): Pfam Name: UDP-glucoronosyl and UDP-glucosyl transferase Pfam Description: UDP-glucoronosyl and UDP-glucosyl transferase
  misc_feature (1)..(444): Homolog of NCBI NO: 25286815 NR Description: probable flavonol 3-O-glucosyltransferase
  misc_feature (65)..(444): Homolog of NCBI NO: 30680413 NR Description: UDP-glucosyltransferase family [Arabidopsis
  misc_feature (65)..(444): Homolog of NCBI NO: 39104603 NR Description: putative flavonol 3-O-glucosyltransferase
  misc_feature (64)..(443): Homolog of NCBI NO: 25286819 NR Description: probable flavonol 3-O-glucosyltransferase
  misc_feature (1)..(70): Homolog of NCBI NO: 25286819 NR Description: probable flavonol 3-O-glucosyltransferase
  misc_feature (178)..(443): Homolog of NCBI NO: 30680415 NR Description: glycosyltransferase family [Arabidopsis thaliana]
  misc_feature (65)..(438): Homolog of NCBI NO: 2501494 NR Description: Flavonol 3-O-glucosyltransferase 5 (UDP-glucose
  misc_feature (4)..(56): Homolog of NCBI NO: 2501494 NR Description: Flavonol 3-O-glucosyltransferase 5 (UDP-glucose
  misc_feature (62)..(433): Homolog of NCBI NO: 18409172 NR Description: UTP-glucose glucosyltransferase - like protein; id: At3g50740.1, supported by cDNA: gi_15146271 [Arabidopsis >gi|15146272|gb|AAK83619.1| AT3g50740/T3A5_120 [Arabidopsis
  misc_feature (4)..(46): Homolog of NCBI NO: 18409172 NR Description: UTP-glucose glucosyltransferase - like protein; id: At3g50740.1, supported by cDNA: gi_15146271 [Arabidopsis >gi|15146272|gb|AAK83619.1| AT3g50740/T3A5_120 [Arabidopsis

SEQ ID NO: 93536 - protein, 380 aa, Arabidopsis thaliana; identical to SEQ ID NO: 89780
  peptide (1)..(380): Ceres Seq. ID no. 12720430
  misc_feature (1)..(380): Pfam Name: UDP-glucoronosyl and UDP-glucosyl transferase Pfam Description: UDP-glucoronosyl and UDP-glucosyl transferase
  misc_feature (1)..(380): Homolog of NCBI NO: 25286815 NR Description: probable flavonol 3-O-glucosyltransferase
  misc_feature (1)..(380): Homolog of NCBI NO: 30680413 NR Description: UDP-glucosyltransferase family [Arabidopsis
  misc_feature (1)..(380): Homolog of NCBI NO: 39104603 NR Description: putative flavonol 3-O-glucosyltransferase
  misc_feature (1)..(379): Homolog of NCBI NO: 25286819 NR Description: probable flavonol 3-O-glucosyltransferase
  misc_feature (114)..(379): Homolog of NCBI NO: 30680415 NR Description: glycosyltransferase family [Arabidopsis thaliana]
  misc_feature (1)..(374): Homolog of NCBI NO: 2501494 NR Description: Flavonol 3-O-glucosyltransferase 5 (UDP-glucose
  misc_feature (1)..(369): Homolog of NCBI NO: 18409172 NR Description: UTP-glucose glucosyltransferase - like protein; id: At3g50740.1, supported by cDNA: gi_15146271 [Arabidopsis >gi|15146272|gb|AAK83619.1| AT3g50740/T3A5_120 [Arabidopsis
  misc_feature (1)..(369): Homolog of NCBI NO: 7433913 NR Description: UTP-glucose glucosyltransferase-like protein -
  misc_feature (1)..(376): Homolog of NCBI NO: 15240051 NR Description: UTP-glucose glucosyltransferase; protein id: supported by cDNA: 151441., supported by cDNA: gi_17065119,
  misc_feature (1)..(376): Homolog of NCBI NO: 15240305 NR Description: UTP-glucose glucosyltransferase - like protein;

SEQ ID NO: 93537 - protein, 377 aa, Arabidopsis thaliana; identical to SEQ ID NO: 89781
  peptide (1)..(377): Ceres Seq. ID no. 12720431
  misc_feature (1)..(377): Pfam Name: UDP-glucoronosyl and UDP-glucosyl transferase Pfam Description: UDP-glucoronosyl and UDP-glucosyl transferase
  misc_feature (1)..(377): Homolog of NCBI NO: 25286815 NR Description: probable flavonol 3-O-glucosyltransferase
  misc_feature (1)..(377): Homolog of NCBI NO: 30680413 NR Description: UDP-glucosyltransferase family [Arabidopsis
  misc_feature (1)..(377): Homolog of NCBI NO: 39104603 NR Description: putative flavonol 3-O-glucosyltransferase
  misc_feature (1)..(376): Homolog of NCBI NO: 25286819 NR Description: probable flavonol 3-O-glucosyltransferase
  misc_feature (111)..(376): Homolog of NCBI NO: 30680415 NR Description: glycosyltransferase family [Arabidopsis thaliana]
  misc_feature (1)..(371): Homolog of NCBI NO: 2501494 NR Description: Flavonol 3-O-glucosyltransferase 5 (UDP-glucose
  misc_feature (1)..(366): Homolog of NCBI NO: 18409172 NR Description: UTP-glucose glucosyltransferase - like protein; id: At3g50740.1, supported by cDNA: gi_15146271 [Arabidopsis >gi|15146272|gb|AAK83619.1| AT3g50740/T3A5_120 [Arabidopsis
  misc_feature (1)..(366): Homolog of NCBI NO: 7433913 NR Description: UTP-glucose glucosyltransferase-like protein -
  misc_feature (1)..(373): Homolog of NCBI NO: 15240051 NR Description: UTP-glucose glucosyltransferase; protein id: supported by cDNA: 151441., supported by cDNA: gi_17065119,
  misc_feature (1)..(373): Homolog of NCBI NO: 15240305 NR Description: UTP-glucose glucosyltransferase - like protein;

SEQ ID NO: 93538 - DNA, 918 bp, Arabidopsis thaliana; identical to SEQ ID NO: 89782
  misc_feature (1)..(918): Ceres Seq. ID no. 12720464
  misc_feature: MA Experiment ID: 20000184 Result: Up-regulated in Transcription
  misc_feature: MA Experiment 20000184 PARAMETER Experiment Name: At_Shoots__P Parameter: Age (day) Value: 7
  misc_feature: MA Experiment 20000184 PARAMETER Experiment Name: At_Shoots__P Parameter: Tissue Value: Shoots vs. Whole Plant
  misc_feature: MA Experiment ID: 20000185 Result: Up-regulated in Transcription
  misc_feature: MA Experiment 20000185 PARAMETER Experiment Name: At_Roots__P Parameter: Age (day) Value: 7 vs. 21
  misc_feature: MA Experiment 20000185 PARAMETER Experiment Name: At_Roots__P Parameter: Organism Value: A. thaliana
  misc_feature: MA Experiment 20000185 PARAMETER Experiment Name: At_Roots__P Parameter: Tissue Value: Roots vs. Whole Plant
  misc_feature: MA Experiment ID: 20000267 Result: Down-regulated in Transcription
  misc_feature: MA Experiment 20000267 PARAMETER Experiment Name: At_Drought_P Parameter: Age (day) Value: 7
  misc_feature: MA Experiment 20000267 PARAMETER Experiment Name: At_Drought_P Parameter: Organism Value: A. thaliana
  misc_feature: MA Experiment 20000267 PARAMETER Experiment Name: At_Drought_P Parameter: Plant Line Value: WS
  misc_feature: MA Experiment 20000267 PARAMETER Experiment Name: At_Drought_P Parameter: Timepoint (hr) Value: 6
  misc_feature: MA Experiment 20000267 PARAMETER Experiment Name: At_Drought_P Parameter: Tissue Value: Whole Plant
  misc_feature: MA Experiment 20000267 PARAMETER Experiment Name: At_Drought_P Parameter: Treatment Value: Drought vs. No Drought
  misc_feature: MA Experiment ID: 20000436 Result: Down-regulated in Transcription
  misc_feature: MA Experiment 20000436 PARAMETER Experiment Name: At_Drought_P Parameter: Age (day) Value: 7
  misc_feature: MA Experiment 20000436 PARAMETER Experiment Name: At_Drought_P Parameter: Organism Value: A. thaliana
  misc_feature: MA Experiment 20000436 PARAMETER Experiment Name: At_Drought_P Parameter: Plant Line Value: WS
  misc_feature: MA Experiment 20000436 PARAMETER Experiment Name: At_Drought_P Parameter: Timepoint (hr) Value: 12
  misc_feature: MA Experiment 20000436 PARAMETER Experiment Name: At_Drought_P Parameter: Tissue Value: Whole Plant
  misc_feature: MA Experiment 20000436 PARAMETER Experiment Name: At_Drought_P Parameter: Treatment Value: Drought vs. No Drought
  misc_feature: MA Experiment ID: 20000437 Result: Down-regulated in Transcription
  misc_feature: MA Experiment 20000437 PARAMETER Experiment Name: At_Drought_P Parameter: Age (day) Value: 8
  misc_feature: MA Experiment 20000437 PARAMETER Experiment Name: At_Drought_P Parameter: Organism Value: A. thaliana
  misc_feature: MA Experiment 20000437 PARAMETER Experiment Name: At_Drought_P Parameter: Plant Line Value: WS
  misc_feature: MA Experiment 20000437 PARAMETER Experiment Name: At_Drought_P Parameter: Timepoint (hr) Value: 24
  misc_feature: MA Experiment 20000437 PARAMETER Experiment Name: At_Drought_P Parameter: Tissue Value: Whole Plant
  misc_feature: MA Experiment 20000437 PARAMETER Experiment Name: At_Drought_P Parameter: Treatment Value: Drought vs. No Drought
  misc_feature: MA Experiment ID: 20000439 Result: Up-regulated in Transcription
  misc_feature: MA Experiment 20000439 PARAMETER Experiment Name: At_Roots__P Parameter: Age (day) Value: 14 vs. 21
  misc_feature: MA Experiment 20000439 PARAMETER Experiment Name: At_Roots__P Parameter: Organism Value: A. thaliana
  misc_feature: MA Experiment 20000439 PARAMETER Experiment Name: At_Roots__P Parameter: Tissue Value: Roots vs. Whole Plant
  misc_feature: MA Experiment ID: 20000451 Result: Down-regulated in Transcription
  misc_feature: MA Experiment 20000451 PARAMETER Experiment Name: At_CS6879_Shoots-Roots_P Parameter: Age (day) Value: 14
  misc_feature: MA Experiment 20000451 PARAMETER Experiment Name: At_CS6879_Shoots-Roots_P Parameter: Organism Value: A. thaliana
  misc_feature: MA Experiment 20000451 PARAMETER Experiment Name: At_CS6879_Shoots-Roots_P Parameter: Plant Line Value: CS6879 vs. WS
  misc_feature: MA Experiment 20000451 PARAMETER Experiment Name: At_CS6879_Shoots-Roots_P Parameter: Tissue Value: Roots

SEQ ID NO: 93539 - protein, 305 aa, Arabidopsis thaliana; identical to SEQ ID NO: 89783
  peptide (1)..(305): Ceres Seq. ID no. 12720465
  misc_feature (28)..(209): Pfam Name: Glycosyl hydrolases family 16 Pfam Description: Glycosyl hydrolases family 16
  misc_feature (1)..(305): Homolog of NCBI NO: 15224232 NR Description: xyloglucan endotransglycosylase, putative; id: At2g18800.1 [Arabidopsis thaliana] >gi|25313552|pir||G84568
  misc_feature (1)..(296): Homolog of NCBI NO: 29500893 NR Description: putative xyloglucan endotransglycosylase [Cucumis >gi|29500901|emb|CAD87534.1| putative xyloglucan
  misc_feature (11)..(298): Homolog of NCBI NO: 15242781 NR Description: xyloglucan endotransglycosylase (TCH4); protein At5g57560.1, supported by cDNA: gi_14194112, supported by cDNA:
  misc_feature (1)..(296): Homolog of NCBI NO: 29500891 NR Description: putative xyloglucan endotransglycosylase [Cucumis >gi|29500899|emb|CAD87533.1| putative xyloglucan

SEQ ID NO: 93540 - protein, 297 aa, Arabidopsis thaliana; identical to SEQ ID NO: 89784
  peptide (1)..(297): Ceres Seq. ID no. 12720466
  misc_feature (20)..(201): Pfam Name: Glycosyl hydrolases family 16 Pfam Description: Glycosyl hydrolases family 16
  misc_feature (1)..(297): Homolog of NCBI NO: 15224232 NR Description: xyloglucan endotransglycosylase, putative; id: At2g18800.1 [Arabidopsis thaliana] >gi|25313552|pir||G84568
  misc_feature (1)..(288): Homolog of NCBI NO: 29500893 NR Description: putative xyloglucan endotransglycosylase [Cucumis >gi|29500901|emb|CAD87534.1| putative xyloglucan
  misc_feature (3)..(290): Homolog of NCBI NO: 15242781 NR Description: xyloglucan endotransglycosylase (TCH4); protein At5g57560.1, supported by cDNA: gi_14194112, supported by cDNA:
  misc_feature (1)..(288): Homolog of NCBI NO: 29500891 NR Description: putative xyloglucan endotransglycosylase [Cucumis >gi|29500899|emb|CAD87533.1| putative xyloglucan

SEQ ID NO: 93541 - protein, 231 aa, Arabidopsis thaliana; identical to SEQ ID NO: 89785
  peptide (1)..(231): Ceres Seq. ID no. 12720467
  misc_feature (1)..(135): Pfam Name: Glycosyl hydrolases family 16 Pfam Description: Glycosyl hydrolases family 16
  misc_feature (1)..(231): Homolog of NCBI NO: 15224232 NR Description: xyloglucan endotransglycosylase, putative; id: At2g18800.1 [Arabidopsis thaliana] >gi|25313552|pir||G84568
  misc_feature (1)..(222): Homolog of NCBI NO: 29500893 NR Description: putative xyloglucan endotransglycosylase [Cucumis >gi|29500901|emb|CAD87534.1| putative xyloglucan
  misc_feature (1)..(224): Homolog of NCBI NO: 15242781 NR Description: xyloglucan endotransglycosylase (TCH4); protein At5g57560.1, supported by cDNA: gi_14194112, supported by cDNA:
  misc_feature (1)..(222): Homolog of NCBI NO: 29500891 NR Description: putative xyloglucan endotransglycosylase [Cucumis >gi|29500899|emb|CAD87533.1| putative xyloglucan

SEQ ID NO: 93542 - DNA, 1319 bp, Arabidopsis thaliana; identical to SEQ ID NO: 89786
  misc_feature (1)..(1319): Ceres Seq. ID no. 12720490
  misc_feature: MA Experiment ID: 20000173 Result: Down-regulated in Transcription
  misc_feature: MA Experiment 20000173 PARAMETER Experiment Name: At_42deg_Heat_P Parameter: Age (day) Value: 14
  misc_feature: MA Experiment 20000173 PARAMETER Experiment Name: At_42deg_Heat_P Parameter: Organism Value: A. thaliana
  misc_feature: MA Experiment 20000173 PARAMETER Experiment Name: At_42deg_Heat_P Parameter: Plant Line Value: WS
  misc_feature: MA Experiment 20000173 PARAMETER Experiment Name: At_42deg_Heat_P Parameter: Temperature (deg C) Value: 42 vs. 22
  misc_feature: MA Experiment 20000173 PARAMETER Experiment Name: At_42deg_Heat_P Parameter: Timepoint (hr) Value: 6
  misc_feature: MA Experiment 20000173 PARAMETER Experiment Name: At_42deg_Heat_P Parameter: Tissue Value: Aerial
  misc_feature: MA Experiment ID: 20000234 Result: Down-regulated in Transcription
  misc_feature: MA Experiment 20000234 PARAMETER Experiment Name: At_Siliques_P Parameter: Age (day) Value: 21
  misc_feature: MA Experiment 20000234 PARAMETER Experiment Name: At_Siliques_P Parameter: Organism Value: A. thaliana
  misc_feature: MA Experiment 20000234 PARAMETER Experiment Name: At_Siliques_P Parameter: Plant Line Value: WS
  misc_feature: MA Experiment 20000234 PARAMETER Experiment Name: At_Siliques_P Parameter: Tissue Value: Less Than 5mm Siliques vs. Whole Plant
  misc_feature: MA Experiment ID: 20000235 Result: Down-regulated in Transcription
  misc_feature: MA Experiment 20000235 PARAMETER Experiment Name: At_Siliques_P Parameter: Age (day) Value: 21
  misc_feature: MA Experiment 20000235 PARAMETER Experiment Name: At_Siliques_P Parameter: Organism Value: A. thaliana
  misc_feature: MA Experiment 20000235 PARAMETER Experiment Name: At_Siliques_P Parameter: Plant Line Value: WS
  misc_feature: MA Experiment 20000235 PARAMETER Experiment Name: At_Siliques_P Parameter: Tissue Value: 5-10mm Siliques vs. Whole Plant
  misc_feature: MA Experiment ID: 20000264 Result: Down-regulated in Transcription
  misc_feature: MA Experiment 20000264 PARAMETER Experiment Name: At_Open_Flower_P Parameter: Age (day) Value: 21
  misc_feature: MA Experiment 20000264 PARAMETER Experiment Name: At_Open_Flower_P Parameter: Plant Line Value: WS
  misc_feature: MA Experiment 20000264 PARAMETER Experiment Name: At_Open_Flower_P Parameter: Tissue Value: Open Flower vs. Whole Plant
  misc_feature: MA Experiment ID: 20000438 Result: Up-regulated in Transcription
  misc_feature: MA Experiment 20000438 PARAMETER Experiment Name: At_Shoots__P Parameter: Age (day) Value: 14
  misc_feature: MA Experiment 20000438 PARAMETER Experiment Name: At_Shoots__P Parameter: Tissue Value: Shoots vs. Whole Plant
  misc_feature: MA Experiment ID: 20000439 Result: Down-regulated in Transcription
  misc_feature: MA Experiment 20000439 PARAMETER Experiment Name: At_Roots__P Parameter: Age (day) Value: 14 vs. 21
  misc_feature: MA Experiment 20000439 PARAMETER Experiment Name: At_Roots__P Parameter: Organism Value: A. thaliana
  misc_feature: MA Experiment 20000439 PARAMETER Experiment Name: At_Roots__P Parameter: Tissue Value: Roots vs. Whole Plant
  misc_feature: MA Experiment ID: 20000794 Result: Down-regulated in Transcription
  misc_feature: MA Experiment 20000794 PARAMETER Experiment Name: At_Petals_P Parameter: Age (day) Value: 23-25 days
  misc_feature: MA Experiment 20000794 PARAMETER Experiment Name: At_Petals_P Parameter: Plant Line Value: WS
  misc_feature: MA Experiment 20000794 PARAMETER Experiment Name: At_Petals_P Parameter: Tissue Value: Petals vs. Whole plant
  misc_feature: MA Experiment ID: 20001451 Result: Down-regulated in Transcription
  misc_feature: MA Experiment 20001451 PARAMETER Experiment Name: At_Far-red-induction_P Parameter: Age (day) Value: 7
  misc_feature: MA Experiment 20001451 PARAMETER Experiment Name: At_Far-red-induction_P Parameter: Light Value: Far-red vs. White
  misc_feature: MA Experiment 20001451 PARAMETER Experiment Name: At_Far-red-induction_P Parameter: Organism Value: A. thaliana
  misc_feature: MA Experiment 20001451 PARAMETER Experiment Name: At_Far-red-induction_P Parameter: Plant Line Value: Columbia
  misc_feature: MA Experiment 20001451 PARAMETER Experiment Name: At_Far-red-induction_P Parameter: Timepoint (hr) Value: 24
  misc_feature: MA Experiment 20001451 PARAMETER Experiment Name: At_Far-red-induction_P Parameter: Tissue Value: Whole Plant

SEQ ID NO: 93543 - protein, 395 aa, Arabidopsis thaliana; identical to SEQ ID NO: 89787
  peptide (1)..(395): Ceres Seq. ID no. 12720491
  misc_feature (16)..(395): Homolog of NCBI NO: 15217715 NR Description: alcohol dehydrogenase, putative; protein id: supported by cDNA: gi_17529031 [Arabidopsis thaliana]
  misc_feature (16)..(395): Homolog of NCBI NO: 25283039 NR Description: alcohol dehydrogenase (EC 1.-.-.-) [similarity] - thaliana >gi|5042408|gb|AAD38247.1|AC006193_3 very similar to
  misc_feature (17)..(395): Homolog of NCBI NO: 18398586 NR Description: alcohol dehydrogenase, putative; protein id:
  misc_feature (17)..(395): Homolog of NCBI NO: 21592656 NR Description: alcohol dehydrogenase, putative [Arabidopsis
  misc_feature (18)..(393): Homolog of NCBI NO: 113363 NR Description: ALCOHOL DEHYDROGENASE 1 >gi|279445|pir||DEPJA1
  misc_feature (20)..(393): Homolog of NCBI NO: 1362105 NR Description: alcohol dehydrogenase (EC 1.1.1.1) - common (fragment) >gi|551257|emb|CAA57446.1| alcohol dehydrogenase
  misc_feature (18)..(393): Homolog of NCBI NO: 7427629 NR Description: alcohol dehydrogenase (EC 1.1.1.1) - potato
  misc_feature (16)..(393): Homolog of NCBI NO: 6684345 NR Description: alcohol dehydrogenase [Arabis alpina]
  misc_feature (18)..(393): Homolog of NCBI NO: 113365 NR Description: Alcohol dehydrogenase 1 >gi|169467|gb|AAA33806.1|
  misc_feature (18)..(393): Homolog of NCBI NO: 113379 NR Description: ALCOHOL DEHYDROGENASE 2 >gi|169469|gb|AAA33807.1|

SEQ ID NO: 93544 - protein, 380 aa, Arabidopsis thaliana; identical to SEQ ID NO: 89788
  peptide (1)..(380): Ceres Seq. ID no. 12720492
  misc_feature (1)..(380): Homolog of NCBI NO: 15217715 NR Description: alcohol dehydrogenase, putative; protein id: supported by cDNA: gi_17529031 [Arabidopsis thaliana]
  misc_feature (1)..(380): Homolog of NCBI NO: 25283039 NR Description: alcohol dehydrogenase (EC 1.-.-.-) [similarity] - thaliana >gi|5042408|gb|AAD38247.1|AC006193_3 very similar to
  misc_feature (2)..(380): Homolog of NCBI NO: 18398586 NR Description: alcohol dehydrogenase, putative; protein id:
  misc_feature (2)..(380): Homolog of NCBI NO: 21592656 NR Description: alcohol dehydrogenase, putative [Arabidopsis
  misc_feature (3)..(378): Homolog of NCBI NO: 113363 NR Description: ALCOHOL DEHYDROGENASE 1 >gi|279445|pir||DEPJA1
  misc_feature (5)..(378): Homolog of NCBI NO: 1362105 NR Description: alcohol dehydrogenase (EC 1.1.1.1) - common (fragment) >gi|551257|emb|CAA57446.1| alcohol dehydrogenase
  misc_feature (3)..(378): Homolog of NCBI NO: 7427629 NR Description: alcohol dehydrogenase (EC 1.1.1.1) - potato
  misc_feature (1)..(378): Homolog of NCBI NO: 6684345 NR Description: alcohol dehydrogenase [Arabis alpina]
  misc_feature (3)..(378): Homolog of NCBI NO: 113365 NR Description: Alcohol dehydrogenase 1 >gi|169467|gb|AAA33806.1|
  misc_feature (3)..(378): Homolog of NCBI NO: 113379 NR Description: ALCOHOL DEHYDROGENASE 2 >gi|169469|gb|AAA33807.1|

SEQ ID NO: 93545 - protein, 357 aa, Arabidopsis thaliana; identical to SEQ ID NO: 89789
  peptide (1)..(357): Ceres Seq. ID no. 12720493
  misc_feature (1)..(357): Homolog of NCBI NO: 15217715 NR Description: alcohol dehydrogenase, putative; protein id: supported by cDNA: gi_17529031 [Arabidopsis thaliana]
  misc_feature (1)..(357): Homolog of NCBI NO: 25283039 NR Description: alcohol dehydrogenase (EC 1.-.-.-) [similarity] - thaliana >gi|5042408|gb|AAD38247.1|AC006193_3 very similar to
  misc_feature (1)..(357): Homolog of NCBI NO: 18398586 NR Description: alcohol dehydrogenase, putative; protein id:
  misc_feature (1)..(357): Homolog of NCBI NO: 21592656 NR Description: alcohol dehydrogenase, putative [Arabidopsis
  misc_feature (1)..(355): Homolog of NCBI NO: 113363 NR Description: ALCOHOL DEHYDROGENASE 1 >gi|279445|pir||DEPJA1
  misc_feature (1)..(355): Homolog of NCBI NO: 1362105 NR Description: alcohol dehydrogenase (EC 1.1.1.1) - common (fragment) >gi|551257|emb|CAA57446.1| alcohol dehydrogenase
  misc_feature (1)..(355): Homolog of NCBI NO: 7427629 NR Description: alcohol dehydrogenase (EC 1.1.1.1) - potato
  misc_feature (1)..(355): Homolog of NCBI NO: 6684345 NR Description: alcohol dehydrogenase [Arabis alpina]
  misc_feature (1)..(355): Homolog of NCBI NO: 113365 NR Description: Alcohol dehydrogenase 1 >gi|169467|gb|AAA33806.1|
  misc_feature (1)..(355): Homolog of NCBI NO: 113379 NR Description: ALCOHOL DEHYDROGENASE 2 >gi|169469|gb|AAA33807.1|

SEQ ID NO: 93546 - DNA, 1509 bp, Arabidopsis thaliana; identical to SEQ ID NO: 89790
  misc_feature (1)..(1509): Ceres Seq. ID no. 12720502
  misc_feature: MA Experiment ID: 20000306 Result: Down-regulated in Transcription
  misc_feature: MA Experiment 20000306 PARAMETER Experiment Name: At_Germinating_Seeds_Sub_P Parameter: Age (hr) Value: 6 vs. 0
  misc_feature: MA Experiment 20000306 PARAMETER Experiment Name: At_Germinating_Seeds_Sub_P Parameter: Organism Value: A. thaliana
  misc_feature: MA Experiment 20000306 PARAMETER Experiment Name: At_Germinating_Seeds_Sub_P Parameter: Plant Line Value: WS
  misc_feature: MA Experiment 20000306 PARAMETER Experiment Name: At_Germinating_Seeds_Sub_P Parameter: Tissue Value: Germinating Seeds
  misc_feature: MA Experiment ID: 20000307 Result: Down-regulated in Transcription
  misc_feature: MA Experiment 20000307 PARAMETER Experiment Name: At_Germinating_Seeds_Sub_P Parameter: Age (hr) Value: 24 vs. 0
  misc_feature: MA Experiment 20000307 PARAMETER Experiment Name: At_Germinating_Seeds_Sub_P Parameter: Organism Value: A. thaliana
  misc_feature: MA Experiment 20000307 PARAMETER Experiment Name: At_Germinating_Seeds_Sub_P Parameter: Plant Line Value: WS
  misc_feature: MA Experiment 20000307 PARAMETER Experiment Name: At_Germinating_Seeds_Sub_P Parameter: Tissue Value: Germinating Seeds

SEQ ID NO: 93547 - protein, 502 aa, Arabidopsis thaliana; identical to SEQ ID NO: 89791
  peptide (1)..(502): Ceres Seq. ID no. 12720503
  misc_feature (1)..(502): Homolog of NCBI NO: 15217763 NR Description: hypothetical protein; protein id: At1g64820.1
  misc_feature (1)..(266): Homolog of NCBI NO: 25404496 NR Description: hypothetical protein F13O11.12 [imported] - thaliana >gi|5042417|gb|AAD38256.1|AC006193_12 Hypothetical
  misc_feature (421)..(502): Homolog of NCBI NO: 25404496 NR Description: hypothetical protein F13O11.12 [imported] - thaliana >gi|5042417|gb|AAD38256.1|AC006193_12 Hypothetical
  misc_feature (315)..(394): Homolog of NCBI NO: 25404496 NR Description: hypothetical protein F13O11.12 [imported] - thaliana >gi|5042417|gb|AAD38256.1|AC006193_12 Hypothetical
  misc_feature (1)..(277): Homolog of NCBI NO: 15219745 NR Description: MATE efflux family protein, putative; protein id: [Arabidopsis thaliana] >gi|12597755|gb|AAG60068.1|AC013288_2 MATE
  misc_feature (273)..(476): Homolog of NCBI NO: 15219745 NR Description: MATE efflux family protein, putative; protein id: [Arabidopsis thaliana] >gi|12597755|gb|AAG60068.1|AC013288_2 MATE
  misc_feature (1)..(470): Homolog of NCBI NO: 13430684 NR Description: putative MATE efflux family protein [Arabidopsis
  misc_feature (1)..(470): Homolog of NCBI NO: 30697399 NR Description: MATE efflux protein - related [Arabidopsis >gi|12597760|gb|AAG60073.1|AC013288_7 MATE efflux family protein,
  misc_feature (30)..(480): Homolog of NCBI NO: 22325453 NR Description: hypothetical protein; protein id: At2g04100.1, by cDNA: gi_20260453 [Arabidopsis thaliana]
  misc_feature (30)..(470): Homolog of NCBI NO: 15228073 NR Description: hypothetical protein; protein id: At2g04050.1

SEQ ID NO: 93548 - protein, 481 aa, Arabidopsis thaliana; identical to SEQ ID NO: 89792
  peptide (1)..(481): Ceres Seq. ID no. 12720504
  misc_feature (1)..(481): Homolog of NCBI NO: 15217763 NR Description: hypothetical protein; protein id: At1g64820.1
  misc_feature (1)..(245): Homolog of NCBI NO: 25404496 NR Description: hypothetical protein F13O11.12 [imported] - thaliana >gi|5042417|gb|AAD38256.1|AC006193_12 Hypothetical
  misc_feature (400)..(481): Homolog of NCBI NO: 25404496 NR Description: hypothetical protein F13O11.12 [imported] - thaliana >gi|5042417|gb|AAD38256.1|AC006193_12 Hypothetical
  misc_feature (294)..(373): Homolog of NCBI NO: 25404496 NR Description: hypothetical protein F13O11.12 [imported] - thaliana >gi|5042417|gb|AAD38256.1|AC006193_12 Hypothetical
  misc_feature (1)..(256): Homolog of NCBI NO: 15219745 NR Description: MATE efflux family protein, putative; protein id: [Arabidopsis thaliana] >gi|12597755|gb|AAG60068.1|AC013288_2 MATE
  misc_feature (252)..(455): Homolog of NCBI NO: 15219745 NR Description: MATE efflux family protein, putative; protein id: [Arabidopsis thaliana] >gi|12597755|gb|AAG60068.1|AC013288_2 MATE
  misc_feature (1)..(449): Homolog of NCBI NO: 13430684 NR Description: putative MATE efflux family protein [Arabidopsis
  misc_feature (1)..(449): Homolog of NCBI NO: 30697399 NR Description: MATE efflux protein - related [Arabidopsis >gi|12597760|gb|AAG60073.1|AC013288_7 MATE efflux family protein,
  misc_feature (9)..(459): Homolog of NCBI NO: 22325453 NR Description: hypothetical protein; protein id: At2g04100.1, by cDNA: gi_20260453 [Arabidopsis thaliana]
  misc_feature (9)..(449): Homolog of NCBI NO: 15228073 NR Description: hypothetical protein; protein id: At2g04050.1

SEQ ID NO: 93549 - protein, 476 aa, Arabidopsis thaliana; identical to SEQ ID NO: 89793
  peptide (1)..(476): Ceres Seq. ID no. 12720505
  misc_feature (1)..(476): Homolog of NCBI NO: 15217763 NR Description: hypothetical protein; protein id: At1g64820.1
  misc_feature (1)..(240): Homolog of NCBI NO: 25404496 NR Description: hypothetical protein F13O11.12 [imported] - thaliana >gi|5042417|gb|AAD38256.1|AC006193_12 Hypothetical
  misc_feature (395)..(476): Homolog of NCBI NO: 25404496 NR Description: hypothetical protein F13O11.12 [imported] - thaliana >gi|5042417|gb|AAD38256.1|AC006193_12 Hypothetical
  misc_feature (289)..(368): Homolog of NCBI NO: 25404496 NR Description: hypothetical protein F13O11.12 [imported] - thaliana >gi|5042417|gb|AAD38256.1|AC006193_12 Hypothetical
  misc_feature (1)..(251): Homolog of NCBI NO: 15219745 NR Description: MATE efflux family protein, putative; protein id: [Arabidopsis thaliana] >gi|12597755|gb|AAG60068.1|AC013288_2 MATE
  misc_feature (247)..(450): Homolog of NCBI NO: 15219745 NR Description: MATE efflux family protein, putative; protein id: [Arabidopsis thaliana] >gi|12597755|gb|AAG60068.1|AC013288_2 MATE
  misc_feature (1)..(444): Homolog of NCBI NO: 13430684 NR Description: putative MATE efflux family protein [Arabidopsis
  misc_feature (1)..(444): Homolog of NCBI NO: 30697399 NR Description: MATE efflux protein - related [Arabidopsis >gi|12597760|gb|AAG60073.1|AC013288_7 MATE efflux family protein,
  misc_feature (4)..(454): Homolog of NCBI NO: 22325453 NR Description: hypothetical protein; protein id: At2g04100.1, by cDNA: gi_20260453 [Arabidopsis thaliana]
  misc_feature (4)..(444): Homolog of NCBI NO: 15228073 NR Description: hypothetical protein; protein id: At2g04050.1

SEQ ID NO: 93550 - DNA, 1344 bp, Arabidopsis thaliana; identical to SEQ ID NO: 89794
  misc_feature (1)..(1344): Ceres Seq. ID no. 12720522
  misc_feature: MA Experiment ID: 20000348 Result: Up-regulated in Transcription
  misc_feature: MA Experiment 20000348 PARAMETER Experiment Name: At_100uM_ABA_Sub_P Parameter: Age (day) Value: 14
  misc_feature: MA Experiment 20000348 PARAMETER Experiment Name: At_100uM_ABA_Sub_P Parameter: Organism Value: A. thaliana
  misc_feature: MA Experiment 20000348 PARAMETER Experiment Name: At_100uM_ABA_Sub_P Parameter: Plant Line Value: WS
  misc_feature: MA Experiment 20000348 PARAMETER Experiment Name: At_100uM_ABA_Sub_P Parameter: Timepoint (hr) Value: 1
  misc_feature: MA Experiment 20000348 PARAMETER Experiment Name: At_100uM_ABA_Sub_P Parameter: Tissue Value: Aerial
  misc_feature: MA Experiment 20000348 PARAMETER Experiment Name: At_100uM_ABA_Sub_P Parameter: Treatment Value: 100uM ABA vs. No Treatment
  misc_feature: MA Experiment ID: 20000355 Result: Up-regulated in Transcription
  misc_feature: MA Experiment 20000355 PARAMETER Experiment Name: At_Siliques_Sub_P Parameter: Age (day) Value: 21
  misc_feature: MA Experiment 20000355 PARAMETER Experiment Name: At_Siliques_Sub_P Parameter: Organism Value: A. thaliana
  misc_feature: MA Experiment 20000355 PARAMETER Experiment Name: At_Siliques_Sub_P Parameter: Plant Line Value: WS
  misc_feature: MA Experiment 20000355 PARAMETER Experiment Name: At_Siliques_Sub_P Parameter: Tissue Value: Less Than 5mm Siliques vs. Whole Plant
  misc_feature: MA Experiment ID: 20000440 Result: Up-regulated in Transcription
  misc_feature: MA Experiment 20000440 PARAMETER Experiment Name: At_Closed-Flower__Sub_P Parameter: Tissue Value: Closed Flower vs. Whole Plant

SEQ ID NO: 93551 - protein, 447 aa, Arabidopsis thaliana; identical to SEQ ID NO: 89795
  peptide (1)..(447): Ceres Seq. ID no. 12720523
  misc_feature (1)..(447): Homolog of NCBI NO: 15217773 NR Description: rhamnosyltransferase, putative; protein id:
  misc_feature (1)..(447): Homolog of NCBI NO: 15239523 NR Description: flavonol 3-O-glucosyltransferase-like protein; id: At5g53990.1, supported by cDNA: gi_17529305, supported by gi_20465446 [Arabidopsis thaliana] >gi|10177261|dbj|BAB10729.1|
  misc_feature (1)..(443): Homolog of NCBI NO: 15217796 NR Description: anthocyanidin-3-glucoside rhamnosyltransferase, protein id: At1g64920.1 [Arabidopsis thaliana]
  misc_feature (1)..(441): Homolog of NCBI NO: 15233903 NR Description: putative protein; protein id: At4g09500.1
  misc_feature (1)..(438): Homolog of NCBI NO: 15227766 NR Description: putative flavonol 3-O-glucosyltransferase;
  misc_feature (1)..(225): Homolog of NCBI NO: 28393204 NR Description: unknown protein [Arabidopsis thaliana]
  misc_feature (235)..(441): Homolog of NCBI NO: 28393204 NR Description: unknown protein [Arabidopsis thaliana]
  misc_feature (1)..(447): Homolog of NCBI NO: 15239525 NR Description: flavonol 3-O-glucosyltransferase-like protein;
  misc_feature (2)..(444): Homolog of NCBI NO: 15234195 NR Description: UDP rhamnose-anthocyanidin-3-glucoside
  misc_feature (2)..(447): Homolog of NCBI NO: 15234196 NR Description: UDP rhamnose--anthocyanidin-3-glucoside

SEQ ID NO: 93552 - protein, 439 aa, Arabidopsis thaliana; identical to SEQ ID NO: 89796
  peptide (1)..(439): Ceres Seq. ID no. 12720524
  misc_feature (1)..(439): Homolog of NCBI NO: 15217773 NR Description: rhamnosyltransferase, putative; protein id:
  misc_feature (1)..(439): Homolog of NCBI NO: 15239523 NR Description: flavonol 3-O-glucosyltransferase-like protein; id: At5g53990.1, supported by cDNA: gi_17529305, supported by gi_20465446 [Arabidopsis thaliana] >gi|10177261|dbj|BAB10729.1|
  misc_feature (1)..(435): Homolog of NCBI NO: 15217796 NR Description: anthocyanidin-3-glucoside rhamnosyltransferase, protein id: At1g64920.1 [Arabidopsis thaliana]
  misc_feature (1)..(433): Homolog of NCBI NO: 15233903 NR Description: putative protein; protein id: At4g09500.1
  misc_feature (1)..(430): Homolog of NCBI NO: 15227766 NR Description: putative flavonol 3-O-glucosyltransferase;
  misc_feature (1)..(217): Homolog of NCBI NO: 28393204 NR Description: unknown protein [Arabidopsis thaliana]
  misc_feature (227)..(433): Homolog of NCBI NO: 28393204 NR Description: unknown protein [Arabidopsis thaliana]
  misc_feature (1)..(439): Homolog of NCBI NO: 15239525 NR Description: flavonol 3-O-glucosyltransferase-like protein;
  misc_feature (1)..(436): Homolog of NCBI NO: 15234195 NR Description: UDP rhamnose-anthocyanidin-3-glucoside
  misc_feature (1)..(439): Homolog of NCBI NO: 15234196 NR Description: UDP rhamnose--anthocyanidin-3-glucoside

SEQ ID NO: 93553 - protein, 430 aa, Arabidopsis thaliana; identical to SEQ ID NO: 89797
  peptide (1)..(430): Ceres Seq. ID no. 12720525
  misc_feature (1)..(430): Homolog of NCBI NO: 15217773 NR Description: rhamnosyltransferase, putative; protein id:
  misc_feature (1)..(430): Homolog of NCBI NO: 15239523 NR Description: flavonol 3-O-glucosyltransferase-like protein; id: At5g53990.1, supported by cDNA: gi_17529305, supported by gi_20465446 [Arabidopsis thaliana] >gi|10177261|dbj|BAB10729.1|
  misc_feature (1)..(426): Homolog of NCBI NO: 15217796 NR Description: anthocyanidin-3-glucoside rhamnosyltransferase, protein id: At1g64920.1 [Arabidopsis thaliana]
  misc_feature (1)..(424): Homolog of NCBI NO: 15233903 NR Description: putative protein; protein id: At4g09500.1
  misc_feature (1)..(421): Homolog of NCBI NO: 15227766 NR Description: putative flavonol 3-O-glucosyltransferase;
  misc_feature (1)..(208): Homolog of NCBI NO: 28393204 NR Description: unknown protein [Arabidopsis thaliana]
  misc_feature (218)..(424): Homolog of NCBI NO: 28393204 NR Description: unknown protein [Arabidopsis thaliana]
  misc_feature (1)..(430): Homolog of NCBI NO: 15239525 NR Description: flavonol 3-O-glucosyltransferase-like protein;
  misc_feature (1)..(427): Homolog of NCBI NO: 15234195 NR Description: UDP rhamnose-anthocyanidin-3-glucoside
  misc_feature (1)..(430): Homolog of NCBI NO: 15234196 NR Description: UDP rhamnose--anthocyanidin-3-glucoside

SEQ ID NO: 93554 - DNA, 1536 bp, Arabidopsis thaliana; identical to SEQ ID NO: 89798
  misc_feature (1)..(1536): Ceres Seq. ID no. 12720530
  misc_feature: MA Experiment ID: 20000171 Result: Down-regulated in Transcription
  misc_feature: MA Experiment 20000171 PARAMETER Experiment Name: At_42deg_Heat_P Parameter: Age (day) Value: 14
  misc_feature: MA Experiment 20000171 PARAMETER Experiment Name: At_42deg_Heat_P Parameter: Organism Value: A. thaliana
  misc_feature: MA Experiment 20000171 PARAMETER Experiment Name: At_42deg_Heat_P Parameter: Plant Line Value: WS
  misc_feature: MA Experiment 20000171 PARAMETER Experiment Name: At_42deg_Heat_P Parameter: Temperature (deg C) Value: 42 vs. 22
  misc_feature: MA Experiment 20000171 PARAMETER Experiment Name: At_42deg_Heat_P Parameter: Timepoint (hr) Value: 1
  misc_feature: MA Experiment 20000171 PARAMETER Experiment Name: At_42deg_Heat_P Parameter: Tissue Value: Aerial

SEQ ID NO: 93555 - protein, 511 aa, Arabidopsis thaliana; identical to SEQ ID NO: 89799
  peptide (1)..(511): Ceres Seq. ID no. 12720531
  misc_feature (33)..(507): Pfam Name: Cytochrome P450 Pfam Description: Cytochrome P450
  misc_feature (1)..(511): Homolog of NCBI NO: 15217798 NR Description: cytochrome p450, putative; protein id: [Arabidopsis thaliana] >gi|25282571|pir||G96672 hypothetical
  misc_feature (1)..(511): Homolog of NCBI NO: 15217801 NR Description: cytochrome p450, putative; protein id: supported by cDNA: gi_14334809, supported by cDNA: gi_15293196, by cDNA: gi_15450600 [Arabidopsis thaliana]
  misc_feature (1)..(511): Homolog of NCBI NO: 15224379 NR Description: cytochrome p450, putative; protein id: [Arabidopsis thaliana] >gi|25282595|pir||E84501 probable
  misc_feature (1)..(511): Homolog of NCBI NO: 15450601 NR Description: At1g64950/F13O11_25 [Arabidopsis thaliana]
  misc_feature (1)..(511): Homolog of NCBI NO: 15217800 NR Description: cytochrome p450, putative; protein id: [Arabidopsis thaliana] >gi|25282572|pir||H96672 probable
  misc_feature (1)..(511): Homolog of NCBI NO: 15217771 NR Description: cytochrome p450, putative; protein id:
  misc_feature (1)..(511): Homolog of NCBI NO: 1432145 NR Description: cytochrome P450 [Arabidopsis thaliana]
  misc_feature (1)..(301): Homolog of NCBI NO: 9757853 NR Description: cytochrome P450-like protein [Arabidopsis
  misc_feature (332)..(509): Homolog of NCBI NO: 9757853 NR Description: cytochrome P450-like protein [Arabidopsis
  misc_feature (3)..(509): Homolog of NCBI NO: 15228566 NR Description: cytochrome p450, putative; protein id: supported by cDNA: gi_15983413 [Arabidopsis thaliana]

SEQ ID NO: 93556 - protein, 368 aa, Arabidopsis thaliana; identical to SEQ ID NO: 89800
  peptide (1)..(368): Ceres Seq. ID no. 12720532
  misc_feature (1)..(364): Pfam Name: Cytochrome P450 Pfam Description: Cytochrome P450
  misc_feature (1)..(368): Homolog of NCBI NO: 15217798 NR Description: cytochrome p450, putative; protein id: [Arabidopsis thaliana] >gi|25282571|pir||G96672 hypothetical
  misc_feature (1)..(368): Homolog of NCBI NO: 15217801 NR Description: cytochrome p450, putative; protein id: supported by cDNA: gi_14334809, supported by cDNA: gi_15293196, by cDNA: gi_15450600 [Arabidopsis thaliana]
  misc_feature (1)..(368): Homolog of NCBI NO: 15224379 NR Description: cytochrome p450, putative; protein id: [Arabidopsis thaliana] >gi|25282595|pir||E84501 probable
  misc_feature (1)..(368): Homolog of NCBI NO: 15450601 NR Description: At1g64950/F13O11_25 [Arabidopsis thaliana]
  misc_feature (1)..(368): Homolog of NCBI NO: 15217800 NR Description: cytochrome p450, putative; protein id: [Arabidopsis thaliana] >gi|25282572|pir||H96672 probable
  misc_feature (1)..(368): Homolog of NCBI NO: 15217771 NR Description: cytochrome p450, putative; protein id:
  misc_feature (1)..(368): Homolog of NCBI NO: 1432145 NR Description: cytochrome P450 [Arabidopsis thaliana]
  misc_feature (1)..(158): Homolog of NCBI NO: 9757853 NR Description: cytochrome P450-like protein [Arabidopsis
  misc_feature (189)..(366): Homolog of NCBI NO: 9757853 NR Description: cytochrome P450-like protein [Arabidopsis
  misc_feature (1)..(366): Homolog of NCBI NO: 15228566 NR Description: cytochrome p450, putative; protein id: supported by cDNA: gi_15983413 [Arabidopsis thaliana]

SEQ ID NO: 93557 - protein, 331 aa, Arabidopsis thaliana; identical to SEQ ID NO: 89801
  peptide (1)..(331): Ceres Seq. ID no. 12720533
  misc_feature (1)..(327): Pfam Name: Cytochrome P450 Pfam Description: Cytochrome P450
  misc_feature (1)..(331): Homolog of NCBI NO: 15217798 NR Description: cytochrome p450, putative; protein id: [Arabidopsis thaliana] >gi|25282571|pir||G96672 hypothetical
  misc_feature (1)..(331): Homolog of NCBI NO: 15217801 NR Description: cytochrome p450, putative; protein id: supported by cDNA: gi_14334809, supported by cDNA: gi_15293196, by cDNA: gi_15450600 [Arabidopsis thaliana]
  misc_feature (1)..(331): Homolog of NCBI NO: 15224379 NR Description: cytochrome p450, putative; protein id: [Arabidopsis thaliana] >gi|25282595|pir||E84501 probable
  misc_feature (1)..(331): Homolog of NCBI NO: 15450601 NR Description: At1g64950/F13O11_25 [Arabidopsis thaliana]
  misc_feature (1)..(331): Homolog of NCBI NO: 15217800 NR Description: cytochrome p450, putative; protein id: [Arabidopsis thaliana] >gi|25282572|pir||H96672 probable
  misc_feature (1)..(331): Homolog of NCBI NO: 15217771 NR Description: cytochrome p450, putative; protein id:
  misc_feature (1)..(331): Homolog of NCBI NO: 1432145 NR Description: cytochrome P450 [Arabidopsis thaliana]
  misc_feature (1)..(121): Homolog of NCBI NO: 9757853 NR Description: cytochrome P450-like protein [Arabidopsis
  misc_feature (152)..(329): Homolog of NCBI NO: 9757853 NR Description: cytochrome P450-like protein [Arabidopsis
  misc_feature (1)..(329): Homolog of NCBI NO: 15228566 NR Description: cytochrome p450, putative; protein id: supported by cDNA: gi_15983413 [Arabidopsis thaliana]

SEQ ID NO: 93558 - DNA, 780 bp, Arabidopsis thaliana; identical to SEQ ID NO: 89802
  misc_feature (1)..(780): Ceres Seq. ID no. 12720538
  misc_feature: MA Experiment ID: 20000180 Result: Up-regulated in Transcription
  misc_feature: MA Experiment 20000180 PARAMETER Experiment Name: At_Germinating_Seeds_P Parameter: Age (hr) Value: 24 vs. 0
  misc_feature: MA Experiment 20000180 PARAMETER Experiment Name: At_Germinating_Seeds_P Parameter: Tissue Value: Germinating Seeds
  misc_feature: MA Experiment ID: 20000495 Result: Down-regulated in Transcription
  misc_feature: MA Experiment 20000495 PARAMETER Experiment Name: At_Guard_Cells_P Parameter: Harvest Date Value: 8/2/2002
  misc_feature: MA Experiment 20000495 PARAMETER Experiment Name: At_Guard_Cells_P Parameter: Organism Value: A. thaliana
  misc_feature: MA Experiment 20000495 PARAMETER Experiment Name: At_Guard_Cells_P Parameter: Tissue Value: Guard Cells vs. Leaves
  misc_feature: MA Experiment ID: 20000527 Result: Up-regulated in Transcription
  misc_feature: MA Experiment 20000527 PARAMETER Experiment Name: At_10percent_PEG_P Parameter: Age (day) Value: 20
  misc_feature: MA Experiment 20000527 PARAMETER Experiment Name: At_10percent_PEG_P Parameter: Organism Value: A. thaliana
  misc_feature: MA Experiment 20000527 PARAMETER Experiment Name: At_10percent_PEG_P Parameter: Plant Line Value: WS
  misc_feature: MA Experiment 20000527 PARAMETER Experiment Name: At_10percent_PEG_P Parameter: Timepoint (day) Value: 20
  misc_feature: MA Experiment 20000527 PARAMETER Experiment Name: At_10percent_PEG_P Parameter: Tissue Value: Whole Plant
  misc_feature: MA Experiment 20000527 PARAMETER Experiment Name: At_10percent_PEG_P Parameter: Treatment Value: 10percent PEG vs. No Treatment
  misc_feature: MA Experiment ID: 20001247 Result: Down-regulated in Transcription
  misc_feature: MA Experiment 20001247 PARAMETER Experiment Name: At_Far-red-induction_P Parameter: Age (day) Value: 7
  misc_feature: MA Experiment 20001247 PARAMETER Experiment Name: At_Far-red-induction_P Parameter: Light Value: Far-red vs. White
  misc_feature: MA Experiment 20001247 PARAMETER Experiment Name: At_Far-red-induction_P Parameter: Organism Value: A. thaliana
  misc_feature: MA Experiment 20001247 PARAMETER Experiment Name: At_Far-red-induction_P Parameter: Plant Line Value: Columbia
  misc_feature: MA Experiment 20001247 PARAMETER Experiment Name: At_Far-red-induction_P Parameter: Timepoint (hr) Value: 1
  misc_feature: MA Experiment 20001247 PARAMETER Experiment Name: At_Far-red-induction_P Parameter: Tissue Value: Whole Plant
  misc_feature: MA Experiment ID: 20001248 Result: Down-regulated in Transcription
  misc_feature: MA Experiment 20001248 PARAMETER Experiment Name: At_Far-red-induction_P Parameter: Age (day) Value: 7
  misc_feature: MA Experiment 20001248 PARAMETER Experiment Name: At_Far-red-induction_P Parameter: Light Value: Far-red vs. White
  misc_feature: MA Experiment 20001248 PARAMETER Experiment Name: At_Far-red-induction_P Parameter: Organism Value: A. thaliana
  misc_feature: MA Experiment 20001248 PARAMETER Experiment Name: At_Far-red-induction_P Parameter: Plant Line Value: Columbia
  misc_feature: MA Experiment 20001248 PARAMETER Experiment Name: At_Far-red-induction_P Parameter: Timepoint (hr) Value: 4
  misc_feature: MA Experiment 20001248 PARAMETER Experiment Name: At_Far-red-induction_P Parameter: Tissue Value: Whole Plant
  misc_feature: MA Experiment ID: 20001450 Result: Down-regulated in Transcription
  misc_feature: MA Experiment 20001450 PARAMETER Experiment Name: At_Far-red-induction_P Parameter: Age (day) Value: 7
  misc_feature: MA Experiment 20001450 PARAMETER Experiment Name: At_Far-red-induction_P Parameter: Light Value: Far-red vs. White
  misc_feature: MA Experiment 20001450 PARAMETER Experiment Name: At_Far-red-induction_P Parameter: Organism Value: A. thaliana
  misc_feature: MA Experiment 20001450 PARAMETER Experiment Name: At_Far-red-induction_P Parameter: Plant Line Value: Columbia
  misc_feature: MA Experiment 20001450 PARAMETER Experiment Name: At_Far-red-induction_P Parameter: Timepoint (hr) Value: 8
  misc_feature: MA Experiment 20001450 PARAMETER Experiment Name: At_Far-red-induction_P Parameter: Tissue Value: Whole Plant
  misc_feature: MA Experiment ID: 20001451 Result: Down-regulated in Transcription
  misc_feature: MA Experiment 20001451 PARAMETER Experiment Name: At_Far-red-induction_P Parameter: Age (day) Value: 7
  misc_feature: MA Experiment 20001451 PARAMETER Experiment Name: At_Far-red-induction_P Parameter: Light Value: Far-red vs. White
  misc_feature: MA Experiment 20001451 PARAMETER Experiment Name: At_Far-red-induction_P Parameter: Organism Value: A. thaliana
  misc_feature: MA Experiment 20001451 PARAMETER Experiment Name: At_Far-red-induction_P Parameter: Plant Line Value: Columbia
  misc_feature: MA Experiment 20001451 PARAMETER Experiment Name: At_Far-red-induction_P Parameter: Timepoint (hr) Value: 24
  misc_feature: MA Experiment 20001451 PARAMETER Experiment Name: At_Far-red-induction_P Parameter: Tissue Value: Whole Plant
  misc_feature: MA Experiment ID: 20001555 Result: Down-regulated in Transcription
  misc_feature: MA Experiment 20001555 PARAMETER Experiment Name: At_Drought_Soil_Dry_P Parameter: Age (day) Value: 24
  misc_feature: MA Experiment 20001555 PARAMETER Experiment Name: At_Drought_Soil_Dry_P Parameter: Organism Value: A. thaliana
  misc_feature: MA Experiment 20001555 PARAMETER Experiment Name: At_Drought_Soil_Dry_P Parameter: Plant Line Value: WS
  misc_feature: MA Experiment 20001555 PARAMETER Experiment Name: At_Drought_Soil_Dry_P Parameter: Post Timepoint (hr) Value: None
  misc_feature: MA Experiment 20001555 PARAMETER Experiment Name: At_Drought_Soil_Dry_P Parameter: Post-Treatment Value: None
  misc_feature: MA Experiment 20001555 PARAMETER Experiment Name: At_Drought_Soil_Dry_P Parameter: Timepoint (day) Value: 10
  misc_feature: MA Experiment 20001555 PARAMETER Experiment Name: At_Drought_Soil_Dry_P Parameter: Treatment Value: Drought vs. No Drought

SEQ ID NO: 93559 - protein, 259 aa, Arabidopsis thaliana; identical to SEQ ID NO: 89803
  peptide (1)..(259): Ceres Seq. ID no. 12720539
  misc_feature (1)..(259): Homolog of NCBI NO: 15217806 NR Description: unknown protein; protein id: At1g64980.1
  misc_feature (23)..(256): Homolog of NCBI NO: 34903402 NR Description: hypothetical protein~similar to Oryza sativa
  misc_feature (12)..(254): Homolog of NCBI NO: 37536068 NR Description: unknown protein [Oryza sativa (japonica
  misc_feature (25)..(240): Homolog of NCBI NO: 16264294 NR Description: conserved hypothetical protein [Sinorhizobium
  misc_feature (17)..(228): Homolog of NCBI NO: 33864719 NR Description: conserved hypothetical protein [Synechococcus sp.
  misc_feature (21)..(228): Homolog of NCBI NO: 33864181 NR Description: conserved hypothetical protein [Prochlorococcus str. MIT 9313] >gi|33635765|emb|CAE22090.1| conserved
  misc_feature (134)..(201): Homolog of NCBI NO: 33864189 NR Description: conserved hypothetical protein [Prochlorococcus str. MIT 9313] >gi|33635773|emb|CAE22098.1| conserved

SEQ ID NO: 93560 - protein, 162 aa, Arabidopsis thaliana; identical to SEQ ID NO: 89804
  peptide (1)..(162): Ceres Seq. ID no. 12720540
  misc_feature (1)..(162): Homolog of NCBI NO: 15217806 NR Description: unknown protein; protein id: At1g64980.1
  misc_feature (1)..(159): Homolog of NCBI NO: 34903402 NR Description: hypothetical protein~similar to Oryza sativa
  misc_feature (1)..(157): Homolog of NCBI NO: 37536068 NR Description: unknown protein [Oryza sativa (japonica
  misc_feature (1)..(143): Homolog of NCBI NO: 16264294 NR Description: conserved hypothetical protein [Sinorhizobium
  misc_feature (1)..(131): Homolog of NCBI NO: 33864719 NR Description: conserved hypothetical protein [Synechococcus sp.
  misc_feature (1)..(131): Homolog of NCBI NO: 33864181 NR Description: conserved hypothetical protein [Prochlorococcus str. MIT 9313] >gi|33635765|emb|CAE22090.1| conserved
  misc_feature (37)..(104): Homolog of NCBI NO: 33864189 NR Description: conserved hypothetical protein [Prochlorococcus str. MIT 9313] >gi|33635773|emb|CAE22098.1| conserved

SEQ ID NO: 93561 - protein, 136 aa, Arabidopsis thaliana; identical to SEQ ID NO: 89805
  peptide (1)..(136): Ceres Seq. ID no. 12720541
  misc_feature (1)..(136): Homolog of NCBI NO: 15217806 NR Description: unknown protein; protein id: At1g64980.1
  misc_feature (1)..(133): Homolog of NCBI NO: 34903402 NR Description: hypothetical protein~similar to Oryza sativa
  misc_feature (1)..(131): Homolog of NCBI NO: 37536068 NR Description: unknown protein [Oryza sativa (japonica
  misc_feature (1)..(117): Homolog of NCBI NO: 16264294 NR Description: conserved hypothetical protein [Sinorhizobium
  misc_feature (1)..(105): Homolog of NCBI NO: 33864719 NR Description: conserved hypothetical protein [Synechococcus sp.
  misc_feature (1)..(105): Homolog of NCBI NO: 33864181 NR Description: conserved hypothetical protein [Prochlorococcus str. MIT 9313] >gi|33635765|emb|CAE22090.1| conserved
  misc_feature (11)..(78): Homolog of NCBI NO: 33864189 NR Description: conserved hypothetical protein [Prochlorococcus str. MIT 9313] >gi|33635773|emb|CAE22098.1| conserved

SEQ ID NO: 93562 - DNA, 2013 bp, Arabidopsis thaliana; identical to SEQ ID NO: 89806
  misc_feature (1)..(2013): Ceres Seq. ID no. 12720611
  misc_feature: MA Experiment ID: 20000184 Result: Down-regulated in Transcription
  misc_feature: MA Experiment 20000184 PARAMETER Experiment Name: At_Shoots__P Parameter: Age (day) Value: 7
  misc_feature: MA Experiment 20000184 PARAMETER Experiment Name: At_Shoots__P Parameter: Tissue Value: Shoots vs. Whole Plant
  misc_feature: MA Experiment ID: 20000794 Result: Up-regulated in Transcription
  misc_feature: MA Experiment 20000794 PARAMETER Experiment Name: At_Petals_P Parameter: Age (day) Value: 23-25 days
  misc_feature: MA Experiment 20000794 PARAMETER Experiment Name: At_Petals_P Parameter: Plant Line Value: WS
  misc_feature: MA Experiment 20000794 PARAMETER Experiment Name: At_Petals_P Parameter: Tissue Value: Petals vs. Whole plant

SEQ ID NO: 93563 - protein, 567 aa, Arabidopsis thaliana; identical to SEQ ID NO: 89807
  peptide (1)..(567): Ceres Seq. ID no. 12720612
  misc_feature (197)..(259): Pfam Name: IBR domain Pfam Description: IBR domain
  misc_feature (3)..(565): Homolog of NCBI NO: 38346221 NR Description: OJ990528_30.1 [Oryza sativa (japonica
  misc_feature (1)..(539): Homolog of NCBI NO: 29125028 NR Description: ARIADNE-like protein ARI7 [Arabidopsis thaliana]
  misc_feature (4)..(539): Homolog of NCBI NO: 30679494 NR Description: expressed protein [Arabidopsis thaliana] unknown protein [Arabidopsis thaliana]
  misc_feature (1)..(539): Homolog of NCBI NO: 29125025 NR Description: ARIADNE-like protein ARI5 [Arabidopsis thaliana]
  misc_feature (2)..(567): Homolog of NCBI NO: 38175567 NR Description: putative ariadne [Oryza sativa (japonica
  misc_feature (4)..(283): Homolog of NCBI NO: 25406877 NR Description: hypothetical protein [imported] - Arabidopsis
  misc_feature (314)..(539): Homolog of NCBI NO: 25406877 NR Description: hypothetical protein [imported] - Arabidopsis
  misc_feature (3)..(524): Homolog of NCBI NO: 15225136 NR Description: putative ARI-like RING zinc finger protein;
  misc_feature (6)..(535): Homolog of NCBI NO: 15225137 NR Description: similar to Ariadne protein from Drosophila; id: At2g31780.1 [Arabidopsis thaliana] >gi|25408184|pir||A84725
  misc_feature (279)..(539): Homolog of NCBI NO: 30684981 NR Description: RING zinc finger protein -related [Arabidopsis

SEQ ID NO: 93564 - protein, 382 aa, Arabidopsis thaliana; identical to SEQ ID NO: 89808
  peptide (1)..(382): Ceres Seq. ID no. 12720613
  misc_feature (12)..(74): Pfam Name: IBR domain Pfam Description: IBR domain
  misc_feature (1)..(380): Homolog of NCBI NO: 38346221 NR Description: OJ990528_30.1 [Oryza sativa (japonica
  misc_feature (1)..(354): Homolog of NCBI NO: 29125028 NR Description: ARIADNE-like protein ARI7 [Arabidopsis thaliana]
  misc_feature (1)..(354): Homolog of NCBI NO: 30679494 NR Description: expressed protein [Arabidopsis thaliana] unknown protein [Arabidopsis thaliana]
  misc_feature (1)..(354): Homolog of NCBI NO: 29125025 NR Description: ARIADNE-like protein ARI5 [Arabidopsis thaliana]
  misc_feature (1)..(382): Homolog of NCBI NO: 38175567 NR Description: putative ariadne [Oryza sativa (japonica
  misc_feature (1)..(98): Homolog of NCBI NO: 25406877 NR Description: hypothetical protein [imported] - Arabidopsis
  misc_feature (129)..(354): Homolog of NCBI NO: 25406877 NR Description: hypothetical protein [imported] - Arabidopsis
  misc_feature (1)..(339): Homolog of NCBI NO: 15225136 NR Description: putative ARI-like RING zinc finger protein;
  misc_feature (1)..(350): Homolog of NCBI NO: 15225137 NR Description: similar to Ariadne protein from Drosophila; id: At2g31780.1 [Arabidopsis thaliana] >gi|25408184|pir||A84725
  misc_feature (94)..(354): Homolog of NCBI NO: 30684981 NR Description: RING zinc finger protein -related [Arabidopsis

SEQ ID NO: 93565 - protein, 292 aa, Arabidopsis thaliana; identical to SEQ ID NO: 89809
  peptide (1)..(292): Ceres Seq. ID no. 12720614
  misc_feature (1)..(290): Homolog of NCBI NO: 38346221 NR Description: OJ990528_30.1 [Oryza sativa (japonica
  misc_feature (1)..(264): Homolog of NCBI NO: 29125028 NR Description: ARIADNE-like protein ARI7 [Arabidopsis thaliana]
  misc_feature (1)..(264): Homolog of NCBI NO: 30679494 NR Description: expressed protein [Arabidopsis thaliana] unknown protein [Arabidopsis thaliana]
  misc_feature (1)..(264): Homolog of NCBI NO: 29125025 NR Description: ARIADNE-like protein ARI5 [Arabidopsis thaliana]
  misc_feature (1)..(292): Homolog of NCBI NO: 38175567 NR Description: putative ariadne [Oryza sativa (japonica
  misc_feature (39)..(264): Homolog of NCBI NO: 25406877 NR Description: hypothetical protein [imported] - Arabidopsis
  misc_feature (1)..(249): Homolog of NCBI NO: 15225136 NR Description: putative ARI-like RING zinc finger protein;
  misc_feature (1)..(260): Homolog of NCBI NO: 15225137 NR Description: similar to Ariadne protein from Drosophila; id: At2g31780.1 [Arabidopsis thaliana] >gi|25408184|pir||A84725
  misc_feature (4)..(264): Homolog of NCBI NO: 30684981 NR Description: RING zinc finger protein -related [Arabidopsis
  misc_feature (4)..(260): Homolog of NCBI NO: 25408165 NR Description: probable RING zinc finger protein [imported] - thaliana >gi|4582446|gb|AAD24830.1| putative RING zinc finger

SEQ ID NO: 93566 - DNA, 2328 bp, Arabidopsis thaliana; identical to SEQ ID NO: 89810
  misc_feature (1)..(2328): Ceres Seq. ID no. 12720642
  misc_feature: MA Experiment ID: 20000182 Result: Down-regulated in Transcription
  misc_feature: MA Experiment 20000182 PARAMETER Experiment Name: At_2mM_SA_P Parameter: Age (day) Value: 14
  misc_feature: MA Experiment 20000182 PARAMETER Experiment Name: At_2mM_SA_P Parameter: Organism Value: A. thaliana
  misc_feature: MA Experiment 20000182 PARAMETER Experiment Name: At_2mM_SA_P Parameter: Plant Line Value: WS
  misc_feature: MA Experiment 20000182 PARAMETER Experiment Name: At_2mM_SA_P Parameter: Timepoint (hr) Value: 6
  misc_feature: MA Experiment 20000182 PARAMETER Experiment Name: At_2mM_SA_P Parameter: Tissue Value: Aerial
  misc_feature: MA Experiment 20000182 PARAMETER Experiment Name: At_2mM_SA_P Parameter: Treatment Value: 2mM SA vs. No Treatment
  misc_feature: MA Experiment ID: 20000184 Result: Up-regulated in Transcription
  misc_feature: MA Experiment 20000184 PARAMETER Experiment Name: At_Shoots__P Parameter: Age (day) Value: 7
  misc_feature: MA Experiment 20000184 PARAMETER Experiment Name: At_Shoots__P Parameter: Tissue Value: Shoots vs. Whole Plant
  misc_feature: MA Experiment ID: 20000286 Result: Up-regulated in Transcription
  misc_feature: MA Experiment 20000286 PARAMETER Experiment Name: At_Open_Flower_P Parameter: Age (day) Value: 21
  misc_feature: MA Experiment 20000286 PARAMETER Experiment Name: At_Open_Flower_P Parameter: Plant Line Value: WS
  misc_feature: MA Experiment 20000286 PARAMETER Experiment Name: At_Open_Flower_P Parameter: Tissue Value: Half Open vs. Whole Plant
  misc_feature: MA Experiment ID: 20000436 Result: Down-regulated in Transcription
  misc_feature: MA Experiment 20000436 PARAMETER Experiment Name: At_Drought_P Parameter: Age (day) Value: 7
  misc_feature: MA Experiment 20000436 PARAMETER Experiment Name: At_Drought_P Parameter: Organism Value: A. thaliana
  misc_feature: MA Experiment 20000436 PARAMETER Experiment Name: At_Drought_P Parameter: Plant Line Value: WS
  misc_feature: MA Experiment 20000436 PARAMETER Experiment Name: At_Drought_P Parameter: Timepoint (hr) Value: 12
  misc_feature: MA Experiment 20000436 PARAMETER Experiment Name: At_Drought_P Parameter: Tissue Value: Whole Plant
  misc_feature: MA Experiment 20000436 PARAMETER Experiment Name: At_Drought_P Parameter: Treatment Value: Drought vs. No Drought
  misc_feature: MA Experiment ID: 20000437 Result: Down-regulated in Transcription
  misc_feature: MA Experiment 20000437 PARAMETER Experiment Name: At_Drought_P Parameter: Age (day) Value: 8
  misc_feature: MA Experiment 20000437 PARAMETER Experiment Name: At_Drought_P Parameter: Organism Value: A. thaliana
  misc_feature: MA Experiment 20000437 PARAMETER Experiment Name: At_Drought_P Parameter: Plant Line Value: WS
  misc_feature: MA Experiment 20000437 PARAMETER Experiment Name: At_Drought_P Parameter: Timepoint (hr) Value: 24
  misc_feature: MA Experiment 20000437 PARAMETER Experiment Name: At_Drought_P Parameter: Tissue Value: Whole Plant
  misc_feature: MA Experiment 20000437 PARAMETER Experiment Name: At_Drought_P Parameter: Treatment Value: Drought vs. No Drought
  misc_feature: MA Experiment ID: 20000438 Result: Up-regulated in Transcription
  misc_feature: MA Experiment 20000438 PARAMETER Experiment Name: At_Shoots__P Parameter: Age (day) Value: 14
  misc_feature: MA Experiment 20000438 PARAMETER Experiment Name: At_Shoots__P Parameter: Tissue Value: Shoots vs. Whole Plant
  misc_feature: MA Experiment ID: 20000794 Result: Up-regulated in Transcription
  misc_feature: MA Experiment 20000794 PARAMETER Experiment Name: At_Petals_P Parameter: Age (day) Value: 23-25 days
  misc_feature: MA Experiment 20000794 PARAMETER Experiment Name: At_Petals_P Parameter: Plant Line Value: WS
  misc_feature: MA Experiment 20000794 PARAMETER Experiment Name: At_Petals_P Parameter: Tissue Value: Petals vs. Whole plant

SEQ ID NO: 93567 - protein, 775 aa, Arabidopsis thaliana; identical to SEQ ID NO: 89811
  peptide (1)..(775): Ceres Seq. ID no. 12720643
  misc_feature (520)..(666): Pfam Name: Protein kinase domain Pfam Description: Protein kinase domain
  misc_feature (6)..(775): Homolog of NCBI NO: 15225044 NR Description: putative protein kinase; protein id: At2g39180.1 thaliana] >gi|7487054|pir||T02584 probable protein kinase
  misc_feature (10)..(666): Homolog of NCBI NO: 15721862 NR Description: CR4 [Oryza sativa]
  misc_feature (675)..(766): Homolog of NCBI NO: 15721862 NR Description: CR4 [Oryza sativa]
  misc_feature (14)..(666): Homolog of NCBI NO: 3913366 NR Description: Putative receptor protein kinase CRINKLY4
  misc_feature (675)..(767): Homolog of NCBI NO: 3913366 NR Description: Putative receptor protein kinase CRINKLY4
  misc_feature (2)..(666): Homolog of NCBI NO: 15231681 NR Description: putative protein; protein id: At3g59420.1, by cDNA: gi_20302589 [Arabidopsis thaliana]
  misc_feature (675)..(766): Homolog of NCBI NO: 15231681 NR Description: putative protein; protein id: At3g59420.1, by cDNA: gi_20302589 [Arabidopsis thaliana]
  misc_feature (73)..(666): Homolog of NCBI NO: 15238823 NR Description: receptor kinase-like protein; protein id:
  misc_feature (673)..(766): Homolog of NCBI NO: 15238823 NR Description: receptor kinase-like protein; protein id:
  misc_feature (10)..(344): Homolog of NCBI NO: 15228781 NR Description: receptor kinase - like protein; protein id:

SEQ ID NO: 93568 - protein, 690 aa, Arabidopsis thaliana; identical to SEQ ID NO: 89812
  peptide (1)..(690): Ceres Seq. ID no. 12720644
  misc_feature (435)..(581): Pfam Name: Protein kinase domain Pfam Description: Protein kinase domain
  misc_feature (1)..(690): Homolog of NCBI NO: 15225044 NR Description: putative protein kinase; protein id: At2g39180.1 thaliana] >gi|7487054|pir||T02584 probable protein kinase
  misc_feature (1)..(581): Homolog of NCBI NO: 15721862 NR Description: CR4 [Oryza sativa]
  misc_feature (590)..(681): Homolog of NCBI NO: 15721862 NR Description: CR4 [Oryza sativa]
  misc_feature (1)..(581): Homolog of NCBI NO: 3913366 NR Description: Putative receptor protein kinase CRINKLY4
  misc_feature (590)..(682): Homolog of NCBI NO: 3913366 NR Description: Putative receptor protein kinase CRINKLY4
  misc_feature (1)..(581): Homolog of NCBI NO: 15231681 NR Description: putative protein; protein id: At3g59420.1, by cDNA: gi_20302589 [Arabidopsis thaliana]
  misc_feature (590)..(681): Homolog of NCBI NO: 15231681 NR Description: putative protein; protein id: At3g59420.1, by cDNA: gi_20302589 [Arabidopsis thaliana]
  misc_feature (1)..(581): Homolog of NCBI NO: 15238823 NR Description: receptor kinase-like protein; protein id:
  misc_feature (588)..(681): Homolog of NCBI NO: 15238823 NR Description: receptor kinase-like protein; protein id:
  misc_feature (1)..(259): Homolog of NCBI NO: 15228781 NR Description: receptor kinase - like protein; protein id:

SEQ ID NO: 93569 - protein, 658 aa, Arabidopsis thaliana; identical to SEQ ID NO: 89813
  peptide (1)..(658): Ceres Seq. ID no. 12720645
  misc_feature (403)..(549): Pfam Name: Protein kinase domain Pfam Description: Protein kinase domain
  misc_feature (1)..(658): Homolog of NCBI NO: 15225044 NR Description: putative protein kinase; protein id: At2g39180.1 thaliana] >gi|7487054|pir||T02584 probable protein kinase
  misc_feature (1)..(549): Homolog of NCBI NO: 15721862 NR Description: CR4 [Oryza sativa]
  misc_feature (558)..(649): Homolog of NCBI NO: 15721862 NR Description: CR4 [Oryza sativa]
  misc_feature (1)..(549): Homolog of NCBI NO: 3913366 NR Description: Putative receptor protein kinase CRINKLY4
  misc_feature (558)..(650): Homolog of NCBI NO: 3913366 NR Description: Putative receptor protein kinase CRINKLY4
  misc_feature (1)..(549): Homolog of NCBI NO: 15231681 NR Description: putative protein; protein id: At3g59420.1, by cDNA: gi_20302589 [Arabidopsis thaliana]
  misc_feature (558)..(649): Homolog of NCBI NO: 15231681 NR Description: putative protein; protein id: At3g59420.1, by cDNA: gi_20302589 [Arabidopsis thaliana]
  misc_feature (1)..(549): Homolog of NCBI NO: 15238823 NR Description: receptor kinase-like protein; protein id:
  misc_feature (556)..(649): Homolog of NCBI NO: 15238823 NR Description: receptor kinase-like protein; protein id:
  misc_feature (1)..(227): Homolog of NCBI NO: 15228781 NR Description: receptor kinase - like protein; protein id:

SEQ ID NO: 93570 - DNA, 1911 bp, Arabidopsis thaliana; identical to SEQ ID NO: 89814
  misc_feature (1)..(1911): Ceres Seq. ID no. 12720656
  misc_feature: MA Experiment ID: 20000185 Result: Down-regulated in Transcription
  misc_feature: MA Experiment 20000185 PARAMETER Experiment Name: At_Roots__P Parameter: Age (day) Value: 7 vs. 21
  misc_feature: MA Experiment 20000185 PARAMETER Experiment Name: At_Roots__P Parameter: Organism Value: A. thaliana
  misc_feature: MA Experiment 20000185 PARAMETER Experiment Name: At_Roots__P Parameter: Tissue Value: Roots vs. Whole Plant
  misc_feature: MA Experiment ID: 20000213 Result: Up-regulated in Transcription
  misc_feature: MA Experiment 20000213 PARAMETER Experiment Name: At_4deg_Cold_P Parameter: Timepoint (hr) Value: 2
  misc_feature: MA Experiment ID: 20000438 Result: Down-regulated in Transcription
  misc_feature: MA Experiment 20000438 PARAMETER Experiment Name: At_Shoots__P Parameter: Age (day) Value: 14
  misc_feature: MA Experiment 20000438 PARAMETER Experiment Name: At_Shoots__P Parameter: Tissue Value: Shoots vs. Whole Plant
  misc_feature: MA Experiment ID: 20001247 Result: Down-regulated in Transcription
  misc_feature: MA Experiment 20001247 PARAMETER Experiment Name: At_Far-red-induction_P Parameter: Age (day) Value: 7
  misc_feature: MA Experiment 20001247 PARAMETER Experiment Name: At_Far-red-induction_P Parameter: Light Value: Far-red vs. White
  misc_feature: MA Experiment 20001247 PARAMETER Experiment Name: At_Far-red-induction_P Parameter: Organism Value: A. thaliana
  misc_feature: MA Experiment 20001247 PARAMETER Experiment Name: At_Far-red-induction_P Parameter: Plant Line Value: Columbia
  misc_feature: MA Experiment 20001247 PARAMETER Experiment Name: At_Far-red-induction_P Parameter: Timepoint (hr) Value: 1
  misc_feature: MA Experiment 20001247 PARAMETER Experiment Name: At_Far-red-induction_P Parameter: Tissue Value: Whole Plant
  misc_feature: MA Experiment ID: 20001248 Result: Up-regulated in Transcription
  misc_feature: MA Experiment 20001248 PARAMETER Experiment Name: At_Far-red-induction_P Parameter: Age (day) Value: 7
  misc_feature: MA Experiment 20001248 PARAMETER Experiment Name: At_Far-red-induction_P Parameter: Light Value: Far-red vs. White
  misc_feature: MA Experiment 20001248 PARAMETER Experiment Name: At_Far-red-induction_P Parameter: Organism Value: A. thaliana
  misc_feature: MA Experiment 20001248 PARAMETER Experiment Name: At_Far-red-induction_P Parameter: Plant Line Value: Columbia
  misc_feature: MA Experiment 20001248 PARAMETER Experiment Name: At_Far-red-induction_P Parameter: Timepoint (hr) Value: 4
  misc_feature: MA Experiment 20001248 PARAMETER Experiment Name: At_Far-red-induction_P Parameter: Tissue Value: Whole Plant
  misc_feature: MA Experiment ID: 20001458 Result: Up-regulated in Transcription
  misc_feature: MA Experiment 20001458 PARAMETER Experiment Name: At_50mM_NH4NO3_L-to-H_P Parameter: Age (day) Value: Undefined
  misc_feature: MA Experiment 20001458 PARAMETER Experiment Name: At_50mM_NH4NO3_L-to-H_P Parameter: Organism Value: Undefined
  misc_feature: MA Experiment 20001458 PARAMETER Experiment Name: At_50mM_NH4NO3_L-to-H_P Parameter: Plant Line Value: Undefined
  misc_feature: MA Experiment 20001458 PARAMETER Experiment Name: At_50mM_NH4NO3_L-to-H_P Parameter: Timepoint (hr) Value: 2
  misc_feature: MA Experiment 20001458 PARAMETER Experiment Name: At_50mM_NH4NO3_L-to-H_P Parameter: Tissue Value: Siliques
  misc_feature: MA Experiment 20001458 PARAMETER Experiment Name: At_50mM_NH4NO3_L-to-H_P Parameter: Treatment Value: 50mM NH4NO3 vs. 100mM Manitol
  misc_feature: MA Experiment ID: 20001459 Result: Down-regulated in Transcription
  misc_feature: MA Experiment 20001459 PARAMETER Experiment Name: At_50mM_NH4NO3_L-to-H_P Parameter: Age (day) Value: Undefined
  misc_feature: MA Experiment 20001459 PARAMETER Experiment Name: At_50mM_NH4NO3_L-to-H_P Parameter: Organism Value: Undefined
  misc_feature: MA Experiment 20001459 PARAMETER Experiment Name: At_50mM_NH4NO3_L-to-H_P Parameter: Plant Line Value: Undefined
  misc_feature: MA Experiment 20001459 PARAMETER Experiment Name: At_50mM_NH4NO3_L-to-H_P Parameter: Timepoint (hr) Value: 4
  misc_feature: MA Experiment 20001459 PARAMETER Experiment Name: At_50mM_NH4NO3_L-to-H_P Parameter: Tissue Value: Siliques
  misc_feature: MA Experiment 20001459 PARAMETER Experiment Name: At_50mM_NH4NO3_L-to-H_P Parameter: Treatment Value: 50mM NH4NO3 vs. 100mM Manitol

SEQ ID NO: 93571 - protein, 418 aa, Arabidopsis thaliana; identical to SEQ ID NO: 89815
  peptide (1)..(418): Ceres Seq. ID no. 12720657
  misc_feature (1)..(418): Homolog of NCBI NO: 15232764 NR Description: putative protein kinase; protein id: At3g09830.1, by cDNA: gi_20268726 [Arabidopsis thaliana] putative protein kinase [Arabidopsis thaliana]
  misc_feature (1)..(418): Homolog of NCBI NO: 15242720 NR Description: putative protein; protein id: At5g03320.1
  misc_feature (1)..(392): Homolog of NCBI NO: 30687780 NR Description: protein kinase, putative [Arabidopsis thaliana]
  misc_feature (1)..(392): Homolog of NCBI NO: 28416693 NR Description: At2g39110 [Arabidopsis thaliana]
  misc_feature (1)..(392): Homolog of NCBI NO: 25287613 NR Description: probable protein kinase [imported] - Arabidopsis >gi|3928095|gb|AAC79621.1| putative protein kinase [Arabidopsis
  misc_feature (1)..(416): Homolog of NCBI NO: 7248457 NR Description: protein serine/threonine kinase [Lophopyrum >gi|13022177|gb|AAK11674.1|AF339747_1 protein kinase [Lophopyrum
  misc_feature (1)..(416): Homolog of NCBI NO: 37534774 NR Description: putative serine/threonine kinase [Oryza sativa
  misc_feature (67)..(378): Homolog of NCBI NO: 7488278 NR Description: probable protein kinase [imported] - Arabidopsis >gi|3461836|gb|AAC33222.1| putative protein kinase [Arabidopsis >gi|20197438|gb|AAM15076.1| putative protein kinase [Arabidopsis
  misc_feature (125)..(378): Homolog of NCBI NO: 30684071 NR Description: protein kinase family [Arabidopsis thaliana]
  misc_feature (22)..(404): Homolog of NCBI NO: 15242204 NR Description: serine/threonine specific protein kinase -like; id: At5g15080.1, supported by cDNA: gi_17064887 [Arabidopsis

SEQ ID NO: 93572 - protein, 366 aa, Arabidopsis thaliana; identical to SEQ ID NO: 89816
  peptide (1)..(366): Ceres Seq. ID no. 12720658
  misc_feature (1)..(366): Homolog of NCBI NO: 15232764 NR Description: putative protein kinase; protein id: At3g09830.1, by cDNA: gi_20268726 [Arabidopsis thaliana] putative protein kinase [Arabidopsis thaliana]
  misc_feature (1)..(366): Homolog of NCBI NO: 15242720 NR Description: putative protein; protein id: At5g03320.1
  misc_feature (1)..(340): Homolog of NCBI NO: 30687780 NR Description: protein kinase, putative [Arabidopsis thaliana]
  misc_feature (1)..(340): Homolog of NCBI NO: 28416693 NR Description: At2g39110 [Arabidopsis thaliana]
  misc_feature (1)..(340): Homolog of NCBI NO: 25287613 NR Description: probable protein kinase [imported] - Arabidopsis >gi|3928095|gb|AAC79621.1| putative protein kinase [Arabidopsis
  misc_feature (1)..(364): Homolog of NCBI NO: 7248457 NR Description: protein serine/threonine kinase [Lophopyrum >gi|13022177|gb|AAK11674.1|AF339747_1 protein kinase [Lophopyrum
  misc_feature (1)..(364): Homolog of NCBI NO: 37534774 NR Description: putative serine/threonine kinase [Oryza sativa
  misc_feature (15)..(326): Homolog of NCBI NO: 7488278 NR Description: probable protein kinase [imported] - Arabidopsis >gi|3461836|gb|AAC33222.1| putative protein kinase [Arabidopsis >gi|20197438|gb|AAM15076.1| putative protein kinase [Arabidopsis
  misc_feature (73)..(326): Homolog of NCBI NO: 30684071 NR Description: protein kinase family [Arabidopsis thaliana]
  misc_feature (1)..(352): Homolog of NCBI NO: 15242204 NR Description: serine/threonine specific protein kinase -like; id: At5g15080.1, supported by cDNA: gi_17064887 [Arabidopsis

SEQ ID NO: 93573 - protein, 330 aa, Arabidopsis thaliana; identical to SEQ ID NO: 89817
  peptide (1)..(330): Ceres Seq. ID no. 12720659
  misc_feature (1)..(330): Homolog of NCBI NO: 15232764 NR Description: putative protein kinase; protein id: At3g09830.1, by cDNA: gi_20268726 [Arabidopsis thaliana] putative protein kinase [Arabidopsis thaliana]
  misc_feature (1)..(330): Homolog of NCBI NO: 15242720 NR Description: putative protein; protein id: At5g03320.1
  misc_feature (1)..(304): Homolog of NCBI NO: 30687780 NR Description: protein kinase, putative [Arabidopsis thaliana]
  misc_feature (1)..(304): Homolog of NCBI NO: 28416693 NR Description: At2g39110 [Arabidopsis thaliana]
  misc_feature (1)..(304): Homolog of NCBI NO: 25287613 NR Description: probable protein kinase [imported] - Arabidopsis >gi|3928095|gb|AAC79621.1| putative protein kinase [Arabidopsis
  misc_feature (1)..(328): Homolog of NCBI NO: 7248457 NR Description: protein serine/threonine kinase [Lophopyrum >gi|13022177|gb|AAK11674.1|AF339747_1 protein kinase [Lophopyrum
  misc_feature (1)..(328): Homolog of NCBI NO: 37534774 NR Description: putative serine/threonine kinase [Oryza sativa
  misc_feature (1)..(290): Homolog of NCBI NO: 7488278 NR Description: probable protein kinase [imported] - Arabidopsis >gi|3461836|gb|AAC33222.1| putative protein kinase [Arabidopsis >gi|20197438|gb|AAM15076.1| putative protein kinase [Arabidopsis
  misc_feature (37)..(290): Homolog of NCBI NO: 30684071 NR Description: protein kinase family [Arabidopsis thaliana]
  misc_feature (1)..(316): Homolog of NCBI NO: 15242204 NR Description: serine/threonine specific protein kinase -like; id: At5g15080.1, supported by cDNA: gi_17064887 [Arabidopsis

SEQ ID NO: 93574 - DNA, 618 bp, Arabidopsis thaliana; identical to SEQ ID NO: 89818
  misc_feature (1)..(618): Ceres Seq. ID no. 12720660
  misc_feature: MA Experiment ID: 20000306 Result: Up-regulated in Transcription
  misc_feature: MA Experiment 20000306 PARAMETER Experiment Name: At_Germinating_Seeds_Sub_P Parameter: Age (hr) Value: 6 vs. 0
  misc_feature: MA Experiment 20000306 PARAMETER Experiment Name: At_Germinating_Seeds_Sub_P Parameter: Organism Value: A. thaliana
  misc_feature: MA Experiment 20000306 PARAMETER Experiment Name: At_Germinating_Seeds_Sub_P Parameter: Plant Line Value: WS
  misc_feature: MA Experiment 20000306 PARAMETER Experiment Name: At_Germinating_Seeds_Sub_P Parameter: Tissue Value: Germinating Seeds
  misc_feature: MA Experiment ID: 20000307 Result: Up-regulated in Transcription
  misc_feature: MA Experiment 20000307 PARAMETER Experiment Name: At_Germinating_Seeds_Sub_P Parameter: Age (hr) Value: 24 vs. 0
  misc_feature: MA Experiment 20000307 PARAMETER Experiment Name: At_Germinating_Seeds_Sub_P Parameter: Organism Value: A. thaliana
  misc_feature: MA Experiment 20000307 PARAMETER Experiment Name: At_Germinating_Seeds_Sub_P Parameter: Plant Line Value: WS
  misc_feature: MA Experiment 20000307 PARAMETER Experiment Name: At_Germinating_Seeds_Sub_P Parameter: Tissue Value: Germinating Seeds
  misc_feature: MA Experiment ID: 20000315 Result: Down-regulated in Transcription
  misc_feature: MA Experiment 20000315 PARAMETER Experiment Name: At_14day_Shoots-Roots_Sub_P Parameter: Age (day) Value: 14
  misc_feature: MA Experiment 20000315 PARAMETER Experiment Name: At_14day_Shoots-Roots_Sub_P Parameter: Organism Value: A. thaliana
  misc_feature: MA Experiment 20000315 PARAMETER Experiment Name: At_14day_Shoots-Roots_Sub_P Parameter: Plant Line Value: WS
  misc_feature: MA Experiment 20000315 PARAMETER Experiment Name: At_14day_Shoots-Roots_Sub_P Parameter: Tissue Value: Shoots vs. Whole Plant
  misc_feature: MA Experiment ID: 20000328 Result: Down-regulated in Transcription
  misc_feature: MA Experiment 20000328 PARAMETER Experiment Name: At_42deg_Heat_Sub_P Parameter: Age (day) Value: 14
  misc_feature: MA Experiment 20000328 PARAMETER Experiment Name: At_42deg_Heat_Sub_P Parameter: Organism Value: A. thaliana
  misc_feature: MA Experiment 20000328 PARAMETER Experiment Name: At_42deg_Heat_Sub_P Parameter: Plant Line Value: WS
  misc_feature: MA Experiment 20000328 PARAMETER Experiment Name: At_42deg_Heat_Sub_P Parameter: Temperature (deg C) Value: 42 vs. 22
  misc_feature: MA Experiment 20000328 PARAMETER Experiment Name: At_42deg_Heat_Sub_P Parameter: Timepoint (hr) Value: 6
  misc_feature: MA Experiment 20000328 PARAMETER Experiment Name: At_42deg_Heat_Sub_P Parameter: Tissue Value: Aerial
  misc_feature: MA Experiment ID: 20000352 Result: Up-regulated in Transcription
  misc_feature: MA Experiment 20000352 PARAMETER Experiment Name: At_Drought_Sub_P Parameter: Age (day) Value: 7
  misc_feature: MA Experiment 20000352 PARAMETER Experiment Name: At_Drought_Sub_P Parameter: Organism Value: A. thaliana
  misc_feature: MA Experiment 20000352 PARAMETER Experiment Name: At_Drought_Sub_P Parameter: Plant Line Value: WS
  misc_feature: MA Experiment 20000352 PARAMETER Experiment Name: At_Drought_Sub_P Parameter: Timepoint (hr) Value: 6
  misc_feature: MA Experiment 20000352 PARAMETER Experiment Name: At_Drought_Sub_P Parameter: Tissue Value: Whole Plant
  misc_feature: MA Experiment 20000352 PARAMETER Experiment Name: At_Drought_Sub_P Parameter: Treatment Value: Drought vs. No Drought
  misc_feature: MA Experiment ID: 20000355 Result: Up-regulated in Transcription
  misc_feature: MA Experiment 20000355 PARAMETER Experiment Name: At_Siliques_Sub_P Parameter: Age (day) Value: 21
  misc_feature: MA Experiment 20000355 PARAMETER Experiment Name: At_Siliques_Sub_P Parameter: Organism Value: A. thaliana
  misc_feature: MA Experiment 20000355 PARAMETER Experiment Name: At_Siliques_Sub_P Parameter: Plant Line Value: WS
  misc_feature: MA Experiment 20000355 PARAMETER Experiment Name: At_Siliques_Sub_P Parameter: Tissue Value: Less Than 5mm Siliques vs. Whole Plant
  misc_feature: MA Experiment ID: 20000440 Result: Up-regulated in Transcription
  misc_feature: MA Experiment 20000440 PARAMETER Experiment Name: At_Closed-Flower__Sub_P Parameter: Tissue Value: Closed Flower vs. Whole Plant

SEQ ID NO: 93575 - protein, 205 aa, Arabidopsis thaliana; identical to SEQ ID NO: 89819
  peptide (1)..(205): Ceres Seq. ID no. 12720661
  misc_feature (15)..(177): Pfam Name: Ras family Pfam Description: Ras family
  misc_feature (1)..(205): Homolog of NCBI NO: 15232785 NR Description: GTP-binding protein, putative; protein id:
  misc_feature (1)..(204): Homolog of NCBI NO: 18414255 NR Description: putative protein; protein id: At5g03530.1,
  misc_feature (1)..(204): Homolog of NCBI NO: 1370172 NR Description: RAB1X [Lotus japonicus]
  misc_feature (3)..(203): Homolog of NCBI NO: 15451614 NR Description: Putative GTP-binding protein [Oryza sativa]
  misc_feature (1)..(191): Homolog of NCBI NO: 15218575 NR Description: GTP-binding protein(RAB1Y), putative; protein id: supported by cDNA: 2898., supported by cDNA: gi_17104730, by cDNA: gi_2231311 [Arabidopsis thaliana]
  misc_feature (2)..(203): Homolog of NCBI NO: 37534998 NR Description: putative GTP-binding protein [Oryza sativa
  misc_feature (69)..(191): Homolog of NCBI NO: 25294118 NR Description: protein F9C16.3 [imported] - Arabidopsis thaliana
  misc_feature (1)..(68): Homolog of NCBI NO: 25294118 NR Description: protein F9C16.3 [imported] - Arabidopsis thaliana
  misc_feature (3)..(203): Homolog of NCBI NO: 1370174 NR Description: RAB1Y [Lotus japonicus]
  misc_feature (13)..(203): Homolog of NCBI NO: 27687387 NR Description: similar to RAB18, member RAS oncogene family [Mus

SEQ ID NO: 93576 - protein, 152 aa, Arabidopsis thaliana; identical to SEQ ID NO: 89820
  peptide (1)..(152): Ceres Seq. ID no. 12720662
  misc_feature (1)..(124): Pfam Name: Ras family Pfam Description: Ras family
  misc_feature (1)..(152): Homolog of NCBI NO: 15232785 NR Description: GTP-binding protein, putative; protein id:
  misc_feature (1)..(151): Homolog of NCBI NO: 18414255 NR Description: putative protein; protein id: At5g03530.1,
  misc_feature (1)..(151): Homolog of NCBI NO: 1370172 NR Description: RAB1X [Lotus japonicus]
  misc_feature (1)..(150): Homolog of NCBI NO: 15451614 NR Description: Putative GTP-binding protein [Oryza sativa]
  misc_feature (1)..(138): Homolog of NCBI NO: 15218575 NR Description: GTP-binding protein(RAB1Y), putative; protein id: supported by cDNA: 2898., supported by cDNA: gi_17104730, by cDNA: gi_2231311 [Arabidopsis thaliana]
  misc_feature (1)..(150): Homolog of NCBI NO: 37534998 NR Description: putative GTP-binding protein [Oryza sativa
  misc_feature (16)..(138): Homolog of NCBI NO: 25294118 NR Description: protein F9C16.3 [imported] - Arabidopsis thaliana
  misc_feature (1)..(15): Homolog of NCBI NO: 25294118 NR Description: protein F9C16.3 [imported] - Arabidopsis thaliana
  misc_feature (1)..(150): Homolog of NCBI NO: 1370174 NR Description: RAB1Y [Lotus japonicus]
  misc_feature (1)..(150): Homolog of NCBI NO: 27687387 NR Description: similar to RAB18, member RAS oncogene family [Mus

SEQ ID NO: 93577 - DNA, 1657 bp, Arabidopsis thaliana; identical to SEQ ID NO: 89821
  misc_feature (1)..(1657): Ceres Seq. ID no. 12720690
  misc_feature: MA Experiment ID: 20000173 Result: Up-regulated in Transcription
  misc_feature: MA Experiment 20000173 PARAMETER Experiment Name: At_42deg_Heat_P Parameter: Age (day) Value: 14
  misc_feature: MA Experiment 20000173 PARAMETER Experiment Name: At_42deg_Heat_P Parameter: Organism Value: A. thaliana
  misc_feature: MA Experiment 20000173 PARAMETER Experiment Name: At_42deg_Heat_P Parameter: Plant Line Value: WS
  misc_feature: MA Experiment 20000173 PARAMETER Experiment Name: At_42deg_Heat_P Parameter: Temperature (deg C) Value: 42 vs. 22
  misc_feature: MA Experiment 20000173 PARAMETER Experiment Name: At_42deg_Heat_P Parameter: Timepoint (hr) Value: 6
  misc_feature: MA Experiment 20000173 PARAMETER Experiment Name: At_42deg_Heat_P Parameter: Tissue Value: Aerial
  misc_feature: MA Experiment ID: 20000179 Result: Up-regulated in Transcription
  misc_feature: MA Experiment 20000179 PARAMETER Experiment Name: At_Germinating_Seeds_P Parameter: Age (hr) Value: 6 vs. 0
  misc_feature: MA Experiment 20000179 PARAMETER Experiment Name: At_Germinating_Seeds_P Parameter: Tissue Value: Germinating Seeds
  misc_feature: MA Experiment ID: 20000182 Result: Down-regulated in Transcription
  misc_feature: MA Experiment 20000182 PARAMETER Experiment Name: At_2mM_SA_P Parameter: Age (day) Value: 14
  misc_feature: MA Experiment 20000182 PARAMETER Experiment Name: At_2mM_SA_P Parameter: Organism Value: A. thaliana
  misc_feature: MA Experiment 20000182 PARAMETER Experiment Name: At_2mM_SA_P Parameter: Plant Line Value: WS
  misc_feature: MA Experiment 20000182 PARAMETER Experiment Name: At_2mM_SA_P Parameter: Timepoint (hr) Value: 6
  misc_feature: MA Experiment 20000182 PARAMETER Experiment Name: At_2mM_SA_P Parameter: Tissue Value: Aerial
  misc_feature: MA Experiment 20000182 PARAMETER Experiment Name: At_2mM_SA_P Parameter: Treatment Value: 2mM SA vs. No Treatment
  misc_feature: MA Experiment ID: 20000264 Result: Up-regulated in Transcription
  misc_feature: MA Experiment 20000264 PARAMETER Experiment Name: At_Open_Flower_P Parameter: Age (day) Value: 21
  misc_feature: MA Experiment 20000264 PARAMETER Experiment Name: At_Open_Flower_P Parameter: Plant Line Value: WS
  misc_feature: MA Experiment 20000264 PARAMETER Experiment Name: At_Open_Flower_P Parameter: Tissue Value: Open Flower vs. Whole Plant
  misc_feature: MA Experiment ID: 20000265 Result: Up-regulated in Transcription
  misc_feature: MA Experiment 20000265 PARAMETER Experiment Name: At_Open_Flower_P Parameter: Age (day) Value: 21
  misc_feature: MA Experiment 20000265 PARAMETER Experiment Name: At_Open_Flower_P Parameter: Plant Line Value: WS
  misc_feature: MA Experiment 20000265 PARAMETER Experiment Name: At_Open_Flower_P Parameter: Tissue Value: Closed Flower vs. Whole Plant
  misc_feature: MA Experiment ID: 20000286 Result: Up-regulated in Transcription
  misc_feature: MA Experiment 20000286 PARAMETER Experiment Name: At_Open_Flower_P Parameter: Age (day) Value: 21
  misc_feature: MA Experiment 20000286 PARAMETER Experiment Name: At_Open_Flower_P Parameter: Plant Line Value: WS
  misc_feature: MA Experiment 20000286 PARAMETER Experiment Name: At_Open_Flower_P Parameter: Tissue Value: Half Open vs. Whole Plant
  misc_feature: MA Experiment ID: 20000437 Result: Up-regulated in Transcription
  misc_feature: MA Experiment 20000437 PARAMETER Experiment Name: At_Drought_P Parameter: Age (day) Value: 8
  misc_feature: MA Experiment 20000437 PARAMETER Experiment Name: At_Drought_P Parameter: Organism Value: A. thaliana
  misc_feature: MA Experiment 20000437 PARAMETER Experiment Name: At_Drought_P Parameter: Plant Line Value: WS
  misc_feature: MA Experiment 20000437 PARAMETER Experiment Name: At_Drought_P Parameter: Timepoint (hr) Value: 24
  misc_feature: MA Experiment 20000437 PARAMETER Experiment Name: At_Drought_P Parameter: Tissue Value: Whole Plant
  misc_feature: MA Experiment 20000437 PARAMETER Experiment Name: At_Drought_P Parameter: Treatment Value: Drought vs. No Drought
  misc_feature: MA Experiment ID: 20000451 Result: Up-regulated in Transcription
  misc_feature: MA Experiment 20000451 PARAMETER Experiment Name: At_CS6879_Shoots-Roots_P Parameter: Age (day) Value: 14
  misc_feature: MA Experiment 20000451 PARAMETER Experiment Name: At_CS6879_Shoots-Roots_P Parameter: Organism Value: A. thaliana
  misc_feature: MA Experiment 20000451 PARAMETER Experiment Name: At_CS6879_Shoots-Roots_P Parameter: Plant Line Value: CS6879 vs. WS
  misc_feature: MA Experiment 20000451 PARAMETER Experiment Name: At_CS6879_Shoots-Roots_P Parameter: Tissue Value: Roots
  misc_feature: MA Experiment ID: 20000495 Result: Up-regulated in Transcription
  misc_feature: MA Experiment 20000495 PARAMETER Experiment Name: At_Guard_Cells_P Parameter: Harvest Date Value: 8/2/2002
  misc_feature: MA Experiment 20000495 PARAMETER Experiment Name: At_Guard_Cells_P Parameter: Organism Value: A. thaliana
  misc_feature: MA Experiment 20000495 PARAMETER Experiment Name: At_Guard_Cells_P Parameter: Tissue Value: Guard Cells vs. Leaves
  misc_feature: MA Experiment ID: 20000794 Result: Up-regulated in Transcription
  misc_feature: MA Experiment 20000794 PARAMETER Experiment Name: At_Petals_P Parameter: Age (day) Value: 23-25 days
  misc_feature: MA Experiment 20000794 PARAMETER Experiment Name: At_Petals_P Parameter: Plant Line Value: WS
  misc_feature: MA Experiment 20000794 PARAMETER Experiment Name: At_Petals_P Parameter: Tissue Value: Petals vs. Whole plant
  misc_feature: MA Experiment ID: 20001248 Result: Down-regulated in Transcription
  misc_feature: MA Experiment 20001248 PARAMETER Experiment Name: At_Far-red-induction_P Parameter: Age (day) Value: 7
  misc_feature: MA Experiment 20001248 PARAMETER Experiment Name: At_Far-red-induction_P Parameter: Light Value: Far-red vs. White
  misc_feature: MA Experiment 20001248 PARAMETER Experiment Name: At_Far-red-induction_P Parameter: Organism Value: A. thaliana
  misc_feature: MA Experiment 20001248 PARAMETER Experiment Name: At_Far-red-induction_P Parameter: Plant Line Value: Columbia
  misc_feature: MA Experiment 20001248 PARAMETER Experiment Name: At_Far-red-induction_P Parameter: Timepoint (hr) Value: 4
  misc_feature: MA Experiment 20001248 PARAMETER Experiment Name: At_Far-red-induction_P Parameter: Tissue Value: Whole Plant
  misc_feature: MA Experiment ID: 20001459 Result: Down-regulated in Transcription
  misc_feature: MA Experiment 20001459 PARAMETER Experiment Name: At_50mM_NH4NO3_L-to-H_P Parameter: Age (day) Value: Undefined
  misc_feature: MA Experiment 20001459 PARAMETER Experiment Name: At_50mM_NH4NO3_L-to-H_P Parameter: Organism Value: Undefined
  misc_feature: MA Experiment 20001459 PARAMETER Experiment Name: At_50mM_NH4NO3_L-to-H_P Parameter: Plant Line Value: Undefined
  misc_feature: MA Experiment 20001459 PARAMETER Experiment Name: At_50mM_NH4NO3_L-to-H_P Parameter: Timepoint (hr) Value: 4
  misc_feature: MA Experiment 20001459 PARAMETER Experiment Name: At_50mM_NH4NO3_L-to-H_P Parameter: Tissue Value: Siliques
  misc_feature: MA Experiment 20001459 PARAMETER Experiment Name: At_50mM_NH4NO3_L-to-H_P Parameter: Treatment Value: 50mM NH4NO3 vs. 100mM Manitol
  misc_feature: MA Experiment ID: 20001906 Result: Up-regulated in Transcription
  misc_feature: MA Experiment 20001906 PARAMETER Experiment Name: At_Drought_Reproduction_P Parameter: Age (day) Value: 35
  misc_feature: MA Experiment 20001906 PARAMETER Experiment Name: At_Drought_Reproduction_P Parameter: Organism Value: A. thaliana
  misc_feature: MA Experiment 20001906 PARAMETER Experiment Name: At_Drought_Reproduction_P Parameter: Plant Line Value: WS
  misc_feature: MA Experiment 20001906 PARAMETER Experiment Name: At_Drought_Reproduction_P Parameter: Timepoint (day) Value: 5
  misc_feature: MA Experiment 20001906 PARAMETER Experiment Name: At_Drought_Reproduction_P Parameter: Tissue Value: Siliques
  misc_feature: MA Experiment 20001906 PARAMETER Experiment Name: At_Drought_Reproduction_P Parameter: Treatment Value: Drought vs. No Drought
  misc_feature: MA Experiment ID: 20001907 Result: Up-regulated in Transcription
  misc_feature: MA Experiment 20001907 PARAMETER Experiment Name: At_Drought_Reproduction_P Parameter: Age (day) Value: 37
  misc_feature: MA Experiment 20001907 PARAMETER Experiment Name: At_Drought_Reproduction_P Parameter: Organism Value: A. thaliana
  misc_feature: MA Experiment 20001907 PARAMETER Experiment Name: At_Drought_Reproduction_P Parameter: Plant Line Value: WS
  misc_feature: MA Experiment 20001907 PARAMETER Experiment Name: At_Drought_Reproduction_P Parameter: Timepoint (day) Value: 7
  misc_feature: MA Experiment 20001907 PARAMETER Experiment Name: At_Drought_Reproduction_P Parameter: Tissue Value: Siliques
  misc_feature: MA Experiment 20001907 PARAMETER Experiment Name: At_Drought_Reproduction_P Parameter: Treatment Value: Drought vs. No Drought
  misc_feature: MA Experiment ID: 20001908 Result: Up-regulated in Transcription
  misc_feature: MA Experiment 20001908 PARAMETER Experiment Name: At_Drought_Reproduction_P Parameter: Age (day) Value: 40
  misc_feature: MA Experiment 20001908 PARAMETER Experiment Name: At_Drought_Reproduction_P Parameter: Organism Value: A. thaliana
  misc_feature: MA Experiment 20001908 PARAMETER Experiment Name: At_Drought_Reproduction_P Parameter: Plant Line Value: WS
  misc_feature: MA Experiment 20001908 PARAMETER Experiment Name: At_Drought_Reproduction_P Parameter: Timepoint (day) Value: 10
  misc_feature: MA Experiment 20001908 PARAMETER Experiment Name: At_Drought_Reproduction_P Parameter: Tissue Value: Siliques
  misc_feature: MA Experiment 20001908 PARAMETER Experiment Name: At_Drought_Reproduction_P Parameter: Treatment Value: Drought vs. No Drought
  misc_feature: MA Experiment ID: 20001911 Result: Up-regulated in Transcription
  misc_feature: MA Experiment 20001911 PARAMETER Experiment Name: At_Drought_Reproduction_P Parameter: Age (day) Value: 40
  misc_feature: MA Experiment 20001911 PARAMETER Experiment Name: At_Drought_Reproduction_P Parameter: Organism Value: A. thaliana
  misc_feature: MA Experiment 20001911 PARAMETER Experiment Name: At_Drought_Reproduction_P Parameter: Plant Line Value: WS
  misc_feature: MA Experiment 20001911 PARAMETER Experiment Name: At_Drought_Reproduction_P Parameter: Timepoint (day) Value: 10
  misc_feature: MA Experiment 20001911 PARAMETER Experiment Name: At_Drought_Reproduction_P Parameter: Tissue Value: Flowers
  misc_feature: MA Experiment 20001911 PARAMETER Experiment Name: At_Drought_Reproduction_P Parameter: Treatment Value: Drought vs. No Drought

SEQ ID NO: 93578 - protein, 496 aa, Arabidopsis thaliana; identical to SEQ ID NO: 89822
  peptide (1)..(496): Ceres Seq. ID no. 12720691
  misc_feature (339)..(495): Pfam Name: Caldesmon Pfam Description: Caldesmon
  misc_feature (66)..(496): Homolog of NCBI NO: 30681119 NR Description: expressed protein [Arabidopsis thaliana]
  misc_feature (79)..(496): Homolog of NCBI NO: 6143872 NR Description: unknown protein [Arabidopsis thaliana]
  misc_feature (76)..(375): Homolog of NCBI NO: 34894646 NR Description: P0028G04.23 [Oryza sativa (japonica
  misc_feature (385)..(490): Homolog of NCBI NO: 34894646 NR Description: P0028G04.23 [Oryza sativa (japonica

SEQ ID NO: 93579 - protein, 431 aa, Arabidopsis thaliana; identical to SEQ ID NO: 89823
  peptide (1)..(431): Ceres Seq. ID no. 12720692
  misc_feature (274)..(430): Pfam Name: Caldesmon Pfam Description: Caldesmon
  misc_feature (1)..(431): Homolog of NCBI NO: 30681119 NR Description: expressed protein [Arabidopsis thaliana]
  misc_feature (14)..(431): Homolog of NCBI NO: 6143872 NR Description: unknown protein [Arabidopsis thaliana]
  misc_feature (11)..(310): Homolog of NCBI NO: 34894646 NR Description: P0028G04.23 [Oryza sativa (japonica
  misc_feature (320)..(425): Homolog of NCBI NO: 34894646 NR Description: P0028G04.23 [Oryza sativa (japonica

SEQ ID NO: 93580 - protein, 426 aa, Arabidopsis thaliana; identical to SEQ ID NO: 89824
  peptide (1)..(426): Ceres Seq. ID no. 12720693
  misc_feature (269)..(425): Pfam Name: Caldesmon Pfam Description: Caldesmon
  misc_feature (1)..(426): Homolog of NCBI NO: 30681119 NR Description: expressed protein [Arabidopsis thaliana]
  misc_feature (9)..(426): Homolog of NCBI NO: 6143872 NR Description: unknown protein [Arabidopsis thaliana]
  misc_feature (6)..(305): Homolog of NCBI NO: 34894646 NR Description: P0028G04.23 [Oryza sativa (japonica
  misc_feature (315)..(420): Homolog of NCBI NO: 34894646 NR Description: P0028G04.23 [Oryza sativa (japonica

SEQ ID NO: 93581 - DNA, 4047 bp, Arabidopsis thaliana; identical to SEQ ID NO: 89825
  misc_feature (1)..(4047): Ceres Seq. ID no. 12720713
  misc_feature: MA Experiment ID: 20000179 Result: Down-regulated in Transcription
  misc_feature: MA Experiment 20000179 PARAMETER Experiment Name: At_Germinating_Seeds_P Parameter: Age (hr) Value: 6 vs. 0
  misc_feature: MA Experiment 20000179 PARAMETER Experiment Name: At_Germinating_Seeds_P Parameter: Tissue Value: Germinating Seeds
  misc_feature: MA Experiment ID: 20000227 Result: Up-regulated in Transcription
  misc_feature: MA Experiment 20000227 PARAMETER Experiment Name: At_Root-Tips-vs-Tops_P Parameter: Tissue Value: Root Tips vs. Root Tops
  misc_feature: MA Experiment ID: 20000234 Result: Up-regulated in Transcription
  misc_feature: MA Experiment 20000234 PARAMETER Experiment Name: At_Siliques_P Parameter: Age (day) Value: 21
  misc_feature: MA Experiment 20000234 PARAMETER Experiment Name: At_Siliques_P Parameter: Organism Value: A. thaliana
  misc_feature: MA Experiment 20000234 PARAMETER Experiment Name: At_Siliques_P Parameter: Plant Line Value: WS
  misc_feature: MA Experiment 20000234 PARAMETER Experiment Name: At_Siliques_P Parameter: Tissue Value: Less Than 5mm Siliques vs. Whole Plant
  misc_feature: MA Experiment ID: 20000265 Result: Up-regulated in Transcription
  misc_feature: MA Experiment 20000265 PARAMETER Experiment Name: At_Open_Flower_P Parameter: Age (day) Value: 21
  misc_feature: MA Experiment 20000265 PARAMETER Experiment Name: At_Open_Flower_P Parameter: Plant Line Value: WS
  misc_feature: MA Experiment 20000265 PARAMETER Experiment Name: At_Open_Flower_P Parameter: Tissue Value: Closed Flower vs. Whole Plant
  misc_feature: MA Experiment ID: 20000286 Result: Up-regulated in Transcription
  misc_feature: MA Experiment 20000286 PARAMETER Experiment Name: At_Open_Flower_P Parameter: Age (day) Value: 21
  misc_feature: MA Experiment 20000286 PARAMETER Experiment Name: At_Open_Flower_P Parameter: Plant Line Value: WS
  misc_feature: MA Experiment 20000286 PARAMETER Experiment Name: At_Open_Flower_P Parameter: Tissue Value: Half Open vs. Whole Plant
  misc_feature: MA Experiment ID: 20000496 Result: Up-regulated in Transcription
  misc_feature: MA Experiment 20000496 PARAMETER Experiment Name: At_Guard_Cells_P Parameter: Harvest Date Value: 7/19/2002
  misc_feature: MA Experiment 20000496 PARAMETER Experiment Name: At_Guard_Cells_P Parameter: Organism Value: Canola
  misc_feature: MA Experiment 20000496 PARAMETER Experiment Name: At_Guard_Cells_P Parameter: Tissue Value: Guard Cells vs. Leaves

SEQ ID NO: 93582 - protein, 1348 aa, Arabidopsis thaliana; identical to SEQ ID NO: 89826
  peptide (1)..(1348): Ceres Seq. ID no. 12720714
  misc_feature (519)..(1266): Pfam Name: Myosin tail Pfam Description: Myosin tail
  misc_feature (36)..(434): Homolog of NCBI NO: 6056206 NR Description: putative kinesin-like centromere protein
  misc_feature (1)..(805): Homolog of NCBI NO: 18406379 NR Description: kinesin-related protein; protein id: At1g59540.1,
  misc_feature (1)..(495): Homolog of NCBI NO: 14475945 NR Description: kinesin motor protein (kin2), putative
  misc_feature (4)..(839): Homolog of NCBI NO: 25404863 NR Description: protein T30E16.9 [imported] - Arabidopsis >gi|8778739|gb|AAF79747.1|AC009317_6 T30E16.9 [Arabidopsis
  misc_feature (2)..(1246): Homolog of NCBI NO: 7512169 NR Description: kinesin-related protein - African clawed frog
  misc_feature (4)..(1282): Homolog of NCBI NO: 40789293 NR Description: cDNA sequence BC049989 [Mus musculus]
  misc_feature (4)..(1283): Homolog of NCBI NO: 4502781 NR Description: centromere protein E; Centromere autoantigen E centromere protein E (312kD); kinesin family member 10 [Homo
  misc_feature (1)..(1238): Homolog of NCBI NO: 28268805 NR Description: kinesin-related protein K4 [Dictyostelium
  misc_feature (4)..(1283): Homolog of NCBI NO: 382658 NR Description: CENP-E protein
  misc_feature (74)..(1241): Homolog of NCBI NO: 34860597 NR Description: similar to CENTROMERIC PROTEIN E (CENP-E PROTEIN)

SEQ ID NO: 93583 - protein, 1317 aa, Arabidopsis thaliana; identical to SEQ ID NO: 89827
  peptide (1)..(1317): Ceres Seq. ID no. 12720715
  misc_feature (488)..(1235): Pfam Name: Myosin tail Pfam Description: Myosin tail
  misc_feature (5)..(403): Homolog of NCBI NO: 6056206 NR Description: putative kinesin-like centromere protein
  misc_feature (1)..(774): Homolog of NCBI NO: 18406379 NR Description: kinesin-related protein; protein id: At1g59540.1,
  misc_feature (1)..(464): Homolog of NCBI NO: 14475945 NR Description: kinesin motor protein (kin2), putative
  misc_feature (1)..(808): Homolog of NCBI NO: 25404863 NR Description: protein T30E16.9 [imported] - Arabidopsis >gi|8778739|gb|AAF79747.1|AC009317_6 T30E16.9 [Arabidopsis
  misc_feature (1)..(1215): Homolog of NCBI NO: 7512169 NR Description: kinesin-related protein - African clawed frog
  misc_feature (1)..(1251): Homolog of NCBI NO: 40789293 NR Description: cDNA sequence BC049989 [Mus musculus]
  misc_feature (1)..(1252): Homolog of NCBI NO: 4502781 NR Description: centromere protein E; Centromere autoantigen E centromere protein E (312kD); kinesin family member 10 [Homo
  misc_feature (1)..(1207): Homolog of NCBI NO: 28268805 NR Description: kinesin-related protein K4 [Dictyostelium
  misc_feature (1)..(1252): Homolog of NCBI NO: 382658 NR Description: CENP-E protein
  misc_feature (43)..(1210): Homolog of NCBI NO: 34860597 NR Description: similar to CENTROMERIC PROTEIN E (CENP-E PROTEIN)

SEQ ID NO: 93584 - protein, 1260 aa, Arabidopsis thaliana; identical to SEQ ID NO: 89828
  peptide (1)..(1260): Ceres Seq. ID no. 12720716
  misc_feature (431)..(1178): Pfam Name: Myosin tail Pfam Description: Myosin tail
  misc_feature (1)..(346): Homolog of NCBI NO: 6056206 NR Description: putative kinesin-like centromere protein
  misc_feature (1)..(717): Homolog of NCBI NO: 18406379 NR Description: kinesin-related protein; protein id: At1g59540.1,
  misc_feature (1)..(407): Homolog of NCBI NO: 14475945 NR Description: kinesin motor protein (kin2), putative
  misc_feature (1)..(751): Homolog of NCBI NO: 25404863 NR Description: protein T30E16.9 [imported] - Arabidopsis >gi|8778739|gb|AAF79747.1|AC009317_6 T30E16.9 [Arabidopsis
  misc_feature (1)..(1158): Homolog of NCBI NO: 7512169 NR Description: kinesin-related protein - African clawed frog
  misc_feature (1)..(1194): Homolog of NCBI NO: 40789293 NR Description: cDNA sequence BC049989 [Mus musculus]
  misc_feature (1)..(1195): Homolog of NCBI NO: 4502781 NR Description: centromere protein E; Centromere autoantigen E centromere protein E (312kD); kinesin family member 10 [Homo
  misc_feature (1)..(1150): Homolog of NCBI NO: 28268805 NR Description: kinesin-related protein K4 [Dictyostelium
  misc_feature (1)..(1195): Homolog of NCBI NO: 382658 NR Description: CENP-E protein
  misc_feature (1)..(1153): Homolog of NCBI NO: 34860597 NR Description: similar to CENTROMERIC PROTEIN E (CENP-E PROTEIN)

SEQ ID NO: 93585 - DNA, 1748 bp, Arabidopsis thaliana; identical to SEQ ID NO: 89829
  misc_feature (1)..(1748): Ceres Seq. ID no. 12720754
  misc_feature: MA Experiment ID: 108461 Result: Down-regulated in Transcription
  misc_feature: MA Experiment 108461 PARAMETER Experiment Name: At_Germinating_Seeds_cDNA_P Parameter: Age (day) Value: 1 vs. 0
  misc_feature: MA Experiment 108461 PARAMETER Experiment Name: At_Germinating_Seeds_cDNA_P Parameter: Tissue Value: Germinating Seeds
  misc_feature: MA Experiment ID: 108488 Result: Down-regulated in Transcription
  misc_feature: MA Experiment ID: 108569 Result: Up-regulated in Transcription
  misc_feature: MA Experiment 108569 PARAMETER Experiment Name: At_0.001%_MeJA__cDNA_P Parameter: Timepoint (hr) Value: 6
  misc_feature: MA Experiment 108569 PARAMETER Experiment Name: At_0.001%_MeJA__cDNA_P Parameter: Tissue Value: Aerial
  misc_feature: MA Experiment 108569 PARAMETER Experiment Name: At_0.001%_MeJA__cDNA_P Parameter: Treatment Value: 0.001% MeJA vs. No Treatment
  misc_feature: MA Experiment ID: 108573 Result: Up-regulated in Transcription
  misc_feature: MA Experiment 108573 PARAMETER Experiment Name: At_Drought_cDNA_P Parameter: Timepoint (hr) Value: 6
  misc_feature: MA Experiment 108573 PARAMETER Experiment Name: At_Drought_cDNA_P Parameter: Tissue Value: Aerial
  misc_feature: MA Experiment 108573 PARAMETER Experiment Name: At_Drought_cDNA_P Parameter: Treatment Value: Drought vs. No Drought
  misc_feature: MA Experiment ID: 108585 Result: Up-regulated in Transcription
  misc_feature: MA Experiment 108585 PARAMETER Experiment Name: At_5mM_NaNP_cDNA_P Parameter: Timepoint (hr) Value: 6
  misc_feature: MA Experiment 108585 PARAMETER Experiment Name: At_5mM_NaNP_cDNA_P Parameter: Tissue Value: Aerial
  misc_feature: MA Experiment 108585 PARAMETER Experiment Name: At_5mM_NaNP_cDNA_P Parameter: Treatment Value: null
  misc_feature: MA Experiment ID: 108595 Result: Up-regulated in Transcription
  misc_feature: MA Experiment 108595 PARAMETER Experiment Name: At_Ler-pi_Ovule_cDNA_P Parameter: Plant Line Value: null
  misc_feature: MA Experiment ID: 20000307 Result: Down-regulated in Transcription
  misc_feature: MA Experiment 20000307 PARAMETER Experiment Name: At_Germinating_Seeds_Sub_P Parameter: Age (hr) Value: 24 vs. 0
  misc_feature: MA Experiment 20000307 PARAMETER Experiment Name: At_Germinating_Seeds_Sub_P Parameter: Organism Value: A. thaliana
  misc_feature: MA Experiment 20000307 PARAMETER Experiment Name: At_Germinating_Seeds_Sub_P Parameter: Plant Line Value: WS
  misc_feature: MA Experiment 20000307 PARAMETER Experiment Name: At_Germinating_Seeds_Sub_P Parameter: Tissue Value: Germinating Seeds

SEQ ID NO: 93586 - protein, 238 aa, Arabidopsis thaliana; identical to SEQ ID NO: 89830
  peptide (1)..(238): Ceres Seq. ID no. 12720755
  misc_feature (27)..(155): Pfam Name: No apical meristem (NAM) protein Pfam Description: No apical meristem (NAM) protein
  misc_feature (1)..(234): Homolog of NCBI NO: 30681347 NR Description: expressed protein [Arabidopsis thaliana]
  misc_feature (1)..(234): Homolog of NCBI NO: 18398891 NR Description: expressed protein; protein id: At3g10480.1 thaliana] >gi|8567777|gb|AAF76349.1| unknown protein [Arabidopsis >gi|12322797|gb|AAG51394.1|AC011560_26 unknown protein; unknown
  misc_feature (1)..(238): Homolog of NCBI NO: 18398893 NR Description: expressed protein; protein id: At3g10490.1
  misc_feature (1)..(224): Homolog of NCBI NO: 21105736 NR Description: nam-like protein 4 [Petunia x hybrida]
  misc_feature (1)..(224): Homolog of NCBI NO: 21105744 NR Description: nam-like protein 8 [Petunia x hybrida]
  misc_feature (27)..(230): Homolog of NCBI NO: 21105746 NR Description: nam-like protein 9 [Petunia x hybrida]
  misc_feature (19)..(209): Homolog of NCBI NO: 15237699 NR Description: putative protein; protein id: At5g04410.1, by cDNA: gi_20466285, supported by cDNA: gi_6456750 [Arabidopsis
  misc_feature (19)..(238): Homolog of NCBI NO: 8567779 NR Description: NAC, putative [Arabidopsis thaliana]
  misc_feature (19)..(238): Homolog of NCBI NO: 18398895 NR Description: expressed protein; protein id: At3g10500.1 thaliana] >gi|15293139|gb|AAK93680.1| unknown protein thaliana] >gi|19310691|gb|AAL85076.1| unknown protein
  misc_feature (19)..(238): Homolog of NCBI NO: 21593389 NR Description: NAC, putative [Arabidopsis thaliana]

SEQ ID NO: 93587 - protein, 165 aa, Arabidopsis thaliana; identical to SEQ ID NO: 89831
  peptide (1)..(165): Ceres Seq. ID no. 12720756
  misc_feature (1)..(165): Homolog of NCBI NO: 30681347 NR Description: expressed protein [Arabidopsis thaliana]
  misc_feature (1)..(165): Homolog of NCBI NO: 18398891 NR Description: expressed protein; protein id: At3g10480.1 thaliana] >gi|8567777|gb|AAF76349.1| unknown protein [Arabidopsis >gi|12322797|gb|AAG51394.1|AC011560_26 unknown protein; unknown
  misc_feature (1)..(159): Homolog of NCBI NO: 21105736 NR Description: nam-like protein 4 [Petunia x hybrida]
  misc_feature (1)..(159): Homolog of NCBI NO: 21105744 NR Description: nam-like protein 8 [Petunia x hybrida]
  misc_feature (1)..(92): Homolog of NCBI NO: 15237698 NR Description: NAC2-like protein; protein id: At5g04400.1

SEQ ID NO: 93588 - protein, 138 aa, Arabidopsis thaliana; identical to SEQ ID NO: 89832
  peptide (1)..(138): Ceres Seq. ID no. 12720757
  misc_feature (1)..(55): Pfam Name: No apical meristem (NAM) protein Pfam Description: No apical meristem (NAM) protein
  misc_feature (1)..(134): Homolog of NCBI NO: 30681347 NR Description: expressed protein [Arabidopsis thaliana]
  misc_feature (1)..(134): Homolog of NCBI NO: 18398891 NR Description: expressed protein; protein id: At3g10480.1 thaliana] >gi|8567777|gb|AAF76349.1| unknown protein [Arabidopsis >gi|12322797|gb|AAG51394.1|AC011560_26 unknown protein; unknown
  misc_feature (1)..(138): Homolog of NCBI NO: 18398893 NR Description: expressed protein; protein id: At3g10490.1
  misc_feature (1)..(124): Homolog of NCBI NO: 21105736 NR Description: nam-like protein 4 [Petunia x hybrida]
  misc_feature (1)..(124): Homolog of NCBI NO: 21105744 NR Description: nam-like protein 8 [Petunia x hybrida]
  misc_feature (1)..(130): Homolog of NCBI NO: 21105746 NR Description: nam-like protein 9 [Petunia x hybrida]
  misc_feature (1)..(109): Homolog of NCBI NO: 15237699 NR Description: putative protein; protein id: At5g04410.1, by cDNA: gi_20466285, supported by cDNA: gi_6456750 [Arabidopsis
  misc_feature (1)..(138): Homolog of NCBI NO: 8567779 NR Description: NAC, putative [Arabidopsis thaliana]
  misc_feature (1)..(138): Homolog of NCBI NO: 18398895 NR Description: expressed protein; protein id: At3g10500.1 thaliana] >gi|15293139|gb|AAK93680.1| unknown protein thaliana] >gi|19310691|gb|AAL85076.1| unknown protein
  misc_feature (1)..(138): Homolog of NCBI NO: 21593389 NR Description: NAC, putative [Arabidopsis thaliana]

SEQ ID NO: 93589 - DNA, 2138 bp, Arabidopsis thaliana; identical to SEQ ID NO: 89833
  misc_feature (1)..(2138): Ceres Seq. ID no. 12720778
  misc_feature: MA Experiment ID: 20000227 Result: Up-regulated in Transcription
  misc_feature: MA Experiment 20000227 PARAMETER Experiment Name: At_Root-Tips-vs-Tops_P Parameter: Tissue Value: Root Tips vs. Root Tops

SEQ ID NO: 93590 - protein, 646 aa, Arabidopsis thaliana; identical to SEQ ID NO: 89834
  peptide (1)..(646): Ceres Seq. ID no. 12720779
  misc_feature (186)..(444): Pfam Name: Protein kinase domain Pfam Description: Protein kinase domain
  misc_feature (93)..(645): Homolog of NCBI NO: 15238353 NR Description: calcium-dependent protein kinase; protein id:
  misc_feature (103)..(645): Homolog of NCBI NO: 16215471 NR Description: calcium-dependent protein kinase 3 [Nicotiana
  misc_feature (1)..(89): Homolog of NCBI NO: 16215471 NR Description: calcium-dependent protein kinase 3 [Nicotiana
  misc_feature (103)..(645): Homolog of NCBI NO: 15289758 NR Description: calcium dependent protein kinase [Solanum
  misc_feature (1)..(89): Homolog of NCBI NO: 15289758 NR Description: calcium dependent protein kinase [Solanum
  misc_feature (103)..(646): Homolog of NCBI NO: 16215467 NR Description: calcium-dependent protein kinase 2 [Nicotiana
  misc_feature (1)..(90): Homolog of NCBI NO: 16215467 NR Description: calcium-dependent protein kinase 2 [Nicotiana
  misc_feature (102)..(646): Homolog of NCBI NO: 16215475 NR Description: calcium-dependent protein kinase 2 [Nicotiana
  misc_feature (1)..(92): Homolog of NCBI NO: 16215475 NR Description: calcium-dependent protein kinase 2 [Nicotiana
  misc_feature (90)..(646): Homolog of NCBI NO: 7434364 NR Description: calcium-dependent protein kinase (EC 2.7.1.-)

SEQ ID NO: 93591 - protein, 624 aa, Arabidopsis thaliana; identical to SEQ ID NO: 89835
  peptide (1)..(624): Ceres Seq. ID no. 12720780
  misc_feature (164)..(422): Pfam Name: Protein kinase domain Pfam Description: Protein kinase domain
  misc_feature (71)..(623): Homolog of NCBI NO: 15238353 NR Description: calcium-dependent protein kinase; protein id:
  misc_feature (81)..(623): Homolog of NCBI NO: 16215471 NR Description: calcium-dependent protein kinase 3 [Nicotiana
  misc_feature (1)..(67): Homolog of NCBI NO: 16215471 NR Description: calcium-dependent protein kinase 3 [Nicotiana
  misc_feature (81)..(623): Homolog of NCBI NO: 15289758 NR Description: calcium dependent protein kinase [Solanum
  misc_feature (1)..(67): Homolog of NCBI NO: 15289758 NR Description: calcium dependent protein kinase [Solanum
  misc_feature (81)..(624): Homolog of NCBI NO: 16215467 NR Description: calcium-dependent protein kinase 2 [Nicotiana
  misc_feature (1)..(68): Homolog of NCBI NO: 16215467 NR Description: calcium-dependent protein kinase 2 [Nicotiana
  misc_feature (80)..(624): Homolog of NCBI NO: 16215475 NR Description: calcium-dependent protein kinase 2 [Nicotiana
  misc_feature (1)..(70): Homolog of NCBI NO: 16215475 NR Description: calcium-dependent protein kinase 2 [Nicotiana
  misc_feature (68)..(624): Homolog of NCBI NO: 7434364 NR Description: calcium-dependent protein kinase (EC 2.7.1.-)

SEQ ID NO: 93592 - protein, 581 aa, Arabidopsis thaliana; identical to SEQ ID NO: 89836
  peptide (1)..(581): Ceres Seq. ID no. 12720781
  misc_feature (121)..(379): Pfam Name: Protein kinase domain Pfam Description: Protein kinase domain
  misc_feature (28)..(580): Homolog of NCBI NO: 15238353 NR Description: calcium-dependent protein kinase; protein id:
  misc_feature (38)..(580): Homolog of NCBI NO: 16215471 NR Description: calcium-dependent protein kinase 3 [Nicotiana
  misc_feature (1)..(24): Homolog of NCBI NO: 16215471 NR Description: calcium-dependent protein kinase 3 [Nicotiana
  misc_feature (38)..(580): Homolog of NCBI NO: 15289758 NR Description: calcium dependent protein kinase [Solanum
  misc_feature (1)..(24): Homolog of NCBI NO: 15289758 NR Description: calcium dependent protein kinase [Solanum
  misc_feature (38)..(581): Homolog of NCBI NO: 16215467 NR Description: calcium-dependent protein kinase 2 [Nicotiana
  misc_feature (1)..(25): Homolog of NCBI NO: 16215467 NR Description: calcium-dependent protein kinase 2 [Nicotiana
  misc_feature (37)..(581): Homolog of NCBI NO: 16215475 NR Description: calcium-dependent protein kinase 2 [Nicotiana
  misc_feature (1)..(27): Homolog of NCBI NO: 16215475 NR Description: calcium-dependent protein kinase 2 [Nicotiana
  misc_feature (25)..(581): Homolog of NCBI NO: 7434364 NR Description: calcium-dependent protein kinase (EC 2.7.1.-)

SEQ ID NO: 93593 - DNA, 1686 bp, Arabidopsis thaliana; identical to SEQ ID NO: 89837
  misc_feature (1)..(1686): Ceres Seq. ID no. 12720785
  misc_feature: MA Experiment ID: 20000307 Result: Up-regulated in Transcription
  misc_feature: MA Experiment 20000307 PARAMETER Experiment Name: At_Germinating_Seeds_Sub_P Parameter: Age (hr) Value: 24 vs. 0
  misc_feature: MA Experiment 20000307 PARAMETER Experiment Name: At_Germinating_Seeds_Sub_P Parameter: Organism Value: A. thaliana
  misc_feature: MA Experiment 20000307 PARAMETER Experiment Name: At_Germinating_Seeds_Sub_P Parameter: Plant Line Value: WS
  misc_feature: MA Experiment 20000307 PARAMETER Experiment Name: At_Germinating_Seeds_Sub_P Parameter: Tissue Value: Germinating Seeds
  misc_feature: MA Experiment ID: 20000314 Result: Up-regulated in Transcription
  misc_feature: MA Experiment 20000314 PARAMETER Experiment Name: At_14day_Shoots-Roots_Sub_P Parameter: Age (day) Value: 14
  misc_feature: MA Experiment 20000314 PARAMETER Experiment Name: At_14day_Shoots-Roots_Sub_P Parameter: Organism Value: A. thaliana
  misc_feature: MA Experiment 20000314 PARAMETER Experiment Name: At_14day_Shoots-Roots_Sub_P Parameter: Plant Line Value: WS
  misc_feature: MA Experiment 20000314 PARAMETER Experiment Name: At_14day_Shoots-Roots_Sub_P Parameter: Tissue Value: Roots vs. Whole Plant

SEQ ID NO: 93594 - protein, 561 aa, Arabidopsis thaliana; identical to SEQ ID NO: 89838
  peptide (1)..(561): Ceres Seq. ID no. 12720786
  misc_feature (255)..(548): Pfam Name: Pectinesterase Pfam Description: Pectinesterase
  misc_feature (1)..(561): Homolog of NCBI NO: 15228355 NR Description: pectinesterase family; protein id: At3g10710.1 thaliana] >gi|6630559|gb|AAF19578.1|AC011708_21 putative
  misc_feature (1)..(559): Homolog of NCBI NO: 15238377 NR Description: pectinesterase family; protein id: At5g04960.1 thaliana] >gi|10178035|dbj|BAB11518.1| pectinesterase
  misc_feature (1)..(559): Homolog of NCBI NO: 28393771 NR Description: unknown protein [Arabidopsis thaliana]
  misc_feature (5)..(561): Homolog of NCBI NO: 6093739 NR Description: Pectinesterase 3 precursor (Pectin methylesterase
  misc_feature (70)..(551): Homolog of NCBI NO: 15231826 NR Description: putative pectin methylesterase; protein id:
  misc_feature (242)..(556): Homolog of NCBI NO: 32490042 NR Description: OSJNBa0063C18.2 [Oryza sativa (japonica
  misc_feature (25)..(263): Homolog of NCBI NO: 32490042 NR Description: OSJNBa0063C18.2 [Oryza sativa (japonica
  misc_feature (20)..(561): Homolog of NCBI NO: 15229105 NR Description: pectinesterase - like protein; protein id: supported by cDNA: gi_16648928 [Arabidopsis thaliana]
  misc_feature (43)..(561): Homolog of NCBI NO: 14334992 NR Description: At1g11580/T23J18_33 [Arabidopsis thaliana]
  misc_feature (43)..(561): Homolog of NCBI NO: 15220424 NR Description: pectin methylesterase, putative; protein id:

SEQ ID NO: 93595 - protein, 514 aa, Arabidopsis thaliana; identical to SEQ ID NO: 89839
  peptide (1)..(514): Ceres Seq. ID no. 12720787
  misc_feature (208)..(501): Pfam Name: Pectinesterase Pfam Description: Pectinesterase
  misc_feature (1)..(514): Homolog of NCBI NO: 15228355 NR Description: pectinesterase family; protein id: At3g10710.1 thaliana] >gi|6630559|gb|AAF19578.1|AC011708_21 putative
  misc_feature (1)..(512): Homolog of NCBI NO: 15238377 NR Description: pectinesterase family; protein id: At5g04960.1 thaliana] >gi|10178035|dbj|BAB11518.1| pectinesterase
  misc_feature (1)..(512): Homolog of NCBI NO: 28393771 NR Description: unknown protein [Arabidopsis thaliana]
  misc_feature (1)..(514): Homolog of NCBI NO: 6093739 NR Description: Pectinesterase 3 precursor (Pectin methylesterase
  misc_feature (23)..(504): Homolog of NCBI NO: 15231826 NR Description: putative pectin methylesterase; protein id:
  misc_feature (195)..(509): Homolog of NCBI NO: 32490042 NR Description: OSJNBa0063C18.2 [Oryza sativa (japonica
  misc_feature (1)..(216): Homolog of NCBI NO: 32490042 NR Description: OSJNBa0063C18.2 [Oryza sativa (japonica
  misc_feature (1)..(514): Homolog of NCBI NO: 15229105 NR Description: pectinesterase - like protein; protein id: supported by cDNA: gi_16648928 [Arabidopsis thaliana]
  misc_feature (1)..(514): Homolog of NCBI NO: 14334992 NR Description: At1g11580/T23J18_33 [Arabidopsis thaliana]
  misc_feature (1)..(514): Homolog of NCBI NO: 15220424 NR Description: pectin methylesterase, putative; protein id:

SEQ ID NO: 93596 - protein, 429 aa, Arabidopsis thaliana; identical to SEQ ID NO: 89840
  peptide (1)..(429): Ceres Seq. ID no. 12720788
  misc_feature (123)..(416): Pfam Name: Pectinesterase Pfam Description: Pectinesterase
  misc_feature (1)..(429): Homolog of NCBI NO: 15228355 NR Description: pectinesterase family; protein id: At3g10710.1 thaliana] >gi|6630559|gb|AAF19578.1|AC011708_21 putative
  misc_feature (1)..(427): Homolog of NCBI NO: 15238377 NR Description: pectinesterase family; protein id: At5g04960.1 thaliana] >gi|10178035|dbj|BAB11518.1| pectinesterase
  misc_feature (1)..(427): Homolog of NCBI NO: 28393771 NR Description: unknown protein [Arabidopsis thaliana]
  misc_feature (1)..(429): Homolog of NCBI NO: 6093739 NR Description: Pectinesterase 3 precursor (Pectin methylesterase
  misc_feature (1)..(419): Homolog of NCBI NO: 15231826 NR Description: putative pectin methylesterase; protein id:
  misc_feature (110)..(424): Homolog of NCBI NO: 32490042 NR Description: OSJNBa0063C18.2 [Oryza sativa (japonica
  misc_feature (1)..(131): Homolog of NCBI NO: 32490042 NR Description: OSJNBa0063C18.2 [Oryza sativa (japonica
  misc_feature (1)..(429): Homolog of NCBI NO: 15229105 NR Description: pectinesterase - like protein; protein id: supported by cDNA: gi_16648928 [Arabidopsis thaliana]
  misc_feature (1)..(429): Homolog of NCBI NO: 14334992 NR Description: At1g11580/T23J18_33 [Arabidopsis thaliana]
  misc_feature (1)..(429): Homolog of NCBI NO: 15220424 NR Description: pectin methylesterase, putative; protein id:

SEQ ID NO: 93597 - DNA, 1227 bp, Arabidopsis thaliana; identical to SEQ ID NO: 89841
  misc_feature (1)..(1227): Ceres Seq. ID no. 12720815
  misc_feature: MA Experiment ID: 20001451 Result: Up-regulated in Transcription
  misc_feature: MA Experiment 20001451 PARAMETER Experiment Name: At_Far-red-induction_P Parameter: Age (day) Value: 7
  misc_feature: MA Experiment 20001451 PARAMETER Experiment Name: At_Far-red-induction_P Parameter: Light Value: Far-red vs. White
  misc_feature: MA Experiment 20001451 PARAMETER Experiment Name: At_Far-red-induction_P Parameter: Organism Value: A. thaliana
  misc_feature: MA Experiment 20001451 PARAMETER Experiment Name: At_Far-red-induction_P Parameter: Plant Line Value: Columbia
  misc_feature: MA Experiment 20001451 PARAMETER Experiment Name: At_Far-red-induction_P Parameter: Timepoint (hr) Value: 24
  misc_feature: MA Experiment 20001451 PARAMETER Experiment Name: At_Far-red-induction_P Parameter: Tissue Value: Whole Plant

SEQ ID NO: 93598 - protein, 408 aa, Arabidopsis thaliana; identical to SEQ ID NO: 89842
  peptide (1)..(408): Ceres Seq. ID no. 12720816
  misc_feature (34)..(359): Pfam Name: Cellulase (glycosyl hydrolase family 5) Pfam Description: Cellulase (glycosyl hydrolase family 5)
  misc_feature (1)..(408): Homolog of NCBI NO: 15228394 NR Description: glycosyl hydrolase family 5/cellulase
  misc_feature (1)..(349): Homolog of NCBI NO: 15230798 NR Description: putative beta-mannan endohydrolase; protein id:
  misc_feature (1)..(402): Homolog of NCBI NO: 15228393 NR Description: glycosyl hydrolase family 5/cellulase
  misc_feature (85)..(349): Homolog of NCBI NO: 9279563 NR Description: (1-4)-beta-mannan endohydrolase-like protein
  misc_feature (1)..(34): Homolog of NCBI NO: 9279563 NR Description: (1-4)-beta-mannan endohydrolase-like protein
  misc_feature (1)..(402): Homolog of NCBI NO: 15239973 NR Description: glycosyl hydrolase family 5/cellulase
  misc_feature (4)..(404): Homolog of NCBI NO: 34912090 NR Description: putative mannan endo-1,4-beta-mannosidase [Oryza
  misc_feature (4)..(402): Homolog of NCBI NO: 10178872 NR Description: (1-4)-beta-mannan endohydrolase [Coffea arabica]
  misc_feature (4)..(402): Homolog of NCBI NO: 23477717 NR Description: endo-beta-mannanase [Daucus carota]
  misc_feature (1)..(407): Homolog of NCBI NO: 37544517 NR Description: mannan endo-1,4-beta-mannosidase precursor

SEQ ID NO: 93599 - protein, 214 aa, Arabidopsis thaliana; identical to SEQ ID NO: 89843
  peptide (1)..(214): Ceres Seq. ID no. 12720817
  misc_feature (1)..(165): Pfam Name: Cellulase (glycosyl hydrolase family 5) Pfam Description: Cellulase (glycosyl hydrolase family 5)
  misc_feature (1)..(214): Homolog of NCBI NO: 15228394 NR Description: glycosyl hydrolase family 5/cellulase
  misc_feature (1)..(155): Homolog of NCBI NO: 15230798 NR Description: putative beta-mannan endohydrolase; protein id:
  misc_feature (1)..(208): Homolog of NCBI NO: 15228393 NR Description: glycosyl hydrolase family 5/cellulase
  misc_feature (1)..(155): Homolog of NCBI NO: 9279563 NR Description: (1-4)-beta-mannan endohydrolase-like protein
  misc_feature (1)..(208): Homolog of NCBI NO: 15239973 NR Description: glycosyl hydrolase family 5/cellulase
  misc_feature (1)..(210): Homolog of NCBI NO: 34912090 NR Description: putative mannan endo-1,4-beta-mannosidase [Oryza
  misc_feature (1)..(208): Homolog of NCBI NO: 10178872 NR Description: (1-4)-beta-mannan endohydrolase [Coffea arabica]
  misc_feature (1)..(208): Homolog of NCBI NO: 23477717 NR Description: endo-beta-mannanase [Daucus carota]
  misc_feature (1)..(213): Homolog of NCBI NO: 37544517 NR Description: mannan endo-1,4-beta-mannosidase precursor
  misc_feature (1)..(205): Homolog of NCBI NO: 10129675 NR Description: (1-4)-beta-mannan endohydrolase [Coffea arabica]

SEQ ID NO: 93600 - protein, 209 aa, Arabidopsis thaliana; identical to SEQ ID NO: 89844
  peptide (1)..(209): Ceres Seq. ID no. 12720818
  misc_feature (1)..(160): Pfam Name: Cellulase (glycosyl hydrolase family 5) Pfam Description: Cellulase (glycosyl hydrolase family 5)
  misc_feature (1)..(209): Homolog of NCBI NO: 15228394 NR Description: glycosyl hydrolase family 5/cellulase
  misc_feature (1)..(150): Homolog of NCBI NO: 15230798 NR Description: putative beta-mannan endohydrolase; protein id:
  misc_feature (1)..(203): Homolog of NCBI NO: 15228393 NR Description: glycosyl hydrolase family 5/cellulase
  misc_feature (1)..(150): Homolog of NCBI NO: 9279563 NR Description: (1-4)-beta-mannan endohydrolase-like protein
  misc_feature (1)..(203): Homolog of NCBI NO: 15239973 NR Description: glycosyl hydrolase family 5/cellulase
  misc_feature (1)..(205): Homolog of NCBI NO: 34912090 NR Description: putative mannan endo-1,4-beta-mannosidase [Oryza
  misc_feature (1)..(203): Homolog of NCBI NO: 10178872 NR Description: (1-4)-beta-mannan endohydrolase [Coffea arabica]
  misc_feature (1)..(203): Homolog of NCBI NO: 23477717 NR Description: endo-beta-mannanase [Daucus carota]
  misc_feature (1)..(208): Homolog of NCBI NO: 37544517 NR Description: mannan endo-1,4-beta-mannosidase precursor
  misc_feature (1)..(200): Homolog of NCBI NO: 10129675 NR Description: (1-4)-beta-mannan endohydrolase [Coffea arabica]

SEQ ID NO: 93601 - DNA, 477 bp, Arabidopsis thaliana; identical to SEQ ID NO: 89845
  misc_feature (1)..(477): Ceres Seq. ID no. 12720848
  misc_feature: MA Experiment ID: 20000184 Result: Up-regulated in Transcription
  misc_feature: MA Experiment 20000184 PARAMETER Experiment Name: At_Shoots__P Parameter: Age (day) Value: 7
  misc_feature: MA Experiment 20000184 PARAMETER Experiment Name: At_Shoots__P Parameter: Tissue Value: Shoots vs. Whole Plant
  misc_feature: MA Experiment ID: 20000185 Result: Down-regulated in Transcription
  misc_feature: MA Experiment 20000185 PARAMETER Experiment Name: At_Roots__P Parameter: Age (day) Value: 7 vs. 21
  misc_feature: MA Experiment 20000185 PARAMETER Experiment Name: At_Roots__P Parameter: Organism Value: A. thaliana
  misc_feature: MA Experiment 20000185 PARAMETER Experiment Name: At_Roots__P Parameter: Tissue Value: Roots vs. Whole Plant
  misc_feature: MA Experiment ID: 20000437 Result: Down-regulated in Transcription
  misc_feature: MA Experiment 20000437 PARAMETER Experiment Name: At_Drought_P Parameter: Age (day) Value: 8
  misc_feature: MA Experiment 20000437 PARAMETER Experiment Name: At_Drought_P Parameter: Organism Value: A. thaliana
  misc_feature: MA Experiment 20000437 PARAMETER Experiment Name: At_Drought_P Parameter: Plant Line Value: WS
  misc_feature: MA Experiment 20000437 PARAMETER Experiment Name: At_Drought_P Parameter: Timepoint (hr) Value: 24
  misc_feature: MA Experiment 20000437 PARAMETER Experiment Name: At_Drought_P Parameter: Tissue Value: Whole Plant
  misc_feature: MA Experiment 20000437 PARAMETER Experiment Name: At_Drought_P Parameter: Treatment Value: Drought vs. No Drought
  misc_feature: MA Experiment ID: 20000438 Result: Up-regulated in Transcription
  misc_feature: MA Experiment 20000438 PARAMETER Experiment Name: At_Shoots__P Parameter: Age (day) Value: 14
  misc_feature: MA Experiment 20000438 PARAMETER Experiment Name: At_Shoots__P Parameter: Tissue Value: Shoots vs. Whole Plant
  misc_feature: MA Experiment ID: 20000439 Result: Down-regulated in Transcription
  misc_feature: MA Experiment 20000439 PARAMETER Experiment Name: At_Roots__P Parameter: Age (day) Value: 14 vs. 21
  misc_feature: MA Experiment 20000439 PARAMETER Experiment Name: At_Roots__P Parameter: Organism Value: A. thaliana
  misc_feature: MA Experiment 20000439 PARAMETER Experiment Name: At_Roots__P Parameter: Tissue Value: Roots vs. Whole Plant
  misc_feature: MA Experiment ID: 20000496 Result: Down-regulated in Transcription
  misc_feature: MA Experiment 20000496 PARAMETER Experiment Name: At_Guard_Cells_P Parameter: Harvest Date Value: 7/19/2002
  misc_feature: MA Experiment 20000496 PARAMETER Experiment Name: At_Guard_Cells_P Parameter: Organism Value: Canola
  misc_feature: MA Experiment 20000496 PARAMETER Experiment Name: At_Guard_Cells_P Parameter: Tissue Value: Guard Cells vs. Leaves
  misc_feature: MA Experiment ID: 20001247 Result: Up-regulated in Transcription
  misc_feature: MA Experiment 20001247 PARAMETER Experiment Name: At_Far-red-induction_P Parameter: Age (day) Value: 7
  misc_feature: MA Experiment 20001247 PARAMETER Experiment Name: At_Far-red-induction_P Parameter: Light Value: Far-red vs. White
  misc_feature: MA Experiment 20001247 PARAMETER Experiment Name: At_Far-red-induction_P Parameter: Organism Value: A. thaliana
  misc_feature: MA Experiment 20001247 PARAMETER Experiment Name: At_Far-red-induction_P Parameter: Plant Line Value: Columbia
  misc_feature: MA Experiment 20001247 PARAMETER Experiment Name: At_Far-red-induction_P Parameter: Timepoint (hr) Value: 1
  misc_feature: MA Experiment 20001247 PARAMETER Experiment Name: At_Far-red-induction_P Parameter: Tissue Value: Whole Plant
  misc_feature: MA Experiment ID: 20001248 Result: Down-regulated in Transcription
  misc_feature: MA Experiment 20001248 PARAMETER Experiment Name: At_Far-red-induction_P Parameter: Age (day) Value: 7
  misc_feature: MA Experiment 20001248 PARAMETER Experiment Name: At_Far-red-induction_P Parameter: Light Value: Far-red vs. White
  misc_feature: MA Experiment 20001248 PARAMETER Experiment Name: At_Far-red-induction_P Parameter: Organism Value: A. thaliana
  misc_feature: MA Experiment 20001248 PARAMETER Experiment Name: At_Far-red-induction_P Parameter: Plant Line Value: Columbia
  misc_feature: MA Experiment 20001248 PARAMETER Experiment Name: At_Far-red-induction_P Parameter: Timepoint (hr) Value: 4
  misc_feature: MA Experiment 20001248 PARAMETER Experiment Name: At_Far-red-induction_P Parameter: Tissue Value: Whole Plant
  misc_feature: MA Experiment ID: 20001451 Result: Up-regulated in Transcription
  misc_feature: MA Experiment 20001451 PARAMETER Experiment Name: At_Far-red-induction_P Parameter: Age (day) Value: 7
  misc_feature: MA Experiment 20001451 PARAMETER Experiment Name: At_Far-red-induction_P Parameter: Light Value: Far-red vs. White
  misc_feature: MA Experiment 20001451 PARAMETER Experiment Name: At_Far-red-induction_P Parameter: Organism Value: A. thaliana
  misc_feature: MA Experiment 20001451 PARAMETER Experiment Name: At_Far-red-induction_P Parameter: Plant Line Value: Columbia
  misc_feature: MA Experiment 20001451 PARAMETER Experiment Name: At_Far-red-induction_P Parameter: Timepoint (hr) Value: 24
  misc_feature: MA Experiment 20001451 PARAMETER Experiment Name: At_Far-red-induction_P Parameter: Tissue Value: Whole Plant
  misc_feature: MA Experiment ID: 20001556 Result: Down-regulated in Transcription
  misc_feature: MA Experiment 20001556 PARAMETER Experiment Name: At_Drought_Soil_Dry_P Parameter: Age (day) Value: 26
  misc_feature: MA Experiment 20001556 PARAMETER Experiment Name: At_Drought_Soil_Dry_P Parameter: Organism Value: A. thaliana
  misc_feature: MA Experiment 20001556 PARAMETER Experiment Name: At_Drought_Soil_Dry_P Parameter: Plant Line Value: WS
  misc_feature: MA Experiment 20001556 PARAMETER Experiment Name: At_Drought_Soil_Dry_P Parameter: Post Timepoint (hr) Value: None
  misc_feature: MA Experiment 20001556 PARAMETER Experiment Name: At_Drought_Soil_Dry_P Parameter: Post-Treatment Value: None
  misc_feature: MA Experiment 20001556 PARAMETER Experiment Name: At_Drought_Soil_Dry_P Parameter: Timepoint (day) Value: 12
  misc_feature: MA Experiment 20001556 PARAMETER Experiment Name: At_Drought_Soil_Dry_P Parameter: Treatment Value: Drought vs. No Drought
  misc_feature: MA Experiment ID: 20001904 Result: Down-regulated in Transcription
  misc_feature: MA Experiment 20001904 PARAMETER Experiment Name: At_Drought_Reproduction_P Parameter: Age (day) Value: 37
  misc_feature: MA Experiment 20001904 PARAMETER Experiment Name: At_Drought_Reproduction_P Parameter: Organism Value: A. thaliana
  misc_feature: MA Experiment 20001904 PARAMETER Experiment Name: At_Drought_Reproduction_P Parameter: Plant Line Value: WS
  misc_feature: MA Experiment 20001904 PARAMETER Experiment Name: At_Drought_Reproduction_P Parameter: Timepoint (day) Value: 7
  misc_feature: MA Experiment 20001904 PARAMETER Experiment Name: At_Drought_Reproduction_P Parameter: Tissue Value: Rosettes
  misc_feature: MA Experiment 20001904 PARAMETER Experiment Name: At_Drought_Reproduction_P Parameter: Treatment Value: Drought vs. No Drought

SEQ ID NO: 93602 - protein, 158 aa, Arabidopsis thaliana; identical to SEQ ID NO: 89846
  peptide (1)..(158): Ceres Seq. ID no. 12720849
  misc_feature (107)..(148): Pfam Name: Zinc finger, C3HC4 type (RING finger) Pfam Description: Zinc finger, C3HC4 type (RING finger)
  misc_feature (1)..(158): Homolog of NCBI NO: 15228437 NR Description: RING zinc finger protein; protein id: At3g11110.1 thaliana] >gi|6016703|gb|AAF01530.1|AC009991_26 hypothetical [Arabidopsis thaliana] >gi|12321864|gb|AAG50960.1|AC073395_2 RING
  misc_feature (22)..(152): Homolog of NCBI NO: 28558782 NR Description: RING/C3HC4/PHD zinc finger-like protein [Cucumis
  misc_feature (33)..(157): Homolog of NCBI NO: 28071301 NR Description: P0705A05.3 [Oryza sativa (japonica
  misc_feature (79)..(154): Homolog of NCBI NO: 8698833 NR Description: EL5 [Oryza sativa (japonica cultivar-group)]
  misc_feature (33)..(152): Homolog of NCBI NO: 34907968 NR Description: P0446G04.15 [Oryza sativa (japonica
  misc_feature (80)..(149): Homolog of NCBI NO: 15226289 NR Description: putative RING zinc finger protein; protein id: [Arabidopsis thaliana] >gi|25407935|pir||G84678 probable RING
  misc_feature (22)..(152): Homolog of NCBI NO: 34903920 NR Description: OSJNBa0038J17.5 [Oryza sativa (japonica
  misc_feature (3)..(158): Homolog of NCBI NO: 15228395 NR Description: putative RING zinc finger protein; protein id: [Arabidopsis thaliana] >gi|6630539|gb|AAF19558.1|AC011708_1 RING zinc finger protein [Arabidopsis thaliana]
  misc_feature (18)..(149): Homolog of NCBI NO: 25456278 NR Description: probable zinc finger protein [imported] - thaliana >gi|3873408|gb|AAC77829.1| putative zinc finger protein
  misc_feature (79)..(152): Homolog of NCBI NO: 27261477 NR Description: Hypothetical protein [Oryza sativa (japonica

SEQ ID NO: 93603 - protein, 147 aa, Arabidopsis thaliana; identical to SEQ ID NO: 89847
  peptide (1)..(147): Ceres Seq. ID no. 12720850
  misc_feature (96)..(137): Pfam Name: Zinc finger, C3HC4 type (RING finger) Pfam Description: Zinc finger, C3HC4 type (RING finger)
  misc_feature (1)..(147): Homolog of NCBI NO: 15228437 NR Description: RING zinc finger protein; protein id: At3g11110.1 thaliana] >gi|6016703|gb|AAF01530.1|AC009991_26 hypothetical [Arabidopsis thaliana] >gi|12321864|gb|AAG50960.1|AC073395_2 RING
  misc_feature (11)..(141): Homolog of NCBI NO: 28558782 NR Description: RING/C3HC4/PHD zinc finger-like protein [Cucumis
  misc_feature (22)..(146): Homolog of NCBI NO: 28071301 NR Description: P0705A05.3 [Oryza sativa (japonica
  misc_feature (68)..(143): Homolog of NCBI NO: 8698833 NR Description: EL5 [Oryza sativa (japonica cultivar-group)]
  misc_feature (22)..(141): Homolog of NCBI NO: 34907968 NR Description: P0446G04.15 [Oryza sativa (japonica
  misc_feature (69)..(138): Homolog of NCBI NO: 15226289 NR Description: putative RING zinc finger protein; protein id: [Arabidopsis thaliana] >gi|25407935|pir||G84678 probable RING
  misc_feature (11)..(141): Homolog of NCBI NO: 34903920 NR Description: OSJNBa0038J17.5 [Oryza sativa (japonica
  misc_feature (1)..(147): Homolog of NCBI NO: 15228395 NR Description: putative RING zinc finger protein; protein id: [Arabidopsis thaliana] >gi|6630539|gb|AAF19558.1|AC011708_1 RING zinc finger protein [Arabidopsis thaliana]
  misc_feature (7)..(138): Homolog of NCBI NO: 25456278 NR Description: probable zinc finger protein [imported] - thaliana >gi|3873408|gb|AAC77829.1| putative zinc finger protein
  misc_feature (68)..(141): Homolog of NCBI NO: 27261477 NR Description: Hypothetical protein [Oryza sativa (japonica

SEQ ID NO: 93604 - DNA, 1203 bp, Arabidopsis thaliana; identical to SEQ ID NO: 89848
  misc_feature (1)..(1203): Ceres Seq. ID no. 12720851
  misc_feature: MA Experiment ID: 20000182 Result: Up-regulated in Transcription
  misc_feature: MA Experiment 20000182 PARAMETER Experiment Name: At_2mM_SA_P Parameter: Age (day) Value: 14
  misc_feature: MA Experiment 20000182 PARAMETER Experiment Name: At_2mM_SA_P Parameter: Organism Value: A. thaliana
  misc_feature: MA Experiment 20000182 PARAMETER Experiment Name: At_2mM_SA_P Parameter: Plant Line Value: WS
  misc_feature: MA Experiment 20000182 PARAMETER Experiment Name: At_2mM_SA_P Parameter: Timepoint (hr) Value: 6
  misc_feature: MA Experiment 20000182 PARAMETER Experiment Name: At_2mM_SA_P Parameter: Tissue Value: Aerial
  misc_feature: MA Experiment 20000182 PARAMETER Experiment Name: At_2mM_SA_P Parameter: Treatment Value: 2mM SA vs. No Treatment
  misc_feature: MA Experiment ID: 20000211 Result: Up-regulated in Transcription
  misc_feature: MA Experiment 20000211 PARAMETER Experiment Name: At_0.001percent_MeJA__P Parameter: Age (day) Value: 14
  misc_feature: MA Experiment 20000211 PARAMETER Experiment Name: At_0.001percent_MeJA__P Parameter: Organism Value: A. thaliana
  misc_feature: MA Experiment 20000211 PARAMETER Experiment Name: At_0.001percent_MeJA__P Parameter: Plant Line Value: WS
  misc_feature: MA Experiment 20000211 PARAMETER Experiment Name: At_0.001percent_MeJA__P Parameter: Timepoint (hr) Value: 1
  misc_feature: MA Experiment 20000211 PARAMETER Experiment Name: At_0.001percent_MeJA__P Parameter: Tissue Value: Aerial
  misc_feature: MA Experiment 20000211 PARAMETER Experiment Name: At_0.001percent_MeJA__P Parameter: Treatment Value: 0.001percent MeJA vs. No Treatment

SEQ ID NO: 93605 - protein, 400 aa, Arabidopsis thaliana; identical to SEQ ID NO: 89849
  peptide (1)..(400): Ceres Seq. ID no. 12720852
  misc_feature (249)..(349): Pfam Name: 2OG-Fe(II) oxygenase superfamily Pfam Description: 2OG-Fe(II) oxygenase superfamily
  misc_feature (1)..(400): Homolog of NCBI NO: 15229694 NR Description: putative leucoanthocyanidin dioxygenase; protein At3g11180.1 [Arabidopsis thaliana]
  misc_feature (33)..(400): Homolog of NCBI NO: 15239179 NR Description: leucoanthocyanidin dioxygenase-like protein; id: At5g05600.1, supported by cDNA: 13012., supported by cDNA: [Arabidopsis thaliana] >gi|10178137|dbj|BAB11549.1|
  misc_feature (47)..(400): Homolog of NCBI NO: 21537324 NR Description: leucoanthocyanidin dioxygenase-like protein
  misc_feature (47)..(400): Homolog of NCBI NO: 15228785 NR Description: leucoanthocyanidin dioxygenase -like protein; id: At3g55970.1 [Arabidopsis thaliana] >gi|11255840|pir||T49209
  misc_feature (47)..(323): Homolog of NCBI NO: 34907994 NR Description: leucoanthocyanidin dioxygenase-like protein
  misc_feature (315)..(395): Homolog of NCBI NO: 34907994 NR Description: leucoanthocyanidin dioxygenase-like protein
  misc_feature (49)..(400): Homolog of NCBI NO: 15224472 NR Description: putative anthocyanidin synthase; protein id: supported by cDNA: 256433., supported by cDNA: gi_17065133, by cDNA: gi_20259907 [Arabidopsis thaliana]
  misc_feature (49)..(400): Homolog of NCBI NO: 21554535 NR Description: putative anthocyanidin synthase [Arabidopsis
  misc_feature (52)..(386): Homolog of NCBI NO: 2116599 NR Description: leucoanthocyanidin dioxygenase [Perilla
  misc_feature (51)..(395): Homolog of NCBI NO: 20260150 NR Description: strong similarity to naringenin 3-dioxygenase

SEQ ID NO: 93606 - protein, 374 aa, Arabidopsis thaliana; identical to SEQ ID NO: 89850
  peptide (1)..(374): Ceres Seq. ID no. 12720853
  misc_feature (223)..(323): Pfam Name: 2OG-Fe(II) oxygenase superfamily Pfam Description: 2OG-Fe(II) oxygenase superfamily
  misc_feature (1)..(374): Homolog of NCBI NO: 15229694 NR Description: putative leucoanthocyanidin dioxygenase; protein At3g11180.1 [Arabidopsis thaliana]
  misc_feature (7)..(374): Homolog of NCBI NO: 15239179 NR Description: leucoanthocyanidin dioxygenase-like protein; id: At5g05600.1, supported by cDNA: 13012., supported by cDNA: [Arabidopsis thaliana] >gi|10178137|dbj|BAB11549.1|
  misc_feature (21)..(374): Homolog of NCBI NO: 21537324 NR Description: leucoanthocyanidin dioxygenase-like protein
  misc_feature (21)..(374): Homolog of NCBI NO: 15228785 NR Description: leucoanthocyanidin dioxygenase -like protein; id: At3g55970.1 [Arabidopsis thaliana] >gi|11255840|pir||T49209
  misc_feature (21)..(297): Homolog of NCBI NO: 34907994 NR Description: leucoanthocyanidin dioxygenase-like protein
  misc_feature (289)..(369): Homolog of NCBI NO: 34907994 NR Description: leucoanthocyanidin dioxygenase-like protein
  misc_feature (23)..(374): Homolog of NCBI NO: 15224472 NR Description: putative anthocyanidin synthase; protein id: supported by cDNA: 256433., supported by cDNA: gi_17065133, by cDNA: gi_20259907 [Arabidopsis thaliana]
  misc_feature (23)..(374): Homolog of NCBI NO: 21554535 NR Description: putative anthocyanidin synthase [Arabidopsis
  misc_feature (26)..(360): Homolog of NCBI NO: 2116599 NR Description: leucoanthocyanidin dioxygenase [Perilla
  misc_feature (25)..(369): Homolog of NCBI NO: 20260150 NR Description: strong similarity to naringenin 3-dioxygenase

SEQ ID NO: 93607 - protein, 372 aa, Arabidopsis thaliana; identical to SEQ ID NO: 89851
  peptide (1)..(372): Ceres Seq. ID no. 12720854
  misc_feature (221)..(321): Pfam Name: 2OG-Fe(II) oxygenase superfamily Pfam Description: 2OG-Fe(II) oxygenase superfamily
  misc_feature (1)..(372): Homolog of NCBI NO: 15229694 NR Description: putative leucoanthocyanidin dioxygenase; protein At3g11180.1 [Arabidopsis thaliana]
  misc_feature (5)..(372): Homolog of NCBI NO: 15239179 NR Description: leucoanthocyanidin dioxygenase-like protein; id: At5g05600.1, supported by cDNA: 13012., supported by cDNA: [Arabidopsis thaliana] >gi|10178137|dbj|BAB11549.1|
  misc_feature (19)..(372): Homolog of NCBI NO: 21537324 NR Description: leucoanthocyanidin dioxygenase-like protein
  misc_feature (19)..(372): Homolog of NCBI NO: 15228785 NR Description: leucoanthocyanidin dioxygenase -like protein; id: At3g55970.1 [Arabidopsis thaliana] >gi|11255840|pir||T49209
  misc_feature (19)..(295): Homolog of NCBI NO: 34907994 NR Description: leucoanthocyanidin dioxygenase-like protein
  misc_feature (287)..(367): Homolog of NCBI NO: 34907994 NR Description: leucoanthocyanidin dioxygenase-like protein
  misc_feature (21)..(372): Homolog of NCBI NO: 15224472 NR Description: putative anthocyanidin synthase; protein id: supported by cDNA: 256433., supported by cDNA: gi_17065133, by cDNA: gi_20259907 [Arabidopsis thaliana]
  misc_feature (21)..(372): Homolog of NCBI NO: 21554535 NR Description: putative anthocyanidin synthase [Arabidopsis
  misc_feature (24)..(358): Homolog of NCBI NO: 2116599 NR Description: leucoanthocyanidin dioxygenase [Perilla
  misc_feature (23)..(367): Homolog of NCBI NO: 20260150 NR Description: strong similarity to naringenin 3-dioxygenase

SEQ ID NO: 93608 - DNA, 1982 bp, Arabidopsis thaliana; identical to SEQ ID NO: 89852
  misc_feature (1)..(1982): Ceres Seq. ID no. 12720859
  misc_feature: MA Experiment ID: 20000179 Result: Up-regulated in Transcription
  misc_feature: MA Experiment 20000179 PARAMETER Experiment Name: At_Germinating_Seeds_P Parameter: Age (hr) Value: 6 vs. 0
  misc_feature: MA Experiment 20000179 PARAMETER Experiment Name: At_Germinating_Seeds_P Parameter: Tissue Value: Germinating Seeds
  misc_feature: MA Experiment ID: 20000180 Result: Up-regulated in Transcription
  misc_feature: MA Experiment 20000180 PARAMETER Experiment Name: At_Germinating_Seeds_P Parameter: Age (hr) Value: 24 vs. 0
  misc_feature: MA Experiment 20000180 PARAMETER Experiment Name: At_Germinating_Seeds_P Parameter: Tissue Value: Germinating Seeds
  misc_feature: MA Experiment ID: 20000184 Result: Down-regulated in Transcription
  misc_feature: MA Experiment 20000184 PARAMETER Experiment Name: At_Shoots__P Parameter: Age (day) Value: 7
  misc_feature: MA Experiment 20000184 PARAMETER Experiment Name: At_Shoots__P Parameter: Tissue Value: Shoots vs. Whole Plant

SEQ ID NO: 93609 - protein, 612 aa, Arabidopsis thaliana; identical to SEQ ID NO: 89853
  peptide (1)..(612): Ceres Seq. ID no. 12720860
  misc_feature (323)..(482): Pfam Name: Arginine-tRNA-protein transferase, C terminus Pfam Description: Arginine-tRNA-protein transferase, C terminus
  misc_feature (16)..(562): Homolog of NCBI NO: 15239222 NR Description: arginine-tRNA-protein transferase 1 homolog; id: At5g05700.1, supported by cDNA: gi_3806097 [Arabidopsis
  misc_feature (523)..(611): Homolog of NCBI NO: 15239222 NR Description: arginine-tRNA-protein transferase 1 homolog; id: At5g05700.1, supported by cDNA: gi_3806097 [Arabidopsis
  misc_feature (16)..(562): Homolog of NCBI NO: 11357175 NR Description: arginine-tRNA-protein transferase 1 [imported] -
  misc_feature (512)..(611): Homolog of NCBI NO: 11357175 NR Description: arginine-tRNA-protein transferase 1 [imported] -
  misc_feature (257)..(495): Homolog of NCBI NO: 22002033 NR Description: Arginine-tRNA-protein transferase 1
  misc_feature (27)..(176): Homolog of NCBI NO: 22002033 NR Description: Arginine-tRNA-protein transferase 1
  misc_feature (257)..(495): Homolog of NCBI NO: 3806094 NR Description: arginine-tRNA-protein transferase 1-1p; ATE1-1p
  misc_feature (42)..(176): Homolog of NCBI NO: 3806094 NR Description: arginine-tRNA-protein transferase 1-1p; ATE1-1p
  misc_feature (257)..(495): Homolog of NCBI NO: 3806096 NR Description: arginine-tRNA-protein transferase 1-2p; ATE1-2p
  misc_feature (42)..(176): Homolog of NCBI NO: 3806096 NR Description: arginine-tRNA-protein transferase 1-2p; ATE1-2p

SEQ ID NO: 93610 - protein, 605 aa, Arabidopsis thaliana; identical to SEQ ID NO: 89854
  peptide (1)..(605): Ceres Seq. ID no. 12720861
  misc_feature (316)..(475): Pfam Name: Arginine-tRNA-protein transferase, C terminus Pfam Description: Arginine-tRNA-protein transferase, C terminus
  misc_feature (9)..(555): Homolog of NCBI NO: 15239222 NR Description: arginine-tRNA-protein transferase 1 homolog; id: At5g05700.1, supported by cDNA: gi_3806097 [Arabidopsis
  misc_feature (516)..(604): Homolog of NCBI NO: 15239222 NR Description: arginine-tRNA-protein transferase 1 homolog; id: At5g05700.1, supported by cDNA: gi_3806097 [Arabidopsis
  misc_feature (9)..(555): Homolog of NCBI NO: 11357175 NR Description: arginine-tRNA-protein transferase 1 [imported] -
  misc_feature (505)..(604): Homolog of NCBI NO: 11357175 NR Description: arginine-tRNA-protein transferase 1 [imported] -
  misc_feature (250)..(488): Homolog of NCBI NO: 22002033 NR Description: Arginine-tRNA-protein transferase 1
  misc_feature (20)..(169): Homolog of NCBI NO: 22002033 NR Description: Arginine-tRNA-protein transferase 1
  misc_feature (250)..(488): Homolog of NCBI NO: 3806094 NR Description: arginine-tRNA-protein transferase 1-1p; ATE1-1p
  misc_feature (35)..(169): Homolog of NCBI NO: 3806094 NR Description: arginine-tRNA-protein transferase 1-1p; ATE1-1p
  misc_feature (250)..(488): Homolog of NCBI NO: 3806096 NR Description: arginine-tRNA-protein transferase 1-2p; ATE1-2p
  misc_feature (35)..(169): Homolog of NCBI NO: 3806096 NR Description: arginine-tRNA-protein transferase 1-2p; ATE1-2p

SEQ ID NO: 93611 - protein, 526 aa, Arabidopsis thaliana; identical to SEQ ID NO: 89855
  peptide (1)..(526): Ceres Seq. ID no. 12720862
  misc_feature (237)..(396): Pfam Name: Arginine-tRNA-protein transferase, C terminus Pfam Description: Arginine-tRNA-protein transferase, C terminus
  misc_feature (1)..(476): Homolog of NCBI NO: 15239222 NR Description: arginine-tRNA-protein transferase 1 homolog; id: At5g05700.1, supported by cDNA: gi_3806097 [Arabidopsis
  misc_feature (437)..(525): Homolog of NCBI NO: 15239222 NR Description: arginine-tRNA-protein transferase 1 homolog; id: At5g05700.1, supported by cDNA: gi_3806097 [Arabidopsis
  misc_feature (1)..(476): Homolog of NCBI NO: 11357175 NR Description: arginine-tRNA-protein transferase 1 [imported] -
  misc_feature (426)..(525): Homolog of NCBI NO: 11357175 NR Description: arginine-tRNA-protein transferase 1 [imported] -
  misc_feature (171)..(409): Homolog of NCBI NO: 22002033 NR Description: Arginine-tRNA-protein transferase 1
  misc_feature (1)..(90): Homolog of NCBI NO: 22002033 NR Description: Arginine-tRNA-protein transferase 1
  misc_feature (171)..(409): Homolog of NCBI NO: 3806094 NR Description: arginine-tRNA-protein transferase 1-1p; ATE1-1p
  misc_feature (1)..(90): Homolog of NCBI NO: 3806094 NR Description: arginine-tRNA-protein transferase 1-1p; ATE1-1p
  misc_feature (171)..(409): Homolog of NCBI NO: 3806096 NR Description: arginine-tRNA-protein transferase 1-2p; ATE1-2p
  misc_feature (1)..(90): Homolog of NCBI NO: 3806096 NR Description: arginine-tRNA-protein transferase 1-2p; ATE1-2p

SEQ ID NO: 93612 - DNA, 1797 bp, Arabidopsis thaliana; identical to SEQ ID NO: 89856
  misc_feature (1)..(1797): Ceres Seq. ID no. 12720871
  misc_feature: MA Experiment ID: 20000314 Result: Up-regulated in Transcription
  misc_feature: MA Experiment 20000314 PARAMETER Experiment Name: At_14day_Shoots-Roots_Sub_P Parameter: Age (day) Value: 14
  misc_feature: MA Experiment 20000314 PARAMETER Experiment Name: At_14day_Shoots-Roots_Sub_P Parameter: Organism Value: A. thaliana
  misc_feature: MA Experiment 20000314 PARAMETER Experiment Name: At_14day_Shoots-Roots_Sub_P Parameter: Plant Line Value: WS
  misc_feature: MA Experiment 20000314 PARAMETER Experiment Name: At_14day_Shoots-Roots_Sub_P Parameter: Tissue Value: Roots vs. Whole Plant
  misc_feature: MA Experiment ID: 20000347 Result: Up-regulated in Transcription
  misc_feature: MA Experiment 20000347 PARAMETER Experiment Name: At_2mM_SA_Sub_P Parameter: Age (day) Value: 14
  misc_feature: MA Experiment 20000347 PARAMETER Experiment Name: At_2mM_SA_Sub_P Parameter: Organism Value: A. thaliana
  misc_feature: MA Experiment 20000347 PARAMETER Experiment Name: At_2mM_SA_Sub_P Parameter: Plant Line Value: WS
  misc_feature: MA Experiment 20000347 PARAMETER Experiment Name: At_2mM_SA_Sub_P Parameter: Timepoint (hr) Value: 6
  misc_feature: MA Experiment 20000347 PARAMETER Experiment Name: At_2mM_SA_Sub_P Parameter: Tissue Value: Aerial
  misc_feature: MA Experiment 20000347 PARAMETER Experiment Name: At_2mM_SA_Sub_P Parameter: Treatment Value: 2mM SA vs. No Treatment

SEQ ID NO: 93613 - protein, 521 aa, Arabidopsis thaliana; identical to SEQ ID NO: 89857
  peptide (1)..(521): Ceres Seq. ID no. 12720872
  misc_feature (383)..(407): Pfam Name: Leucine Rich Repeat Pfam Description: Leucine Rich Repeat
  misc_feature (23)..(521): Homolog of NCBI NO: 22330985 NR Description: hypothetical protein; protein id: At3g11330.1, by cDNA: gi_18175637 [Arabidopsis thaliana] unknown protein [Arabidopsis thaliana]
  misc_feature (23)..(521): Homolog of NCBI NO: 15239256 NR Description: putative protein; protein id: At5g05850.1 thaliana] >gi|9759110|dbj|BAB09679.1|
  misc_feature (23)..(447): Homolog of NCBI NO: 12321872 NR Description: hypothetical protein; 91861-89496 [Arabidopsis
  misc_feature (111)..(521): Homolog of NCBI NO: 12321872 NR Description: hypothetical protein; 91861-89496 [Arabidopsis
  misc_feature (23)..(490): Homolog of NCBI NO: 7489337 NR Description: leucine-rich protein - common sunflower
  misc_feature (89)..(520): Homolog of NCBI NO: 38605760 NR Description: OSJNBa0044K18.1 [Oryza sativa (japonica
  misc_feature (145)..(521): Homolog of NCBI NO: 18391461 NR Description: expressed protein; protein id: At1g12970.1, by cDNA: gi_17063164 [Arabidopsis thaliana] At1g12970/F13K23_18 [Arabidopsis thaliana]
  misc_feature (141)..(508): Homolog of NCBI NO: 30688342 NR Description: leucine rich repeat protein family [Arabidopsis
  misc_feature (32)..(521): Homolog of NCBI NO: 25518616 NR Description: hypothetical protein F13K23.23 - Arabidopsis >gi|8698744|gb|AAF78502.1|AC012187_22 Contains similarity to CYR1 Candida albicans gb|AB034965 and contains multiple Leucine Rich
  misc_feature (212)..(476): Homolog of NCBI NO: 38346910 NR Description: OSJNBb0015N08.10 [Oryza sativa (japonica

SEQ ID NO: 93614 - protein, 499 aa, Arabidopsis thaliana; identical to SEQ ID NO: 89858
  peptide (1)..(499): Ceres Seq. ID no. 12720873
  misc_feature (361)..(385): Pfam Name: Leucine Rich Repeat Pfam Description: Leucine Rich Repeat
  misc_feature (1)..(499): Homolog of NCBI NO: 22330985 NR Description: hypothetical protein; protein id: At3g11330.1, by cDNA: gi_18175637 [Arabidopsis thaliana] unknown protein [Arabidopsis thaliana]
  misc_feature (1)..(499): Homolog of NCBI NO: 15239256 NR Description: putative protein; protein id: At5g05850.1 thaliana] >gi|9759110|dbj|BAB09679.1|
  misc_feature (1)..(425): Homolog of NCBI NO: 12321872 NR Description: hypothetical protein; 91861-89496 [Arabidopsis
  misc_feature (89)..(499): Homolog of NCBI NO: 12321872 NR Description: hypothetical protein; 91861-89496 [Arabidopsis
  misc_feature (1)..(468): Homolog of NCBI NO: 7489337 NR Description: leucine-rich protein - common sunflower
  misc_feature (67)..(498): Homolog of NCBI NO: 38605760 NR Description: OSJNBa0044K18.1 [Oryza sativa (japonica
  misc_feature (123)..(499): Homolog of NCBI NO: 18391461 NR Description: expressed protein; protein id: At1g12970.1, by cDNA: gi_17063164 [Arabidopsis thaliana] At1g12970/F13K23_18 [Arabidopsis thaliana]
  misc_feature (119)..(486): Homolog of NCBI NO: 30688342 NR Description: leucine rich repeat protein family [Arabidopsis
  misc_feature (10)..(499): Homolog of NCBI NO: 25518616 NR Description: hypothetical protein F13K23.23 - Arabidopsis >gi|8698744|gb|AAF78502.1|AC012187_22 Contains similarity to CYR1 Candida albicans gb|AB034965 and contains multiple Leucine Rich
  misc_feature (190)..(454): Homolog of NCBI NO: 38346910 NR Description: OSJNBb0015N08.10 [Oryza sativa (japonica

SEQ ID NO: 93615 - protein, 445 aa, Arabidopsis thaliana; identical to SEQ ID NO: 89859
  peptide (1)..(445): Ceres Seq. ID no. 12720874
  misc_feature (307)..(331): Pfam Name: Leucine Rich Repeat Pfam Description: Leucine Rich Repeat
  misc_feature (1)..(445): Homolog of NCBI NO: 22330985 NR Description: hypothetical protein; protein id: At3g11330.1, by cDNA: gi_18175637 [Arabidopsis thaliana] unknown protein [Arabidopsis thaliana]
  misc_feature (1)..(445): Homolog of NCBI NO: 15239256 NR Description: putative protein; protein id: At5g05850.1 thaliana] >gi|9759110|dbj|BAB09679.1|
  misc_feature (1)..(371): Homolog of NCBI NO: 12321872 NR Description: hypothetical protein; 91861-89496 [Arabidopsis
  misc_feature (35)..(445): Homolog of NCBI NO: 12321872 NR Description: hypothetical protein; 91861-89496 [Arabidopsis
  misc_feature (1)..(414): Homolog of NCBI NO: 7489337 NR Description: leucine-rich protein - common sunflower
  misc_feature (13)..(444): Homolog of NCBI NO: 38605760 NR Description: OSJNBa0044K18.1 [Oryza sativa (japonica
  misc_feature (69)..(445): Homolog of NCBI NO: 18391461 NR Description: expressed protein; protein id: At1g12970.1, by cDNA: gi_17063164 [Arabidopsis thaliana] At1g12970/F13K23_18 [Arabidopsis thaliana]
  misc_feature (65)..(432): Homolog of NCBI NO: 30688342 NR Description: leucine rich repeat protein family [Arabidopsis
  misc_feature (1)..(445): Homolog of NCBI NO: 25518616 NR Description: hypothetical protein F13K23.23 - Arabidopsis >gi|8698744|gb|AAF78502.1|AC012187_22 Contains similarity to CYR1 Candida albicans gb|AB034965 and contains multiple Leucine Rich
  misc_feature (136)..(400): Homolog of NCBI NO: 38346910 NR Description: OSJNBb0015N08.10 [Oryza sativa (japonica

SEQ ID NO: 93616 - DNA, 1872 bp, Arabidopsis thaliana; identical to SEQ ID NO: 89860
  misc_feature (1)..(1872): Ceres Seq. ID no. 12720894
  misc_feature: MA Experiment ID: 20000180 Result: Down-regulated in Transcription
  misc_feature: MA Experiment 20000180 PARAMETER Experiment Name: At_Germinating_Seeds_P Parameter: Age (hr) Value: 24 vs. 0
  misc_feature: MA Experiment 20000180 PARAMETER Experiment Name: At_Germinating_Seeds_P Parameter: Tissue Value: Germinating Seeds
  misc_feature: MA Experiment ID: 20001248 Result: Up-regulated in Transcription
  misc_feature: MA Experiment 20001248 PARAMETER Experiment Name: At_Far-red-induction_P Parameter: Age (day) Value: 7
  misc_feature: MA Experiment 20001248 PARAMETER Experiment Name: At_Far-red-induction_P Parameter: Light Value: Far-red vs. White
  misc_feature: MA Experiment 20001248 PARAMETER Experiment Name: At_Far-red-induction_P Parameter: Organism Value: A. thaliana
  misc_feature: MA Experiment 20001248 PARAMETER Experiment Name: At_Far-red-induction_P Parameter: Plant Line Value: Columbia
  misc_feature: MA Experiment 20001248 PARAMETER Experiment Name: At_Far-red-induction_P Parameter: Timepoint (hr) Value: 4
  misc_feature: MA Experiment 20001248 PARAMETER Experiment Name: At_Far-red-induction_P Parameter: Tissue Value: Whole Plant

SEQ ID NO: 93617 - protein, 623 aa, Arabidopsis thaliana; identical to SEQ ID NO: 89861
  peptide (1)..(623): Ceres Seq. ID no. 12720895
  misc_feature (324)..(358): Pfam Name: PPR repeat Pfam Description: PPR repeat
  misc_feature (20)..(623): Homolog of NCBI NO: 34909302 NR Description: OJ1529_G03.13 [Oryza sativa (japonica
  misc_feature (21)..(623): Homolog of NCBI NO: 15234831 NR Description: putative protein; protein id: At4g30700.1
  misc_feature (20)..(623): Homolog of NCBI NO: 11994419 NR Description: selenium-binding protein-like [Arabidopsis
  misc_feature (21)..(623): Homolog of NCBI NO: 9279668 NR Description: selenium-binding protein-like [Arabidopsis
  misc_feature (21)..(623): Homolog of NCBI NO: 15231617 NR Description: unknown protein; protein id: At3g26780.1
  misc_feature (20)..(622): Homolog of NCBI NO: 15230593 NR Description: unknown protein; protein id: At3g12770.1
  misc_feature (104)..(623): Homolog of NCBI NO: 15229426 NR Description: hypothetical protein; protein id: At3g23330.1 thaliana] >gi|11994318|dbj|BAB02277.1|
  misc_feature (21)..(121): Homolog of NCBI NO: 15229426 NR Description: hypothetical protein; protein id: At3g23330.1 thaliana] >gi|11994318|dbj|BAB02277.1|
  misc_feature (21)..(623): Homolog of NCBI NO: 34897884 NR Description: Similar to Arabidopsis thaliana DNA chromosome 4,
  misc_feature (21)..(623): Homolog of NCBI NO: 15220337 NR Description: hypothetical protein; protein id: At1g11290.1

SEQ ID NO: 93618 - protein, 580 aa, Arabidopsis thaliana; identical to SEQ ID NO: 89862
  peptide (1)..(580): Ceres Seq. ID no. 12720896
  misc_feature (281)..(315): Pfam Name: PPR repeat Pfam Description: PPR repeat
  misc_feature (1)..(580): Homolog of NCBI NO: 34909302 NR Description: OJ1529_G03.13 [Oryza sativa (japonica
  misc_feature (1)..(580): Homolog of NCBI NO: 15234831 NR Description: putative protein; protein id: At4g30700.1
  misc_feature (1)..(580): Homolog of NCBI NO: 11994419 NR Description: selenium-binding protein-like [Arabidopsis
  misc_feature (1)..(580): Homolog of NCBI NO: 9279668 NR Description: selenium-binding protein-like [Arabidopsis
  misc_feature (1)..(580): Homolog of NCBI NO: 15231617 NR Description: unknown protein; protein id: At3g26780.1
  misc_feature (1)..(579): Homolog of NCBI NO: 15230593 NR Description: unknown protein; protein id: At3g12770.1
  misc_feature (61)..(580): Homolog of NCBI NO: 15229426 NR Description: hypothetical protein; protein id: At3g23330.1 thaliana] >gi|11994318|dbj|BAB02277.1|
  misc_feature (1)..(78): Homolog of NCBI NO: 15229426 NR Description: hypothetical protein; protein id: At3g23330.1 thaliana] >gi|11994318|dbj|BAB02277.1|
  misc_feature (1)..(580): Homolog of NCBI NO: 34897884 NR Description: Similar to Arabidopsis thaliana DNA chromosome 4,
  misc_feature (1)..(580): Homolog of NCBI NO: 15220337 NR Description: hypothetical protein; protein id: At1g11290.1

SEQ ID NO: 93619 - protein, 527 aa, Arabidopsis thaliana; identical to SEQ ID NO: 89863
  peptide (1)..(527): Ceres Seq. ID no. 12720897
  misc_feature (228)..(262): Pfam Name: PPR repeat Pfam Description: PPR repeat
  misc_feature (1)..(527): Homolog of NCBI NO: 34909302 NR Description: OJ1529_G03.13 [Oryza sativa (japonica
  misc_feature (1)..(527): Homolog of NCBI NO: 15234831 NR Description: putative protein; protein id: At4g30700.1
  misc_feature (1)..(527): Homolog of NCBI NO: 11994419 NR Description: selenium-binding protein-like [Arabidopsis
  misc_feature (1)..(527): Homolog of NCBI NO: 9279668 NR Description: selenium-binding protein-like [Arabidopsis
  misc_feature (1)..(527): Homolog of NCBI NO: 15231617 NR Description: unknown protein; protein id: At3g26780.1
  misc_feature (1)..(526): Homolog of NCBI NO: 15230593 NR Description: unknown protein; protein id: At3g12770.1
  misc_feature (8)..(527): Homolog of NCBI NO: 15229426 NR Description: hypothetical protein; protein id: At3g23330.1 thaliana] >gi|11994318|dbj|BAB02277.1|
  misc_feature (1)..(25): Homolog of NCBI NO: 15229426 NR Description: hypothetical protein; protein id: At3g23330.1 thaliana] >gi|11994318|dbj|BAB02277.1|
  misc_feature (1)..(527): Homolog of NCBI NO: 34897884 NR Description: Similar to Arabidopsis thaliana DNA chromosome 4,
  misc_feature (1)..(527): Homolog of NCBI NO: 15220337 NR Description: hypothetical protein; protein id: At1g11290.1

SEQ ID NO: 93620 - DNA, 2174 bp, Arabidopsis thaliana; identical to SEQ ID NO: 89864
  misc_feature (1)..(2174): Ceres Seq. ID no. 12720909
  misc_feature: MA Experiment ID: 20000180 Result: Up-regulated in Transcription
  misc_feature: MA Experiment 20000180 PARAMETER Experiment Name: At_Germinating_Seeds_P Parameter: Age (hr) Value: 24 vs. 0
  misc_feature: MA Experiment 20000180 PARAMETER Experiment Name: At_Germinating_Seeds_P Parameter: Tissue Value: Germinating Seeds
  misc_feature: MA Experiment ID: 20000227 Result: Up-regulated in Transcription
  misc_feature: MA Experiment 20000227 PARAMETER Experiment Name: At_Root-Tips-vs-Tops_P Parameter: Tissue Value: Root Tips vs. Root Tops

SEQ ID NO: 93621 - protein, 622 aa, Arabidopsis thaliana; identical to SEQ ID NO: 89865
  peptide (1)..(622): Ceres Seq. ID no. 12720910
  misc_feature (270)..(539): Pfam Name: Myosin tail Pfam Description: Myosin tail
  misc_feature (14)..(557): Homolog of NCBI NO: 38346645 NR Description: OSJNBa0072D21.15 [Oryza sativa (japonica
  misc_feature (96)..(610): Homolog of NCBI NO: 15238129 NR Description: putative protein; protein id: At5g41620.1 thaliana] >gi|10178016|dbj|BAB11468.1|
  misc_feature (230)..(464): Homolog of NCBI NO: 15223613 NR Description: unknown protein; protein id: At1g50660.1
  misc_feature (230)..(445): Homolog of NCBI NO: 9294553 NR Description: gb|AAF00675.1~gene_id:MQC12.10~similar to unknown
  misc_feature (257)..(447): Homolog of NCBI NO: 38344183 NR Description: OSJNBa0053K19.22 [Oryza sativa (japonica
  misc_feature (230)..(445): Homolog of NCBI NO: 15231114 NR Description: unknown protein; protein id: At3g20350.1
  misc_feature (290)..(447): Homolog of NCBI NO: 29367527 NR Description: unknown [Oryza sativa (japonica cultivar-group)]
  misc_feature (257)..(442): Homolog of NCBI NO: 40253811 NR Description: hypothetical protein [Oryza sativa (japonica group)] >gi|40253851|dbj|BAD05787.1| hypothetical protein [Oryza
  misc_feature (93)..(550): Homolog of NCBI NO: 18407987 NR Description: expressed protein; protein id: At1g64180.1,
  misc_feature (138)..(448): Homolog of NCBI NO: 9757811 NR Description: gb|AAF00675.1~gene_id:MWD9.9~similar to unknown

SEQ ID NO: 93622 - protein, 562 aa, Arabidopsis thaliana; identical to SEQ ID NO: 89866
  peptide (1)..(562): Ceres Seq. ID no. 12720911
  misc_feature (210)..(479): Pfam Name: Myosin tail Pfam Description: Myosin tail
  misc_feature (1)..(497): Homolog of NCBI NO: 38346645 NR Description: OSJNBa0072D21.15 [Oryza sativa (japonica
  misc_feature (36)..(550): Homolog of NCBI NO: 15238129 NR Description: putative protein; protein id: At5g41620.1 thaliana] >gi|10178016|dbj|BAB11468.1|
  misc_feature (170)..(404): Homolog of NCBI NO: 15223613 NR Description: unknown protein; protein id: At1g50660.1
  misc_feature (170)..(385): Homolog of NCBI NO: 9294553 NR Description: gb|AAF00675.1~gene_id:MQC12.10~similar to unknown
  misc_feature (197)..(387): Homolog of NCBI NO: 38344183 NR Description: OSJNBa0053K19.22 [Oryza sativa (japonica
  misc_feature (170)..(385): Homolog of NCBI NO: 15231114 NR Description: unknown protein; protein id: At3g20350.1
  misc_feature (230)..(387): Homolog of NCBI NO: 29367527 NR Description: unknown [Oryza sativa (japonica cultivar-group)]
  misc_feature (197)..(382): Homolog of NCBI NO: 40253811 NR Description: hypothetical protein [Oryza sativa (japonica group)] >gi|40253851|dbj|BAD05787.1| hypothetical protein [Oryza
  misc_feature (33)..(490): Homolog of NCBI NO: 18407987 NR Description: expressed protein; protein id: At1g64180.1,
  misc_feature (78)..(388): Homolog of NCBI NO: 9757811 NR Description: gb|AAF00675.1~gene_id:MWD9.9~similar to unknown

SEQ ID NO: 93623 - protein, 515 aa, Arabidopsis thaliana; identical to SEQ ID NO: 89867
  peptide (1)..(515): Ceres Seq. ID no. 12720912
  misc_feature (163)..(432): Pfam Name: Myosin tail Pfam Description: Myosin tail
  misc_feature (1)..(450): Homolog of NCBI NO: 38346645 NR Description: OSJNBa0072D21.15 [Oryza sativa (japonica
  misc_feature (1)..(503): Homolog of NCBI NO: 15238129 NR Description: putative protein; protein id: At5g41620.1 thaliana] >gi|10178016|dbj|BAB11468.1|
  misc_feature (123)..(357): Homolog of NCBI NO: 15223613 NR Description: unknown protein; protein id: At1g50660.1
  misc_feature (123)..(338): Homolog of NCBI NO: 9294553 NR Description: gb|AAF00675.1~gene_id:MQC12.10~similar to unknown
  misc_feature (150)..(340): Homolog of NCBI NO: 38344183 NR Description: OSJNBa0053K19.22 [Oryza sativa (japonica
  misc_feature (123)..(338): Homolog of NCBI NO: 15231114 NR Description: unknown protein; protein id: At3g20350.1
  misc_feature (183)..(340): Homolog of NCBI NO: 29367527 NR Description: unknown [Oryza sativa (japonica cultivar-group)]
  misc_feature (150)..(335): Homolog of NCBI NO: 40253811 NR Description: hypothetical protein [Oryza sativa (japonica group)] >gi|40253851|dbj|BAD05787.1| hypothetical protein [Oryza
  misc_feature (1)..(443): Homolog of NCBI NO: 18407987 NR Description: expressed protein; protein id: At1g64180.1,
  misc_feature (31)..(341): Homolog of NCBI NO: 9757811 NR Description: gb|AAF00675.1~gene_id:MWD9.9~similar to unknown

SEQ ID NO: 93624 - DNA, 1968 bp, Arabidopsis thaliana; identical to SEQ ID NO: 89868
  misc_feature (1)..(1968): Ceres Seq. ID no. 12720913
  misc_feature: MA Experiment ID: 20000171 Result: Down-regulated in Transcription
  misc_feature: MA Experiment 20000171 PARAMETER Experiment Name: At_42deg_Heat_P Parameter: Age (day) Value: 14
  misc_feature: MA Experiment 20000171 PARAMETER Experiment Name: At_42deg_Heat_P Parameter: Organism Value: A. thaliana
  misc_feature: MA Experiment 20000171 PARAMETER Experiment Name: At_42deg_Heat_P Parameter: Plant Line Value: WS
  misc_feature: MA Experiment 20000171 PARAMETER Experiment Name: At_42deg_Heat_P Parameter: Temperature (deg C) Value: 42 vs. 22
  misc_feature: MA Experiment 20000171 PARAMETER Experiment Name: At_42deg_Heat_P Parameter: Timepoint (hr) Value: 1
  misc_feature: MA Experiment 20000171 PARAMETER Experiment Name: At_42deg_Heat_P Parameter: Tissue Value: Aerial
  misc_feature: MA Experiment ID: 20000173 Result: Down-regulated in Transcription
  misc_feature: MA Experiment 20000173 PARAMETER Experiment Name: At_42deg_Heat_P Parameter: Age (day) Value: 14
  misc_feature: MA Experiment 20000173 PARAMETER Experiment Name: At_42deg_Heat_P Parameter: Organism Value: A. thaliana
  misc_feature: MA Experiment 20000173 PARAMETER Experiment Name: At_42deg_Heat_P Parameter: Plant Line Value: WS
  misc_feature: MA Experiment 20000173 PARAMETER Experiment Name: At_42deg_Heat_P Parameter: Temperature (deg C) Value: 42 vs. 22
  misc_feature: MA Experiment 20000173 PARAMETER Experiment Name: At_42deg_Heat_P Parameter: Timepoint (hr) Value: 6
  misc_feature: MA Experiment 20000173 PARAMETER Experiment Name: At_42deg_Heat_P Parameter: Tissue Value: Aerial
  misc_feature: MA Experiment ID: 20000179 Result: Up-regulated in Transcription
  misc_feature: MA Experiment 20000179 PARAMETER Experiment Name: At_Germinating_Seeds_P Parameter: Age (hr) Value: 6 vs. 0
  misc_feature: MA Experiment 20000179 PARAMETER Experiment Name: At_Germinating_Seeds_P Parameter: Tissue Value: Germinating Seeds
  misc_feature: MA Experiment ID: 20000180 Result: Up-regulated in Transcription
  misc_feature: MA Experiment 20000180 PARAMETER Experiment Name: At_Germinating_Seeds_P Parameter: Age (hr) Value: 24 vs. 0
  misc_feature: MA Experiment 20000180 PARAMETER Experiment Name: At_Germinating_Seeds_P Parameter: Tissue Value: Germinating Seeds
  misc_feature: MA Experiment ID: 20000227 Result: Up-regulated in Transcription
  misc_feature: MA Experiment 20000227 PARAMETER Experiment Name: At_Root-Tips-vs-Tops_P Parameter: Tissue Value: Root Tips vs. Root Tops
  misc_feature: MA Experiment ID: 20000264 Result: Down-regulated in Transcription
  misc_feature: MA Experiment 20000264 PARAMETER Experiment Name: At_Open_Flower_P Parameter: Age (day) Value: 21
  misc_feature: MA Experiment 20000264 PARAMETER Experiment Name: At_Open_Flower_P Parameter: Plant Line Value: WS
  misc_feature: MA Experiment 20000264 PARAMETER Experiment Name: At_Open_Flower_P Parameter: Tissue Value: Open Flower vs. Whole Plant
  misc_feature: MA Experiment ID: 20000794 Result: Down-regulated in Transcription
  misc_feature: MA Experiment 20000794 PARAMETER Experiment Name: At_Petals_P Parameter: Age (day) Value: 23-25 days
  misc_feature: MA Experiment 20000794 PARAMETER Experiment Name: At_Petals_P Parameter: Plant Line Value: WS
  misc_feature: MA Experiment 20000794 PARAMETER Experiment Name: At_Petals_P Parameter: Tissue Value: Petals vs. Whole plant
  misc_feature: MA Experiment ID: 20001451 Result: Up-regulated in Transcription
  misc_feature: MA Experiment 20001451 PARAMETER Experiment Name: At_Far-red-induction_P Parameter: Age (day) Value: 7
  misc_feature: MA Experiment 20001451 PARAMETER Experiment Name: At_Far-red-induction_P Parameter: Light Value: Far-red vs. White
  misc_feature: MA Experiment 20001451 PARAMETER Experiment Name: At_Far-red-induction_P Parameter: Organism Value: A. thaliana
  misc_feature: MA Experiment 20001451 PARAMETER Experiment Name: At_Far-red-induction_P Parameter: Plant Line Value: Columbia
  misc_feature: MA Experiment 20001451 PARAMETER Experiment Name: At_Far-red-induction_P Parameter: Timepoint (hr) Value: 24
  misc_feature: MA Experiment 20001451 PARAMETER Experiment Name: At_Far-red-induction_P Parameter: Tissue Value: Whole Plant
  misc_feature: MA Experiment ID: 20001555 Result: Down-regulated in Transcription
  misc_feature: MA Experiment 20001555 PARAMETER Experiment Name: At_Drought_Soil_Dry_P Parameter: Age (day) Value: 24
  misc_feature: MA Experiment 20001555 PARAMETER Experiment Name: At_Drought_Soil_Dry_P Parameter: Organism Value: A. thaliana
  misc_feature: MA Experiment 20001555 PARAMETER Experiment Name: At_Drought_Soil_Dry_P Parameter: Plant Line Value: WS
  misc_feature: MA Experiment 20001555 PARAMETER Experiment Name: At_Drought_Soil_Dry_P Parameter: Post Timepoint (hr) Value: None
  misc_feature: MA Experiment 20001555 PARAMETER Experiment Name: At_Drought_Soil_Dry_P Parameter: Post-Treatment Value: None
  misc_feature: MA Experiment 20001555 PARAMETER Experiment Name: At_Drought_Soil_Dry_P Parameter: Timepoint (day) Value: 10
  misc_feature: MA Experiment 20001555 PARAMETER Experiment Name: At_Drought_Soil_Dry_P Parameter: Treatment Value: Drought vs. No Drought
  misc_feature: MA Experiment ID: 20001557 Result: Up-regulated in Transcription
  misc_feature: MA Experiment 20001557 PARAMETER Experiment Name: At_Drought_Soil_Dry_P Parameter: Age (day) Value: 27
  misc_feature: MA Experiment 20001557 PARAMETER Experiment Name: At_Drought_Soil_Dry_P Parameter: Organism Value: A. thaliana
  misc_feature: MA Experiment 20001557 PARAMETER Experiment Name: At_Drought_Soil_Dry_P Parameter: Plant Line Value: WS
  misc_feature: MA Experiment 20001557 PARAMETER Experiment Name: At_Drought_Soil_Dry_P Parameter: Post Timepoint (hr) Value: 3
  misc_feature: MA Experiment 20001557 PARAMETER Experiment Name: At_Drought_Soil_Dry_P Parameter: Post-Treatment Value: Re-Water vs. No Drought
  misc_feature: MA Experiment 20001557 PARAMETER Experiment Name: At_Drought_Soil_Dry_P Parameter: Timepoint (day) Value: 13
  misc_feature: MA Experiment 20001557 PARAMETER Experiment Name: At_Drought_Soil_Dry_P Parameter: Treatment Value: Drought vs. No Drought
  misc_feature: MA Experiment ID: 20001558 Result: Up-regulated in Transcription
  misc_feature: MA Experiment 20001558 PARAMETER Experiment Name: At_Drought_Soil_Dry_P Parameter: Age (day) Value: 27
  misc_feature: MA Experiment 20001558 PARAMETER Experiment Name: At_Drought_Soil_Dry_P Parameter: Organism Value: A. thaliana
  misc_feature: MA Experiment 20001558 PARAMETER Experiment Name: At_Drought_Soil_Dry_P Parameter: Plant Line Value: WS
  misc_feature: MA Experiment 20001558 PARAMETER Experiment Name: At_Drought_Soil_Dry_P Parameter: Post Timepoint (hr) Value: 6
  misc_feature: MA Experiment 20001558 PARAMETER Experiment Name: At_Drought_Soil_Dry_P Parameter: Post-Treatment Value: Re-Water vs. No Drought
  misc_feature: MA Experiment 20001558 PARAMETER Experiment Name: At_Drought_Soil_Dry_P Parameter: Timepoint (day) Value: 13
  misc_feature: MA Experiment 20001558 PARAMETER Experiment Name: At_Drought_Soil_Dry_P Parameter: Treatment Value: Drought vs. No Drought
  misc_feature: MA Experiment ID: 20001560 Result: Up-regulated in Transcription
  misc_feature: MA Experiment 20001560 PARAMETER Experiment Name: At_Drought_Soil_Dry_P Parameter: Age (day) Value: 28
  misc_feature: MA Experiment 20001560 PARAMETER Experiment Name: At_Drought_Soil_Dry_P Parameter: Organism Value: A. thaliana
  misc_feature: MA Experiment 20001560 PARAMETER Experiment Name: At_Drought_Soil_Dry_P Parameter: Plant Line Value: WS
  misc_feature: MA Experiment 20001560 PARAMETER Experiment Name: At_Drought_Soil_Dry_P Parameter: Post Timepoint (hr) Value: None
  misc_feature: MA Experiment 20001560 PARAMETER Experiment Name: At_Drought_Soil_Dry_P Parameter: Post-Treatment Value: None
  misc_feature: MA Experiment 20001560 PARAMETER Experiment Name: At_Drought_Soil_Dry_P Parameter: Timepoint (day) Value: 14
  misc_feature: MA Experiment 20001560 PARAMETER Experiment Name: At_Drought_Soil_Dry_P Parameter: Treatment Value: Drought vs. No Drought
  misc_feature: MA Experiment ID: 20001904 Result: Down-regulated in Transcription
  misc_feature: MA Experiment 20001904 PARAMETER Experiment Name: At_Drought_Reproduction_P Parameter: Age (day) Value: 37
  misc_feature: MA Experiment 20001904 PARAMETER Experiment Name: At_Drought_Reproduction_P Parameter: Organism Value: A. thaliana
  misc_feature: MA Experiment 20001904 PARAMETER Experiment Name: At_Drought_Reproduction_P Parameter: Plant Line Value: WS
  misc_feature: MA Experiment 20001904 PARAMETER Experiment Name: At_Drought_Reproduction_P Parameter: Timepoint (day) Value: 7
  misc_feature: MA Experiment 20001904 PARAMETER Experiment Name: At_Drought_Reproduction_P Parameter: Tissue Value: Rosettes
  misc_feature: MA Experiment 20001904 PARAMETER Experiment Name: At_Drought_Reproduction_P Parameter: Treatment Value: Drought vs. No Drought
  misc_feature: MA Experiment ID: 20001905 Result: Down-regulated in Transcription
  misc_feature: MA Experiment 20001905 PARAMETER Experiment Name: At_Drought_Reproduction_P Parameter: Age (day) Value: 40
  misc_feature: MA Experiment 20001905 PARAMETER Experiment Name: At_Drought_Reproduction_P Parameter: Organism Value: A. thaliana
  misc_feature: MA Experiment 20001905 PARAMETER Experiment Name: At_Drought_Reproduction_P Parameter: Plant Line Value: WS
  misc_feature: MA Experiment 20001905 PARAMETER Experiment Name: At_Drought_Reproduction_P Parameter: Timepoint (day) Value: 10
  misc_feature: MA Experiment 20001905 PARAMETER Experiment Name: At_Drought_Reproduction_P Parameter: Tissue Value: Rosettes
  misc_feature: MA Experiment 20001905 PARAMETER Experiment Name: At_Drought_Reproduction_P Parameter: Treatment Value: Drought vs. No Drought
  misc_feature: MA Experiment ID: 20001911 Result: Down-regulated in Transcription
  misc_feature: MA Experiment 20001911 PARAMETER Experiment Name: At_Drought_Reproduction_P Parameter: Age (day) Value: 40
  misc_feature: MA Experiment 20001911 PARAMETER Experiment Name: At_Drought_Reproduction_P Parameter: Organism Value: A. thaliana
  misc_feature: MA Experiment 20001911 PARAMETER Experiment Name: At_Drought_Reproduction_P Parameter: Plant Line Value: WS
  misc_feature: MA Experiment 20001911 PARAMETER Experiment Name: At_Drought_Reproduction_P Parameter: Timepoint (day) Value: 10
  misc_feature: MA Experiment 20001911 PARAMETER Experiment Name: At_Drought_Reproduction_P Parameter: Tissue Value: Flowers
  misc_feature: MA Experiment 20001911 PARAMETER Experiment Name: At_Drought_Reproduction_P Parameter: Treatment Value: Drought vs. No Drought

SEQ ID NO: 93625 - protein, 462 aa, Arabidopsis thaliana; identical to SEQ ID NO: 89869
  peptide (1)..(462): Ceres Seq. ID no. 12720914
  misc_feature (40)..(187): Pfam Name: Fasciclin domain Pfam Description: Fasciclin domain
  misc_feature (1)..(462): Homolog of NCBI NO: 18399319 NR Description: expressed protein; protein id: At3g11700.1, by cDNA: gi_15810316, supported by cDNA: gi_16604518 [Arabidopsis >gi|15810317|gb|AAL07046.1| unknown protein [Arabidopsis
  misc_feature (1)..(440): Homolog of NCBI NO: 6041822 NR Description: unknown protein [Arabidopsis thaliana]
  misc_feature (1)..(443): Homolog of NCBI NO: 15240029 NR Description: putative protein; protein id: At5g06390.1 thaliana] >gi|9758419|dbj|BAB08961.1|
  misc_feature (18)..(452): Homolog of NCBI NO: 15231197 NR Description: unknown protein; protein id: At3g52370.1
  misc_feature (15)..(452): Homolog of NCBI NO: 30686588 NR Description: expressed protein [Arabidopsis thaliana] unknown protein [Arabidopsis thaliana]
  misc_feature (15)..(441): Homolog of NCBI NO: 25370583 NR Description: hypothetical protein At2g35860 [imported] - thaliana >gi|4510383|gb|AAD21471.1| unknown protein [Arabidopsis
  misc_feature (28)..(462): Homolog of NCBI NO: 33146739 NR Description: GPI-anchored protein -like [Oryza sativa
  misc_feature (28)..(439): Homolog of NCBI NO: 34899886 NR Description: OJ1714_H10.26 [Oryza sativa (japonica
  misc_feature (22)..(427): Homolog of NCBI NO: 27819499 NR Description: putative arabinogalactan-protein [Oryza sativa
  misc_feature (116)..(440): Homolog of NCBI NO: 7486009 NR Description: hypothetical protein F22O6.250 - Arabidopsis

SEQ ID NO: 93626 - DNA, 2109 bp, Arabidopsis thaliana; identical to SEQ ID NO: 89870
  misc_feature (1)..(2109): Ceres Seq. ID no. 12720922
  misc_feature: MA Experiment ID: 20000794 Result: Up-regulated in Transcription
  misc_feature: MA Experiment 20000794 PARAMETER Experiment Name: At_Petals_P Parameter: Age (day) Value: 23-25 days
  misc_feature: MA Experiment 20000794 PARAMETER Experiment Name: At_Petals_P Parameter: Plant Line Value: WS
  misc_feature: MA Experiment 20000794 PARAMETER Experiment Name: At_Petals_P Parameter: Tissue Value: Petals vs. Whole plant
  misc_feature: MA Experiment ID: 20001247 Result: Up-regulated in Transcription
  misc_feature: MA Experiment 20001247 PARAMETER Experiment Name: At_Far-red-induction_P Parameter: Age (day) Value: 7
  misc_feature: MA Experiment 20001247 PARAMETER Experiment Name: At_Far-red-induction_P Parameter: Light Value: Far-red vs. White
  misc_feature: MA Experiment 20001247 PARAMETER Experiment Name: At_Far-red-induction_P Parameter: Organism Value: A. thaliana
  misc_feature: MA Experiment 20001247 PARAMETER Experiment Name: At_Far-red-induction_P Parameter: Plant Line Value: Columbia
  misc_feature: MA Experiment 20001247 PARAMETER Experiment Name: At_Far-red-induction_P Parameter: Timepoint (hr) Value: 1
  misc_feature: MA Experiment 20001247 PARAMETER Experiment Name: At_Far-red-induction_P Parameter: Tissue Value: Whole Plant
  misc_feature: MA Experiment ID: 20001557 Result: Up-regulated in Transcription
  misc_feature: MA Experiment 20001557 PARAMETER Experiment Name: At_Drought_Soil_Dry_P Parameter: Age (day) Value: 27
  misc_feature: MA Experiment 20001557 PARAMETER Experiment Name: At_Drought_Soil_Dry_P Parameter: Organism Value: A. thaliana
  misc_feature: MA Experiment 20001557 PARAMETER Experiment Name: At_Drought_Soil_Dry_P Parameter: Plant Line Value: WS
  misc_feature: MA Experiment 20001557 PARAMETER Experiment Name: At_Drought_Soil_Dry_P Parameter: Post Timepoint (hr) Value: 3
  misc_feature: MA Experiment 20001557 PARAMETER Experiment Name: At_Drought_Soil_Dry_P Parameter: Post-Treatment Value: Re-Water vs. No Drought
  misc_feature: MA Experiment 20001557 PARAMETER Experiment Name: At_Drought_Soil_Dry_P Parameter: Timepoint (day) Value: 13
  misc_feature: MA Experiment 20001557 PARAMETER Experiment Name: At_Drought_Soil_Dry_P Parameter: Treatment Value: Drought vs. No Drought

SEQ ID NO: 93627 - protein, 702 aa, Arabidopsis thaliana; identical to SEQ ID NO: 89871
  peptide (1)..(702): Ceres Seq. ID no. 12720923
  misc_feature (1)..(679): Homolog of NCBI NO: 15238352 NR Description: unknown protein; protein id: At5g04860.1 thaliana] >gi|9758461|dbj|BAB08990.1| gene_id:MUK11.18~unknown
  misc_feature (363)..(693): Homolog of NCBI NO: 25412320 NR Description: hypothetical protein At2g25460 [imported] -
  misc_feature (406)..(640): Homolog of NCBI NO: 34903512 NR Description: P0001B06.8 [Oryza sativa (japonica
  misc_feature (491)..(699): Homolog of NCBI NO: 15226799 NR Description: unknown protein; protein id: At2g10560.1
  misc_feature (363)..(558): Homolog of NCBI NO: 17063176 NR Description: SYNC1 protein [Arabidopsis thaliana]
  misc_feature (363)..(558): Homolog of NCBI NO: 18400834 NR Description: expressed protein; protein id: At2g25460.1, by cDNA: gi_17063175 [Arabidopsis thaliana]
  misc_feature (535)..(698): Homolog of NCBI NO: 34903512 NR Description: P0001B06.8 [Oryza sativa (japonica
  misc_feature (539)..(694): Homolog of NCBI NO: 15238352 NR Description: unknown protein; protein id: At5g04860.1 thaliana] >gi|9758461|dbj|BAB08990.1| gene_id:MUK11.18~unknown

SEQ ID NO: 93628 - protein, 698 aa, Arabidopsis thaliana; identical to SEQ ID NO: 89872
  peptide (1)..(698): Ceres Seq. ID no. 12720924
  misc_feature (1)..(675): Homolog of NCBI NO: 15238352 NR Description: unknown protein; protein id: At5g04860.1 thaliana] >gi|9758461|dbj|BAB08990.1| gene_id:MUK11.18~unknown
  misc_feature (359)..(689): Homolog of NCBI NO: 25412320 NR Description: hypothetical protein At2g25460 [imported] -
  misc_feature (402)..(636): Homolog of NCBI NO: 34903512 NR Description: P0001B06.8 [Oryza sativa (japonica
  misc_feature (487)..(695): Homolog of NCBI NO: 15226799 NR Description: unknown protein; protein id: At2g10560.1
  misc_feature (359)..(554): Homolog of NCBI NO: 17063176 NR Description: SYNC1 protein [Arabidopsis thaliana]
  misc_feature (359)..(554): Homolog of NCBI NO: 18400834 NR Description: expressed protein; protein id: At2g25460.1, by cDNA: gi_17063175 [Arabidopsis thaliana]
  misc_feature (531)..(694): Homolog of NCBI NO: 34903512 NR Description: P0001B06.8 [Oryza sativa (japonica
  misc_feature (535)..(690): Homolog of NCBI NO: 15238352 NR Description: unknown protein; protein id: At5g04860.1 thaliana] >gi|9758461|dbj|BAB08990.1| gene_id:MUK11.18~unknown

SEQ ID NO: 93629 - protein, 697 aa, Arabidopsis thaliana; identical to SEQ ID NO: 89873
  peptide (1)..(697): Ceres Seq. ID no. 12720925
  misc_feature (1)..(674): Homolog of NCBI NO: 15238352 NR Description: unknown protein; protein id: At5g04860.1 thaliana] >gi|9758461|dbj|BAB08990.1| gene_id:MUK11.18~unknown
  misc_feature (358)..(688): Homolog of NCBI NO: 25412320 NR Description: hypothetical protein At2g25460 [imported] -
  misc_feature (401)..(635): Homolog of NCBI NO: 34903512 NR Description: P0001B06.8 [Oryza sativa (japonica
  misc_feature (486)..(694): Homolog of NCBI NO: 15226799 NR Description: unknown protein; protein id: At2g10560.1
  misc_feature (358)..(553): Homolog of NCBI NO: 17063176 NR Description: SYNC1 protein [Arabidopsis thaliana]
  misc_feature (358)..(553): Homolog of NCBI NO: 18400834 NR Description: expressed protein; protein id: At2g25460.1, by cDNA: gi_17063175 [Arabidopsis thaliana]
  misc_feature (530)..(693): Homolog of NCBI NO: 34903512 NR Description: P0001B06.8 [Oryza sativa (japonica
  misc_feature (534)..(689): Homolog of NCBI NO: 15238352 NR Description: unknown protein; protein id: At5g04860.1 thaliana] >gi|9758461|dbj|BAB08990.1| gene_id:MUK11.18~unknown

SEQ ID NO: 93630 - DNA, 2913 bp, Arabidopsis thaliana; identical to SEQ ID NO: 89874
  misc_feature (1)..(2913): Ceres Seq. ID no. 12720952
  misc_feature: MA Experiment ID: 20000495 Result: Down-regulated in Transcription
  misc_feature: MA Experiment 20000495 PARAMETER Experiment Name: At_Guard_Cells_P Parameter: Harvest Date Value: 8/2/2002
  misc_feature: MA Experiment 20000495 PARAMETER Experiment Name: At_Guard_Cells_P Parameter: Organism Value: A. thaliana
  misc_feature: MA Experiment 20000495 PARAMETER Experiment Name: At_Guard_Cells_P Parameter: Tissue Value: Guard Cells vs. Leaves
  misc_feature: MA Experiment ID: 20001248 Result: Down-regulated in Transcription
  misc_feature: MA Experiment 20001248 PARAMETER Experiment Name: At_Far-red-induction_P Parameter: Age (day) Value: 7
  misc_feature: MA Experiment 20001248 PARAMETER Experiment Name: At_Far-red-induction_P Parameter: Light Value: Far-red vs. White
  misc_feature: MA Experiment 20001248 PARAMETER Experiment Name: At_Far-red-induction_P Parameter: Organism Value: A. thaliana
  misc_feature: MA Experiment 20001248 PARAMETER Experiment Name: At_Far-red-induction_P Parameter: Plant Line Value: Columbia
  misc_feature: MA Experiment 20001248 PARAMETER Experiment Name: At_Far-red-induction_P Parameter: Timepoint (hr) Value: 4
  misc_feature: MA Experiment 20001248 PARAMETER Experiment Name: At_Far-red-induction_P Parameter: Tissue Value: Whole Plant
  misc_feature: MA Experiment ID: 20001451 Result: Down-regulated in Transcription
  misc_feature: MA Experiment 20001451 PARAMETER Experiment Name: At_Far-red-induction_P Parameter: Age (day) Value: 7
  misc_feature: MA Experiment 20001451 PARAMETER Experiment Name: At_Far-red-induction_P Parameter: Light Value: Far-red vs. White
  misc_feature: MA Experiment 20001451 PARAMETER Experiment Name: At_Far-red-induction_P Parameter: Organism Value: A. thaliana
  misc_feature: MA Experiment 20001451 PARAMETER Experiment Name: At_Far-red-induction_P Parameter: Plant Line Value: Columbia
  misc_feature: MA Experiment 20001451 PARAMETER Experiment Name: At_Far-red-induction_P Parameter: Timepoint (hr) Value: 24
  misc_feature: MA Experiment 20001451 PARAMETER Experiment Name: At_Far-red-induction_P Parameter: Tissue Value: Whole Plant

SEQ ID NO: 93631 - protein, 970 aa, Arabidopsis thaliana; identical to SEQ ID NO: 89875
  peptide (1)..(970): Ceres Seq. ID no. 12720953
  misc_feature (672)..(933): Pfam Name: UbiA prenyltransferase family Pfam Description: UbiA prenyltransferase family
  misc_feature (1)..(558): Homolog of NCBI NO: 6671951 NR Description: hypothetical protein [Arabidopsis thaliana]
  misc_feature (562)..(946): Homolog of NCBI NO: 10998133 NR Description: dbj|BAA17774.1~gene_id:MEC18.5~similar to unknown
  misc_feature (643)..(970): Homolog of NCBI NO: 34393498 NR Description: putative tocopherol polyprenyltransferase [Oryza
  misc_feature (1)..(329): Homolog of NCBI NO: 21741757 NR Description: OSJNBa0060B20.16 [Oryza sativa (japonica
  misc_feature (663)..(814): Homolog of NCBI NO: 23039416 NR Description: hypothetical protein [Trichodesmium erythraeum
  misc_feature (834)..(894): Homolog of NCBI NO: 23039416 NR Description: hypothetical protein [Trichodesmium erythraeum
  misc_feature (921)..(968): Homolog of NCBI NO: 23039416 NR Description: hypothetical protein [Trichodesmium erythraeum
  misc_feature (661)..(890): Homolog of NCBI NO: 23125851 NR Description: hypothetical protein [Nostoc punctiforme]
  misc_feature (921)..(968): Homolog of NCBI NO: 23125851 NR Description: hypothetical protein [Nostoc punctiforme]
  misc_feature (661)..(897): Homolog of NCBI NO: 37519852 NR Description: unknown protein [Gloeobacter violaceus]

SEQ ID NO: 93632 - protein, 902 aa, Arabidopsis thaliana; identical to SEQ ID NO: 89876
  peptide (1)..(902): Ceres Seq. ID no. 12720954
  misc_feature (604)..(865): Pfam Name: UbiA prenyltransferase family Pfam Description: UbiA prenyltransferase family
  misc_feature (1)..(490): Homolog of NCBI NO: 6671951 NR Description: hypothetical protein [Arabidopsis thaliana]
  misc_feature (494)..(878): Homolog of NCBI NO: 10998133 NR Description: dbj|BAA17774.1~gene_id:MEC18.5~similar to unknown
  misc_feature (575)..(902): Homolog of NCBI NO: 34393498 NR Description: putative tocopherol polyprenyltransferase [Oryza
  misc_feature (1)..(261): Homolog of NCBI NO: 21741757 NR Description: OSJNBa0060B20.16 [Oryza sativa (japonica
  misc_feature (595)..(746): Homolog of NCBI NO: 23039416 NR Description: hypothetical protein [Trichodesmium erythraeum
  misc_feature (766)..(826): Homolog of NCBI NO: 23039416 NR Description: hypothetical protein [Trichodesmium erythraeum
  misc_feature (853)..(900): Homolog of NCBI NO: 23039416 NR Description: hypothetical protein [Trichodesmium erythraeum
  misc_feature (593)..(822): Homolog of NCBI NO: 23125851 NR Description: hypothetical protein [Nostoc punctiforme]
  misc_feature (853)..(900): Homolog of NCBI NO: 23125851 NR Description: hypothetical protein [Nostoc punctiforme]
  misc_feature (593)..(829): Homolog of NCBI NO: 37519852 NR Description: unknown protein [Gloeobacter violaceus]

SEQ ID NO: 93633 - protein, 846 aa, Arabidopsis thaliana; identical to SEQ ID NO: 89877
  peptide (1)..(846): Ceres Seq. ID no. 12720955
  misc_feature (548)..(809): Pfam Name: UbiA prenyltransferase family Pfam Description: UbiA prenyltransferase family
  misc_feature (1)..(434): Homolog of NCBI NO: 6671951 NR Description: hypothetical protein [Arabidopsis thaliana]
  misc_feature (438)..(822): Homolog of NCBI NO: 10998133 NR Description: dbj|BAA17774.1~gene_id:MEC18.5~similar to unknown
  misc_feature (519)..(846): Homolog of NCBI NO: 34393498 NR Description: putative tocopherol polyprenyltransferase [Oryza
  misc_feature (1)..(205): Homolog of NCBI NO: 21741757 NR Description: OSJNBa0060B20.16 [Oryza sativa (japonica
  misc_feature (539)..(690): Homolog of NCBI NO: 23039416 NR Description: hypothetical protein [Trichodesmium erythraeum
  misc_feature (710)..(770): Homolog of NCBI NO: 23039416 NR Description: hypothetical protein [Trichodesmium erythraeum
  misc_feature (797)..(844): Homolog of NCBI NO: 23039416 NR Description: hypothetical protein [Trichodesmium erythraeum
  misc_feature (537)..(766): Homolog of NCBI NO: 23125851 NR Description: hypothetical protein [Nostoc punctiforme]
  misc_feature (797)..(844): Homolog of NCBI NO: 23125851 NR Description: hypothetical protein [Nostoc punctiforme]
  misc_feature (537)..(773): Homolog of NCBI NO: 37519852 NR Description: unknown protein [Gloeobacter violaceus]

SEQ ID NO: 93634 - DNA, 3093 bp, Arabidopsis thaliana; identical to SEQ ID NO: 89878
  misc_feature (1)..(3093): Ceres Seq. ID no. 12720964
  misc_feature: MA Experiment ID: 20000173 Result: Down-regulated in Transcription
  misc_feature: MA Experiment 20000173 PARAMETER Experiment Name: At_42deg_Heat_P Parameter: Age (day) Value: 14
  misc_feature: MA Experiment 20000173 PARAMETER Experiment Name: At_42deg_Heat_P Parameter: Organism Value: A. thaliana
  misc_feature: MA Experiment 20000173 PARAMETER Experiment Name: At_42deg_Heat_P Parameter: Plant Line Value: WS
  misc_feature: MA Experiment 20000173 PARAMETER Experiment Name: At_42deg_Heat_P Parameter: Temperature (deg C) Value: 42 vs. 22
  misc_feature: MA Experiment 20000173 PARAMETER Experiment Name: At_42deg_Heat_P Parameter: Timepoint (hr) Value: 6
  misc_feature: MA Experiment 20000173 PARAMETER Experiment Name: At_42deg_Heat_P Parameter: Tissue Value: Aerial
  misc_feature: MA Experiment ID: 20000184 Result: Down-regulated in Transcription
  misc_feature: MA Experiment 20000184 PARAMETER Experiment Name: At_Shoots__P Parameter: Age (day) Value: 7
  misc_feature: MA Experiment 20000184 PARAMETER Experiment Name: At_Shoots__P Parameter: Tissue Value: Shoots vs. Whole Plant
  misc_feature: MA Experiment ID: 20000227 Result: Up-regulated in Transcription
  misc_feature: MA Experiment 20000227 PARAMETER Experiment Name: At_Root-Tips-vs-Tops_P Parameter: Tissue Value: Root Tips vs. Root Tops
  misc_feature: MA Experiment ID: 20000794 Result: Up-regulated in Transcription
  misc_feature: MA Experiment 20000794 PARAMETER Experiment Name: At_Petals_P Parameter: Age (day) Value: 23-25 days
  misc_feature: MA Experiment 20000794 PARAMETER Experiment Name: At_Petals_P Parameter: Plant Line Value: WS
  misc_feature: MA Experiment 20000794 PARAMETER Experiment Name: At_Petals_P Parameter: Tissue Value: Petals vs. Whole plant
  misc_feature: MA Experiment ID: 20001247 Result: Up-regulated in Transcription
  misc_feature: MA Experiment 20001247 PARAMETER Experiment Name: At_Far-red-induction_P Parameter: Age (day) Value: 7
  misc_feature: MA Experiment 20001247 PARAMETER Experiment Name: At_Far-red-induction_P Parameter: Light Value: Far-red vs. White
  misc_feature: MA Experiment 20001247 PARAMETER Experiment Name: At_Far-red-induction_P Parameter: Organism Value: A. thaliana
  misc_feature: MA Experiment 20001247 PARAMETER Experiment Name: At_Far-red-induction_P Parameter: Plant Line Value: Columbia
  misc_feature: MA Experiment 20001247 PARAMETER Experiment Name: At_Far-red-induction_P Parameter: Timepoint (hr) Value: 1
  misc_feature: MA Experiment 20001247 PARAMETER Experiment Name: At_Far-red-induction_P Parameter: Tissue Value: Whole Plant

SEQ ID NO: 93635 - protein, 1030 aa, Arabidopsis thaliana; identical to SEQ ID NO: 89879
  peptide (1)..(1030): Ceres Seq. ID no. 12720965
  misc_feature (384)..(732): Pfam Name: Myosin tail Pfam Description: Myosin tail
  misc_feature (1)..(733): Homolog of NCBI NO: 22326629 NR Description: kinesin-related protein; protein id: At5g06670.1
  misc_feature (793)..(1030): Homolog of NCBI NO: 26450189 NR Description: unknown protein [Arabidopsis thaliana]
  misc_feature (517)..(733): Homolog of NCBI NO: 26450189 NR Description: unknown protein [Arabidopsis thaliana]
  misc_feature (20)..(733): Homolog of NCBI NO: 30687506 NR Description: kinesin-related protein [Arabidopsis thaliana]
  misc_feature (821)..(903): Homolog of NCBI NO: 30687506 NR Description: kinesin-related protein [Arabidopsis thaliana]
  misc_feature (183)..(506): Homolog of NCBI NO: 21741211 NR Description: OSJNBb0086G13.6 [Oryza sativa (japonica
  misc_feature (837)..(1010): Homolog of NCBI NO: 21741211 NR Description: OSJNBb0086G13.6 [Oryza sativa (japonica
  misc_feature (3)..(160): Homolog of NCBI NO: 21741211 NR Description: OSJNBb0086G13.6 [Oryza sativa (japonica
  misc_feature (22)..(484): Homolog of NCBI NO: 18399675 NR Description: kinesin-related protein; protein id: At2g21380.1, by cDNA: gi_14532683 [Arabidopsis thaliana] putative kinesin heavy chain [Arabidopsis thaliana]
  misc_feature (633)..(1027): Homolog of NCBI NO: 18399675 NR Description: kinesin-related protein; protein id: At2g21380.1, by cDNA: gi_14532683 [Arabidopsis thaliana] putative kinesin heavy chain [Arabidopsis thaliana]

SEQ ID NO: 93636 - protein, 893 aa, Arabidopsis thaliana; identical to SEQ ID NO: 89880
  peptide (1)..(893): Ceres Seq. ID no. 12720966
  misc_feature (247)..(595): Pfam Name: Myosin tail Pfam Description: Myosin tail
  misc_feature (1)..(596): Homolog of NCBI NO: 22326629 NR Description: kinesin-related protein; protein id: At5g06670.1
  misc_feature (656)..(893): Homolog of NCBI NO: 26450189 NR Description: unknown protein [Arabidopsis thaliana]
  misc_feature (380)..(596): Homolog of NCBI NO: 26450189 NR Description: unknown protein [Arabidopsis thaliana]
  misc_feature (1)..(596): Homolog of NCBI NO: 30687506 NR Description: kinesin-related protein [Arabidopsis thaliana]
  misc_feature (684)..(766): Homolog of NCBI NO: 30687506 NR Description: kinesin-related protein [Arabidopsis thaliana]
  misc_feature (46)..(369): Homolog of NCBI NO: 21741211 NR Description: OSJNBb0086G13.6 [Oryza sativa (japonica
  misc_feature (700)..(873): Homolog of NCBI NO: 21741211 NR Description: OSJNBb0086G13.6 [Oryza sativa (japonica
  misc_feature (1)..(23): Homolog of NCBI NO: 21741211 NR Description: OSJNBb0086G13.6 [Oryza sativa (japonica
  misc_feature (1)..(347): Homolog of NCBI NO: 18399675 NR Description: kinesin-related protein; protein id: At2g21380.1, by cDNA: gi_14532683 [Arabidopsis thaliana] putative kinesin heavy chain [Arabidopsis thaliana]
  misc_feature (496)..(890): Homolog of NCBI NO: 18399675 NR Description: kinesin-related protein; protein id: At2g21380.1, by cDNA: gi_14532683 [Arabidopsis thaliana] putative kinesin heavy chain [Arabidopsis thaliana]

SEQ ID NO: 93637 - protein, 872 aa, Arabidopsis thaliana; identical to SEQ ID NO: 89881
  peptide (1)..(872): Ceres Seq. ID no. 12720967
  misc_feature (226)..(574): Pfam Name: Myosin tail Pfam Description: Myosin tail
  misc_feature (1)..(575): Homolog of NCBI NO: 22326629 NR Description: kinesin-related protein; protein id: At5g06670.1
  misc_feature (635)..(872): Homolog of NCBI NO: 26450189 NR Description: unknown protein [Arabidopsis thaliana]
  misc_feature (359)..(575): Homolog of NCBI NO: 26450189 NR Description: unknown protein [Arabidopsis thaliana]
  misc_feature (1)..(575): Homolog of NCBI NO: 30687506 NR Description: kinesin-related protein [Arabidopsis thaliana]
  misc_feature (663)..(745): Homolog of NCBI NO: 30687506 NR Description: kinesin-related protein [Arabidopsis thaliana]
  misc_feature (25)..(348): Homolog of NCBI NO: 21741211 NR Description: OSJNBb0086G13.6 [Oryza sativa (japonica
  misc_feature (679)..(852): Homolog of NCBI NO: 21741211 NR Description: OSJNBb0086G13.6 [Oryza sativa (japonica
  misc_feature (1)..(326): Homolog of NCBI NO: 18399675 NR Description: kinesin-related protein; protein id: At2g21380.1, by cDNA: gi_14532683 [Arabidopsis thaliana] putative kinesin heavy chain [Arabidopsis thaliana]
  misc_feature (475)..(869): Homolog of NCBI NO: 18399675 NR Description: kinesin-related protein; protein id: At2g21380.1, by cDNA: gi_14532683 [Arabidopsis thaliana] putative kinesin heavy chain [Arabidopsis thaliana]
  misc_feature (627)..(836): Homolog of NCBI NO: 21741211 NR Description: OSJNBb0086G13.6 [Oryza sativa (japonica

SEQ ID NO: 93638 - DNA, 669 bp, Arabidopsis thaliana; identical to SEQ ID NO: 89882
  misc_feature (1)..(669): Ceres Seq. ID no. 12720976
  misc_feature: MA Experiment ID: 20001910 Result: Up-regulated in Transcription
  misc_feature: MA Experiment 20001910 PARAMETER Experiment Name: At_Drought_Reproduction_P Parameter: Age (day) Value: 37
  misc_feature: MA Experiment 20001910 PARAMETER Experiment Name: At_Drought_Reproduction_P Parameter: Organism Value: A. thaliana
  misc_feature: MA Experiment 20001910 PARAMETER Experiment Name: At_Drought_Reproduction_P Parameter: Plant Line Value: WS
  misc_feature: MA Experiment 20001910 PARAMETER Experiment Name: At_Drought_Reproduction_P Parameter: Timepoint (day) Value: 7
  misc_feature: MA Experiment 20001910 PARAMETER Experiment Name: At_Drought_Reproduction_P Parameter: Tissue Value: Flowers
  misc_feature: MA Experiment 20001910 PARAMETER Experiment Name: At_Drought_Reproduction_P Parameter: Treatment Value: Drought vs. No Drought

SEQ ID NO: 93639 - protein, 222 aa, Arabidopsis thaliana; identical to SEQ ID NO: 89883
  peptide (1)..(222): Ceres Seq. ID no. 12720977
  misc_feature (17)..(178): Pfam Name: Ras family Pfam Description: Ras family
  misc_feature (1)..(222): Homolog of NCBI NO: 15230422 NR Description: ras-related GTP-binding protein, putative;
  misc_feature (1)..(222): Homolog of NCBI NO: 12322015 NR Description: ras-related GTP-binding protein, putative;
  misc_feature (1)..(222): Homolog of NCBI NO: 15238852 NR Description: Ras-related GTP-binding protein, putative; id: At5g47960.1, supported by cDNA: gi_12004622 [Arabidopsis

SEQ ID NO: 93640 - protein, 131 aa, Arabidopsis thaliana; identical to SEQ ID NO: 89884
  peptide (1)..(131): Ceres Seq. ID no. 12720978
  misc_feature (1)..(87): Pfam Name: Ras family Pfam Description: Ras family
  misc_feature (1)..(131): Homolog of NCBI NO: 15230422 NR Description: ras-related GTP-binding protein, putative;
  misc_feature (1)..(131): Homolog of NCBI NO: 12322015 NR Description: ras-related GTP-binding protein, putative;
  misc_feature (1)..(131): Homolog of NCBI NO: 15238852 NR Description: Ras-related GTP-binding protein, putative; id: At5g47960.1, supported by cDNA: gi_12004622 [Arabidopsis

SEQ ID NO: 93641 - protein, 126 aa, Arabidopsis thaliana; identical to SEQ ID NO: 89885
  peptide (1)..(126): Ceres Seq. ID no. 12720979
  misc_feature (1)..(82): Pfam Name: Ras family Pfam Description: Ras family
  misc_feature (1)..(126): Homolog of NCBI NO: 15230422 NR Description: ras-related GTP-binding protein, putative;
  misc_feature (1)..(126): Homolog of NCBI NO: 12322015 NR Description: ras-related GTP-binding protein, putative;
  misc_feature (1)..(126): Homolog of NCBI NO: 15238852 NR Description: Ras-related GTP-binding protein, putative; id: At5g47960.1, supported by cDNA: gi_12004622 [Arabidopsis

SEQ ID NO: 93642 - DNA, 789 bp, Arabidopsis thaliana; identical to SEQ ID NO: 89886
  misc_feature (1)..(789): Ceres Seq. ID no. 12720980
  misc_feature: MA Experiment ID: 20000179 Result: Up-regulated in Transcription
  misc_feature: MA Experiment 20000179 PARAMETER Experiment Name: At_Germinating_Seeds_P Parameter: Age (hr) Value: 6 vs. 0
  misc_feature: MA Experiment 20000179 PARAMETER Experiment Name: At_Germinating_Seeds_P Parameter: Tissue Value: Germinating Seeds
  misc_feature: MA Experiment ID: 20000180 Result: Up-regulated in Transcription
  misc_feature: MA Experiment 20000180 PARAMETER Experiment Name: At_Germinating_Seeds_P Parameter: Age (hr) Value: 24 vs. 0
  misc_feature: MA Experiment 20000180 PARAMETER Experiment Name: At_Germinating_Seeds_P Parameter: Tissue Value: Germinating Seeds
  misc_feature: MA Experiment ID: 20000436 Result: Down-regulated in Transcription
  misc_feature: MA Experiment 20000436 PARAMETER Experiment Name: At_Drought_P Parameter: Age (day) Value: 7
  misc_feature: MA Experiment 20000436 PARAMETER Experiment Name: At_Drought_P Parameter: Organism Value: A. thaliana
  misc_feature: MA Experiment 20000436 PARAMETER Experiment Name: At_Drought_P Parameter: Plant Line Value: WS
  misc_feature: MA Experiment 20000436 PARAMETER Experiment Name: At_Drought_P Parameter: Timepoint (hr) Value: 12
  misc_feature: MA Experiment 20000436 PARAMETER Experiment Name: At_Drought_P Parameter: Tissue Value: Whole Plant
  misc_feature: MA Experiment 20000436 PARAMETER Experiment Name: At_Drought_P Parameter: Treatment Value: Drought vs. No Drought
  misc_feature: MA Experiment ID: 20000437 Result: Down-regulated in Transcription
  misc_feature: MA Experiment 20000437 PARAMETER Experiment Name: At_Drought_P Parameter: Age (day) Value: 8
  misc_feature: MA Experiment 20000437 PARAMETER Experiment Name: At_Drought_P Parameter: Organism Value: A. thaliana
  misc_feature: MA Experiment 20000437 PARAMETER Experiment Name: At_Drought_P Parameter: Plant Line Value: WS
  misc_feature: MA Experiment 20000437 PARAMETER Experiment Name: At_Drought_P Parameter: Timepoint (hr) Value: 24
  misc_feature: MA Experiment 20000437 PARAMETER Experiment Name: At_Drought_P Parameter: Tissue Value: Whole Plant
  misc_feature: MA Experiment 20000437 PARAMETER Experiment Name: At_Drought_P Parameter: Treatment Value: Drought vs. No Drought
  misc_feature: MA Experiment ID: 20000441 Result: Down-regulated in Transcription
  misc_feature: MA Experiment 20000441 PARAMETER Experiment Name: At_1uM_BR-BRZ__P Parameter: Tissue Value: Shoot Apices
  misc_feature: MA Experiment 20000441 PARAMETER Experiment Name: At_1uM_BR-BRZ__P Parameter: Treatment Value: 1uM BR vs. No Treatment
  misc_feature: MA Experiment ID: 20000443 Result: Down-regulated in Transcription
  misc_feature: MA Experiment 20000443 PARAMETER Experiment Name: At_1uM_BR-BRZ__P Parameter: Tissue Value: Shoot Apices
  misc_feature: MA Experiment 20000443 PARAMETER Experiment Name: At_1uM_BR-BRZ__P Parameter: Treatment Value: 1uM BRZ vs. No Treatment
  misc_feature: MA Experiment ID: 20000451 Result: Up-regulated in Transcription
  misc_feature: MA Experiment 20000451 PARAMETER Experiment Name: At_CS6879_Shoots-Roots_P Parameter: Age (day) Value: 14
  misc_feature: MA Experiment 20000451 PARAMETER Experiment Name: At_CS6879_Shoots-Roots_P Parameter: Organism Value: A. thaliana
  misc_feature: MA Experiment 20000451 PARAMETER Experiment Name: At_CS6879_Shoots-Roots_P Parameter: Plant Line Value: CS6879 vs. WS
  misc_feature: MA Experiment 20000451 PARAMETER Experiment Name: At_CS6879_Shoots-Roots_P Parameter: Tissue Value: Roots
  misc_feature: MA Experiment ID: 20000495 Result: Up-regulated in Transcription
  misc_feature: MA Experiment 20000495 PARAMETER Experiment Name: At_Guard_Cells_P Parameter: Harvest Date Value: 8/2/2002
  misc_feature: MA Experiment 20000495 PARAMETER Experiment Name: At_Guard_Cells_P Parameter: Organism Value: A. thaliana
  misc_feature: MA Experiment 20000495 PARAMETER Experiment Name: At_Guard_Cells_P Parameter: Tissue Value: Guard Cells vs. Leaves

SEQ ID NO: 93643 - protein, 262 aa, Arabidopsis thaliana; identical to SEQ ID NO: 89887
  peptide (1)..(262): Ceres Seq. ID no. 12720981
  misc_feature (11)..(76): Pfam Name: DnaJ domain Pfam Description: DnaJ domain
  misc_feature (1)..(262): Homolog of NCBI NO: 15230424 NR Description: DnaJ protein, putative; protein id: At3g12170.1
  misc_feature (1)..(262): Homolog of NCBI NO: 15240212 NR Description: DnaJ homologue (gb|AAB91418.1|); protein id: supported by cDNA: gi_2689719 [Arabidopsis thaliana]
  misc_feature (1)..(262): Homolog of NCBI NO: 2689720 NR Description: DnaJ homologue [Arabidopsis thaliana]
  misc_feature (1)..(149): Homolog of NCBI NO: 12322012 NR Description: DnaJ protein, putative, 3' partial; 1110-1
  misc_feature (11)..(230): Homolog of NCBI NO: 39794528 NR Description: Unknown (protein for MGC:76175) [Silurana
  misc_feature (11)..(249): Homolog of NCBI NO: 34868976 NR Description: similar to J domain of DnaJ-like-protein 1 - rat
  misc_feature (11)..(249): Homolog of NCBI NO: 25513803 NR Description: J domain of DnaJ-like-protein 1 - rat
  misc_feature (11)..(262): Homolog of NCBI NO: 27597059 NR Description: DnaJ homolog, subfamily C, member 9; DnaJ protein
  misc_feature (11)..(230): Homolog of NCBI NO: 23956266 NR Description: similar to DnaJ protein SB73; likely ortholog of
  misc_feature (12)..(262): Homolog of NCBI NO: 9971117 NR Description: dJ1099D15.1 (putative DNAJ protein) [Homo sapiens]

SEQ ID NO: 93644 - protein, 165 aa, Arabidopsis thaliana; identical to SEQ ID NO: 89888
  peptide (1)..(165): Ceres Seq. ID no. 12720982
  misc_feature (1)..(165): Homolog of NCBI NO: 15230424 NR Description: DnaJ protein, putative; protein id: At3g12170.1
  misc_feature (1)..(165): Homolog of NCBI NO: 15240212 NR Description: DnaJ homologue (gb|AAB91418.1|); protein id: supported by cDNA: gi_2689719 [Arabidopsis thaliana]
  misc_feature (1)..(165): Homolog of NCBI NO: 2689720 NR Description: DnaJ homologue [Arabidopsis thaliana]
  misc_feature (1)..(52): Homolog of NCBI NO: 12322012 NR Description: DnaJ protein, putative, 3' partial; 1110-1
  misc_feature (1)..(133): Homolog of NCBI NO: 39794528 NR Description: Unknown (protein for MGC:76175) [Silurana
  misc_feature (1)..(152): Homolog of NCBI NO: 34868976 NR Description: similar to J domain of DnaJ-like-protein 1 - rat
  misc_feature (1)..(152): Homolog of NCBI NO: 25513803 NR Description: J domain of DnaJ-like-protein 1 - rat
  misc_feature (1)..(165): Homolog of NCBI NO: 27597059 NR Description: DnaJ homolog, subfamily C, member 9; DnaJ protein
  misc_feature (1)..(133): Homolog of NCBI NO: 23956266 NR Description: similar to DnaJ protein SB73; likely ortholog of
  misc_feature (1)..(165): Homolog of NCBI NO: 9971117 NR Description: dJ1099D15.1 (putative DNAJ protein) [Homo sapiens]

SEQ ID NO: 93645 - DNA, 848 bp, Arabidopsis thaliana; identical to SEQ ID NO: 89889
  misc_feature (1)..(848): Ceres Seq. ID no. 12721000
  misc_feature: MA Experiment ID: 20000166 Result: Up-regulated in Transcription
  misc_feature: MA Experiment 20000166 PARAMETER Experiment Name: At_100uM_ABA_P Parameter: Age (day) Value: 14
  misc_feature: MA Experiment 20000166 PARAMETER Experiment Name: At_100uM_ABA_P Parameter: Organism Value: A. thaliana
  misc_feature: MA Experiment 20000166 PARAMETER Experiment Name: At_100uM_ABA_P Parameter: Plant Line Value: WS
  misc_feature: MA Experiment 20000166 PARAMETER Experiment Name: At_100uM_ABA_P Parameter: Timepoint (hr) Value: 1
  misc_feature: MA Experiment 20000166 PARAMETER Experiment Name: At_100uM_ABA_P Parameter: Tissue Value: Aerial
  misc_feature: MA Experiment 20000166 PARAMETER Experiment Name: At_100uM_ABA_P Parameter: Treatment Value: 100uM ABA vs. No Treatment
  misc_feature: MA Experiment ID: 20000169 Result: Up-regulated in Transcription
  misc_feature: MA Experiment 20000169 PARAMETER Experiment Name: At_100uM_ABA_P Parameter: Age (day) Value: 14
  misc_feature: MA Experiment 20000169 PARAMETER Experiment Name: At_100uM_ABA_P Parameter: Organism Value: A. thaliana
  misc_feature: MA Experiment 20000169 PARAMETER Experiment Name: At_100uM_ABA_P Parameter: Plant Line Value: WS
  misc_feature: MA Experiment 20000169 PARAMETER Experiment Name: At_100uM_ABA_P Parameter: Timepoint (hr) Value: 6
  misc_feature: MA Experiment 20000169 PARAMETER Experiment Name: At_100uM_ABA_P Parameter: Tissue Value: Aerial
  misc_feature: MA Experiment 20000169 PARAMETER Experiment Name: At_100uM_ABA_P Parameter: Treatment Value: 100uM ABA vs. No Treatment
  misc_feature: MA Experiment ID: 20000180 Result: Up-regulated in Transcription
  misc_feature: MA Experiment 20000180 PARAMETER Experiment Name: At_Germinating_Seeds_P Parameter: Age (hr) Value: 24 vs. 0
  misc_feature: MA Experiment 20000180 PARAMETER Experiment Name: At_Germinating_Seeds_P Parameter: Tissue Value: Germinating Seeds
  misc_feature: MA Experiment ID: 20000264 Result: Down-regulated in Transcription
  misc_feature: MA Experiment 20000264 PARAMETER Experiment Name: At_Open_Flower_P Parameter: Age (day) Value: 21
  misc_feature: MA Experiment 20000264 PARAMETER Experiment Name: At_Open_Flower_P Parameter: Plant Line Value: WS
  misc_feature: MA Experiment 20000264 PARAMETER Experiment Name: At_Open_Flower_P Parameter: Tissue Value: Open Flower vs. Whole Plant
  misc_feature: MA Experiment ID: 20000265 Result: Down-regulated in Transcription
  misc_feature: MA Experiment 20000265 PARAMETER Experiment Name: At_Open_Flower_P Parameter: Age (day) Value: 21
  misc_feature: MA Experiment 20000265 PARAMETER Experiment Name: At_Open_Flower_P Parameter: Plant Line Value: WS
  misc_feature: MA Experiment 20000265 PARAMETER Experiment Name: At_Open_Flower_P Parameter: Tissue Value: Closed Flower vs. Whole Plant
  misc_feature: MA Experiment ID: 20000286 Result: Down-regulated in Transcription
  misc_feature: MA Experiment 20000286 PARAMETER Experiment Name: At_Open_Flower_P Parameter: Age (day) Value: 21
  misc_feature: MA Experiment 20000286 PARAMETER Experiment Name: At_Open_Flower_P Parameter: Plant Line Value: WS
  misc_feature: MA Experiment 20000286 PARAMETER Experiment Name: At_Open_Flower_P Parameter: Tissue Value: Half Open vs. Whole Plant
  misc_feature: MA Experiment ID: 20000436 Result: Up-regulated in Transcription
  misc_feature: MA Experiment 20000436 PARAMETER Experiment Name: At_Drought_P Parameter: Age (day) Value: 7
  misc_feature: MA Experiment 20000436 PARAMETER Experiment Name: At_Drought_P Parameter: Organism Value: A. thaliana
  misc_feature: MA Experiment 20000436 PARAMETER Experiment Name: At_Drought_P Parameter: Plant Line Value: WS
  misc_feature: MA Experiment 20000436 PARAMETER Experiment Name: At_Drought_P Parameter: Timepoint (hr) Value: 12
  misc_feature: MA Experiment 20000436 PARAMETER Experiment Name: At_Drought_P Parameter: Tissue Value: Whole Plant
  misc_feature: MA Experiment 20000436 PARAMETER Experiment Name: At_Drought_P Parameter: Treatment Value: Drought vs. No Drought
  misc_feature: MA Experiment ID: 20000437 Result: Up-regulated in Transcription
  misc_feature: MA Experiment 20000437 PARAMETER Experiment Name: At_Drought_P Parameter: Age (day) Value: 8
  misc_feature: MA Experiment 20000437 PARAMETER Experiment Name: At_Drought_P Parameter: Organism Value: A. thaliana
  misc_feature: MA Experiment 20000437 PARAMETER Experiment Name: At_Drought_P Parameter: Plant Line Value: WS
  misc_feature: MA Experiment 20000437 PARAMETER Experiment Name: At_Drought_P Parameter: Timepoint (hr) Value: 24
  misc_feature: MA Experiment 20000437 PARAMETER Experiment Name: At_Drought_P Parameter: Tissue Value: Whole Plant
  misc_feature: MA Experiment 20000437 PARAMETER Experiment Name: At_Drought_P Parameter: Treatment Value: Drought vs. No Drought
  misc_feature: MA Experiment ID: 20000439 Result: Down-regulated in Transcription
  misc_feature: MA Experiment 20000439 PARAMETER Experiment Name: At_Roots__P Parameter: Age (day) Value: 14 vs. 21
  misc_feature: MA Experiment 20000439 PARAMETER Experiment Name: At_Roots__P Parameter: Organism Value: A. thaliana
  misc_feature: MA Experiment 20000439 PARAMETER Experiment Name: At_Roots__P Parameter: Tissue Value: Roots vs. Whole Plant
  misc_feature: MA Experiment ID: 20000453 Result: Up-regulated in Transcription
  misc_feature: MA Experiment 20000453 PARAMETER Experiment Name: At_100uM_ABA_P Parameter: Age (day) Value: 15
  misc_feature: MA Experiment 20000453 PARAMETER Experiment Name: At_100uM_ABA_P Parameter: Organism Value: A. thaliana
  misc_feature: MA Experiment 20000453 PARAMETER Experiment Name: At_100uM_ABA_P Parameter: Plant Line Value: WS
  misc_feature: MA Experiment 20000453 PARAMETER Experiment Name: At_100uM_ABA_P Parameter: Timepoint (hr) Value: 24
  misc_feature: MA Experiment 20000453 PARAMETER Experiment Name: At_100uM_ABA_P Parameter: Tissue Value: Aerial
  misc_feature: MA Experiment 20000453 PARAMETER Experiment Name: At_100uM_ABA_P Parameter: Treatment Value: 100uM ABA vs. No Treatment
  misc_feature: MA Experiment ID: 20000573 Result: Down-regulated in Transcription
  misc_feature: MA Experiment 20000573 PARAMETER Experiment Name: At_100uM_ABA_Mutants__P Parameter: Organism Value: A. thaliana
  misc_feature: MA Experiment 20000573 PARAMETER Experiment Name: At_100uM_ABA_Mutants__P Parameter: Plant Line Value: CS22 vs. Ler wt
  misc_feature: MA Experiment 20000573 PARAMETER Experiment Name: At_100uM_ABA_Mutants__P Parameter: Timepoint (hr) Value: N/A
  misc_feature: MA Experiment 20000573 PARAMETER Experiment Name: At_100uM_ABA_Mutants__P Parameter: Tissue Value: Whole Plant
  misc_feature: MA Experiment 20000573 PARAMETER Experiment Name: At_100uM_ABA_Mutants__P Parameter: Treatment Value: None
  misc_feature: MA Experiment ID: 20000574 Result: Down-regulated in Transcription
  misc_feature: MA Experiment 20000574 PARAMETER Experiment Name: At_100uM_ABA_Mutants__P Parameter: Organism Value: A. thaliana
  misc_feature: MA Experiment 20000574 PARAMETER Experiment Name: At_100uM_ABA_Mutants__P Parameter: Plant Line Value: CS23 vs. Ler wt
  misc_feature: MA Experiment 20000574 PARAMETER Experiment Name: At_100uM_ABA_Mutants__P Parameter: Timepoint (hr) Value: N/A
  misc_feature: MA Experiment 20000574 PARAMETER Experiment Name: At_100uM_ABA_Mutants__P Parameter: Tissue Value: Whole Plant
  misc_feature: MA Experiment 20000574 PARAMETER Experiment Name: At_100uM_ABA_Mutants__P Parameter: Treatment Value: None
  misc_feature: MA Experiment ID: 20000794 Result: Down-regulated in Transcription
  misc_feature: MA Experiment 20000794 PARAMETER Experiment Name: At_Petals_P Parameter: Age (day) Value: 23-25 days
  misc_feature: MA Experiment 20000794 PARAMETER Experiment Name: At_Petals_P Parameter: Plant Line Value: WS
  misc_feature: MA Experiment 20000794 PARAMETER Experiment Name: At_Petals_P Parameter: Tissue Value: Petals vs. Whole plant
  misc_feature: MA Experiment ID: 20001554 Result: Up-regulated in Transcription
  misc_feature: MA Experiment 20001554 PARAMETER Experiment Name: At_Drought_Soil_Dry_P Parameter: Age (day) Value: 21
  misc_feature: MA Experiment 20001554 PARAMETER Experiment Name: At_Drought_Soil_Dry_P Parameter: Organism Value: A. thaliana
  misc_feature: MA Experiment 20001554 PARAMETER Experiment Name: At_Drought_Soil_Dry_P Parameter: Plant Line Value: WS
  misc_feature: MA Experiment 20001554 PARAMETER Experiment Name: At_Drought_Soil_Dry_P Parameter: Post Timepoint (hr) Value: None
  misc_feature: MA Experiment 20001554 PARAMETER Experiment Name: At_Drought_Soil_Dry_P Parameter: Post-Treatment Value: None
  misc_feature: MA Experiment 20001554 PARAMETER Experiment Name: At_Drought_Soil_Dry_P Parameter: Timepoint (day) Value: 7
  misc_feature: MA Experiment 20001554 PARAMETER Experiment Name: At_Drought_Soil_Dry_P Parameter: Treatment Value: Drought vs. No Drought
  misc_feature: MA Experiment ID: 20001555 Result: Up-regulated in Transcription
  misc_feature: MA Experiment 20001555 PARAMETER Experiment Name: At_Drought_Soil_Dry_P Parameter: Age (day) Value: 24
  misc_feature: MA Experiment 20001555 PARAMETER Experiment Name: At_Drought_Soil_Dry_P Parameter: Organism Value: A. thaliana
  misc_feature: MA Experiment 20001555 PARAMETER Experiment Name: At_Drought_Soil_Dry_P Parameter: Plant Line Value: WS
  misc_feature: MA Experiment 20001555 PARAMETER Experiment Name: At_Drought_Soil_Dry_P Parameter: Post Timepoint (hr) Value: None
  misc_feature: MA Experiment 20001555 PARAMETER Experiment Name: At_Drought_Soil_Dry_P Parameter: Post-Treatment Value: None
  misc_feature: MA Experiment 20001555 PARAMETER Experiment Name: At_Drought_Soil_Dry_P Parameter: Timepoint (day) Value: 10
  misc_feature: MA Experiment 20001555 PARAMETER Experiment Name: At_Drought_Soil_Dry_P Parameter: Treatment Value: Drought vs. No Drought
  misc_feature: MA Experiment ID: 20001557 Result: Down-regulated in Transcription
  misc_feature: MA Experiment 20001557 PARAMETER Experiment Name: At_Drought_Soil_Dry_P Parameter: Age (day) Value: 27
  misc_feature: MA Experiment 20001557 PARAMETER Experiment Name: At_Drought_Soil_Dry_P Parameter: Organism Value: A. thaliana
  misc_feature: MA Experiment 20001557 PARAMETER Experiment Name: At_Drought_Soil_Dry_P Parameter: Plant Line Value: WS
  misc_feature: MA Experiment 20001557 PARAMETER Experiment Name: At_Drought_Soil_Dry_P Parameter: Post Timepoint (hr) Value: 3
  misc_feature: MA Experiment 20001557 PARAMETER Experiment Name: At_Drought_Soil_Dry_P Parameter: Post-Treatment Value: Re-Water vs. No Drought
  misc_feature: MA Experiment 20001557 PARAMETER Experiment Name: At_Drought_Soil_Dry_P Parameter: Timepoint (day) Value: 13
  misc_feature: MA Experiment 20001557 PARAMETER Experiment Name: At_Drought_Soil_Dry_P Parameter: Treatment Value: Drought vs. No Drought
  misc_feature: MA Experiment ID: 20001558 Result: Down-regulated in Transcription
  misc_feature: MA Experiment 20001558 PARAMETER Experiment Name: At_Drought_Soil_Dry_P Parameter: Age (day) Value: 27
  misc_feature: MA Experiment 20001558 PARAMETER Experiment Name: At_Drought_Soil_Dry_P Parameter: Organism Value: A. thaliana
  misc_feature: MA Experiment 20001558 PARAMETER Experiment Name: At_Drought_Soil_Dry_P Parameter: Plant Line Value: WS
  misc_feature: MA Experiment 20001558 PARAMETER Experiment Name: At_Drought_Soil_Dry_P Parameter: Post Timepoint (hr) Value: 6
  misc_feature: MA Experiment 20001558 PARAMETER Experiment Name: At_Drought_Soil_Dry_P Parameter: Post-Treatment Value: Re-Water vs. No Drought
  misc_feature: MA Experiment 20001558 PARAMETER Experiment Name: At_Drought_Soil_Dry_P Parameter: Timepoint (day) Value: 13
  misc_feature: MA Experiment 20001558 PARAMETER Experiment Name: At_Drought_Soil_Dry_P Parameter: Treatment Value: Drought vs. No Drought
  misc_feature: MA Experiment ID: 20001560 Result: Down-regulated in Transcription
  misc_feature: MA Experiment 20001560 PARAMETER Experiment Name: At_Drought_Soil_Dry_P Parameter: Age (day) Value: 28
  misc_feature: MA Experiment 20001560 PARAMETER Experiment Name: At_Drought_Soil_Dry_P Parameter: Organism Value: A. thaliana
  misc_feature: MA Experiment 20001560 PARAMETER Experiment Name: At_Drought_Soil_Dry_P Parameter: Plant Line Value: WS
  misc_feature: MA Experiment 20001560 PARAMETER Experiment Name: At_Drought_Soil_Dry_P Parameter: Post Timepoint (hr) Value: None
  misc_feature: MA Experiment 20001560 PARAMETER Experiment Name: At_Drought_Soil_Dry_P Parameter: Post-Treatment Value: None
  misc_feature: MA Experiment 20001560 PARAMETER Experiment Name: At_Drought_Soil_Dry_P Parameter: Timepoint (day) Value: 14
  misc_feature: MA Experiment 20001560 PARAMETER Experiment Name: At_Drought_Soil_Dry_P Parameter: Treatment Value: Drought vs. No Drought

SEQ ID NO: 93646 - protein, 186 aa, Arabidopsis thaliana; identical to SEQ ID NO: 89890
  peptide (1)..(186): Ceres Seq. ID no. 12721001
  misc_feature (1)..(186): Homolog of NCBI NO: 2398529 NR Description: Transcription factor [Arabidopsis thaliana]
  misc_feature (1)..(186): Homolog of NCBI NO: 15238156 NR Description: putative protein; protein id: At5g47640.1, by cDNA: gi_14326579, supported by cDNA: gi_18700233 [Arabidopsis >gi|9758792|dbj|BAB09090.1| contains similarity to [Arabidopsis
  misc_feature (64)..(186): Homolog of NCBI NO: 9965735 NR Description: transcription factor Hap3b [Arabidopsis thaliana]
  misc_feature (1)..(160): Homolog of NCBI NO: 15233475 NR Description: CCAAT-binding transcription factor subunit protein id: At4g14540.1 [Arabidopsis thaliana]
  misc_feature (5)..(164): Homolog of NCBI NO: 22380 NR Description: CAAT-box DNA binding protein subunit B (NF-YB)
  misc_feature (5)..(164): Homolog of NCBI NO: 115840 NR Description: CCAAT-BINDING TRANSCRIPTION FACTOR SUBUNIT A
  misc_feature (1)..(135): Homolog of NCBI NO: 15231796 NR Description: transcription factor NF-Y, CCAAT-binding - like protein id: At3g53340.1 [Arabidopsis thaliana]
  misc_feature (2)..(164): Homolog of NCBI NO: 30409461 NR Description: NF-YB [Oryza sativa (japonica cultivar-group)]
  misc_feature (15)..(145): Homolog of NCBI NO: 18404885 NR Description: putative CCAAT-binding transcription factor protein id: At2g38880.1, supported by cDNA: 7805. [Arabidopsis >gi|2398527|emb|CAA74051.1| Transcription factor [Arabidopsis
  misc_feature (5)..(155): Homolog of NCBI NO: 17979253 NR Description: At2g37060/T2N18.18 [Arabidopsis thaliana]

SEQ ID NO: 93647 - protein, 150 aa, Arabidopsis thaliana; identical to SEQ ID NO: 48331
  peptide (1)..(150): Ceres Seq. ID no. 12721002
  misc_feature (1)..(150): Homolog of NCBI NO: 2398529 NR Description: Transcription factor [Arabidopsis thaliana]
  misc_feature (1)..(150): Homolog of NCBI NO: 15238156 NR Description: putative protein; protein id: At5g47640.1, by cDNA: gi_14326579, supported by cDNA: gi_18700233 [Arabidopsis >gi|9758792|dbj|BAB09090.1| contains similarity to [Arabidopsis
  misc_feature (28)..(150): Homolog of NCBI NO: 9965735 NR Description: transcription factor Hap3b [Arabidopsis thaliana]
  misc_feature (1)..(124): Homolog of NCBI NO: 15233475 NR Description: CCAAT-binding transcription factor subunit protein id: At4g14540.1 [Arabidopsis thaliana]
  misc_feature (1)..(128): Homolog of NCBI NO: 22380 NR Description: CAAT-box DNA binding protein subunit B (NF-YB)
  misc_feature (1)..(128): Homolog of NCBI NO: 115840 NR Description: CCAAT-BINDING TRANSCRIPTION FACTOR SUBUNIT A
  misc_feature (1)..(99): Homolog of NCBI NO: 15231796 NR Description: transcription factor NF-Y, CCAAT-binding - like protein id: At3g53340.1 [Arabidopsis thaliana]
  misc_feature (1)..(128): Homolog of NCBI NO: 30409461 NR Description: NF-YB [Oryza sativa (japonica cultivar-group)]
  misc_feature (1)..(109): Homolog of NCBI NO: 18404885 NR Description: putative CCAAT-binding transcription factor protein id: At2g38880.1, supported by cDNA: 7805. [Arabidopsis >gi|2398527|emb|CAA74051.1| Transcription factor [Arabidopsis
  misc_feature (1)..(119): Homolog of NCBI NO: 17979253 NR Description: At2g37060/T2N18.18 [Arabidopsis thaliana]

SEQ ID NO: 93648 - protein, 132 aa, Arabidopsis thaliana; identical to SEQ ID NO: 48332
  peptide (1)..(132): Ceres Seq. ID no. 12721003
  misc_feature (1)..(132): Homolog of NCBI NO: 2398529 NR Description: Transcription factor [Arabidopsis thaliana]
  misc_feature (1)..(132): Homolog of NCBI NO: 15238156 NR Description: putative protein; protein id: At5g47640.1, by cDNA: gi_14326579, supported by cDNA: gi_18700233 [Arabidopsis >gi|9758792|dbj|BAB09090.1| contains similarity to [Arabidopsis
  misc_feature (10)..(132): Homolog of NCBI NO: 9965735 NR Description: transcription factor Hap3b [Arabidopsis thaliana]
  misc_feature (1)..(106): Homolog of NCBI NO: 15233475 NR Description: CCAAT-binding transcription factor subunit protein id: At4g14540.1 [Arabidopsis thaliana]
  misc_feature (1)..(110): Homolog of NCBI NO: 22380 NR Description: CAAT-box DNA binding protein subunit B (NF-YB)
  misc_feature (1)..(110): Homolog of NCBI NO: 115840 NR Description: CCAAT-BINDING TRANSCRIPTION FACTOR SUBUNIT A
  misc_feature (1)..(81): Homolog of NCBI NO: 15231796 NR Description: transcription factor NF-Y, CCAAT-binding - like protein id: At3g53340.1 [Arabidopsis thaliana]
  misc_feature (1)..(110): Homolog of NCBI NO: 30409461 NR Description: NF-YB [Oryza sativa (japonica cultivar-group)]
  misc_feature (1)..(91): Homolog of NCBI NO: 18404885 NR Description: putative CCAAT-binding transcription factor protein id: At2g38880.1, supported by cDNA: 7805. [Arabidopsis >gi|2398527|emb|CAA74051.1| Transcription factor [Arabidopsis
  misc_feature (1)..(101): Homolog of NCBI NO: 17979253 NR Description: At2g37060/T2N18.18 [Arabidopsis thaliana]

SEQ ID NO: 93649 - DNA, 661 bp, Arabidopsis thaliana; identical to SEQ ID NO: 89893
  misc_feature (1)..(661): Ceres Seq. ID no. 12721011
  misc_feature: MA Experiment ID: 20000088 Result: Down-regulated in Transcription
  misc_feature: MA Experiment 20000088 PARAMETER Experiment Name: At_100uM_ABA_Mutants_cDNA_P Parameter: Plant Line Value: Landsberg
  misc_feature: MA Experiment 20000088 PARAMETER Experiment Name: At_100uM_ABA_Mutants_cDNA_P Parameter: Timepoint (hr) Value: 6
  misc_feature: MA Experiment 20000088 PARAMETER Experiment Name: At_100uM_ABA_Mutants_cDNA_P Parameter: Tissue Value: Aerial
  misc_feature: MA Experiment 20000088 PARAMETER Experiment Name: At_100uM_ABA_Mutants_cDNA_P Parameter: Treatment Value: 100uM ABA vs. No Treatment
  misc_feature: MA Experiment ID: 20000227 Result: Down-regulated in Transcription
  misc_feature: MA Experiment 20000227 PARAMETER Experiment Name: At_Root-Tips-vs-Tops_P Parameter: Tissue Value: Root Tips vs. Root Tops

SEQ ID NO: 93650 - protein, 181 aa, Arabidopsis thaliana; identical to SEQ ID NO: 89894
  peptide (1)..(181): Ceres Seq. ID no. 12721012
  misc_feature (1)..(180): Homolog of NCBI NO: 30695347 NR Description: cytochrome p450 family [Arabidopsis thaliana]
  misc_feature (1)..(180): Homolog of NCBI NO: 22530982 NR Description: cytochrome P450-like protein [Arabidopsis
  misc_feature (1)..(180): Homolog of NCBI NO: 30695352 NR Description: cytochrome p450 family [Arabidopsis thaliana]
  misc_feature (1)..(181): Homolog of NCBI NO: 15218388 NR Description: cytochrome P450, putative; protein id: supported by cDNA: gi_17473540 [Arabidopsis thaliana]
  misc_feature (1)..(181): Homolog of NCBI NO: 25282639 NR Description: hypothetical protein T30F21.17 [imported] - thaliana >gi|4836883|gb|AAD30586.1|AC007260_17 Similar to
  misc_feature (1)..(180): Homolog of NCBI NO: 15230572 NR Description: cytochrome P450 - like protein; protein id:
  misc_feature (1)..(174): Homolog of NCBI NO: 15222806 NR Description: cytochrome P450, putative; protein id:
  misc_feature (1)..(174): Homolog of NCBI NO: 8778326 NR Description: F14J16.21 [Arabidopsis thaliana]
  misc_feature (4)..(180): Homolog of NCBI NO: 9502380 NR Description: T12C24.27 [Arabidopsis thaliana]
  misc_feature (4)..(180): Homolog of NCBI NO: 30682922 NR Description: cytochrome P450, putative [Arabidopsis thaliana]

SEQ ID NO: 93651 - protein, 142 aa, Arabidopsis thaliana; identical to SEQ ID NO: 89895
  peptide (1)..(142): Ceres Seq. ID no. 12721013
  misc_feature (1)..(141): Homolog of NCBI NO: 30695347 NR Description: cytochrome p450 family [Arabidopsis thaliana]
  misc_feature (1)..(141): Homolog of NCBI NO: 22530982 NR Description: cytochrome P450-like protein [Arabidopsis
  misc_feature (1)..(141): Homolog of NCBI NO: 30695352 NR Description: cytochrome p450 family [Arabidopsis thaliana]
  misc_feature (1)..(142): Homolog of NCBI NO: 15218388 NR Description: cytochrome P450, putative; protein id: supported by cDNA: gi_17473540 [Arabidopsis thaliana]
  misc_feature (1)..(142): Homolog of NCBI NO: 25282639 NR Description: hypothetical protein T30F21.17 [imported] - thaliana >gi|4836883|gb|AAD30586.1|AC007260_17 Similar to
  misc_feature (1)..(141): Homolog of NCBI NO: 15230572 NR Description: cytochrome P450 - like protein; protein id:
  misc_feature (1)..(135): Homolog of NCBI NO: 15222806 NR Description: cytochrome P450, putative; protein id:
  misc_feature (1)..(135): Homolog of NCBI NO: 8778326 NR Description: F14J16.21 [Arabidopsis thaliana]
  misc_feature (1)..(141): Homolog of NCBI NO: 9502380 NR Description: T12C24.27 [Arabidopsis thaliana]
  misc_feature (1)..(141): Homolog of NCBI NO: 30682922 NR Description: cytochrome P450, putative [Arabidopsis thaliana]

SEQ ID NO: 93652 - protein, 114 aa, Arabidopsis thaliana; identical to SEQ ID NO: 89896
  peptide (1)..(114): Ceres Seq. ID no. 12721014
  misc_feature (1)..(113): Homolog of NCBI NO: 30695347 NR Description: cytochrome p450 family [Arabidopsis thaliana]
  misc_feature (1)..(113): Homolog of NCBI NO: 22530982 NR Description: cytochrome P450-like protein [Arabidopsis
  misc_feature (1)..(113): Homolog of NCBI NO: 30695352 NR Description: cytochrome p450 family [Arabidopsis thaliana]
  misc_feature (1)..(114): Homolog of NCBI NO: 15218388 NR Description: cytochrome P450, putative; protein id: supported by cDNA: gi_17473540 [Arabidopsis thaliana]
  misc_feature (1)..(114): Homolog of NCBI NO: 25282639 NR Description: hypothetical protein T30F21.17 [imported] - thaliana >gi|4836883|gb|AAD30586.1|AC007260_17 Similar to
  misc_feature (1)..(113): Homolog of NCBI NO: 15230572 NR Description: cytochrome P450 - like protein; protein id:
  misc_feature (1)..(107): Homolog of NCBI NO: 15222806 NR Description: cytochrome P450, putative; protein id:
  misc_feature (1)..(107): Homolog of NCBI NO: 8778326 NR Description: F14J16.21 [Arabidopsis thaliana]
  misc_feature (1)..(113): Homolog of NCBI NO: 9502380 NR Description: T12C24.27 [Arabidopsis thaliana]
  misc_feature (1)..(113): Homolog of NCBI NO: 30682922 NR Description: cytochrome P450, putative [Arabidopsis thaliana]

SEQ ID NO: 93653 - DNA, 1161 bp, Arabidopsis thaliana; identical to SEQ ID NO: 89897
  misc_feature (1)..(1161): Ceres Seq. ID no. 12721188
  misc_feature: MA Experiment ID: 20000184 Result: Down-regulated in Transcription
  misc_feature: MA Experiment 20000184 PARAMETER Experiment Name: At_Shoots__P Parameter: Age (day) Value: 7
  misc_feature: MA Experiment 20000184 PARAMETER Experiment Name: At_Shoots__P Parameter: Tissue Value: Shoots vs. Whole Plant
  misc_feature: MA Experiment ID: 20000214 Result: Down-regulated in Transcription
  misc_feature: MA Experiment 20000214 PARAMETER Experiment Name: At_4deg_Cold_P Parameter: Timepoint (hr) Value: 6
  misc_feature: MA Experiment ID: 20001248 Result: Up-regulated in Transcription
  misc_feature: MA Experiment 20001248 PARAMETER Experiment Name: At_Far-red-induction_P Parameter: Age (day) Value: 7
  misc_feature: MA Experiment 20001248 PARAMETER Experiment Name: At_Far-red-induction_P Parameter: Light Value: Far-red vs. White
  misc_feature: MA Experiment 20001248 PARAMETER Experiment Name: At_Far-red-induction_P Parameter: Organism Value: A. thaliana
  misc_feature: MA Experiment 20001248 PARAMETER Experiment Name: At_Far-red-induction_P Parameter: Plant Line Value: Columbia
  misc_feature: MA Experiment 20001248 PARAMETER Experiment Name: At_Far-red-induction_P Parameter: Timepoint (hr) Value: 4
  misc_feature: MA Experiment 20001248 PARAMETER Experiment Name: At_Far-red-induction_P Parameter: Tissue Value: Whole Plant
  misc_feature: MA Experiment ID: 20001450 Result: Up-regulated in Transcription
  misc_feature: MA Experiment 20001450 PARAMETER Experiment Name: At_Far-red-induction_P Parameter: Age (day) Value: 7
  misc_feature: MA Experiment 20001450 PARAMETER Experiment Name: At_Far-red-induction_P Parameter: Light Value: Far-red vs. White
  misc_feature: MA Experiment 20001450 PARAMETER Experiment Name: At_Far-red-induction_P Parameter: Organism Value: A. thaliana
  misc_feature: MA Experiment 20001450 PARAMETER Experiment Name: At_Far-red-induction_P Parameter: Plant Line Value: Columbia
  misc_feature: MA Experiment 20001450 PARAMETER Experiment Name: At_Far-red-induction_P Parameter: Timepoint (hr) Value: 8
  misc_feature: MA Experiment 20001450 PARAMETER Experiment Name: At_Far-red-induction_P Parameter: Tissue Value: Whole Plant

SEQ ID NO: 93654 - protein, 386 aa, Arabidopsis thaliana; identical to SEQ ID NO: 89898
  peptide (1)..(386): Ceres Seq. ID no. 12721189
  misc_feature (1)..(386): Homolog of NCBI NO: 30693281 NR Description: expressed protein [Arabidopsis thaliana]
  misc_feature (149)..(362): Homolog of NCBI NO: 6598578 NR Description: F5J5.4 [Arabidopsis thaliana]
  misc_feature (1)..(154): Homolog of NCBI NO: 6598578 NR Description: F5J5.4 [Arabidopsis thaliana]
  misc_feature (358)..(386): Homolog of NCBI NO: 6598578 NR Description: F5J5.4 [Arabidopsis thaliana]
  misc_feature (1)..(386): Homolog of NCBI NO: 38347102 NR Description: OSJNBa0006M15.17 [Oryza sativa (japonica
  misc_feature (1)..(386): Homolog of NCBI NO: 18395087 NR Description: expressed protein; protein id: At1g22200.1, by cDNA: 16380., supported by cDNA: gi_13878150, supported by gi_21281041 [Arabidopsis thaliana] >gi|25350066|pir||F86354
  misc_feature (5)..(384): Homolog of NCBI NO: 13384938 NR Description: serologically defined breast cancer antigen 84; segment, Chr 2, University of California at Los Angeles 1 [Mus >gi|12844094|dbj|BAB26233.1| unnamed protein product [Mus
  misc_feature (5)..(384): Homolog of NCBI NO: 34860248 NR Description: similar to serologically defined breast cancer
  misc_feature (5)..(386): Homolog of NCBI NO: 28278376 NR Description: Similar to serologically defined breast cancer
  misc_feature (5)..(384): Homolog of NCBI NO: 7706278 NR Description: serologically defined breast cancer antigen 84;

SEQ ID NO: 93655 - protein, 348 aa, Arabidopsis thaliana; identical to SEQ ID NO: 89899
  peptide (1)..(348): Ceres Seq. ID no. 12721190
  misc_feature (1)..(348): Homolog of NCBI NO: 30693281 NR Description: expressed protein [Arabidopsis thaliana]
  misc_feature (111)..(324): Homolog of NCBI NO: 6598578 NR Description: F5J5.4 [Arabidopsis thaliana]
  misc_feature (1)..(116): Homolog of NCBI NO: 6598578 NR Description: F5J5.4 [Arabidopsis thaliana]
  misc_feature (320)..(348): Homolog of NCBI NO: 6598578 NR Description: F5J5.4 [Arabidopsis thaliana]
  misc_feature (1)..(348): Homolog of NCBI NO: 38347102 NR Description: OSJNBa0006M15.17 [Oryza sativa (japonica
  misc_feature (1)..(348): Homolog of NCBI NO: 18395087 NR Description: expressed protein; protein id: At1g22200.1, by cDNA: 16380., supported by cDNA: gi_13878150, supported by gi_21281041 [Arabidopsis thaliana] >gi|25350066|pir||F86354
  misc_feature (1)..(346): Homolog of NCBI NO: 13384938 NR Description: serologically defined breast cancer antigen 84; segment, Chr 2, University of California at Los Angeles 1 [Mus >gi|12844094|dbj|BAB26233.1| unnamed protein product [Mus
  misc_feature (1)..(346): Homolog of NCBI NO: 34860248 NR Description: similar to serologically defined breast cancer
  misc_feature (1)..(348): Homolog of NCBI NO: 28278376 NR Description: Similar to serologically defined breast cancer
  misc_feature (1)..(346): Homolog of NCBI NO: 7706278 NR Description: serologically defined breast cancer antigen 84;

SEQ ID NO: 93656 - protein, 297 aa, Arabidopsis thaliana; identical to SEQ ID NO: 89900
  peptide (1)..(297): Ceres Seq. ID no. 12721191
  misc_feature (1)..(297): Homolog of NCBI NO: 30693281 NR Description: expressed protein [Arabidopsis thaliana]
  misc_feature (60)..(273): Homolog of NCBI NO: 6598578 NR Description: F5J5.4 [Arabidopsis thaliana]
  misc_feature (1)..(65): Homolog of NCBI NO: 6598578 NR Description: F5J5.4 [Arabidopsis thaliana]
  misc_feature (269)..(297): Homolog of NCBI NO: 6598578 NR Description: F5J5.4 [Arabidopsis thaliana]
  misc_feature (1)..(297): Homolog of NCBI NO: 38347102 NR Description: OSJNBa0006M15.17 [Oryza sativa (japonica
  misc_feature (1)..(297): Homolog of NCBI NO: 18395087 NR Description: expressed protein; protein id: At1g22200.1, by cDNA: 16380., supported by cDNA: gi_13878150, supported by gi_21281041 [Arabidopsis thaliana] >gi|25350066|pir||F86354
  misc_feature (1)..(295): Homolog of NCBI NO: 13384938 NR Description: serologically defined breast cancer antigen 84; segment, Chr 2, University of California at Los Angeles 1 [Mus >gi|12844094|dbj|BAB26233.1| unnamed protein product [Mus
  misc_feature (1)..(295): Homolog of NCBI NO: 34860248 NR Description: similar to serologically defined breast cancer
  misc_feature (1)..(297): Homolog of NCBI NO: 28278376 NR Description: Similar to serologically defined breast cancer
  misc_feature (1)..(295): Homolog of NCBI NO: 7706278 NR Description: serologically defined breast cancer antigen 84;

SEQ ID NO: 93657 - DNA, 1401 bp, Arabidopsis thaliana; identical to SEQ ID NO: 89901
  misc_feature (1)..(1401): Ceres Seq. ID no. 12721292
  misc_feature: MA Experiment ID: 20000327 Result: Up-regulated in Transcription
  misc_feature: MA Experiment 20000327 PARAMETER Experiment Name: At_42deg_Heat_Sub_P Parameter: Age (day) Value: 14
  misc_feature: MA Experiment 20000327 PARAMETER Experiment Name: At_42deg_Heat_Sub_P Parameter: Organism Value: A. thaliana
  misc_feature: MA Experiment 20000327 PARAMETER Experiment Name: At_42deg_Heat_Sub_P Parameter: Plant Line Value: WS
  misc_feature: MA Experiment 20000327 PARAMETER Experiment Name: At_42deg_Heat_Sub_P Parameter: Temperature (deg C) Value: 42 vs. 22
  misc_feature: MA Experiment 20000327 PARAMETER Experiment Name: At_42deg_Heat_Sub_P Parameter: Timepoint (hr) Value: 1
  misc_feature: MA Experiment 20000327 PARAMETER Experiment Name: At_42deg_Heat_Sub_P Parameter: Tissue Value: Aerial
  misc_feature: MA Experiment ID: 20000328 Result: Up-regulated in Transcription
  misc_feature: MA Experiment 20000328 PARAMETER Experiment Name: At_42deg_Heat_Sub_P Parameter: Age (day) Value: 14
  misc_feature: MA Experiment 20000328 PARAMETER Experiment Name: At_42deg_Heat_Sub_P Parameter: Organism Value: A. thaliana
  misc_feature: MA Experiment 20000328 PARAMETER Experiment Name: At_42deg_Heat_Sub_P Parameter: Plant Line Value: WS
  misc_feature: MA Experiment 20000328 PARAMETER Experiment Name: At_42deg_Heat_Sub_P Parameter: Temperature (deg C) Value: 42 vs. 22
  misc_feature: MA Experiment 20000328 PARAMETER Experiment Name: At_42deg_Heat_Sub_P Parameter: Timepoint (hr) Value: 6
  misc_feature: MA Experiment 20000328 PARAMETER Experiment Name: At_42deg_Heat_Sub_P Parameter: Tissue Value: Aerial

SEQ ID NO: 93658 - protein, 466 aa, Arabidopsis thaliana; identical to SEQ ID NO: 89902
  peptide (1)..(466): Ceres Seq. ID no. 12721293
  misc_feature (1)..(147): Homolog of NCBI NO: 18400088 NR Description: E2, ubiquitin-conjugating enzyme, putative; id: At1g36340.1 [Arabidopsis thaliana] >gi|25293671|pir||E86484
  misc_feature (5)..(147): Homolog of NCBI NO: 13811942 NR Description: ubiquitin conjugating enzyme [Guillardia theta] ubiquitin conjugating enzyme [Guillardia theta] ubiquitin conjugating enzyme [Guillardia theta]
  misc_feature (5)..(147): Homolog of NCBI NO: 19112075 NR Description: ubiquitin-conjugating enzyme e2-16 kd
  misc_feature (5)..(147): Homolog of NCBI NO: 4100646 NR Description: putative ubiquitin conjugating enzyme [Pinus
  misc_feature (5)..(147): Homolog of NCBI NO: 18398206 NR Description: E2, ubiquitin-conjugating enzyme 11 (UBC11); id: At3g08690.1, supported by cDNA: 21455., supported by cDNA: supported by cDNA: gi_20259610 [Arabidopsis thaliana] protein 11)
  misc_feature (5)..(147): Homolog of NCBI NO: 6320264 NR Description: ubiquitin-conjugating enzyme; Ubc5p [Saccharomyces
  misc_feature (24)..(147): Homolog of NCBI NO: 477134 NR Description: ubiquitin-conjugating enzyme ubc-2 -
  misc_feature (24)..(147): Homolog of NCBI NO: 17541470 NR Description: Ubiquitin conjugating enzyme UBC-2, LEThal LET-70
  misc_feature (24)..(147): Homolog of NCBI NO: 40744013 NR Description: UBC1_COLGL Ubiquitin-conjugating enzyme E2-16 kDa
  misc_feature (24)..(147): Homolog of NCBI NO: 37590333 NR Description: Unknown (protein for MGC:73096) [Danio rerio]

SEQ ID NO: 93659 - protein, 456 aa, Arabidopsis thaliana; identical to SEQ ID NO: 89903
  peptide (1)..(456): Ceres Seq. ID no. 12721294
  misc_feature (1)..(137): Homolog of NCBI NO: 18400088 NR Description: E2, ubiquitin-conjugating enzyme, putative; id: At1g36340.1 [Arabidopsis thaliana] >gi|25293671|pir||E86484
  misc_feature (1)..(137): Homolog of NCBI NO: 13811942 NR Description: ubiquitin conjugating enzyme [Guillardia theta] ubiquitin conjugating enzyme [Guillardia theta] ubiquitin conjugating enzyme [Guillardia theta]
  misc_feature (1)..(137): Homolog of NCBI NO: 19112075 NR Description: ubiquitin-conjugating enzyme e2-16 kd
  misc_feature (1)..(137): Homolog of NCBI NO: 4100646 NR Description: putative ubiquitin conjugating enzyme [Pinus
  misc_feature (1)..(137): Homolog of NCBI NO: 18398206 NR Description: E2, ubiquitin-conjugating enzyme 11 (UBC11); id: At3g08690.1, supported by cDNA: 21455., supported by cDNA: supported by cDNA: gi_20259610 [Arabidopsis thaliana] protein 11)
  misc_feature (1)..(137): Homolog of NCBI NO: 6320264 NR Description: ubiquitin-conjugating enzyme; Ubc5p [Saccharomyces
  misc_feature (14)..(137): Homolog of NCBI NO: 477134 NR Description: ubiquitin-conjugating enzyme ubc-2 -
  misc_feature (14)..(137): Homolog of NCBI NO: 17541470 NR Description: Ubiquitin conjugating enzyme UBC-2, LEThal LET-70
  misc_feature (14)..(137): Homolog of NCBI NO: 40744013 NR Description: UBC1_COLGL Ubiquitin-conjugating enzyme E2-16 kDa
  misc_feature (14)..(137): Homolog of NCBI NO: 37590333 NR Description: Unknown (protein for MGC:73096) [Danio rerio]

SEQ ID NO: 93660 - protein, 451 aa, Arabidopsis thaliana; identical to SEQ ID NO: 89904
  peptide (1)..(451): Ceres Seq. ID no. 12721295
  misc_feature (1)..(132): Homolog of NCBI NO: 18400088 NR Description: E2, ubiquitin-conjugating enzyme, putative; id: At1g36340.1 [Arabidopsis thaliana] >gi|25293671|pir||E86484
  misc_feature (1)..(132): Homolog of NCBI NO: 13811942 NR Description: ubiquitin conjugating enzyme [Guillardia theta] ubiquitin conjugating enzyme [Guillardia theta] ubiquitin conjugating enzyme [Guillardia theta]
  misc_feature (1)..(132): Homolog of NCBI NO: 19112075 NR Description: ubiquitin-conjugating enzyme e2-16 kd
  misc_feature (1)..(132): Homolog of NCBI NO: 4100646 NR Description: putative ubiquitin conjugating enzyme [Pinus
  misc_feature (1)..(132): Homolog of NCBI NO: 18398206 NR Description: E2, ubiquitin-conjugating enzyme 11 (UBC11); id: At3g08690.1, supported by cDNA: 21455., supported by cDNA: supported by cDNA: gi_20259610 [Arabidopsis thaliana] protein 11)
  misc_feature (1)..(132): Homolog of NCBI NO: 6320264 NR Description: ubiquitin-conjugating enzyme; Ubc5p [Saccharomyces
  misc_feature (9)..(132): Homolog of NCBI NO: 477134 NR Description: ubiquitin-conjugating enzyme ubc-2 -
  misc_feature (9)..(132): Homolog of NCBI NO: 17541470 NR Description: Ubiquitin conjugating enzyme UBC-2, LEThal LET-70
  misc_feature (9)..(132): Homolog of NCBI NO: 40744013 NR Description: UBC1_COLGL Ubiquitin-conjugating enzyme E2-16 kDa
  misc_feature (9)..(132): Homolog of NCBI NO: 37590333 NR Description: Unknown (protein for MGC:73096) [Danio rerio]

SEQ ID NO: 93661 - DNA, 1746 bp, Arabidopsis thaliana; identical to SEQ ID NO: 89905
  misc_feature (1)..(1746): Ceres Seq. ID no. 12721362
  misc_feature: MA Experiment ID: 20001451 Result: Up-regulated in Transcription
  misc_feature: MA Experiment 20001451 PARAMETER Experiment Name: At_Far-red-induction_P Parameter: Age (day) Value: 7
  misc_feature: MA Experiment 20001451 PARAMETER Experiment Name: At_Far-red-induction_P Parameter: Light Value: Far-red vs. White
  misc_feature: MA Experiment 20001451 PARAMETER Experiment Name: At_Far-red-induction_P Parameter: Organism Value: A. thaliana
  misc_feature: MA Experiment 20001451 PARAMETER Experiment Name: At_Far-red-induction_P Parameter: Plant Line Value: Columbia
  misc_feature: MA Experiment 20001451 PARAMETER Experiment Name: At_Far-red-induction_P Parameter: Timepoint (hr) Value: 24
  misc_feature: MA Experiment 20001451 PARAMETER Experiment Name: At_Far-red-induction_P Parameter: Tissue Value: Whole Plant

SEQ ID NO: 93662 - protein, 466 aa, Arabidopsis thaliana; identical to SEQ ID NO: 89906
  peptide (1)..(466): Ceres Seq. ID no. 12721363
  misc_feature (419)..(453): Pfam Name: Zinc finger, C3HC4 type (RING finger) Pfam Description: Zinc finger, C3HC4 type (RING finger)
  misc_feature (1)..(466): Homolog of NCBI NO: 22330616 NR Description: unknown protein; protein id: At1g73950.1,
  misc_feature (1)..(466): Homolog of NCBI NO: 18394611 NR Description: expressed protein; protein id: At1g18470.1, by cDNA: 33310. [Arabidopsis thaliana]
  misc_feature (1)..(466): Homolog of NCBI NO: 13937305 NR Description: unknown protein [Oryza sativa]
  misc_feature (1)..(466): Homolog of NCBI NO: 18409134 NR Description: expressed protein; protein id: At1g68820.1, by cDNA: gi_13878072, supported by cDNA: gi_17104740 [Arabidopsis >gi|13878073|gb|AAK44114.1|AF370299_1 unknown protein
  misc_feature (1)..(232): Homolog of NCBI NO: 25373333 NR Description: unknown protein F2P9.18 [imported] - Arabidopsis
  misc_feature (269)..(339): Homolog of NCBI NO: 25373333 NR Description: unknown protein F2P9.18 [imported] - Arabidopsis
  misc_feature (150)..(466): Homolog of NCBI NO: 6714286 NR Description: F15H18.5 [Arabidopsis thaliana]
  misc_feature (40)..(149): Homolog of NCBI NO: 6714286 NR Description: F15H18.5 [Arabidopsis thaliana]
  misc_feature (350)..(414): Homolog of NCBI NO: 25373333 NR Description: unknown protein F2P9.18 [imported] - Arabidopsis
  misc_feature (222)..(466): Homolog of NCBI NO: 12324138 NR Description: hypothetical protein; 29936-28688 [Arabidopsis

SEQ ID NO: 93663 - protein, 340 aa, Arabidopsis thaliana; identical to SEQ ID NO: 89907
  peptide (1)..(340): Ceres Seq. ID no. 12721364
  misc_feature (293)..(327): Pfam Name: Zinc finger, C3HC4 type (RING finger) Pfam Description: Zinc finger, C3HC4 type (RING finger)
  misc_feature (1)..(340): Homolog of NCBI NO: 22330616 NR Description: unknown protein; protein id: At1g73950.1,
  misc_feature (1)..(340): Homolog of NCBI NO: 18394611 NR Description: expressed protein; protein id: At1g18470.1, by cDNA: 33310. [Arabidopsis thaliana]
  misc_feature (1)..(340): Homolog of NCBI NO: 13937305 NR Description: unknown protein [Oryza sativa]
  misc_feature (1)..(340): Homolog of NCBI NO: 18409134 NR Description: expressed protein; protein id: At1g68820.1, by cDNA: gi_13878072, supported by cDNA: gi_17104740 [Arabidopsis >gi|13878073|gb|AAK44114.1|AF370299_1 unknown protein
  misc_feature (1)..(106): Homolog of NCBI NO: 25373333 NR Description: unknown protein F2P9.18 [imported] - Arabidopsis
  misc_feature (143)..(213): Homolog of NCBI NO: 25373333 NR Description: unknown protein F2P9.18 [imported] - Arabidopsis
  misc_feature (24)..(340): Homolog of NCBI NO: 6714286 NR Description: F15H18.5 [Arabidopsis thaliana]
  misc_feature (1)..(23): Homolog of NCBI NO: 6714286 NR Description: F15H18.5 [Arabidopsis thaliana]
  misc_feature (224)..(288): Homolog of NCBI NO: 25373333 NR Description: unknown protein F2P9.18 [imported] - Arabidopsis
  misc_feature (96)..(340): Homolog of NCBI NO: 12324138 NR Description: hypothetical protein; 29936-28688 [Arabidopsis

SEQ ID NO: 93664 - protein, 335 aa, Arabidopsis thaliana; identical to SEQ ID NO: 89908
  peptide (1)..(335): Ceres Seq. ID no. 12721365
  misc_feature (288)..(322): Pfam Name: Zinc finger, C3HC4 type (RING finger) Pfam Description: Zinc finger, C3HC4 type (RING finger)
  misc_feature (1)..(335): Homolog of NCBI NO: 22330616 NR Description: unknown protein; protein id: At1g73950.1,
  misc_feature (1)..(335): Homolog of NCBI NO: 18394611 NR Description: expressed protein; protein id: At1g18470.1, by cDNA: 33310. [Arabidopsis thaliana]
  misc_feature (1)..(335): Homolog of NCBI NO: 13937305 NR Description: unknown protein [Oryza sativa]
  misc_feature (1)..(335): Homolog of NCBI NO: 18409134 NR Description: expressed protein; protein id: At1g68820.1, by cDNA: gi_13878072, supported by cDNA: gi_17104740 [Arabidopsis >gi|13878073|gb|AAK44114.1|AF370299_1 unknown protein
  misc_feature (1)..(101): Homolog of NCBI NO: 25373333 NR Description: unknown protein F2P9.18 [imported] - Arabidopsis
  misc_feature (138)..(208): Homolog of NCBI NO: 25373333 NR Description: unknown protein F2P9.18 [imported] - Arabidopsis
  misc_feature (19)..(335): Homolog of NCBI NO: 6714286 NR Description: F15H18.5 [Arabidopsis thaliana]
  misc_feature (1)..(18): Homolog of NCBI NO: 6714286 NR Description: F15H18.5 [Arabidopsis thaliana]
  misc_feature (219)..(283): Homolog of NCBI NO: 25373333 NR Description: unknown protein F2P9.18 [imported] - Arabidopsis
  misc_feature (91)..(335): Homolog of NCBI NO: 12324138 NR Description: hypothetical protein; 29936-28688 [Arabidopsis

SEQ ID NO: 93665 - DNA, 1701 bp, Arabidopsis thaliana; identical to SEQ ID NO: 89909
  misc_feature (1)..(1701): Ceres Seq. ID no. 12721384
  misc_feature: MA Experiment ID: 20000171 Result: Down-regulated in Transcription
  misc_feature: MA Experiment 20000171 PARAMETER Experiment Name: At_42deg_Heat_P Parameter: Age (day) Value: 14
  misc_feature: MA Experiment 20000171 PARAMETER Experiment Name: At_42deg_Heat_P Parameter: Organism Value: A. thaliana
  misc_feature: MA Experiment 20000171 PARAMETER Experiment Name: At_42deg_Heat_P Parameter: Plant Line Value: WS
  misc_feature: MA Experiment 20000171 PARAMETER Experiment Name: At_42deg_Heat_P Parameter: Temperature (deg C) Value: 42 vs. 22
  misc_feature: MA Experiment 20000171 PARAMETER Experiment Name: At_42deg_Heat_P Parameter: Timepoint (hr) Value: 1
  misc_feature: MA Experiment 20000171 PARAMETER Experiment Name: At_42deg_Heat_P Parameter: Tissue Value: Aerial
  misc_feature: MA Experiment ID: 20000173 Result: Down-regulated in Transcription
  misc_feature: MA Experiment 20000173 PARAMETER Experiment Name: At_42deg_Heat_P Parameter: Age (day) Value: 14
  misc_feature: MA Experiment 20000173 PARAMETER Experiment Name: At_42deg_Heat_P Parameter: Organism Value: A. thaliana
  misc_feature: MA Experiment 20000173 PARAMETER Experiment Name: At_42deg_Heat_P Parameter: Plant Line Value: WS
  misc_feature: MA Experiment 20000173 PARAMETER Experiment Name: At_42deg_Heat_P Parameter: Temperature (deg C) Value: 42 vs. 22
  misc_feature: MA Experiment 20000173 PARAMETER Experiment Name: At_42deg_Heat_P Parameter: Timepoint (hr) Value: 6
  misc_feature: MA Experiment 20000173 PARAMETER Experiment Name: At_42deg_Heat_P Parameter: Tissue Value: Aerial
  misc_feature: MA Experiment ID: 20000179 Result: Up-regulated in Transcription
  misc_feature: MA Experiment 20000179 PARAMETER Experiment Name: At_Germinating_Seeds_P Parameter: Age (hr) Value: 6 vs. 0
  misc_feature: MA Experiment 20000179 PARAMETER Experiment Name: At_Germinating_Seeds_P Parameter: Tissue Value: Germinating Seeds
  misc_feature: MA Experiment ID: 20000180 Result: Up-regulated in Transcription
  misc_feature: MA Experiment 20000180 PARAMETER Experiment Name: At_Germinating_Seeds_P Parameter: Age (hr) Value: 24 vs. 0
  misc_feature: MA Experiment 20000180 PARAMETER Experiment Name: At_Germinating_Seeds_P Parameter: Tissue Value: Germinating Seeds
  misc_feature: MA Experiment ID: 20000185 Result: Up-regulated in Transcription
  misc_feature: MA Experiment 20000185 PARAMETER Experiment Name: At_Roots__P Parameter: Age (day) Value: 7 vs. 21
  misc_feature: MA Experiment 20000185 PARAMETER Experiment Name: At_Roots__P Parameter: Organism Value: A. thaliana
  misc_feature: MA Experiment 20000185 PARAMETER Experiment Name: At_Roots__P Parameter: Tissue Value: Roots vs. Whole Plant
  misc_feature: MA Experiment ID: 20000227 Result: Up-regulated in Transcription
  misc_feature: MA Experiment 20000227 PARAMETER Experiment Name: At_Root-Tips-vs-Tops_P Parameter: Tissue Value: Root Tips vs. Root Tops
  misc_feature: MA Experiment ID: 20000234 Result: Up-regulated in Transcription
  misc_feature: MA Experiment 20000234 PARAMETER Experiment Name: At_Siliques_P Parameter: Age (day) Value: 21
  misc_feature: MA Experiment 20000234 PARAMETER Experiment Name: At_Siliques_P Parameter: Organism Value: A. thaliana
  misc_feature: MA Experiment 20000234 PARAMETER Experiment Name: At_Siliques_P Parameter: Plant Line Value: WS
  misc_feature: MA Experiment 20000234 PARAMETER Experiment Name: At_Siliques_P Parameter: Tissue Value: Less Than 5mm Siliques vs. Whole Plant
  misc_feature: MA Experiment ID: 20000264 Result: Up-regulated in Transcription
  misc_feature: MA Experiment 20000264 PARAMETER Experiment Name: At_Open_Flower_P Parameter: Age (day) Value: 21
  misc_feature: MA Experiment 20000264 PARAMETER Experiment Name: At_Open_Flower_P Parameter: Plant Line Value: WS
  misc_feature: MA Experiment 20000264 PARAMETER Experiment Name: At_Open_Flower_P Parameter: Tissue Value: Open Flower vs. Whole Plant
  misc_feature: MA Experiment ID: 20000265 Result: Up-regulated in Transcription
  misc_feature: MA Experiment 20000265 PARAMETER Experiment Name: At_Open_Flower_P Parameter: Age (day) Value: 21
  misc_feature: MA Experiment 20000265 PARAMETER Experiment Name: At_Open_Flower_P Parameter: Plant Line Value: WS
  misc_feature: MA Experiment 20000265 PARAMETER Experiment Name: At_Open_Flower_P Parameter: Tissue Value: Closed Flower vs. Whole Plant
  misc_feature: MA Experiment ID: 20000286 Result: Up-regulated in Transcription
  misc_feature: MA Experiment 20000286 PARAMETER Experiment Name: At_Open_Flower_P Parameter: Age (day) Value: 21
  misc_feature: MA Experiment 20000286 PARAMETER Experiment Name: At_Open_Flower_P Parameter: Plant Line Value: WS
  misc_feature: MA Experiment 20000286 PARAMETER Experiment Name: At_Open_Flower_P Parameter: Tissue Value: Half Open vs. Whole Plant
  misc_feature: MA Experiment ID: 20000439 Result: Up-regulated in Transcription
  misc_feature: MA Experiment 20000439 PARAMETER Experiment Name: At_Roots__P Parameter: Age (day) Value: 14 vs. 21
  misc_feature: MA Experiment 20000439 PARAMETER Experiment Name: At_Roots__P Parameter: Organism Value: A. thaliana
  misc_feature: MA Experiment 20000439 PARAMETER Experiment Name: At_Roots__P Parameter: Tissue Value: Roots vs. Whole Plant
  misc_feature: MA Experiment ID: 20000443 Result: Down-regulated in Transcription
  misc_feature: MA Experiment 20000443 PARAMETER Experiment Name: At_1uM_BR-BRZ__P Parameter: Tissue Value: Shoot Apices
  misc_feature: MA Experiment 20000443 PARAMETER Experiment Name: At_1uM_BR-BRZ__P Parameter: Treatment Value: 1uM BRZ vs. No Treatment
  misc_feature: MA Experiment ID: 20001451 Result: Down-regulated in Transcription
  misc_feature: MA Experiment 20001451 PARAMETER Experiment Name: At_Far-red-induction_P Parameter: Age (day) Value: 7
  misc_feature: MA Experiment 20001451 PARAMETER Experiment Name: At_Far-red-induction_P Parameter: Light Value: Far-red vs. White
  misc_feature: MA Experiment 20001451 PARAMETER Experiment Name: At_Far-red-induction_P Parameter: Organism Value: A. thaliana
  misc_feature: MA Experiment 20001451 PARAMETER Experiment Name: At_Far-red-induction_P Parameter: Plant Line Value: Columbia
  misc_feature: MA Experiment 20001451 PARAMETER Experiment Name: At_Far-red-induction_P Parameter: Timepoint (hr) Value: 24
  misc_feature: MA Experiment 20001451 PARAMETER Experiment Name: At_Far-red-induction_P Parameter: Tissue Value: Whole Plant
  misc_feature: MA Experiment ID: 20001755 Result: Up-regulated in Transcription
  misc_feature: MA Experiment 20001755 PARAMETER Experiment Name: At_50mM_NH4NO3_L-to-H_P Parameter: Timepoint (hr) Value: 2
  misc_feature: MA Experiment 20001755 PARAMETER Experiment Name: At_50mM_NH4NO3_L-to-H_P Parameter: Tissue Value: Leaf
  misc_feature: MA Experiment 20001755 PARAMETER Experiment Name: At_50mM_NH4NO3_L-to-H_P Parameter: Treatment Value: 50mM NH4NO3 vs 100mM Mannitol
  misc_feature: MA Experiment ID: 20001757 Result: Up-regulated in Transcription
  misc_feature: MA Experiment 20001757 PARAMETER Experiment Name: At_50mM_NH4NO3_L-to-H_P Parameter: Timepoint (hr) Value: 6
  misc_feature: MA Experiment 20001757 PARAMETER Experiment Name: At_50mM_NH4NO3_L-to-H_P Parameter: Tissue Value: Leaf
  misc_feature: MA Experiment 20001757 PARAMETER Experiment Name: At_50mM_NH4NO3_L-to-H_P Parameter: Treatment Value: 50mM NH4NO3 vs 100mM Mannitol
  misc_feature: MA Experiment ID: 20001911 Result: Down-regulated in Transcription
  misc_feature: MA Experiment 20001911 PARAMETER Experiment Name: At_Drought_Reproduction_P Parameter: Age (day) Value: 40
  misc_feature: MA Experiment 20001911 PARAMETER Experiment Name: At_Drought_Reproduction_P Parameter: Organism Value: A. thaliana
  misc_feature: MA Experiment 20001911 PARAMETER Experiment Name: At_Drought_Reproduction_P Parameter: Plant Line Value: WS
  misc_feature: MA Experiment 20001911 PARAMETER Experiment Name: At_Drought_Reproduction_P Parameter: Timepoint (day) Value: 10
  misc_feature: MA Experiment 20001911 PARAMETER Experiment Name: At_Drought_Reproduction_P Parameter: Tissue Value: Flowers
  misc_feature: MA Experiment 20001911 PARAMETER Experiment Name: At_Drought_Reproduction_P Parameter: Treatment Value: Drought vs. No Drought

SEQ ID NO: 93666 - protein, 487 aa, Arabidopsis thaliana; identical to SEQ ID NO: 89910
  peptide (1)..(487): Ceres Seq. ID no. 12721385
  misc_feature (197)..(487): Pfam Name: Enolase, C-terminal TIM barrel domain Pfam Description: Enolase, C-terminal TIM barrel domain
  misc_feature (11)..(487): Homolog of NCBI NO: 15221107 NR Description: putative enolase; protein id: At1g74030.1, by cDNA: gi_14334609, supported by cDNA: gi_17065639 [Arabidopsis
  misc_feature (24)..(487): Homolog of NCBI NO: 21392248 NR Description: SD23356p [Drosophila melanogaster]
  misc_feature (24)..(487): Homolog of NCBI NO: 24580914 NR Description: Enolase CG17654-PB >gi|24580916|ref|NP_722722.1|
  misc_feature (61)..(487): Homolog of NCBI NO: 119351 NR Description: Enolase (2-phosphoglycerate dehydratase)
  misc_feature (64)..(487): Homolog of NCBI NO: 1169533 NR Description: Enolase (2-phosphoglycerate dehydratase)
  misc_feature (64)..(487): Homolog of NCBI NO: 17536383 NR Description: Enolase (46.6 kD) [Caenorhabditis elegans]
  misc_feature (61)..(487): Homolog of NCBI NO: 8919731 NR Description: enolase [Spinacia oleracea]
  misc_feature (64)..(487): Homolog of NCBI NO: 37589645 NR Description: Unknown (protein for MGC:73056) [Danio rerio]
  misc_feature (61)..(487): Homolog of NCBI NO: 119354 NR Description: Enolase (2-phosphoglycerate dehydratase)
  misc_feature (61)..(487): Homolog of NCBI NO: 7436883 NR Description: phosphopyruvate hydratase (EC 4.2.1.11) - common

SEQ ID NO: 93667 - protein, 477 aa, Arabidopsis thaliana; identical to SEQ ID NO: 89911
  peptide (1)..(477): Ceres Seq. ID no. 12721386
  misc_feature (187)..(477): Pfam Name: Enolase, C-terminal TIM barrel domain Pfam Description: Enolase, C-terminal TIM barrel domain
  misc_feature (1)..(477): Homolog of NCBI NO: 15221107 NR Description: putative enolase; protein id: At1g74030.1, by cDNA: gi_14334609, supported by cDNA: gi_17065639 [Arabidopsis
  misc_feature (14)..(477): Homolog of NCBI NO: 21392248 NR Description: SD23356p [Drosophila melanogaster]
  misc_feature (14)..(477): Homolog of NCBI NO: 24580914 NR Description: Enolase CG17654-PB >gi|24580916|ref|NP_722722.1|
  misc_feature (51)..(477): Homolog of NCBI NO: 119351 NR Description: Enolase (2-phosphoglycerate dehydratase)
  misc_feature (54)..(477): Homolog of NCBI NO: 1169533 NR Description: Enolase (2-phosphoglycerate dehydratase)
  misc_feature (54)..(477): Homolog of NCBI NO: 17536383 NR Description: Enolase (46.6 kD) [Caenorhabditis elegans]
  misc_feature (51)..(477): Homolog of NCBI NO: 8919731 NR Description: enolase [Spinacia oleracea]
  misc_feature (54)..(477): Homolog of NCBI NO: 37589645 NR Description: Unknown (protein for MGC:73056) [Danio rerio]
  misc_feature (51)..(477): Homolog of NCBI NO: 119354 NR Description: Enolase (2-phosphoglycerate dehydratase)
  misc_feature (51)..(477): Homolog of NCBI NO: 7436883 NR Description: phosphopyruvate hydratase (EC 4.2.1.11) - common

SEQ ID NO: 93668 - protein, 339 aa, Arabidopsis thaliana; identical to SEQ ID NO: 89912
  peptide (1)..(339): Ceres Seq. ID no. 12721387
  misc_feature (49)..(339): Pfam Name: Enolase, C-terminal TIM barrel domain Pfam Description: Enolase, C-terminal TIM barrel domain
  misc_feature (1)..(339): Homolog of NCBI NO: 15221107 NR Description: putative enolase; protein id: At1g74030.1, by cDNA: gi_14334609, supported by cDNA: gi_17065639 [Arabidopsis
  misc_feature (1)..(339): Homolog of NCBI NO: 21392248 NR Description: SD23356p [Drosophila melanogaster]
  misc_feature (1)..(339): Homolog of NCBI NO: 24580914 NR Description: Enolase CG17654-PB >gi|24580916|ref|NP_722722.1|
  misc_feature (1)..(339): Homolog of NCBI NO: 119351 NR Description: Enolase (2-phosphoglycerate dehydratase)
  misc_feature (1)..(339): Homolog of NCBI NO: 1169533 NR Description: Enolase (2-phosphoglycerate dehydratase)
  misc_feature (1)..(339): Homolog of NCBI NO: 17536383 NR Description: Enolase (46.6 kD) [Caenorhabditis elegans]
  misc_feature (1)..(339): Homolog of NCBI NO: 8919731 NR Description: enolase [Spinacia oleracea]
  misc_feature (1)..(339): Homolog of NCBI NO: 37589645 NR Description: Unknown (protein for MGC:73056) [Danio rerio]
  misc_feature (1)..(339): Homolog of NCBI NO: 119354 NR Description: Enolase (2-phosphoglycerate dehydratase)
  misc_feature (1)..(339): Homolog of NCBI NO: 7436883 NR Description: phosphopyruvate hydratase (EC 4.2.1.11) - common

SEQ ID NO: 93669 - DNA, 1116 bp, Arabidopsis thaliana; identical to SEQ ID NO: 89913
  misc_feature (1)..(1116): Ceres Seq. ID no. 12721407
  misc_feature: MA Experiment ID: 20000328 Result: Down-regulated in Transcription
  misc_feature: MA Experiment 20000328 PARAMETER Experiment Name: At_42deg_Heat_Sub_P Parameter: Age (day) Value: 14
  misc_feature: MA Experiment 20000328 PARAMETER Experiment Name: At_42deg_Heat_Sub_P Parameter: Organism Value: A. thaliana
  misc_feature: MA Experiment 20000328 PARAMETER Experiment Name: At_42deg_Heat_Sub_P Parameter: Plant Line Value: WS
  misc_feature: MA Experiment 20000328 PARAMETER Experiment Name: At_42deg_Heat_Sub_P Parameter: Temperature (deg C) Value: 42 vs. 22
  misc_feature: MA Experiment 20000328 PARAMETER Experiment Name: At_42deg_Heat_Sub_P Parameter: Timepoint (hr) Value: 6
  misc_feature: MA Experiment 20000328 PARAMETER Experiment Name: At_42deg_Heat_Sub_P Parameter: Tissue Value: Aerial

SEQ ID NO: 93670 - protein, 371 aa, Arabidopsis thaliana; identical to SEQ ID NO: 89914
  peptide (1)..(371): Ceres Seq. ID no. 12721408
  misc_feature (115)..(360): Pfam Name: alpha/beta hydrolase fold Pfam Description: alpha/beta hydrolase fold
  misc_feature (1)..(371): Homolog of NCBI NO: 15221193 NR Description: unknown protein; protein id: At1g74290.1
  misc_feature (1)..(364): Homolog of NCBI NO: 21537089 NR Description: unknown [Arabidopsis thaliana]
  misc_feature (1)..(370): Homolog of NCBI NO: 18410575 NR Description: expressed protein; protein id: At1g74280.1, by cDNA: 119889. [Arabidopsis thaliana] >gi|25406331|pir||C96771
  misc_feature (22)..(362): Homolog of NCBI NO: 21592662 NR Description: unknown [Arabidopsis thaliana]
  misc_feature (22)..(362): Homolog of NCBI NO: 18410582 NR Description: expressed protein; protein id: At1g74300.1, by cDNA: 31039. [Arabidopsis thaliana] >gi|25406334|pir||E96771
  misc_feature (1)..(365): Homolog of NCBI NO: 18404095 NR Description: expressed protein; protein id: At2g36290.1, by cDNA: 5167. [Arabidopsis thaliana] >gi|25408458|pir||H84778
  misc_feature (1)..(365): Homolog of NCBI NO: 28416665 NR Description: At2g36290 [Arabidopsis thaliana]
  misc_feature (8)..(367): Homolog of NCBI NO: 15228377 NR Description: putative protein; protein id: At3g48410.1, by cDNA: gi_17529095 [Arabidopsis thaliana]
  misc_feature (24)..(365): Homolog of NCBI NO: 38346334 NR Description: OSJNBa0073L04.5 [Oryza sativa (japonica
  misc_feature (28)..(361): Homolog of NCBI NO: 37536162 NR Description: putative alpha/beta hydrolase [Oryza sativa

SEQ ID NO: 93671 - protein, 255 aa, Arabidopsis thaliana; identical to SEQ ID NO: 89915
  peptide (1)..(255): Ceres Seq. ID no. 12721409
  misc_feature (1)..(244): Pfam Name: alpha/beta hydrolase fold Pfam Description: alpha/beta hydrolase fold
  misc_feature (1)..(255): Homolog of NCBI NO: 15221193 NR Description: unknown protein; protein id: At1g74290.1
  misc_feature (1)..(248): Homolog of NCBI NO: 21537089 NR Description: unknown [Arabidopsis thaliana]
  misc_feature (1)..(254): Homolog of NCBI NO: 18410575 NR Description: expressed protein; protein id: At1g74280.1, by cDNA: 119889. [Arabidopsis thaliana] >gi|25406331|pir||C96771
  misc_feature (1)..(246): Homolog of NCBI NO: 21592662 NR Description: unknown [Arabidopsis thaliana]
  misc_feature (1)..(246): Homolog of NCBI NO: 18410582 NR Description: expressed protein; protein id: At1g74300.1, by cDNA: 31039. [Arabidopsis thaliana] >gi|25406334|pir||E96771
  misc_feature (1)..(249): Homolog of NCBI NO: 18404095 NR Description: expressed protein; protein id: At2g36290.1, by cDNA: 5167. [Arabidopsis thaliana] >gi|25408458|pir||H84778
  misc_feature (1)..(249): Homolog of NCBI NO: 28416665 NR Description: At2g36290 [Arabidopsis thaliana]
  misc_feature (1)..(251): Homolog of NCBI NO: 15228377 NR Description: putative protein; protein id: At3g48410.1, by cDNA: gi_17529095 [Arabidopsis thaliana]
  misc_feature (1)..(249): Homolog of NCBI NO: 38346334 NR Description: OSJNBa0073L04.5 [Oryza sativa (japonica
  misc_feature (1)..(245): Homolog of NCBI NO: 37536162 NR Description: putative alpha/beta hydrolase [Oryza sativa

SEQ ID NO: 93672 - protein, 209 aa, Arabidopsis thaliana; identical to SEQ ID NO: 89916
  peptide (1)..(209): Ceres Seq. ID no. 12721410
  misc_feature (1)..(198): Pfam Name: alpha/beta hydrolase fold Pfam Description: alpha/beta hydrolase fold
  misc_feature (1)..(209): Homolog of NCBI NO: 15221193 NR Description: unknown protein; protein id: At1g74290.1
  misc_feature (1)..(202): Homolog of NCBI NO: 21537089 NR Description: unknown [Arabidopsis thaliana]
  misc_feature (1)..(208): Homolog of NCBI NO: 18410575 NR Description: expressed protein; protein id: At1g74280.1, by cDNA: 119889. [Arabidopsis thaliana] >gi|25406331|pir||C96771
  misc_feature (1)..(200): Homolog of NCBI NO: 21592662 NR Description: unknown [Arabidopsis thaliana]
  misc_feature (1)..(200): Homolog of NCBI NO: 18410582 NR Description: expressed protein; protein id: At1g74300.1, by cDNA: 31039. [Arabidopsis thaliana] >gi|25406334|pir||E96771
  misc_feature (1)..(203): Homolog of NCBI NO: 18404095 NR Description: expressed protein; protein id: At2g36290.1, by cDNA: 5167. [Arabidopsis thaliana] >gi|25408458|pir||H84778
  misc_feature (1)..(203): Homolog of NCBI NO: 28416665 NR Description: At2g36290 [Arabidopsis thaliana]
  misc_feature (1)..(205): Homolog of NCBI NO: 15228377 NR Description: putative protein; protein id: At3g48410.1, by cDNA: gi_17529095 [Arabidopsis thaliana]
  misc_feature (1)..(203): Homolog of NCBI NO: 38346334 NR Description: OSJNBa0073L04.5 [Oryza sativa (japonica
  misc_feature (1)..(199): Homolog of NCBI NO: 37536162 NR Description: putative alpha/beta hydrolase [Oryza sativa

SEQ ID NO: 93673 - DNA, 1558 bp, Arabidopsis thaliana; identical to SEQ ID NO: 89917
  misc_feature (1)..(1558): Ceres Seq. ID no. 12721415
  misc_feature: MA Experiment ID: 20000171 Result: Up-regulated in Transcription
  misc_feature: MA Experiment 20000171 PARAMETER Experiment Name: At_42deg_Heat_P Parameter: Age (day) Value: 14
  misc_feature: MA Experiment 20000171 PARAMETER Experiment Name: At_42deg_Heat_P Parameter: Organism Value: A. thaliana
  misc_feature: MA Experiment 20000171 PARAMETER Experiment Name: At_42deg_Heat_P Parameter: Plant Line Value: WS
  misc_feature: MA Experiment 20000171 PARAMETER Experiment Name: At_42deg_Heat_P Parameter: Temperature (deg C) Value: 42 vs. 22
  misc_feature: MA Experiment 20000171 PARAMETER Experiment Name: At_42deg_Heat_P Parameter: Timepoint (hr) Value: 1
  misc_feature: MA Experiment 20000171 PARAMETER Experiment Name: At_42deg_Heat_P Parameter: Tissue Value: Aerial
  misc_feature: MA Experiment ID: 20000173 Result: Up-regulated in Transcription
  misc_feature: MA Experiment 20000173 PARAMETER Experiment Name: At_42deg_Heat_P Parameter: Age (day) Value: 14
  misc_feature: MA Experiment 20000173 PARAMETER Experiment Name: At_42deg_Heat_P Parameter: Organism Value: A. thaliana
  misc_feature: MA Experiment 20000173 PARAMETER Experiment Name: At_42deg_Heat_P Parameter: Plant Line Value: WS
  misc_feature: MA Experiment 20000173 PARAMETER Experiment Name: At_42deg_Heat_P Parameter: Temperature (deg C) Value: 42 vs. 22
  misc_feature: MA Experiment 20000173 PARAMETER Experiment Name: At_42deg_Heat_P Parameter: Timepoint (hr) Value: 6
  misc_feature: MA Experiment 20000173 PARAMETER Experiment Name: At_42deg_Heat_P Parameter: Tissue Value: Aerial
  misc_feature: MA Experiment ID: 20000794 Result: Up-regulated in Transcription
  misc_feature: MA Experiment 20000794 PARAMETER Experiment Name: At_Petals_P Parameter: Age (day) Value: 23-25 days
  misc_feature: MA Experiment 20000794 PARAMETER Experiment Name: At_Petals_P Parameter: Plant Line Value: WS
  misc_feature: MA Experiment 20000794 PARAMETER Experiment Name: At_Petals_P Parameter: Tissue Value: Petals vs. Whole plant
  misc_feature: MA Experiment ID: 20001451 Result: Down-regulated in Transcription
  misc_feature: MA Experiment 20001451 PARAMETER Experiment Name: At_Far-red-induction_P Parameter: Age (day) Value: 7
  misc_feature: MA Experiment 20001451 PARAMETER Experiment Name: At_Far-red-induction_P Parameter: Light Value: Far-red vs. White
  misc_feature: MA Experiment 20001451 PARAMETER Experiment Name: At_Far-red-induction_P Parameter: Organism Value: A. thaliana
  misc_feature: MA Experiment 20001451 PARAMETER Experiment Name: At_Far-red-induction_P Parameter: Plant Line Value: Columbia
  misc_feature: MA Experiment 20001451 PARAMETER Experiment Name: At_Far-red-induction_P Parameter: Timepoint (hr) Value: 24
  misc_feature: MA Experiment 20001451 PARAMETER Experiment Name: At_Far-red-induction_P Parameter: Tissue Value: Whole Plant

SEQ ID NO: 93674 - protein, 350 aa, Arabidopsis thaliana; identical to SEQ ID NO: 89918
  peptide (1)..(350): Ceres Seq. ID no. 12721416
  misc_feature (66)..(338): Pfam Name: Choline/ethanolamine kinase Pfam Description: Choline/ethanolamine kinase
  misc_feature (1)..(350): Homolog of NCBI NO: 22330627 NR Description: putative choline kinase; protein id: At1g74320.1, by cDNA: gi_20453121 [Arabidopsis thaliana] At1g74320/F1O17_1 [Arabidopsis thaliana]
  misc_feature (3)..(350): Homolog of NCBI NO: 25348157 NR Description: protein choline kinase F1O17.1 [imported] -
  misc_feature (5)..(348): Homolog of NCBI NO: 7488654 NR Description: choline kinase (EC 2.7.1.32) CK3 - soybean
  misc_feature (20)..(350): Homolog of NCBI NO: 7488653 NR Description: choline kinase (EC 2.7.1.32) CK2 - soybean
  misc_feature (20)..(344): Homolog of NCBI NO: 7488652 NR Description: choline kinase (EC 2.7.1.32) CK1 - soybean
  misc_feature (20)..(344): Homolog of NCBI NO: 12311795 NR Description: choline kinase [Pisum sativum]
  misc_feature (16)..(346): Homolog of NCBI NO: 33149685 NR Description: choline kinase [Oryza sativa (indica
  misc_feature (18)..(345): Homolog of NCBI NO: 15234032 NR Description: choline kinase GmCK2p -like protein; protein id: supported by cDNA: 126037., supported by cDNA: 7395. [Arabidopsis >gi|7484868|pir||T04023 choline kinase 2 homolog [Arabidopsis
  misc_feature (18)..(345): Homolog of NCBI NO: 21537276 NR Description: choline kinase GmCK2p-like protein [Arabidopsis
  misc_feature (18)..(344): Homolog of NCBI NO: 15217543 NR Description: choline kinase, putative; protein id: At1g71697.1

SEQ ID NO: 93675 - protein, 348 aa, Arabidopsis thaliana; identical to SEQ ID NO: 89919
  peptide (1)..(348): Ceres Seq. ID no. 12721417
  misc_feature (64)..(336): Pfam Name: Choline/ethanolamine kinase Pfam Description: Choline/ethanolamine kinase
  misc_feature (1)..(348): Homolog of NCBI NO: 22330627 NR Description: putative choline kinase; protein id: At1g74320.1, by cDNA: gi_20453121 [Arabidopsis thaliana] At1g74320/F1O17_1 [Arabidopsis thaliana]
  misc_feature (1)..(348): Homolog of NCBI NO: 25348157 NR Description: protein choline kinase F1O17.1 [imported] -
  misc_feature (3)..(346): Homolog of NCBI NO: 7488654 NR Description: choline kinase (EC 2.7.1.32) CK3 - soybean
  misc_feature (18)..(348): Homolog of NCBI NO: 7488653 NR Description: choline kinase (EC 2.7.1.32) CK2 - soybean
  misc_feature (18)..(342): Homolog of NCBI NO: 7488652 NR Description: choline kinase (EC 2.7.1.32) CK1 - soybean
  misc_feature (18)..(342): Homolog of NCBI NO: 12311795 NR Description: choline kinase [Pisum sativum]
  misc_feature (14)..(344): Homolog of NCBI NO: 33149685 NR Description: choline kinase [Oryza sativa (indica
  misc_feature (16)..(343): Homolog of NCBI NO: 15234032 NR Description: choline kinase GmCK2p -like protein; protein id: supported by cDNA: 126037., supported by cDNA: 7395. [Arabidopsis >gi|7484868|pir||T04023 choline kinase 2 homolog [Arabidopsis
  misc_feature (16)..(343): Homolog of NCBI NO: 21537276 NR Description: choline kinase GmCK2p-like protein [Arabidopsis
  misc_feature (16)..(342): Homolog of NCBI NO: 15217543 NR Description: choline kinase, putative; protein id: At1g71697.1

SEQ ID NO: 93676 - protein, 301 aa, Arabidopsis thaliana; identical to SEQ ID NO: 89920
  peptide (1)..(301): Ceres Seq. ID no. 12721418
  misc_feature (17)..(289): Pfam Name: Choline/ethanolamine kinase Pfam Description: Choline/ethanolamine kinase
  misc_feature (1)..(301): Homolog of NCBI NO: 22330627 NR Description: putative choline kinase; protein id: At1g74320.1, by cDNA: gi_20453121 [Arabidopsis thaliana] At1g74320/F1O17_1 [Arabidopsis thaliana]
  misc_feature (1)..(301): Homolog of NCBI NO: 25348157 NR Description: protein choline kinase F1O17.1 [imported] -
  misc_feature (1)..(299): Homolog of NCBI NO: 7488654 NR Description: choline kinase (EC 2.7.1.32) CK3 - soybean
  misc_feature (1)..(301): Homolog of NCBI NO: 7488653 NR Description: choline kinase (EC 2.7.1.32) CK2 - soybean
  misc_feature (1)..(295): Homolog of NCBI NO: 7488652 NR Description: choline kinase (EC 2.7.1.32) CK1 - soybean
  misc_feature (1)..(295): Homolog of NCBI NO: 12311795 NR Description: choline kinase [Pisum sativum]
  misc_feature (1)..(297): Homolog of NCBI NO: 33149685 NR Description: choline kinase [Oryza sativa (indica
  misc_feature (1)..(296): Homolog of NCBI NO: 15234032 NR Description: choline kinase GmCK2p -like protein; protein id: supported by cDNA: 126037., supported by cDNA: 7395. [Arabidopsis >gi|7484868|pir||T04023 choline kinase 2 homolog [Arabidopsis
  misc_feature (1)..(296): Homolog of NCBI NO: 21537276 NR Description: choline kinase GmCK2p-like protein [Arabidopsis
  misc_feature (1)..(295): Homolog of NCBI NO: 15217543 NR Description: choline kinase, putative; protein id: At1g71697.1

SEQ ID NO: 93677 - DNA, 2688 bp, Arabidopsis thaliana; identical to SEQ ID NO: 89921
  misc_feature (1)..(2688): Ceres Seq. ID no. 12721444
  misc_feature: MA Experiment ID: 20000173 Result: Down-regulated in Transcription
  misc_feature: MA Experiment 20000173 PARAMETER Experiment Name: At_42deg_Heat_P Parameter: Age (day) Value: 14
  misc_feature: MA Experiment 20000173 PARAMETER Experiment Name: At_42deg_Heat_P Parameter: Organism Value: A. thaliana
  misc_feature: MA Experiment 20000173 PARAMETER Experiment Name: At_42deg_Heat_P Parameter: Plant Line Value: WS
  misc_feature: MA Experiment 20000173 PARAMETER Experiment Name: At_42deg_Heat_P Parameter: Temperature (deg C) Value: 42 vs. 22
  misc_feature: MA Experiment 20000173 PARAMETER Experiment Name: At_42deg_Heat_P Parameter: Timepoint (hr) Value: 6
  misc_feature: MA Experiment 20000173 PARAMETER Experiment Name: At_42deg_Heat_P Parameter: Tissue Value: Aerial

SEQ ID NO: 93678 - protein, 895 aa, Arabidopsis thaliana; identical to SEQ ID NO: 89922
  peptide (1)..(895): Ceres Seq. ID no. 12721445
  misc_feature (217)..(251): Pfam Name: PPR repeat Pfam Description: PPR repeat
  misc_feature (86)..(893): Homolog of NCBI NO: 15236324 NR Description: putative protein; protein id: At4g13650.1
  misc_feature (83)..(893): Homolog of NCBI NO: 34903762 NR Description: unnamed protein product [Oryza sativa (japonica group)] >gi|7340873|dbj|BAA92963.1| unnamed protein product
  misc_feature (323)..(893): Homolog of NCBI NO: 15234095 NR Description: putative protein; protein id: At4g33170.1
  misc_feature (13)..(227): Homolog of NCBI NO: 15234095 NR Description: putative protein; protein id: At4g33170.1
  misc_feature (187)..(893): Homolog of NCBI NO: 15235115 NR Description: putative protein; protein id: At4g39530.1
  misc_feature (198)..(893): Homolog of NCBI NO: 38423978 NR Description: PPR-repeat protein-like [Oryza sativa (japonica
  misc_feature (153)..(893): Homolog of NCBI NO: 38606535 NR Description: OSJNBa0016O02.23 [Oryza sativa (japonica
  misc_feature (189)..(893): Homolog of NCBI NO: 37536800 NR Description: putative PPR-repeat protein [Oryza sativa
  misc_feature (187)..(895): Homolog of NCBI NO: 34897084 NR Description: hypothetical protein [Oryza sativa (japonica group)] >gi|12957718|gb|AAK09236.1| hypothetical protein [Oryza
  misc_feature (191)..(893): Homolog of NCBI NO: 15232006 NR Description: hypothetical protein; protein id: At3g09040.1 thaliana] >gi|5923669|gb|AAD56320.1|AC009326_7 hypothetical

SEQ ID NO: 93679 - protein, 796 aa, Arabidopsis thaliana; identical to SEQ ID NO: 89923
  peptide (1)..(796): Ceres Seq. ID no. 12721446
  misc_feature (118)..(152): Pfam Name: PPR repeat Pfam Description: PPR repeat
  misc_feature (1)..(794): Homolog of NCBI NO: 15236324 NR Description: putative protein; protein id: At4g13650.1
  misc_feature (1)..(794): Homolog of NCBI NO: 34903762 NR Description: unnamed protein product [Oryza sativa (japonica group)] >gi|7340873|dbj|BAA92963.1| unnamed protein product
  misc_feature (224)..(794): Homolog of NCBI NO: 15234095 NR Description: putative protein; protein id: At4g33170.1
  misc_feature (1)..(128): Homolog of NCBI NO: 15234095 NR Description: putative protein; protein id: At4g33170.1
  misc_feature (88)..(794): Homolog of NCBI NO: 15235115 NR Description: putative protein; protein id: At4g39530.1
  misc_feature (99)..(794): Homolog of NCBI NO: 38423978 NR Description: PPR-repeat protein-like [Oryza sativa (japonica
  misc_feature (54)..(794): Homolog of NCBI NO: 38606535 NR Description: OSJNBa0016O02.23 [Oryza sativa (japonica
  misc_feature (90)..(794): Homolog of NCBI NO: 37536800 NR Description: putative PPR-repeat protein [Oryza sativa
  misc_feature (88)..(796): Homolog of NCBI NO: 34897084 NR Description: hypothetical protein [Oryza sativa (japonica group)] >gi|12957718|gb|AAK09236.1| hypothetical protein [Oryza
  misc_feature (92)..(794): Homolog of NCBI NO: 15232006 NR Description: hypothetical protein; protein id: At3g09040.1 thaliana] >gi|5923669|gb|AAD56320.1|AC009326_7 hypothetical

SEQ ID NO: 93680 - protein, 775 aa, Arabidopsis thaliana; identical to SEQ ID NO: 89924
  peptide (1)..(775): Ceres Seq. ID no. 12721447
  misc_feature (97)..(131): Pfam Name: PPR repeat Pfam Description: PPR repeat
  misc_feature (1)..(773): Homolog of NCBI NO: 15236324 NR Description: putative protein; protein id: At4g13650.1
  misc_feature (1)..(773): Homolog of NCBI NO: 34903762 NR Description: unnamed protein product [Oryza sativa (japonica group)] >gi|7340873|dbj|BAA92963.1| unnamed protein product
  misc_feature (203)..(773): Homolog of NCBI NO: 15234095 NR Description: putative protein; protein id: At4g33170.1
  misc_feature (1)..(107): Homolog of NCBI NO: 15234095 NR Description: putative protein; protein id: At4g33170.1
  misc_feature (67)..(773): Homolog of NCBI NO: 15235115 NR Description: putative protein; protein id: At4g39530.1
  misc_feature (78)..(773): Homolog of NCBI NO: 38423978 NR Description: PPR-repeat protein-like [Oryza sativa (japonica
  misc_feature (33)..(773): Homolog of NCBI NO: 38606535 NR Description: OSJNBa0016O02.23 [Oryza sativa (japonica
  misc_feature (69)..(773): Homolog of NCBI NO: 37536800 NR Description: putative PPR-repeat protein [Oryza sativa
  misc_feature (67)..(775): Homolog of NCBI NO: 34897084 NR Description: hypothetical protein [Oryza sativa (japonica group)] >gi|12957718|gb|AAK09236.1| hypothetical protein [Oryza
  misc_feature (71)..(773): Homolog of NCBI NO: 15232006 NR Description: hypothetical protein; protein id: At3g09040.1 thaliana] >gi|5923669|gb|AAD56320.1|AC009326_7 hypothetical

SEQ ID NO: 93681 - DNA, 1932 bp, Arabidopsis thaliana; identical to SEQ ID NO: 89925
  misc_feature (1)..(1932): Ceres Seq. ID no. 12721448
  misc_feature: MA Experiment ID: 20000307 Result: Up-regulated in Transcription
  misc_feature: MA Experiment 20000307 PARAMETER Experiment Name: At_Germinating_Seeds_Sub_P Parameter: Age (hr) Value: 24 vs. 0
  misc_feature: MA Experiment 20000307 PARAMETER Experiment Name: At_Germinating_Seeds_Sub_P Parameter: Organism Value: A. thaliana
  misc_feature: MA Experiment 20000307 PARAMETER Experiment Name: At_Germinating_Seeds_Sub_P Parameter: Plant Line Value: WS
  misc_feature: MA Experiment 20000307 PARAMETER Experiment Name: At_Germinating_Seeds_Sub_P Parameter: Tissue Value: Germinating Seeds
  misc_feature: MA Experiment ID: 20000315 Result: Up-regulated in Transcription
  misc_feature: MA Experiment 20000315 PARAMETER Experiment Name: At_14day_Shoots-Roots_Sub_P Parameter: Age (day) Value: 14
  misc_feature: MA Experiment 20000315 PARAMETER Experiment Name: At_14day_Shoots-Roots_Sub_P Parameter: Organism Value: A. thaliana
  misc_feature: MA Experiment 20000315 PARAMETER Experiment Name: At_14day_Shoots-Roots_Sub_P Parameter: Plant Line Value: WS
  misc_feature: MA Experiment 20000315 PARAMETER Experiment Name: At_14day_Shoots-Roots_Sub_P Parameter: Tissue Value: Shoots vs. Whole Plant
  misc_feature: MA Experiment ID: 20000327 Result: Up-regulated in Transcription
  misc_feature: MA Experiment 20000327 PARAMETER Experiment Name: At_42deg_Heat_Sub_P Parameter: Age (day) Value: 14
  misc_feature: MA Experiment 20000327 PARAMETER Experiment Name: At_42deg_Heat_Sub_P Parameter: Organism Value: A. thaliana
  misc_feature: MA Experiment 20000327 PARAMETER Experiment Name: At_42deg_Heat_Sub_P Parameter: Plant Line Value: WS
  misc_feature: MA Experiment 20000327 PARAMETER Experiment Name: At_42deg_Heat_Sub_P Parameter: Temperature (deg C) Value: 42 vs. 22
  misc_feature: MA Experiment 20000327 PARAMETER Experiment Name: At_42deg_Heat_Sub_P Parameter: Timepoint (hr) Value: 1
  misc_feature: MA Experiment 20000327 PARAMETER Experiment Name: At_42deg_Heat_Sub_P Parameter: Tissue Value: Aerial
  misc_feature: MA Experiment ID: 20000328 Result: Up-regulated in Transcription
  misc_feature: MA Experiment 20000328 PARAMETER Experiment Name: At_42deg_Heat_Sub_P Parameter: Age (day) Value: 14
  misc_feature: MA Experiment 20000328 PARAMETER Experiment Name: At_42deg_Heat_Sub_P Parameter: Organism Value: A. thaliana
  misc_feature: MA Experiment 20000328 PARAMETER Experiment Name: At_42deg_Heat_Sub_P Parameter: Plant Line Value: WS
  misc_feature: MA Experiment 20000328 PARAMETER Experiment Name: At_42deg_Heat_Sub_P Parameter: Temperature (deg C) Value: 42 vs. 22
  misc_feature: MA Experiment 20000328 PARAMETER Experiment Name: At_42deg_Heat_Sub_P Parameter: Timepoint (hr) Value: 6
  misc_feature: MA Experiment 20000328 PARAMETER Experiment Name: At_42deg_Heat_Sub_P Parameter: Tissue Value: Aerial

SEQ ID NO: 93682 - protein, 643 aa, Arabidopsis thaliana; identical to SEQ ID NO: 89926
  peptide (1)..(643): Ceres Seq. ID no. 12721449
  misc_feature (408)..(442): Pfam Name: PPR repeat Pfam Description: PPR repeat
  misc_feature (206)..(643): Homolog of NCBI NO: 15239745 NR Description: selenium-binding protein-like; protein id:
  misc_feature (12)..(233): Homolog of NCBI NO: 15239745 NR Description: selenium-binding protein-like; protein id:
  misc_feature (176)..(643): Homolog of NCBI NO: 9279687 NR Description: gb|AAC35225.1~gene_id:MWI23.6~strong similarity
  misc_feature (10)..(227): Homolog of NCBI NO: 9279687 NR Description: gb|AAC35225.1~gene_id:MWI23.6~strong similarity
  misc_feature (176)..(642): Homolog of NCBI NO: 15228829 NR Description: hypothetical protein; protein id: At3g22690.1
  misc_feature (10)..(227): Homolog of NCBI NO: 15228829 NR Description: hypothetical protein; protein id: At3g22690.1
  misc_feature (207)..(643): Homolog of NCBI NO: 8778758 NR Description: T30E16.32 [Arabidopsis thaliana]
  misc_feature (207)..(643): Homolog of NCBI NO: 15218900 NR Description: hypothetical protein; protein id: At1g59720.1
  misc_feature (2)..(198): Homolog of NCBI NO: 8778758 NR Description: T30E16.32 [Arabidopsis thaliana]
  misc_feature (2)..(198): Homolog of NCBI NO: 15218900 NR Description: hypothetical protein; protein id: At1g59720.1

SEQ ID NO: 93683 - protein, 572 aa, Arabidopsis thaliana; identical to SEQ ID NO: 89927
  peptide (1)..(572): Ceres Seq. ID no. 12721450
  misc_feature (337)..(371): Pfam Name: PPR repeat Pfam Description: PPR repeat
  misc_feature (135)..(572): Homolog of NCBI NO: 15239745 NR Description: selenium-binding protein-like; protein id:
  misc_feature (1)..(162): Homolog of NCBI NO: 15239745 NR Description: selenium-binding protein-like; protein id:
  misc_feature (105)..(572): Homolog of NCBI NO: 9279687 NR Description: gb|AAC35225.1~gene_id:MWI23.6~strong similarity
  misc_feature (1)..(156): Homolog of NCBI NO: 9279687 NR Description: gb|AAC35225.1~gene_id:MWI23.6~strong similarity
  misc_feature (105)..(571): Homolog of NCBI NO: 15228829 NR Description: hypothetical protein; protein id: At3g22690.1
  misc_feature (1)..(156): Homolog of NCBI NO: 15228829 NR Description: hypothetical protein; protein id: At3g22690.1
  misc_feature (136)..(572): Homolog of NCBI NO: 8778758 NR Description: T30E16.32 [Arabidopsis thaliana]
  misc_feature (136)..(572): Homolog of NCBI NO: 15218900 NR Description: hypothetical protein; protein id: At1g59720.1
  misc_feature (1)..(127): Homolog of NCBI NO: 8778758 NR Description: T30E16.32 [Arabidopsis thaliana]
  misc_feature (1)..(127): Homolog of NCBI NO: 15218900 NR Description: hypothetical protein; protein id: At1g59720.1

SEQ ID NO: 93684 - protein, 548 aa, Arabidopsis thaliana; identical to SEQ ID NO: 89928
  peptide (1)..(548): Ceres Seq. ID no. 12721451
  misc_feature (313)..(347): Pfam Name: PPR repeat Pfam Description: PPR repeat
  misc_feature (111)..(548): Homolog of NCBI NO: 15239745 NR Description: selenium-binding protein-like; protein id:
  misc_feature (1)..(138): Homolog of NCBI NO: 15239745 NR Description: selenium-binding protein-like; protein id:
  misc_feature (81)..(548): Homolog of NCBI NO: 9279687 NR Description: gb|AAC35225.1~gene_id:MWI23.6~strong similarity
  misc_feature (1)..(132): Homolog of NCBI NO: 9279687 NR Description: gb|AAC35225.1~gene_id:MWI23.6~strong similarity
  misc_feature (81)..(547): Homolog of NCBI NO: 15228829 NR Description: hypothetical protein; protein id: At3g22690.1
  misc_feature (1)..(132): Homolog of NCBI NO: 15228829 NR Description: hypothetical protein; protein id: At3g22690.1
  misc_feature (112)..(548): Homolog of NCBI NO: 8778758 NR Description: T30E16.32 [Arabidopsis thaliana]
  misc_feature (112)..(548): Homolog of NCBI NO: 15218900 NR Description: hypothetical protein; protein id: At1g59720.1
  misc_feature (1)..(103): Homolog of NCBI NO: 8778758 NR Description: T30E16.32 [Arabidopsis thaliana]
  misc_feature (1)..(103): Homolog of NCBI NO: 15218900 NR Description: hypothetical protein; protein id: At1g59720.1

SEQ ID NO: 93685 - DNA, 768 bp, Arabidopsis thaliana; identical to SEQ ID NO: 89929
  misc_feature (1)..(768): Ceres Seq. ID no. 12721472
  misc_feature: MA Experiment ID: 20000314 Result: Up-regulated in Transcription
  misc_feature: MA Experiment 20000314 PARAMETER Experiment Name: At_14day_Shoots-Roots_Sub_P Parameter: Age (day) Value: 14
  misc_feature: MA Experiment 20000314 PARAMETER Experiment Name: At_14day_Shoots-Roots_Sub_P Parameter: Organism Value: A. thaliana
  misc_feature: MA Experiment 20000314 PARAMETER Experiment Name: At_14day_Shoots-Roots_Sub_P Parameter: Plant Line Value: WS
  misc_feature: MA Experiment 20000314 PARAMETER Experiment Name: At_14day_Shoots-Roots_Sub_P Parameter: Tissue Value: Roots vs. Whole Plant
  misc_feature: MA Experiment ID: 20000347 Result: Up-regulated in Transcription
  misc_feature: MA Experiment 20000347 PARAMETER Experiment Name: At_2mM_SA_Sub_P Parameter: Age (day) Value: 14
  misc_feature: MA Experiment 20000347 PARAMETER Experiment Name: At_2mM_SA_Sub_P Parameter: Organism Value: A. thaliana
  misc_feature: MA Experiment 20000347 PARAMETER Experiment Name: At_2mM_SA_Sub_P Parameter: Plant Line Value: WS
  misc_feature: MA Experiment 20000347 PARAMETER Experiment Name: At_2mM_SA_Sub_P Parameter: Timepoint (hr) Value: 6
  misc_feature: MA Experiment 20000347 PARAMETER Experiment Name: At_2mM_SA_Sub_P Parameter: Tissue Value: Aerial
  misc_feature: MA Experiment 20000347 PARAMETER Experiment Name: At_2mM_SA_Sub_P Parameter: Treatment Value: 2mM SA vs. No Treatment

SEQ ID NO: 93686 - protein, 255 aa, Arabidopsis thaliana; identical to SEQ ID NO: 89930
  peptide (1)..(255): Ceres Seq. ID no. 12721473
  misc_feature (21)..(97): Pfam Name: CHY zinc finger Pfam Description: CHY zinc finger
  misc_feature (1)..(255): Homolog of NCBI NO: 15221379 NR Description: hypothetical protein; protein id: At1g74760.1
  misc_feature (2)..(254): Homolog of NCBI NO: 25402866 NR Description: protein F14D16.3 [imported] - Arabidopsis >gi|8778297|gb|AAF79306.1|AC068602_29 F14D16.3 [Arabidopsis
  misc_feature (61)..(254): Homolog of NCBI NO: 15221895 NR Description: hypothetical protein; protein id: At1g18910.1
  misc_feature (4)..(255): Homolog of NCBI NO: 34911328 NR Description: putative zinc finger protein [Oryza sativa
  misc_feature (6)..(255): Homolog of NCBI NO: 9279663 NR Description: gb|AAD55299.1~gene_id:MIE15.8~similar to unknown
  misc_feature (6)..(255): Homolog of NCBI NO: 15229615 NR Description: zinc finger protein, putative; protein id: supported by cDNA: gi_20453198 [Arabidopsis thaliana] AT3g18290/MIE15_8 [Arabidopsis thaliana]
  misc_feature (3)..(255): Homolog of NCBI NO: 22347790 NR Description: putative zinc finger protein [Zea mays]
  misc_feature (9)..(197): Homolog of NCBI NO: 29367543 NR Description: putative zinc finger protein [Oryza sativa
  misc_feature (17)..(252): Homolog of NCBI NO: 32413120 NR Description: hypothetical protein [Neurospora crassa] conserved hypothetical protein [Neurospora crassa]
  misc_feature (19)..(253): Homolog of NCBI NO: 15237169 NR Description: PGPD14 protein; protein id: At5g22920.1, by cDNA: 41666., supported by cDNA: gi_15450520 [Arabidopsis >gi|10177239|dbj|BAB10613.1| PGPD14 protein [Arabidopsis

SEQ ID NO: 93687 - protein, 195 aa, Arabidopsis thaliana; identical to SEQ ID NO: 89931
  peptide (1)..(195): Ceres Seq. ID no. 12721474
  misc_feature (89)..(130): Pfam Name: Zinc finger, C3HC4 type (RING finger) Pfam Description: Zinc finger, C3HC4 type (RING finger)
  misc_feature (1)..(195): Homolog of NCBI NO: 15221379 NR Description: hypothetical protein; protein id: At1g74760.1
  misc_feature (1)..(194): Homolog of NCBI NO: 25402866 NR Description: protein F14D16.3 [imported] - Arabidopsis >gi|8778297|gb|AAF79306.1|AC068602_29 F14D16.3 [Arabidopsis
  misc_feature (1)..(194): Homolog of NCBI NO: 15221895 NR Description: hypothetical protein; protein id: At1g18910.1
  misc_feature (1)..(195): Homolog of NCBI NO: 34911328 NR Description: putative zinc finger protein [Oryza sativa
  misc_feature (1)..(195): Homolog of NCBI NO: 9279663 NR Description: gb|AAD55299.1~gene_id:MIE15.8~similar to unknown
  misc_feature (1)..(195): Homolog of NCBI NO: 15229615 NR Description: zinc finger protein, putative; protein id: supported by cDNA: gi_20453198 [Arabidopsis thaliana] AT3g18290/MIE15_8 [Arabidopsis thaliana]
  misc_feature (1)..(195): Homolog of NCBI NO: 22347790 NR Description: putative zinc finger protein [Zea mays]
  misc_feature (1)..(137): Homolog of NCBI NO: 29367543 NR Description: putative zinc finger protein [Oryza sativa
  misc_feature (1)..(192): Homolog of NCBI NO: 32413120 NR Description: hypothetical protein [Neurospora crassa] conserved hypothetical protein [Neurospora crassa]
  misc_feature (1)..(193): Homolog of NCBI NO: 15237169 NR Description: PGPD14 protein; protein id: At5g22920.1, by cDNA: 41666., supported by cDNA: gi_15450520 [Arabidopsis >gi|10177239|dbj|BAB10613.1| PGPD14 protein [Arabidopsis

SEQ ID NO: 93688 - protein, 194 aa, Arabidopsis thaliana; identical to SEQ ID NO: 89932
  peptide (1)..(194): Ceres Seq. ID no. 12721475
  misc_feature (88)..(129): Pfam Name: Zinc finger, C3HC4 type (RING finger) Pfam Description: Zinc finger, C3HC4 type (RING finger)
  misc_feature (1)..(194): Homolog of NCBI NO: 15221379 NR Description: hypothetical protein; protein id: At1g74760.1
  misc_feature (1)..(193): Homolog of NCBI NO: 25402866 NR Description: protein F14D16.3 [imported] - Arabidopsis >gi|8778297|gb|AAF79306.1|AC068602_29 F14D16.3 [Arabidopsis
  misc_feature (1)..(193): Homolog of NCBI NO: 15221895 NR Description: hypothetical protein; protein id: At1g18910.1
  misc_feature (1)..(194): Homolog of NCBI NO: 34911328 NR Description: putative zinc finger protein [Oryza sativa
  misc_feature (1)..(194): Homolog of NCBI NO: 9279663 NR Description: gb|AAD55299.1~gene_id:MIE15.8~similar to unknown
  misc_feature (1)..(194): Homolog of NCBI NO: 15229615 NR Description: zinc finger protein, putative; protein id: supported by cDNA: gi_20453198 [Arabidopsis thaliana] AT3g18290/MIE15_8 [Arabidopsis thaliana]
  misc_feature (1)..(194): Homolog of NCBI NO: 22347790 NR Description: putative zinc finger protein [Zea mays]
  misc_feature (1)..(136): Homolog of NCBI NO: 29367543 NR Description: putative zinc finger protein [Oryza sativa
  misc_feature (1)..(191): Homolog of NCBI NO: 32413120 NR Description: hypothetical protein [Neurospora crassa] conserved hypothetical protein [Neurospora crassa]
  misc_feature (1)..(192): Homolog of NCBI NO: 15237169 NR Description: PGPD14 protein; protein id: At5g22920.1, by cDNA: 41666., supported by cDNA: gi_15450520 [Arabidopsis >gi|10177239|dbj|BAB10613.1| PGPD14 protein [Arabidopsis

SEQ ID NO: 93689 - DNA, 684 bp, Arabidopsis thaliana; identical to SEQ ID NO: 89933
  misc_feature (1)..(684): Ceres Seq. ID no. 12721488
  misc_feature: MA Experiment ID: 20001909 Result: Up-regulated in Transcription
  misc_feature: MA Experiment 20001909 PARAMETER Experiment Name: At_Drought_Reproduction_P Parameter: Age (day) Value: 35
  misc_feature: MA Experiment 20001909 PARAMETER Experiment Name: At_Drought_Reproduction_P Parameter: Organism Value: A. thaliana
  misc_feature: MA Experiment 20001909 PARAMETER Experiment Name: At_Drought_Reproduction_P Parameter: Plant Line Value: WS
  misc_feature: MA Experiment 20001909 PARAMETER Experiment Name: At_Drought_Reproduction_P Parameter: Timepoint (day) Value: 5
  misc_feature: MA Experiment 20001909 PARAMETER Experiment Name: At_Drought_Reproduction_P Parameter: Tissue Value: Flowers
  misc_feature: MA Experiment 20001909 PARAMETER Experiment Name: At_Drought_Reproduction_P Parameter: Treatment Value: Drought vs. No Drought

SEQ ID NO: 93690 - protein, 227 aa, Arabidopsis thaliana; identical to SEQ ID NO: 89934
  peptide (1)..(227): Ceres Seq. ID no. 12721489
  misc_feature (71)..(219): Pfam Name: Cupin Pfam Description: Cupin
  misc_feature (1)..(227): Homolog of NCBI NO: 15221388 NR Description: germin subunit, putative; protein id: At1g74820.1
  misc_feature (6)..(225): Homolog of NCBI NO: 15221902 NR Description: germin, putative; protein id: At1g18980.1,
  misc_feature (12)..(225): Homolog of NCBI NO: 18202452 NR Description: Germin-like protein subfamily T member 1 >gi|8778295|gb|AAF79304.1|AC068602_27 F14D16.12 [Arabidopsis
  misc_feature (24)..(225): Homolog of NCBI NO: 18394676 NR Description: germin, putative; protein id: At1g18970.1,
  misc_feature (38)..(225): Homolog of NCBI NO: 25044823 NR Description: germin-like protein [Ananas comosus]
  misc_feature (30)..(225): Homolog of NCBI NO: 34902528 NR Description: probable germin protein 4 [Oryza sativa (japonica
  misc_feature (39)..(225): Homolog of NCBI NO: 7447330 NR Description: probable oxalate oxidase (EC 1.2.3.4) - rice
  misc_feature (33)..(226): Homolog of NCBI NO: 28273400 NR Description: putative oxalate oxidase [Oryza sativa (japonica
  misc_feature (9)..(226): Homolog of NCBI NO: 28273416 NR Description: putative oxalate oxidase [Oryza sativa (japonica
  misc_feature (10)..(226): Homolog of NCBI NO: 28273419 NR Description: putative oxalate oxidase [Oryza sativa (japonica

SEQ ID NO: 93691 - protein, 123 aa, Arabidopsis thaliana; identical to SEQ ID NO: 89935
  peptide (1)..(123): Ceres Seq. ID no. 12721490
  misc_feature (1)..(115): Pfam Name: Cupin Pfam Description: Cupin
  misc_feature (1)..(123): Homolog of NCBI NO: 15221388 NR Description: germin subunit, putative; protein id: At1g74820.1
  misc_feature (1)..(121): Homolog of NCBI NO: 15221902 NR Description: germin, putative; protein id: At1g18980.1,
  misc_feature (1)..(121): Homolog of NCBI NO: 18202452 NR Description: Germin-like protein subfamily T member 1 >gi|8778295|gb|AAF79304.1|AC068602_27 F14D16.12 [Arabidopsis
  misc_feature (1)..(121): Homolog of NCBI NO: 18394676 NR Description: germin, putative; protein id: At1g18970.1,
  misc_feature (1)..(121): Homolog of NCBI NO: 25044823 NR Description: germin-like protein [Ananas comosus]
  misc_feature (1)..(121): Homolog of NCBI NO: 34902528 NR Description: probable germin protein 4 [Oryza sativa (japonica
  misc_feature (1)..(121): Homolog of NCBI NO: 7447330 NR Description: probable oxalate oxidase (EC 1.2.3.4) - rice
  misc_feature (1)..(122): Homolog of NCBI NO: 28273400 NR Description: putative oxalate oxidase [Oryza sativa (japonica
  misc_feature (1)..(122): Homolog of NCBI NO: 28273416 NR Description: putative oxalate oxidase [Oryza sativa (japonica
  misc_feature (1)..(122): Homolog of NCBI NO: 28273419 NR Description: putative oxalate oxidase [Oryza sativa (japonica

SEQ ID NO: 93692 - DNA, 2589 bp, Arabidopsis thaliana; identical to SEQ ID NO: 89936
  misc_feature (1)..(2589): Ceres Seq. ID no. 12721495
  misc_feature: MA Experiment ID: 20000171 Result: Down-regulated in Transcription
  misc_feature: MA Experiment 20000171 PARAMETER Experiment Name: At_42deg_Heat_P Parameter: Age (day) Value: 14
  misc_feature: MA Experiment 20000171 PARAMETER Experiment Name: At_42deg_Heat_P Parameter: Organism Value: A. thaliana
  misc_feature: MA Experiment 20000171 PARAMETER Experiment Name: At_42deg_Heat_P Parameter: Plant Line Value: WS
  misc_feature: MA Experiment 20000171 PARAMETER Experiment Name: At_42deg_Heat_P Parameter: Temperature (deg C) Value: 42 vs. 22
  misc_feature: MA Experiment 20000171 PARAMETER Experiment Name: At_42deg_Heat_P Parameter: Timepoint (hr) Value: 1
  misc_feature: MA Experiment 20000171 PARAMETER Experiment Name: At_42deg_Heat_P Parameter: Tissue Value: Aerial
  misc_feature: MA Experiment ID: 20000173 Result: Down-regulated in Transcription
  misc_feature: MA Experiment 20000173 PARAMETER Experiment Name: At_42deg_Heat_P Parameter: Age (day) Value: 14
  misc_feature: MA Experiment 20000173 PARAMETER Experiment Name: At_42deg_Heat_P Parameter: Organism Value: A. thaliana
  misc_feature: MA Experiment 20000173 PARAMETER Experiment Name: At_42deg_Heat_P Parameter: Plant Line Value: WS
  misc_feature: MA Experiment 20000173 PARAMETER Experiment Name: At_42deg_Heat_P Parameter: Temperature (deg C) Value: 42 vs. 22
  misc_feature: MA Experiment 20000173 PARAMETER Experiment Name: At_42deg_Heat_P Parameter: Timepoint (hr) Value: 6
  misc_feature: MA Experiment 20000173 PARAMETER Experiment Name: At_42deg_Heat_P Parameter: Tissue Value: Aerial
  misc_feature: MA Experiment ID: 20000495 Result: Down-regulated in Transcription
  misc_feature: MA Experiment 20000495 PARAMETER Experiment Name: At_Guard_Cells_P Parameter: Harvest Date Value: 8/2/2002
  misc_feature: MA Experiment 20000495 PARAMETER Experiment Name: At_Guard_Cells_P Parameter: Organism Value: A. thaliana
  misc_feature: MA Experiment 20000495 PARAMETER Experiment Name: At_Guard_Cells_P Parameter: Tissue Value: Guard Cells vs. Leaves
  misc_feature: MA Experiment ID: 20001451 Result: Down-regulated in Transcription
  misc_feature: MA Experiment 20001451 PARAMETER Experiment Name: At_Far-red-induction_P Parameter: Age (day) Value: 7
  misc_feature: MA Experiment 20001451 PARAMETER Experiment Name: At_Far-red-induction_P Parameter: Light Value: Far-red vs. White
  misc_feature: MA Experiment 20001451 PARAMETER Experiment Name: At_Far-red-induction_P Parameter: Organism Value: A. thaliana
  misc_feature: MA Experiment 20001451 PARAMETER Experiment Name: At_Far-red-induction_P Parameter: Plant Line Value: Columbia
  misc_feature: MA Experiment 20001451 PARAMETER Experiment Name: At_Far-red-induction_P Parameter: Timepoint (hr) Value: 24
  misc_feature: MA Experiment 20001451 PARAMETER Experiment Name: At_Far-red-induction_P Parameter: Tissue Value: Whole Plant
  misc_feature: MA Experiment ID: 20001757 Result: Up-regulated in Transcription
  misc_feature: MA Experiment 20001757 PARAMETER Experiment Name: At_50mM_NH4NO3_L-to-H_P Parameter: Timepoint (hr) Value: 6
  misc_feature: MA Experiment 20001757 PARAMETER Experiment Name: At_50mM_NH4NO3_L-to-H_P Parameter: Tissue Value: Leaf
  misc_feature: MA Experiment 20001757 PARAMETER Experiment Name: At_50mM_NH4NO3_L-to-H_P Parameter: Treatment Value: 50mM NH4NO3 vs 100mM Mannitol

SEQ ID NO: 93693 - protein, 862 aa, Arabidopsis thaliana; identical to SEQ ID NO: 89937
  peptide (1)..(862): Ceres Seq. ID no. 12721496
  misc_feature (212)..(247): Pfam Name: PPR repeat Pfam Description: PPR repeat
  misc_feature (64)..(856): Homolog of NCBI NO: 34897386 NR Description: putative chloroplast RNA processing protein
  misc_feature (92)..(720): Homolog of NCBI NO: 15242557 NR Description: putative protein; protein id: At5g02860.1
  misc_feature (79)..(710): Homolog of NCBI NO: 15224262 NR Description: putative salt-inducible protein; protein id: supported by cDNA: gi_15983784 [Arabidopsis thaliana]
  misc_feature (99)..(637): Homolog of NCBI NO: 15224671 NR Description: unknown protein; protein id: At2g31400.1
  misc_feature (583)..(792): Homolog of NCBI NO: 15224671 NR Description: unknown protein; protein id: At2g31400.1
  misc_feature (148)..(720): Homolog of NCBI NO: 34393454 NR Description: putative pentatricopeptide (PPR)
  misc_feature (142)..(280): Homolog of NCBI NO: 15724390 NR Description: putative salt-inducible protein [Brassica nigra]
  misc_feature (79)..(628): Homolog of NCBI NO: 30688770 NR Description: pentatricopeptide (PPR) repeat-containing protein
  misc_feature (79)..(628): Homolog of NCBI NO: 30688764 NR Description: pentatricopeptide (PPR) repeat-containing protein
  misc_feature (121)..(641): Homolog of NCBI NO: 34393454 NR Description: putative pentatricopeptide (PPR)

SEQ ID NO: 93694 - protein, 732 aa, Arabidopsis thaliana; identical to SEQ ID NO: 89938
  peptide (1)..(732): Ceres Seq. ID no. 12721497
  misc_feature (82)..(117): Pfam Name: PPR repeat Pfam Description: PPR repeat
  misc_feature (1)..(726): Homolog of NCBI NO: 34897386 NR Description: putative chloroplast RNA processing protein
  misc_feature (1)..(590): Homolog of NCBI NO: 15242557 NR Description: putative protein; protein id: At5g02860.1
  misc_feature (1)..(580): Homolog of NCBI NO: 15224262 NR Description: putative salt-inducible protein; protein id: supported by cDNA: gi_15983784 [Arabidopsis thaliana]
  misc_feature (1)..(507): Homolog of NCBI NO: 15224671 NR Description: unknown protein; protein id: At2g31400.1
  misc_feature (453)..(662): Homolog of NCBI NO: 15224671 NR Description: unknown protein; protein id: At2g31400.1
  misc_feature (18)..(590): Homolog of NCBI NO: 34393454 NR Description: putative pentatricopeptide (PPR)
  misc_feature (12)..(150): Homolog of NCBI NO: 15724390 NR Description: putative salt-inducible protein [Brassica nigra]
  misc_feature (1)..(498): Homolog of NCBI NO: 30688770 NR Description: pentatricopeptide (PPR) repeat-containing protein
  misc_feature (1)..(498): Homolog of NCBI NO: 30688764 NR Description: pentatricopeptide (PPR) repeat-containing protein
  misc_feature (1)..(511): Homolog of NCBI NO: 34393454 NR Description: putative pentatricopeptide (PPR)

SEQ ID NO: 93695 - protein, 716 aa, Arabidopsis thaliana; identical to SEQ ID NO: 89939
  peptide (1)..(716): Ceres Seq. ID no. 12721498
  misc_feature (66)..(101): Pfam Name: PPR repeat Pfam Description: PPR repeat
  misc_feature (1)..(710): Homolog of NCBI NO: 34897386 NR Description: putative chloroplast RNA processing protein
  misc_feature (1)..(574): Homolog of NCBI NO: 15242557 NR Description: putative protein; protein id: At5g02860.1
  misc_feature (1)..(564): Homolog of NCBI NO: 15224262 NR Description: putative salt-inducible protein; protein id: supported by cDNA: gi_15983784 [Arabidopsis thaliana]
  misc_feature (1)..(491): Homolog of NCBI NO: 15224671 NR Description: unknown protein; protein id: At2g31400.1
  misc_feature (437)..(646): Homolog of NCBI NO: 15224671 NR Description: unknown protein; protein id: At2g31400.1
  misc_feature (2)..(574): Homolog of NCBI NO: 34393454 NR Description: putative pentatricopeptide (PPR)
  misc_feature (1)..(134): Homolog of NCBI NO: 15724390 NR Description: putative salt-inducible protein [Brassica nigra]
  misc_feature (1)..(482): Homolog of NCBI NO: 30688770 NR Description: pentatricopeptide (PPR) repeat-containing protein
  misc_feature (1)..(482): Homolog of NCBI NO: 30688764 NR Description: pentatricopeptide (PPR) repeat-containing protein
  misc_feature (1)..(495): Homolog of NCBI NO: 34393454 NR Description: putative pentatricopeptide (PPR)

SEQ ID NO: 93696 - DNA, 1449 bp, Arabidopsis thaliana; identical to SEQ ID NO: 89940
  misc_feature (1)..(1449): Ceres Seq. ID no. 12721502
  misc_feature: MA Experiment ID: 20000794 Result: Up-regulated in Transcription
  misc_feature: MA Experiment 20000794 PARAMETER Experiment Name: At_Petals_P Parameter: Age (day) Value: 23-25 days
  misc_feature: MA Experiment 20000794 PARAMETER Experiment Name: At_Petals_P Parameter: Plant Line Value: WS
  misc_feature: MA Experiment 20000794 PARAMETER Experiment Name: At_Petals_P Parameter: Tissue Value: Petals vs. Whole plant

SEQ ID NO: 93697 - protein, 482 aa, Arabidopsis thaliana; identical to SEQ ID NO: 89941
  peptide (1)..(482): Ceres Seq. ID no. 12721503
  misc_feature (231)..(265): Pfam Name: PPR repeat Pfam Description: PPR repeat
  misc_feature (1)..(482): Homolog of NCBI NO: 15222036 NR Description: hypothetical protein; protein id: At1g74900.1
  misc_feature (2)..(459): Homolog of NCBI NO: 14488357 NR Description: unknown protein [Oryza sativa (japonica
  misc_feature (23)..(455): Homolog of NCBI NO: 15223926 NR Description: hypothetical protein; protein id: At1g77360.1
  misc_feature (58)..(469): Homolog of NCBI NO: 21686921 NR Description: putative reverse transcriptase [Oryza sativa
  misc_feature (90)..(473): Homolog of NCBI NO: 15231863 NR Description: putative protein; protein id: At3g53700.1, by cDNA: gi_15982930 [Arabidopsis thaliana]
  misc_feature (32)..(473): Homolog of NCBI NO: 18394846 NR Description: expressed protein; protein id: At1g20300.1, by cDNA: gi_15450346, supported by cDNA: gi_17386103 [Arabidopsis
  misc_feature (89)..(457): Homolog of NCBI NO: 15221550 NR Description: PPR-repeat protein; protein id: At1g62680.1
  misc_feature (54)..(474): Homolog of NCBI NO: 15221549 NR Description: PPR-repeat protein; protein id: At1g62670.1
  misc_feature (112)..(474): Homolog of NCBI NO: 5454208 NR Description: T3P18.22 [Arabidopsis thaliana]
  misc_feature (15)..(477): Homolog of NCBI NO: 15228825 NR Description: hypothetical protein; protein id: At3g22670.1 thaliana] >gi|9279685|dbj|BAB01242.1|

SEQ ID NO: 93698 - protein, 366 aa, Arabidopsis thaliana; identical to SEQ ID NO: 89942
  peptide (1)..(366): Ceres Seq. ID no. 12721504
  misc_feature (115)..(149): Pfam Name: PPR repeat Pfam Description: PPR repeat
  misc_feature (1)..(366): Homolog of NCBI NO: 15222036 NR Description: hypothetical protein; protein id: At1g74900.1
  misc_feature (1)..(343): Homolog of NCBI NO: 14488357 NR Description: unknown protein [Oryza sativa (japonica
  misc_feature (1)..(339): Homolog of NCBI NO: 15223926 NR Description: hypothetical protein; protein id: At1g77360.1
  misc_feature (1)..(353): Homolog of NCBI NO: 21686921 NR Description: putative reverse transcriptase [Oryza sativa
  misc_feature (1)..(357): Homolog of NCBI NO: 15231863 NR Description: putative protein; protein id: At3g53700.1, by cDNA: gi_15982930 [Arabidopsis thaliana]
  misc_feature (1)..(357): Homolog of NCBI NO: 18394846 NR Description: expressed protein; protein id: At1g20300.1, by cDNA: gi_15450346, supported by cDNA: gi_17386103 [Arabidopsis
  misc_feature (1)..(341): Homolog of NCBI NO: 15221550 NR Description: PPR-repeat protein; protein id: At1g62680.1
  misc_feature (1)..(358): Homolog of NCBI NO: 15221549 NR Description: PPR-repeat protein; protein id: At1g62670.1
  misc_feature (1)..(358): Homolog of NCBI NO: 5454208 NR Description: T3P18.22 [Arabidopsis thaliana]
  misc_feature (1)..(361): Homolog of NCBI NO: 15228825 NR Description: hypothetical protein; protein id: At3g22670.1 thaliana] >gi|9279685|dbj|BAB01242.1|

SEQ ID NO: 93699 - protein, 331 aa, Arabidopsis thaliana; identical to SEQ ID NO: 89943
  peptide (1)..(331): Ceres Seq. ID no. 12721505
  misc_feature (80)..(114): Pfam Name: PPR repeat Pfam Description: PPR repeat
  misc_feature (1)..(331): Homolog of NCBI NO: 15222036 NR Description: hypothetical protein; protein id: At1g74900.1
  misc_feature (1)..(308): Homolog of NCBI NO: 14488357 NR Description: unknown protein [Oryza sativa (japonica
  misc_feature (1)..(304): Homolog of NCBI NO: 15223926 NR Description: hypothetical protein; protein id: At1g77360.1
  misc_feature (1)..(318): Homolog of NCBI NO: 21686921 NR Description: putative reverse transcriptase [Oryza sativa
  misc_feature (1)..(322): Homolog of NCBI NO: 15231863 NR Description: putative protein; protein id: At3g53700.1, by cDNA: gi_15982930 [Arabidopsis thaliana]
  misc_feature (1)..(322): Homolog of NCBI NO: 18394846 NR Description: expressed protein; protein id: At1g20300.1, by cDNA: gi_15450346, supported by cDNA: gi_17386103 [Arabidopsis
  misc_feature (1)..(306): Homolog of NCBI NO: 15221550 NR Description: PPR-repeat protein; protein id: At1g62680.1
  misc_feature (1)..(323): Homolog of NCBI NO: 15221549 NR Description: PPR-repeat protein; protein id: At1g62670.1
  misc_feature (1)..(323): Homolog of NCBI NO: 5454208 NR Description: T3P18.22 [Arabidopsis thaliana]
  misc_feature (1)..(326): Homolog of NCBI NO: 15228825 NR Description: hypothetical protein; protein id: At3g22670.1 thaliana] >gi|9279685|dbj|BAB01242.1|

SEQ ID NO: 93700 - DNA, 1623 bp, Arabidopsis thaliana; identical to SEQ ID NO: 89944
  misc_feature (1)..(1623): Ceres Seq. ID no. 12721545
  misc_feature: MA Experiment ID: 20001247 Result: Up-regulated in Transcription
  misc_feature: MA Experiment 20001247 PARAMETER Experiment Name: At_Far-red-induction_P Parameter: Age (day) Value: 7
  misc_feature: MA Experiment 20001247 PARAMETER Experiment Name: At_Far-red-induction_P Parameter: Light Value: Far-red vs. White
  misc_feature: MA Experiment 20001247 PARAMETER Experiment Name: At_Far-red-induction_P Parameter: Organism Value: A. thaliana
  misc_feature: MA Experiment 20001247 PARAMETER Experiment Name: At_Far-red-induction_P Parameter: Plant Line Value: Columbia
  misc_feature: MA Experiment 20001247 PARAMETER Experiment Name: At_Far-red-induction_P Parameter: Timepoint (hr) Value: 1
  misc_feature: MA Experiment 20001247 PARAMETER Experiment Name: At_Far-red-induction_P Parameter: Tissue Value: Whole Plant
  misc_feature: MA Experiment ID: 20001248 Result: Up-regulated in Transcription
  misc_feature: MA Experiment 20001248 PARAMETER Experiment Name: At_Far-red-induction_P Parameter: Age (day) Value: 7
  misc_feature: MA Experiment 20001248 PARAMETER Experiment Name: At_Far-red-induction_P Parameter: Light Value: Far-red vs. White
  misc_feature: MA Experiment 20001248 PARAMETER Experiment Name: At_Far-red-induction_P Parameter: Organism Value: A. thaliana
  misc_feature: MA Experiment 20001248 PARAMETER Experiment Name: At_Far-red-induction_P Parameter: Plant Line Value: Columbia
  misc_feature: MA Experiment 20001248 PARAMETER Experiment Name: At_Far-red-induction_P Parameter: Timepoint (hr) Value: 4
  misc_feature: MA Experiment 20001248 PARAMETER Experiment Name: At_Far-red-induction_P Parameter: Tissue Value: Whole Plant
  misc_feature: MA Experiment ID: 20001450 Result: Up-regulated in Transcription
  misc_feature: MA Experiment 20001450 PARAMETER Experiment Name: At_Far-red-induction_P Parameter: Age (day) Value: 7
  misc_feature: MA Experiment 20001450 PARAMETER Experiment Name: At_Far-red-induction_P Parameter: Light Value: Far-red vs. White
  misc_feature: MA Experiment 20001450 PARAMETER Experiment Name: At_Far-red-induction_P Parameter: Organism Value: A. thaliana
  misc_feature: MA Experiment 20001450 PARAMETER Experiment Name: At_Far-red-induction_P Parameter: Plant Line Value: Columbia
  misc_feature: MA Experiment 20001450 PARAMETER Experiment Name: At_Far-red-induction_P Parameter: Timepoint (hr) Value: 8
  misc_feature: MA Experiment 20001450 PARAMETER Experiment Name: At_Far-red-induction_P Parameter: Tissue Value: Whole Plant
  misc_feature: MA Experiment ID: 20001504 Result: Up-regulated in Transcription
  misc_feature: MA Experiment 20001504 PARAMETER Experiment Name: At_Far-red-enriched_P Parameter: Age (day) Value: 10
  misc_feature: MA Experiment 20001504 PARAMETER Experiment Name: At_Far-red-enriched_P Parameter: Light Value: Far-red enriched vs. White
  misc_feature: MA Experiment 20001504 PARAMETER Experiment Name: At_Far-red-enriched_P Parameter: Organism Value: A. thaliana
  misc_feature: MA Experiment 20001504 PARAMETER Experiment Name: At_Far-red-enriched_P Parameter: Plant Line Value: Columbia
  misc_feature: MA Experiment 20001504 PARAMETER Experiment Name: At_Far-red-enriched_P Parameter: Timepoint (day) Value: 6
  misc_feature: MA Experiment 20001504 PARAMETER Experiment Name: At_Far-red-enriched_P Parameter: Tissue Value: Whole Plant
  misc_feature: MA Experiment ID: 20001768 Result: Up-regulated in Transcription
  misc_feature: MA Experiment 20001768 PARAMETER Experiment Name: At_Far-red-enriched-adult_P Parameter: Age (day) Value: 28
  misc_feature: MA Experiment 20001768 PARAMETER Experiment Name: At_Far-red-enriched-adult_P Parameter: Light Value: Far-red enriched vs. White
  misc_feature: MA Experiment 20001768 PARAMETER Experiment Name: At_Far-red-enriched-adult_P Parameter: Organism Value: A. thaliana
  misc_feature: MA Experiment 20001768 PARAMETER Experiment Name: At_Far-red-enriched-adult_P Parameter: Plant Line Value: Columbia
  misc_feature: MA Experiment 20001768 PARAMETER Experiment Name: At_Far-red-enriched-adult_P Parameter: Timepoint (hr) Value: 1
  misc_feature: MA Experiment 20001768 PARAMETER Experiment Name: At_Far-red-enriched-adult_P Parameter: Tissue Value: Aerial
  misc_feature: MA Experiment ID: 20001769 Result: Up-regulated in Transcription
  misc_feature: MA Experiment 20001769 PARAMETER Experiment Name: At_Far-red-enriched-adult_P Parameter: Age (day) Value: 28
  misc_feature: MA Experiment 20001769 PARAMETER Experiment Name: At_Far-red-enriched-adult_P Parameter: Light Value: Far-red enriched vs. White
  misc_feature: MA Experiment 20001769 PARAMETER Experiment Name: At_Far-red-enriched-adult_P Parameter: Organism Value: A. thaliana
  misc_feature: MA Experiment 20001769 PARAMETER Experiment Name: At_Far-red-enriched-adult_P Parameter: Plant Line Value: Columbia
  misc_feature: MA Experiment 20001769 PARAMETER Experiment Name: At_Far-red-enriched-adult_P Parameter: Timepoint (hr) Value: 4
  misc_feature: MA Experiment 20001769 PARAMETER Experiment Name: At_Far-red-enriched-adult_P Parameter: Tissue Value: Aerial
  misc_feature: MA Experiment ID: 20001770 Result: Up-regulated in Transcription
  misc_feature: MA Experiment 20001770 PARAMETER Experiment Name: At_Far-red-enriched-adult_P Parameter: Age (day) Value: 28
  misc_feature: MA Experiment 20001770 PARAMETER Experiment Name: At_Far-red-enriched-adult_P Parameter: Light Value: Far-red enriched vs. White
  misc_feature: MA Experiment 20001770 PARAMETER Experiment Name: At_Far-red-enriched-adult_P Parameter: Organism Value: A. thaliana
  misc_feature: MA Experiment 20001770 PARAMETER Experiment Name: At_Far-red-enriched-adult_P Parameter: Plant Line Value: Columbia
  misc_feature: MA Experiment 20001770 PARAMETER Experiment Name: At_Far-red-enriched-adult_P Parameter: Timepoint (hr) Value: 8
  misc_feature: MA Experiment 20001770 PARAMETER Experiment Name: At_Far-red-enriched-adult_P Parameter: Tissue Value: Aerial
  misc_feature: MA Experiment ID: 20001904 Result: Up-regulated in Transcription
  misc_feature: MA Experiment 20001904 PARAMETER Experiment Name: At_Drought_Reproduction_P Parameter: Age (day) Value: 37
  misc_feature: MA Experiment 20001904 PARAMETER Experiment Name: At_Drought_Reproduction_P Parameter: Organism Value: A. thaliana
  misc_feature: MA Experiment 20001904 PARAMETER Experiment Name: At_Drought_Reproduction_P Parameter: Plant Line Value: WS
  misc_feature: MA Experiment 20001904 PARAMETER Experiment Name: At_Drought_Reproduction_P Parameter: Timepoint (day) Value: 7
  misc_feature: MA Experiment 20001904 PARAMETER Experiment Name: At_Drought_Reproduction_P Parameter: Tissue Value: Rosettes
  misc_feature: MA Experiment 20001904 PARAMETER Experiment Name: At_Drought_Reproduction_P Parameter: Treatment Value: Drought vs. No Drought
  misc_feature: MA Experiment ID: 20001905 Result: Up-regulated in Transcription
  misc_feature: MA Experiment 20001905 PARAMETER Experiment Name: At_Drought_Reproduction_P Parameter: Age (day) Value: 40
  misc_feature: MA Experiment 20001905 PARAMETER Experiment Name: At_Drought_Reproduction_P Parameter: Organism Value: A. thaliana
  misc_feature: MA Experiment 20001905 PARAMETER Experiment Name: At_Drought_Reproduction_P Parameter: Plant Line Value: WS
  misc_feature: MA Experiment 20001905 PARAMETER Experiment Name: At_Drought_Reproduction_P Parameter: Timepoint (day) Value: 10
  misc_feature: MA Experiment 20001905 PARAMETER Experiment Name: At_Drought_Reproduction_P Parameter: Tissue Value: Rosettes
  misc_feature: MA Experiment 20001905 PARAMETER Experiment Name: At_Drought_Reproduction_P Parameter: Treatment Value: Drought vs. No Drought

SEQ ID NO: 93701 - protein, 540 aa, Arabidopsis thaliana; identical to SEQ ID NO: 89945
  peptide (1)..(540): Ceres Seq. ID no. 12721546
  misc_feature (67)..(227): Pfam Name: FAD binding domain Pfam Description: FAD binding domain
  misc_feature (1)..(540): Homolog of NCBI NO: 22330649 NR Description: cytokinin oxidase, putative; protein id:
  misc_feature (1)..(540): Homolog of NCBI NO: 11120516 NR Description: cytokinin oxidase [Arabidopsis thaliana]
  misc_feature (226)..(540): Homolog of NCBI NO: 25406436 NR Description: hypothetical protein F1B16.2 [imported] - thaliana >gi|10120443|gb|AAG13068.1|AC023754_6 Similar to
  misc_feature (5)..(208): Homolog of NCBI NO: 25406436 NR Description: hypothetical protein F1B16.2 [imported] - thaliana >gi|10120443|gb|AAG13068.1|AC023754_6 Similar to
  misc_feature (5)..(525): Homolog of NCBI NO: 34910002 NR Description: putative cytokinin oxidase [Oryza sativa cultivar- group)] >gi|22202687|dbj|BAC07345.1| putative cytokinin
  misc_feature (10)..(532): Homolog of NCBI NO: 23267157 NR Description: cytokinin dehydrogenase 2 [Hordeum vulgare]
  misc_feature (29)..(537): Homolog of NCBI NO: 15227374 NR Description: putative cytokinin oxidase; protein id: [Arabidopsis thaliana] >gi|7487602|pir||T00807 probable cytokinin
  misc_feature (10)..(532): Homolog of NCBI NO: 27312007 NR Description: cytokinin dehydrogenase 2 [Hordeum vulgare]
  misc_feature (10)..(532): Homolog of NCBI NO: 28883584 NR Description: cytokinin dehydrogenase 3 [Hordeum vulgare]
  misc_feature (35)..(527): Homolog of NCBI NO: 20161335 NR Description: putative cytokinin oxidase [Oryza sativa

SEQ ID NO: 93702 - protein, 536 aa, Arabidopsis thaliana; identical to SEQ ID NO: 89946
  peptide (1)..(536): Ceres Seq. ID no. 12721547
  misc_feature (63)..(223): Pfam Name: FAD binding domain Pfam Description: FAD binding domain
  misc_feature (1)..(536): Homolog of NCBI NO: 22330649 NR Description: cytokinin oxidase, putative; protein id:
  misc_feature (1)..(536): Homolog of NCBI NO: 11120516 NR Description: cytokinin oxidase [Arabidopsis thaliana]
  misc_feature (222)..(536): Homolog of NCBI NO: 25406436 NR Description: hypothetical protein F1B16.2 [imported] - thaliana >gi|10120443|gb|AAG13068.1|AC023754_6 Similar to
  misc_feature (1)..(204): Homolog of NCBI NO: 25406436 NR Description: hypothetical protein F1B16.2 [imported] - thaliana >gi|10120443|gb|AAG13068.1|AC023754_6 Similar to
  misc_feature (1)..(521): Homolog of NCBI NO: 34910002 NR Description: putative cytokinin oxidase [Oryza sativa cultivar- group)] >gi|22202687|dbj|BAC07345.1| putative cytokinin
  misc_feature (6)..(528): Homolog of NCBI NO: 23267157 NR Description: cytokinin dehydrogenase 2 [Hordeum vulgare]
  misc_feature (25)..(533): Homolog of NCBI NO: 15227374 NR Description: putative cytokinin oxidase; protein id: [Arabidopsis thaliana] >gi|7487602|pir||T00807 probable cytokinin
  misc_feature (6)..(528): Homolog of NCBI NO: 27312007 NR Description: cytokinin dehydrogenase 2 [Hordeum vulgare]
  misc_feature (6)..(528): Homolog of NCBI NO: 28883584 NR Description: cytokinin dehydrogenase 3 [Hordeum vulgare]
  misc_feature (31)..(523): Homolog of NCBI NO: 20161335 NR Description: putative cytokinin oxidase [Oryza sativa

SEQ ID NO: 93703 - protein, 481 aa, Arabidopsis thaliana; identical to SEQ ID NO: 89947
  peptide (1)..(481): Ceres Seq. ID no. 12721548
  misc_feature (8)..(168): Pfam Name: FAD binding domain Pfam Description: FAD binding domain
  misc_feature (1)..(481): Homolog of NCBI NO: 22330649 NR Description: cytokinin oxidase, putative; protein id:
  misc_feature (1)..(481): Homolog of NCBI NO: 11120516 NR Description: cytokinin oxidase [Arabidopsis thaliana]
  misc_feature (167)..(481): Homolog of NCBI NO: 25406436 NR Description: hypothetical protein F1B16.2 [imported] - thaliana >gi|10120443|gb|AAG13068.1|AC023754_6 Similar to
  misc_feature (1)..(149): Homolog of NCBI NO: 25406436 NR Description: hypothetical protein F1B16.2 [imported] - thaliana >gi|10120443|gb|AAG13068.1|AC023754_6 Similar to
  misc_feature (1)..(466): Homolog of NCBI NO: 34910002 NR Description: putative cytokinin oxidase [Oryza sativa cultivar- group)] >gi|22202687|dbj|BAC07345.1| putative cytokinin
  misc_feature (1)..(473): Homolog of NCBI NO: 23267157 NR Description: cytokinin dehydrogenase 2 [Hordeum vulgare]
  misc_feature (1)..(478): Homolog of NCBI NO: 15227374 NR Description: putative cytokinin oxidase; protein id: [Arabidopsis thaliana] >gi|7487602|pir||T00807 probable cytokinin
  misc_feature (1)..(473): Homolog of NCBI NO: 27312007 NR Description: cytokinin dehydrogenase 2 [Hordeum vulgare]
  misc_feature (1)..(473): Homolog of NCBI NO: 28883584 NR Description: cytokinin dehydrogenase 3 [Hordeum vulgare]
  misc_feature (1)..(468): Homolog of NCBI NO: 20161335 NR Description: putative cytokinin oxidase [Oryza sativa

SEQ ID NO: 93704 - DNA, 594 bp, Arabidopsis thaliana; identical to SEQ ID NO: 89948
  misc_feature (1)..(594): Ceres Seq. ID no. 12721549
  misc_feature: MA Experiment ID: 20000184 Result: Up-regulated in Transcription
  misc_feature: MA Experiment 20000184 PARAMETER Experiment Name: At_Shoots__P Parameter: Age (day) Value: 7
  misc_feature: MA Experiment 20000184 PARAMETER Experiment Name: At_Shoots__P Parameter: Tissue Value: Shoots vs. Whole Plant
  misc_feature: MA Experiment ID: 20000264 Result: Down-regulated in Transcription
  misc_feature: MA Experiment 20000264 PARAMETER Experiment Name: At_Open_Flower_P Parameter: Age (day) Value: 21
  misc_feature: MA Experiment 20000264 PARAMETER Experiment Name: At_Open_Flower_P Parameter: Plant Line Value: WS
  misc_feature: MA Experiment 20000264 PARAMETER Experiment Name: At_Open_Flower_P Parameter: Tissue Value: Open Flower vs. Whole Plant
  misc_feature: MA Experiment ID: 20000265 Result: Down-regulated in Transcription
  misc_feature: MA Experiment 20000265 PARAMETER Experiment Name: At_Open_Flower_P Parameter: Age (day) Value: 21
  misc_feature: MA Experiment 20000265 PARAMETER Experiment Name: At_Open_Flower_P Parameter: Plant Line Value: WS
  misc_feature: MA Experiment 20000265 PARAMETER Experiment Name: At_Open_Flower_P Parameter: Tissue Value: Closed Flower vs. Whole Plant
  misc_feature: MA Experiment ID: 20000438 Result: Up-regulated in Transcription
  misc_feature: MA Experiment 20000438 PARAMETER Experiment Name: At_Shoots__P Parameter: Age (day) Value: 14
  misc_feature: MA Experiment 20000438 PARAMETER Experiment Name: At_Shoots__P Parameter: Tissue Value: Shoots vs. Whole Plant
  misc_feature: MA Experiment ID: 20000444 Result: Up-regulated in Transcription
  misc_feature: MA Experiment 20000444 PARAMETER Experiment Name: At_100uM_NAA__P Parameter: Age (day) Value: 14
  misc_feature: MA Experiment 20000444 PARAMETER Experiment Name: At_100uM_NAA__P Parameter: Organism Value: A. thaliana
  misc_feature: MA Experiment 20000444 PARAMETER Experiment Name: At_100uM_NAA__P Parameter: Plant Line Value: WS
  misc_feature: MA Experiment 20000444 PARAMETER Experiment Name: At_100uM_NAA__P Parameter: Timepoint (hr) Value: 1
  misc_feature: MA Experiment 20000444 PARAMETER Experiment Name: At_100uM_NAA__P Parameter: Tissue Value: Aerial
  misc_feature: MA Experiment 20000444 PARAMETER Experiment Name: At_100uM_NAA__P Parameter: Treatment Value: 100uM NAA vs. No Treatment
  misc_feature: MA Experiment ID: 20000527 Result: Up-regulated in Transcription
  misc_feature: MA Experiment 20000527 PARAMETER Experiment Name: At_10percent_PEG_P Parameter: Age (day) Value: 20
  misc_feature: MA Experiment 20000527 PARAMETER Experiment Name: At_10percent_PEG_P Parameter: Organism Value: A. thaliana
  misc_feature: MA Experiment 20000527 PARAMETER Experiment Name: At_10percent_PEG_P Parameter: Plant Line Value: WS
  misc_feature: MA Experiment 20000527 PARAMETER Experiment Name: At_10percent_PEG_P Parameter: Timepoint (day) Value: 20
  misc_feature: MA Experiment 20000527 PARAMETER Experiment Name: At_10percent_PEG_P Parameter: Tissue Value: Whole Plant
  misc_feature: MA Experiment 20000527 PARAMETER Experiment Name: At_10percent_PEG_P Parameter: Treatment Value: 10percent PEG vs. No Treatment
  misc_feature: MA Experiment ID: 20001248 Result: Up-regulated in Transcription
  misc_feature: MA Experiment 20001248 PARAMETER Experiment Name: At_Far-red-induction_P Parameter: Age (day) Value: 7
  misc_feature: MA Experiment 20001248 PARAMETER Experiment Name: At_Far-red-induction_P Parameter: Light Value: Far-red vs. White
  misc_feature: MA Experiment 20001248 PARAMETER Experiment Name: At_Far-red-induction_P Parameter: Organism Value: A. thaliana
  misc_feature: MA Experiment 20001248 PARAMETER Experiment Name: At_Far-red-induction_P Parameter: Plant Line Value: Columbia
  misc_feature: MA Experiment 20001248 PARAMETER Experiment Name: At_Far-red-induction_P Parameter: Timepoint (hr) Value: 4
  misc_feature: MA Experiment 20001248 PARAMETER Experiment Name: At_Far-red-induction_P Parameter: Tissue Value: Whole Plant
  misc_feature: MA Experiment ID: 20001450 Result: Up-regulated in Transcription
  misc_feature: MA Experiment 20001450 PARAMETER Experiment Name: At_Far-red-induction_P Parameter: Age (day) Value: 7
  misc_feature: MA Experiment 20001450 PARAMETER Experiment Name: At_Far-red-induction_P Parameter: Light Value: Far-red vs. White
  misc_feature: MA Experiment 20001450 PARAMETER Experiment Name: At_Far-red-induction_P Parameter: Organism Value: A. thaliana
  misc_feature: MA Experiment 20001450 PARAMETER Experiment Name: At_Far-red-induction_P Parameter: Plant Line Value: Columbia
  misc_feature: MA Experiment 20001450 PARAMETER Experiment Name: At_Far-red-induction_P Parameter: Timepoint (hr) Value: 8
  misc_feature: MA Experiment 20001450 PARAMETER Experiment Name: At_Far-red-induction_P Parameter: Tissue Value: Whole Plant
  misc_feature: MA Experiment ID: 20001451 Result: Up-regulated in Transcription
  misc_feature: MA Experiment 20001451 PARAMETER Experiment Name: At_Far-red-induction_P Parameter: Age (day) Value: 7
  misc_feature: MA Experiment 20001451 PARAMETER Experiment Name: At_Far-red-induction_P Parameter: Light Value: Far-red vs. White
  misc_feature: MA Experiment 20001451 PARAMETER Experiment Name: At_Far-red-induction_P Parameter: Organism Value: A. thaliana
  misc_feature: MA Experiment 20001451 PARAMETER Experiment Name: At_Far-red-induction_P Parameter: Plant Line Value: Columbia
  misc_feature: MA Experiment 20001451 PARAMETER Experiment Name: At_Far-red-induction_P Parameter: Timepoint (hr) Value: 24
  misc_feature: MA Experiment 20001451 PARAMETER Experiment Name: At_Far-red-induction_P Parameter: Tissue Value: Whole Plant
  misc_feature: MA Experiment ID: 20001905 Result: Up-regulated in Transcription
  misc_feature: MA Experiment 20001905 PARAMETER Experiment Name: At_Drought_Reproduction_P Parameter: Age (day) Value: 40
  misc_feature: MA Experiment 20001905 PARAMETER Experiment Name: At_Drought_Reproduction_P Parameter: Organism Value: A. thaliana
  misc_feature: MA Experiment 20001905 PARAMETER Experiment Name: At_Drought_Reproduction_P Parameter: Plant Line Value: WS
  misc_feature: MA Experiment 20001905 PARAMETER Experiment Name: At_Drought_Reproduction_P Parameter: Timepoint (day) Value: 10
  misc_feature: MA Experiment 20001905 PARAMETER Experiment Name: At_Drought_Reproduction_P Parameter: Tissue Value: Rosettes
  misc_feature: MA Experiment 20001905 PARAMETER Experiment Name: At_Drought_Reproduction_P Parameter: Treatment Value: Drought vs. No Drought
  misc_feature: MA Experiment ID: 20001910 Result: Up-regulated in Transcription
  misc_feature: MA Experiment 20001910 PARAMETER Experiment Name: At_Drought_Reproduction_P Parameter: Age (day) Value: 37
  misc_feature: MA Experiment 20001910 PARAMETER Experiment Name: At_Drought_Reproduction_P Parameter: Organism Value: A. thaliana
  misc_feature: MA Experiment 20001910 PARAMETER Experiment Name: At_Drought_Reproduction_P Parameter: Plant Line Value: WS
  misc_feature: MA Experiment 20001910 PARAMETER Experiment Name: At_Drought_Reproduction_P Parameter: Timepoint (day) Value: 7
  misc_feature: MA Experiment 20001910 PARAMETER Experiment Name: At_Drought_Reproduction_P Parameter: Tissue Value: Flowers
  misc_feature: MA Experiment 20001910 PARAMETER Experiment Name: At_Drought_Reproduction_P Parameter: Treatment Value: Drought vs. No Drought
  misc_feature: MA Experiment ID: 20001911 Result: Up-regulated in Transcription
  misc_feature: MA Experiment 20001911 PARAMETER Experiment Name: At_Drought_Reproduction_P Parameter: Age (day) Value: 40
  misc_feature: MA Experiment 20001911 PARAMETER Experiment Name: At_Drought_Reproduction_P Parameter: Organism Value: A. thaliana
  misc_feature: MA Experiment 20001911 PARAMETER Experiment Name: At_Drought_Reproduction_P Parameter: Plant Line Value: WS
  misc_feature: MA Experiment 20001911 PARAMETER Experiment Name: At_Drought_Reproduction_P Parameter: Timepoint (day) Value: 10
  misc_feature: MA Experiment 20001911 PARAMETER Experiment Name: At_Drought_Reproduction_P Parameter: Tissue Value: Flowers
  misc_feature: MA Experiment 20001911 PARAMETER Experiment Name: At_Drought_Reproduction_P Parameter: Treatment Value: Drought vs. No Drought

SEQ ID NO: 93705 - protein, 197 aa, Arabidopsis thaliana; identical to SEQ ID NO: 89949
  peptide (1)..(197): Ceres Seq. ID no. 12721550
  misc_feature (30)..(94): Pfam Name: AP2 domain Pfam Description: AP2 domain
  misc_feature (1)..(197): Homolog of NCBI NO: 9369375 NR Description: F10A5.29 [Arabidopsis thaliana]
  misc_feature (1)..(197): Homolog of NCBI NO: 15222261 NR Description: transcription factor, putative; protein id:
  misc_feature (15)..(191): Homolog of NCBI NO: 28071316 NR Description: P0705A05.24 [Oryza sativa (japonica
  misc_feature (6)..(116): Homolog of NCBI NO: 8346773 NR Description: AP2-domain DNA-binding protein [Catharanthus
  misc_feature (15)..(166): Homolog of NCBI NO: 18405354 NR Description: AP2 domain transcription factor; protein id: supported by cDNA: 115358. [Arabidopsis thaliana]
  misc_feature (7)..(88): Homolog of NCBI NO: 15238816 NR Description: AP2-domain DNA-binding protein -like; protein id:
  misc_feature (4)..(130): Homolog of NCBI NO: 15239107 NR Description: DRE binding protein (DREB2A); protein id: supported by cDNA: gi_17381031, supported by cDNA: gi_3738229 thaliana] >gi|11358883|pir||T51833 transcription
  misc_feature (3)..(113): Homolog of NCBI NO: 25992100 NR Description: dehydration responsive element binding protein
  misc_feature (15)..(166): Homolog of NCBI NO: 21536924 NR Description: AP2 domain transcription factor [Arabidopsis
  misc_feature (3)..(138): Homolog of NCBI NO: 15228427 NR Description: DRE binding protein (DREB2B); protein id: supported by cDNA: gi_3738231 [Arabidopsis thaliana]

SEQ ID NO: 93706 - protein, 178 aa, Arabidopsis thaliana; identical to SEQ ID NO: 89950
  peptide (1)..(178): Ceres Seq. ID no. 12721551
  misc_feature (11)..(75): Pfam Name: AP2 domain Pfam Description: AP2 domain
  misc_feature (1)..(178): Homolog of NCBI NO: 9369375 NR Description: F10A5.29 [Arabidopsis thaliana]
  misc_feature (1)..(178): Homolog of NCBI NO: 15222261 NR Description: transcription factor, putative; protein id:
  misc_feature (1)..(172): Homolog of NCBI NO: 28071316 NR Description: P0705A05.24 [Oryza sativa (japonica
  misc_feature (1)..(97): Homolog of NCBI NO: 8346773 NR Description: AP2-domain DNA-binding protein [Catharanthus
  misc_feature (1)..(147): Homolog of NCBI NO: 18405354 NR Description: AP2 domain transcription factor; protein id: supported by cDNA: 115358. [Arabidopsis thaliana]
  misc_feature (1)..(69): Homolog of NCBI NO: 15238816 NR Description: AP2-domain DNA-binding protein -like; protein id:
  misc_feature (1)..(111): Homolog of NCBI NO: 15239107 NR Description: DRE binding protein (DREB2A); protein id: supported by cDNA: gi_17381031, supported by cDNA: gi_3738229 thaliana] >gi|11358883|pir||T51833 transcription
  misc_feature (1)..(94): Homolog of NCBI NO: 25992100 NR Description: dehydration responsive element binding protein
  misc_feature (1)..(147): Homolog of NCBI NO: 21536924 NR Description: AP2 domain transcription factor [Arabidopsis
  misc_feature (1)..(119): Homolog of NCBI NO: 15228427 NR Description: DRE binding protein (DREB2B); protein id: supported by cDNA: gi_3738231 [Arabidopsis thaliana]

SEQ ID NO: 93707 - DNA, 1041 bp, Arabidopsis thaliana; identical to SEQ ID NO: 89951
  misc_feature (1)..(1041): Ceres Seq. ID no. 12721552
  misc_feature: MA Experiment ID: 20000184 Result: Up-regulated in Transcription
  misc_feature: MA Experiment 20000184 PARAMETER Experiment Name: At_Shoots__P Parameter: Age (day) Value: 7
  misc_feature: MA Experiment 20000184 PARAMETER Experiment Name: At_Shoots__P Parameter: Tissue Value: Shoots vs. Whole Plant
  misc_feature: MA Experiment ID: 20000438 Result: Up-regulated in Transcription
  misc_feature: MA Experiment 20000438 PARAMETER Experiment Name: At_Shoots__P Parameter: Age (day) Value: 14
  misc_feature: MA Experiment 20000438 PARAMETER Experiment Name: At_Shoots__P Parameter: Tissue Value: Shoots vs. Whole Plant

SEQ ID NO: 93708 - protein, 346 aa, Arabidopsis thaliana; identical to SEQ ID NO: 89952
  peptide (1)..(346): Ceres Seq. ID no. 12721553
  misc_feature (116)..(286): Pfam Name: Domain of unknown function (DUF702) Pfam Description: Domain of unknown function (DUF702)
  misc_feature (1)..(346): Homolog of NCBI NO: 15222285 NR Description: unknown protein; protein id: At1g75520.1
  misc_feature (1)..(345): Homolog of NCBI NO: 15223669 NR Description: hypothetical protein; protein id: At1g19790.1
  misc_feature (1)..(346): Homolog of NCBI NO: 15239350 NR Description: zinc finger protein SHI-like; protein id: supported by cDNA: gi_4929802 [Arabidopsis thaliana] putative zinc finger protein SHI [Arabidopsis thaliana]
  misc_feature (46)..(346): Homolog of NCBI NO: 15234365 NR Description: putative protein; protein id: At4g36260.1
  misc_feature (86)..(327): Homolog of NCBI NO: 34906658 NR Description: putative LRP(lateral root primordia) 1 [Oryza
  misc_feature (189)..(286): Homolog of NCBI NO: 15224110 NR Description: unknown protein; protein id: At2g18120.1
  misc_feature (116)..(173): Homolog of NCBI NO: 15224110 NR Description: unknown protein; protein id: At2g18120.1
  misc_feature (92)..(287): Homolog of NCBI NO: 882341 NR Description: LRP1
  misc_feature (92)..(287): Homolog of NCBI NO: 18416839 NR Description: lateral root primordia (LRP1); protein id: [Arabidopsis thaliana] >gi|14586363|emb|CAC42894.1| lateral root
  misc_feature (233)..(292): Homolog of NCBI NO: 15226540 NR Description: hypothetical protein; protein id: At2g21400.1

SEQ ID NO: 93709 - protein, 262 aa, Arabidopsis thaliana; identical to SEQ ID NO: 89953
  peptide (1)..(262): Ceres Seq. ID no. 12721554
  misc_feature (32)..(202): Pfam Name: Domain of unknown function (DUF702) Pfam Description: Domain of unknown function (DUF702)
  misc_feature (1)..(262): Homolog of NCBI NO: 15222285 NR Description: unknown protein; protein id: At1g75520.1
  misc_feature (1)..(261): Homolog of NCBI NO: 15223669 NR Description: hypothetical protein; protein id: At1g19790.1
  misc_feature (1)..(262): Homolog of NCBI NO: 15239350 NR Description: zinc finger protein SHI-like; protein id: supported by cDNA: gi_4929802 [Arabidopsis thaliana] putative zinc finger protein SHI [Arabidopsis thaliana]
  misc_feature (1)..(262): Homolog of NCBI NO: 15234365 NR Description: putative protein; protein id: At4g36260.1
  misc_feature (2)..(243): Homolog of NCBI NO: 34906658 NR Description: putative LRP(lateral root primordia) 1 [Oryza
  misc_feature (105)..(202): Homolog of NCBI NO: 15224110 NR Description: unknown protein; protein id: At2g18120.1
  misc_feature (32)..(89): Homolog of NCBI NO: 15224110 NR Description: unknown protein; protein id: At2g18120.1
  misc_feature (8)..(203): Homolog of NCBI NO: 882341 NR Description: LRP1
  misc_feature (8)..(203): Homolog of NCBI NO: 18416839 NR Description: lateral root primordia (LRP1); protein id: [Arabidopsis thaliana] >gi|14586363|emb|CAC42894.1| lateral root
  misc_feature (149)..(208): Homolog of NCBI NO: 15226540 NR Description: hypothetical protein; protein id: At2g21400.1

SEQ ID NO: 93710 - protein, 224 aa, Arabidopsis thaliana; identical to SEQ ID NO: 89954
  peptide (1)..(224): Ceres Seq. ID no. 12721555
  misc_feature (1)..(164): Pfam Name: Domain of unknown function (DUF702) Pfam Description: Domain of unknown function (DUF702)
  misc_feature (1)..(224): Homolog of NCBI NO: 15222285 NR Description: unknown protein; protein id: At1g75520.1
  misc_feature (1)..(223): Homolog of NCBI NO: 15223669 NR Description: hypothetical protein; protein id: At1g19790.1
  misc_feature (1)..(224): Homolog of NCBI NO: 15239350 NR Description: zinc finger protein SHI-like; protein id: supported by cDNA: gi_4929802 [Arabidopsis thaliana] putative zinc finger protein SHI [Arabidopsis thaliana]
  misc_feature (1)..(224): Homolog of NCBI NO: 15234365 NR Description: putative protein; protein id: At4g36260.1
  misc_feature (1)..(205): Homolog of NCBI NO: 34906658 NR Description: putative LRP(lateral root primordia) 1 [Oryza
  misc_feature (67)..(164): Homolog of NCBI NO: 15224110 NR Description: unknown protein; protein id: At2g18120.1
  misc_feature (1)..(51): Homolog of NCBI NO: 15224110 NR Description: unknown protein; protein id: At2g18120.1
  misc_feature (1)..(165): Homolog of NCBI NO: 882341 NR Description: LRP1
  misc_feature (1)..(165): Homolog of NCBI NO: 18416839 NR Description: lateral root primordia (LRP1); protein id: [Arabidopsis thaliana] >gi|14586363|emb|CAC42894.1| lateral root
  misc_feature (111)..(170): Homolog of NCBI NO: 15226540 NR Description: hypothetical protein; protein id: At2g21400.1

SEQ ID NO: 93711 - DNA, 996 bp, Arabidopsis thaliana; identical to SEQ ID NO: 89955
  misc_feature (1)..(996): Ceres Seq. ID no. 12721560
  misc_feature: MA Experiment ID: 20000184 Result: Up-regulated in Transcription
  misc_feature: MA Experiment 20000184 PARAMETER Experiment Name: At_Shoots__P Parameter: Age (day) Value: 7
  misc_feature: MA Experiment 20000184 PARAMETER Experiment Name: At_Shoots__P Parameter: Tissue Value: Shoots vs. Whole Plant
  misc_feature: MA Experiment ID: 20000185 Result: Up-regulated in Transcription
  misc_feature: MA Experiment 20000185 PARAMETER Experiment Name: At_Roots__P Parameter: Age (day) Value: 7 vs. 21
  misc_feature: MA Experiment 20000185 PARAMETER Experiment Name: At_Roots__P Parameter: Organism Value: A. thaliana
  misc_feature: MA Experiment 20000185 PARAMETER Experiment Name: At_Roots__P Parameter: Tissue Value: Roots vs. Whole Plant
  misc_feature: MA Experiment ID: 20000234 Result: Down-regulated in Transcription
  misc_feature: MA Experiment 20000234 PARAMETER Experiment Name: At_Siliques_P Parameter: Age (day) Value: 21
  misc_feature: MA Experiment 20000234 PARAMETER Experiment Name: At_Siliques_P Parameter: Organism Value: A. thaliana
  misc_feature: MA Experiment 20000234 PARAMETER Experiment Name: At_Siliques_P Parameter: Plant Line Value: WS
  misc_feature: MA Experiment 20000234 PARAMETER Experiment Name: At_Siliques_P Parameter: Tissue Value: Less Than 5mm Siliques vs. Whole Plant
  misc_feature: MA Experiment ID: 20000235 Result: Down-regulated in Transcription
  misc_feature: MA Experiment 20000235 PARAMETER Experiment Name: At_Siliques_P Parameter: Age (day) Value: 21
  misc_feature: MA Experiment 20000235 PARAMETER Experiment Name: At_Siliques_P Parameter: Organism Value: A. thaliana
  misc_feature: MA Experiment 20000235 PARAMETER Experiment Name: At_Siliques_P Parameter: Plant Line Value: WS
  misc_feature: MA Experiment 20000235 PARAMETER Experiment Name: At_Siliques_P Parameter: Tissue Value: 5-10mm Siliques vs. Whole Plant
  misc_feature: MA Experiment ID: 20000264 Result: Down-regulated in Transcription
  misc_feature: MA Experiment 20000264 PARAMETER Experiment Name: At_Open_Flower_P Parameter: Age (day) Value: 21
  misc_feature: MA Experiment 20000264 PARAMETER Experiment Name: At_Open_Flower_P Parameter: Plant Line Value: WS
  misc_feature: MA Experiment 20000264 PARAMETER Experiment Name: At_Open_Flower_P Parameter: Tissue Value: Open Flower vs. Whole Plant
  misc_feature: MA Experiment ID: 20000265 Result: Down-regulated in Transcription
  misc_feature: MA Experiment 20000265 PARAMETER Experiment Name: At_Open_Flower_P Parameter: Age (day) Value: 21
  misc_feature: MA Experiment 20000265 PARAMETER Experiment Name: At_Open_Flower_P Parameter: Plant Line Value: WS
  misc_feature: MA Experiment 20000265 PARAMETER Experiment Name: At_Open_Flower_P Parameter: Tissue Value: Closed Flower vs. Whole Plant
  misc_feature: MA Experiment ID: 20000286 Result: Down-regulated in Transcription
  misc_feature: MA Experiment 20000286 PARAMETER Experiment Name: At_Open_Flower_P Parameter: Age (day) Value: 21
  misc_feature: MA Experiment 20000286 PARAMETER Experiment Name: At_Open_Flower_P Parameter: Plant Line Value: WS
  misc_feature: MA Experiment 20000286 PARAMETER Experiment Name: At_Open_Flower_P Parameter: Tissue Value: Half Open vs. Whole Plant
  misc_feature: MA Experiment ID: 20000438 Result: Up-regulated in Transcription
  misc_feature: MA Experiment 20000438 PARAMETER Experiment Name: At_Shoots__P Parameter: Age (day) Value: 14
  misc_feature: MA Experiment 20000438 PARAMETER Experiment Name: At_Shoots__P Parameter: Tissue Value: Shoots vs. Whole Plant
  misc_feature: MA Experiment ID: 20000439 Result: Up-regulated in Transcription
  misc_feature: MA Experiment 20000439 PARAMETER Experiment Name: At_Roots__P Parameter: Age (day) Value: 14 vs. 21
  misc_feature: MA Experiment 20000439 PARAMETER Experiment Name: At_Roots__P Parameter: Organism Value: A. thaliana
  misc_feature: MA Experiment 20000439 PARAMETER Experiment Name: At_Roots__P Parameter: Tissue Value: Roots vs. Whole Plant
  misc_feature: MA Experiment ID: 20001450 Result: Up-regulated in Transcription
  misc_feature: MA Experiment 20001450 PARAMETER Experiment Name: At_Far-red-induction_P Parameter: Age (day) Value: 7
  misc_feature: MA Experiment 20001450 PARAMETER Experiment Name: At_Far-red-induction_P Parameter: Light Value: Far-red vs. White
  misc_feature: MA Experiment 20001450 PARAMETER Experiment Name: At_Far-red-induction_P Parameter: Organism Value: A. thaliana
  misc_feature: MA Experiment 20001450 PARAMETER Experiment Name: At_Far-red-induction_P Parameter: Plant Line Value: Columbia
  misc_feature: MA Experiment 20001450 PARAMETER Experiment Name: At_Far-red-induction_P Parameter: Timepoint (hr) Value: 8
  misc_feature: MA Experiment 20001450 PARAMETER Experiment Name: At_Far-red-induction_P Parameter: Tissue Value: Whole Plant

SEQ ID NO: 93712 - protein, 331 aa, Arabidopsis thaliana; identical to SEQ ID NO: 89956
  peptide (1)..(331): Ceres Seq. ID no. 12721561
  misc_feature (55)..(102): Pfam Name: B-box zinc finger Pfam Description: B-box zinc finger
  misc_feature (1)..(331): Homolog of NCBI NO: 15222289 NR Description: CONSTANS B-box zinc finger family protein; id: At1g75540.1 [Arabidopsis thaliana]
  misc_feature (183)..(331): Homolog of NCBI NO: 28416601 NR Description: At1g75540 [Arabidopsis thaliana]
  misc_feature (1)..(196): Homolog of NCBI NO: 22329252 NR Description: CONSTANS B-box zinc finger family protein;
  misc_feature (1)..(196): Homolog of NCBI NO: 26452767 NR Description: putative zinc finger protein [Arabidopsis
  misc_feature (1)..(196): Homolog of NCBI NO: 7485796 NR Description: hypothetical protein F19H22.170 - Arabidopsis >gi|4539326|emb|CAB38827.1| putative zinc finger protein thaliana] >gi|7270890|emb|CAB80570.1| putative zinc finger
  misc_feature (1)..(220): Homolog of NCBI NO: 3618312 NR Description: zinc finger protein [Oryza sativa (japonica
  misc_feature (1)..(138): Homolog of NCBI NO: 38344979 NR Description: OSJNBa0011L07.9 [Oryza sativa (japonica
  misc_feature (1)..(151): Homolog of NCBI NO: 15221367 NR Description: salt-tolerance protein; protein id: At1g06040.1, by cDNA: 39912., supported by cDNA: gi_15027874, supported by
  misc_feature (1)..(151): Homolog of NCBI NO: 30679541 NR Description: salt-tolerance protein [Arabidopsis thaliana]
  misc_feature (1)..(261): Homolog of NCBI NO: 18412037 NR Description: CONSTANS B-box zinc finger family protein; id: At1g78600.1, supported by cDNA: 34830., supported by cDNA: [Arabidopsis thaliana] >gi|20260418|gb|AAM13107.1| highly similar

SEQ ID NO: 93713 - DNA, 348 bp, Arabidopsis thaliana; identical to SEQ ID NO: 89957
  misc_feature (1)..(348): Ceres Seq. ID no. 12721570
  misc_feature: MA Experiment ID: 20000328 Result: Down-regulated in Transcription
  misc_feature: MA Experiment 20000328 PARAMETER Experiment Name: At_42deg_Heat_Sub_P Parameter: Age (day) Value: 14
  misc_feature: MA Experiment 20000328 PARAMETER Experiment Name: At_42deg_Heat_Sub_P Parameter: Organism Value: A. thaliana
  misc_feature: MA Experiment 20000328 PARAMETER Experiment Name: At_42deg_Heat_Sub_P Parameter: Plant Line Value: WS
  misc_feature: MA Experiment 20000328 PARAMETER Experiment Name: At_42deg_Heat_Sub_P Parameter: Temperature (deg C) Value: 42 vs. 22
  misc_feature: MA Experiment 20000328 PARAMETER Experiment Name: At_42deg_Heat_Sub_P Parameter: Timepoint (hr) Value: 6
  misc_feature: MA Experiment 20000328 PARAMETER Experiment Name: At_42deg_Heat_Sub_P Parameter: Tissue Value: Aerial
  misc_feature: MA Experiment ID: 20000355 Result: Up-regulated in Transcription
  misc_feature: MA Experiment 20000355 PARAMETER Experiment Name: At_Siliques_Sub_P Parameter: Age (day) Value: 21
  misc_feature: MA Experiment 20000355 PARAMETER Experiment Name: At_Siliques_Sub_P Parameter: Organism Value: A. thaliana
  misc_feature: MA Experiment 20000355 PARAMETER Experiment Name: At_Siliques_Sub_P Parameter: Plant Line Value: WS
  misc_feature: MA Experiment 20000355 PARAMETER Experiment Name: At_Siliques_Sub_P Parameter: Tissue Value: Less Than 5mm Siliques vs. Whole Plant
  misc_feature: MA Experiment ID: 20000440 Result: Up-regulated in Transcription
  misc_feature: MA Experiment 20000440 PARAMETER Experiment Name: At_Closed-Flower__Sub_P Parameter: Tissue Value: Closed Flower vs. Whole Plant

SEQ ID NO: 93714 - protein, 115 aa, Arabidopsis thaliana; identical to SEQ ID NO: 89958
  peptide (1)..(115): Ceres Seq. ID no. 12721571
  misc_feature (4)..(114): Pfam Name: Core histone H2A/H2B/H3/H4 Pfam Description: Core histone H2A/H2B/H3/H4
  misc_feature (1)..(115): Homolog of NCBI NO: 15222298 NR Description: unknown protein; protein id: At1g75610.1
  misc_feature (4)..(115): Homolog of NCBI NO: 25404986 NR Description: protein F10A5.19 [imported] - Arabidopsis >gi|9369379|gb|AAF87128.1|AC006434_24 F10A5.19 [Arabidopsis
  misc_feature (4)..(115): Homolog of NCBI NO: 81850 NR Description: histone H3 (clone pH3c-1) - alfalfa (fragment)
  misc_feature (4)..(115): Homolog of NCBI NO: 488571 NR Description: histone H3.2
  misc_feature (4)..(115): Homolog of NCBI NO: 488573 NR Description: histone H3.2 precursor [Medicago sativa]
  misc_feature (4)..(115): Homolog of NCBI NO: 15236103 NR Description: histone H3.3; protein id: At4g40030.1, supported cDNA: gi_14326561 [Arabidopsis thaliana] Histon H3; protein id: At4g40040.1, supported by cDNA: 2670.
  misc_feature (4)..(115): Homolog of NCBI NO: 4574208 NR Description: histone H3 [Tortula ruralis]
  misc_feature (4)..(115): Homolog of NCBI NO: 15222297 NR Description: histone H3, putative; protein id: At1g75600.1
  misc_feature (4)..(115): Homolog of NCBI NO: 18698662 NR Description: disease-resistent-related protein [Oryza sativa]
  misc_feature (4)..(115): Homolog of NCBI NO: 15222272 NR Description: histone H3 protein, putative; protein id: supported by cDNA: 268982. [Arabidopsis thaliana]

SEQ ID NO: 93715 - DNA, 1644 bp, Arabidopsis thaliana; identical to SEQ ID NO: 89959
  misc_feature (1)..(1644): Ceres Seq. ID no. 12721572
  misc_feature: MA Experiment ID: 20000184 Result: Up-regulated in Transcription
  misc_feature: MA Experiment 20000184 PARAMETER Experiment Name: At_Shoots__P Parameter: Age (day) Value: 7
  misc_feature: MA Experiment 20000184 PARAMETER Experiment Name: At_Shoots__P Parameter: Tissue Value: Shoots vs. Whole Plant
  misc_feature: MA Experiment ID: 20000185 Result: Up-regulated in Transcription
  misc_feature: MA Experiment 20000185 PARAMETER Experiment Name: At_Roots__P Parameter: Age (day) Value: 7 vs. 21
  misc_feature: MA Experiment 20000185 PARAMETER Experiment Name: At_Roots__P Parameter: Organism Value: A. thaliana
  misc_feature: MA Experiment 20000185 PARAMETER Experiment Name: At_Roots__P Parameter: Tissue Value: Roots vs. Whole Plant
  misc_feature: MA Experiment ID: 20000439 Result: Up-regulated in Transcription
  misc_feature: MA Experiment 20000439 PARAMETER Experiment Name: At_Roots__P Parameter: Age (day) Value: 14 vs. 21
  misc_feature: MA Experiment 20000439 PARAMETER Experiment Name: At_Roots__P Parameter: Organism Value: A. thaliana
  misc_feature: MA Experiment 20000439 PARAMETER Experiment Name: At_Roots__P Parameter: Tissue Value: Roots vs. Whole Plant
  misc_feature: MA Experiment ID: 20001904 Result: Up-regulated in Transcription
  misc_feature: MA Experiment 20001904 PARAMETER Experiment Name: At_Drought_Reproduction_P Parameter: Age (day) Value: 37
  misc_feature: MA Experiment 20001904 PARAMETER Experiment Name: At_Drought_Reproduction_P Parameter: Organism Value: A. thaliana
  misc_feature: MA Experiment 20001904 PARAMETER Experiment Name: At_Drought_Reproduction_P Parameter: Plant Line Value: WS
  misc_feature: MA Experiment 20001904 PARAMETER Experiment Name: At_Drought_Reproduction_P Parameter: Timepoint (day) Value: 7
  misc_feature: MA Experiment 20001904 PARAMETER Experiment Name: At_Drought_Reproduction_P Parameter: Tissue Value: Rosettes
  misc_feature: MA Experiment 20001904 PARAMETER Experiment Name: At_Drought_Reproduction_P Parameter: Treatment Value: Drought vs. No Drought
  misc_feature: MA Experiment ID: 20001906 Result: Down-regulated in Transcription
  misc_feature: MA Experiment 20001906 PARAMETER Experiment Name: At_Drought_Reproduction_P Parameter: Age (day) Value: 35
  misc_feature: MA Experiment 20001906 PARAMETER Experiment Name: At_Drought_Reproduction_P Parameter: Organism Value: A. thaliana
  misc_feature: MA Experiment 20001906 PARAMETER Experiment Name: At_Drought_Reproduction_P Parameter: Plant Line Value: WS
  misc_feature: MA Experiment 20001906 PARAMETER Experiment Name: At_Drought_Reproduction_P Parameter: Timepoint (day) Value: 5
  misc_feature: MA Experiment 20001906 PARAMETER Experiment Name: At_Drought_Reproduction_P Parameter: Tissue Value: Siliques
  misc_feature: MA Experiment 20001906 PARAMETER Experiment Name: At_Drought_Reproduction_P Parameter: Treatment Value: Drought vs. No Drought

SEQ ID NO: 93716 - protein, 547 aa, Arabidopsis thaliana; identical to SEQ ID NO: 89960
  peptide (1)..(547): Ceres Seq. ID no. 12721573
  misc_feature (1)..(547): Homolog of NCBI NO: 15222300 NR Description: unknown protein; protein id: At1g75620.1 thaliana] >gi|9369366|gb|AAF87115.1|AC006434_11 F10A5.18
  misc_feature (23)..(547): Homolog of NCBI NO: 15223699 NR Description: unknown protein; protein id: At1g19900.1, by cDNA: gi_16604506 [Arabidopsis thaliana]
  misc_feature (49)..(547): Homolog of NCBI NO: 25352604 NR Description: hypothetical protein F6F9.4 [imported] - thaliana >gi|10086483|gb|AAG12543.1|AC007797_3 Unknown Protein
  misc_feature (37)..(547): Homolog of NCBI NO: 15230360 NR Description: putative protein; protein id: At3g57620.1 thaliana] >gi|7485502|pir||T06758 probable galactose oxidase (EC
  misc_feature (35)..(546): Homolog of NCBI NO: 25352602 NR Description: F14L17.20 protein - Arabidopsis thaliana Weak similarity to glyoxal oxidase (glx2) from Phanerochaete
  misc_feature (35)..(543): Homolog of NCBI NO: 15223754 NR Description: hypothetical protein; protein id: At1g14430.1
  misc_feature (23)..(546): Homolog of NCBI NO: 15232379 NR Description: putative protein; protein id: At3g53950.1, by cDNA: gi_15809875 [Arabidopsis thaliana]
  misc_feature (29)..(546): Homolog of NCBI NO: 15220398 NR Description: glyoxal oxidase (glx1), putative; protein id: [Arabidopsis thaliana] >gi|9828629|gb|AAG00252.1|AC002130_17 [Arabidopsis thaliana] >gi|27754377|gb|AAO22637.1| putative
  misc_feature (35)..(546): Homolog of NCBI NO: 15241135 NR Description: putative protein; protein id: At5g19580.1,
  misc_feature (35)..(546): Homolog of NCBI NO: 19310437 NR Description: AT5g19580/T20D1_100 [Arabidopsis thaliana]

SEQ ID NO: 93717 - protein, 499 aa, Arabidopsis thaliana; identical to SEQ ID NO: 89961
  peptide (1)..(499): Ceres Seq. ID no. 12721574
  misc_feature (1)..(499): Homolog of NCBI NO: 15222300 NR Description: unknown protein; protein id: At1g75620.1 thaliana] >gi|9369366|gb|AAF87115.1|AC006434_11 F10A5.18
  misc_feature (1)..(499): Homolog of NCBI NO: 15223699 NR Description: unknown protein; protein id: At1g19900.1, by cDNA: gi_16604506 [Arabidopsis thaliana]
  misc_feature (1)..(499): Homolog of NCBI NO: 25352604 NR Description: hypothetical protein F6F9.4 [imported] - thaliana >gi|10086483|gb|AAG12543.1|AC007797_3 Unknown Protein
  misc_feature (1)..(499): Homolog of NCBI NO: 15230360 NR Description: putative protein; protein id: At3g57620.1 thaliana] >gi|7485502|pir||T06758 probable galactose oxidase (EC
  misc_feature (1)..(498): Homolog of NCBI NO: 25352602 NR Description: F14L17.20 protein - Arabidopsis thaliana Weak similarity to glyoxal oxidase (glx2) from Phanerochaete
  misc_feature (1)..(495): Homolog of NCBI NO: 15223754 NR Description: hypothetical protein; protein id: At1g14430.1
  misc_feature (1)..(498): Homolog of NCBI NO: 15232379 NR Description: putative protein; protein id: At3g53950.1, by cDNA: gi_15809875 [Arabidopsis thaliana]
  misc_feature (1)..(498): Homolog of NCBI NO: 15220398 NR Description: glyoxal oxidase (glx1), putative; protein id: [Arabidopsis thaliana] >gi|9828629|gb|AAG00252.1|AC002130_17 [Arabidopsis thaliana] >gi|27754377|gb|AAO22637.1| putative
  misc_feature (1)..(498): Homolog of NCBI NO: 15241135 NR Description: putative protein; protein id: At5g19580.1,
  misc_feature (1)..(498): Homolog of NCBI NO: 19310437 NR Description: AT5g19580/T20D1_100 [Arabidopsis thaliana]

SEQ ID NO: 93718 - protein, 487 aa, Arabidopsis thaliana; identical to SEQ ID NO: 89962
  peptide (1)..(487): Ceres Seq. ID no. 12721575
  misc_feature (1)..(487): Homolog of NCBI NO: 15222300 NR Description: unknown protein; protein id: At1g75620.1 thaliana] >gi|9369366|gb|AAF87115.1|AC006434_11 F10A5.18
  misc_feature (1)..(487): Homolog of NCBI NO: 15223699 NR Description: unknown protein; protein id: At1g19900.1, by cDNA: gi_16604506 [Arabidopsis thaliana]
  misc_feature (1)..(487): Homolog of NCBI NO: 25352604 NR Description: hypothetical protein F6F9.4 [imported] - thaliana >gi|10086483|gb|AAG12543.1|AC007797_3 Unknown Protein
  misc_feature (1)..(487): Homolog of NCBI NO: 15230360 NR Description: putative protein; protein id: At3g57620.1 thaliana] >gi|7485502|pir||T06758 probable galactose oxidase (EC
  misc_feature (1)..(486): Homolog of NCBI NO: 25352602 NR Description: F14L17.20 protein - Arabidopsis thaliana Weak similarity to glyoxal oxidase (glx2) from Phanerochaete
  misc_feature (1)..(483): Homolog of NCBI NO: 15223754 NR Description: hypothetical protein; protein id: At1g14430.1
  misc_feature (1)..(486): Homolog of NCBI NO: 15232379 NR Description: putative protein; protein id: At3g53950.1, by cDNA: gi_15809875 [Arabidopsis thaliana]
  misc_feature (1)..(486): Homolog of NCBI NO: 15220398 NR Description: glyoxal oxidase (glx1), putative; protein id: [Arabidopsis thaliana] >gi|9828629|gb|AAG00252.1|AC002130_17 [Arabidopsis thaliana] >gi|27754377|gb|AAO22637.1| putative
  misc_feature (1)..(486): Homolog of NCBI NO: 15241135 NR Description: putative protein; protein id: At5g19580.1,
  misc_feature (1)..(486): Homolog of NCBI NO: 19310437 NR Description: AT5g19580/T20D1_100 [Arabidopsis thaliana]

SEQ ID NO: 93719 - DNA, 501 bp, Arabidopsis thaliana; identical to SEQ ID NO: 89963
  misc_feature (1)..(501): Ceres Seq. ID no. 12721576
  misc_feature: MA Experiment ID: 20000794 Result: Up-regulated in Transcription
  misc_feature: MA Experiment 20000794 PARAMETER Experiment Name: At_Petals_P Parameter: Age (day) Value: 23-25 days
  misc_feature: MA Experiment 20000794 PARAMETER Experiment Name: At_Petals_P Parameter: Plant Line Value: WS
  misc_feature: MA Experiment 20000794 PARAMETER Experiment Name: At_Petals_P Parameter: Tissue Value: Petals vs. Whole plant
  misc_feature: MA Experiment ID: 20001554 Result: Up-regulated in Transcription
  misc_feature: MA Experiment 20001554 PARAMETER Experiment Name: At_Drought_Soil_Dry_P Parameter: Age (day) Value: 21
  misc_feature: MA Experiment 20001554 PARAMETER Experiment Name: At_Drought_Soil_Dry_P Parameter: Organism Value: A. thaliana
  misc_feature: MA Experiment 20001554 PARAMETER Experiment Name: At_Drought_Soil_Dry_P Parameter: Plant Line Value: WS
  misc_feature: MA Experiment 20001554 PARAMETER Experiment Name: At_Drought_Soil_Dry_P Parameter: Post Timepoint (hr) Value: None
  misc_feature: MA Experiment 20001554 PARAMETER Experiment Name: At_Drought_Soil_Dry_P Parameter: Post-Treatment Value: None
  misc_feature: MA Experiment 20001554 PARAMETER Experiment Name: At_Drought_Soil_Dry_P Parameter: Timepoint (day) Value: 7
  misc_feature: MA Experiment 20001554 PARAMETER Experiment Name: At_Drought_Soil_Dry_P Parameter: Treatment Value: Drought vs. No Drought
  misc_feature: MA Experiment ID: 20001757 Result: Down-regulated in Transcription
  misc_feature: MA Experiment 20001757 PARAMETER Experiment Name: At_50mM_NH4NO3_L-to-H_P Parameter: Timepoint (hr) Value: 6
  misc_feature: MA Experiment 20001757 PARAMETER Experiment Name: At_50mM_NH4NO3_L-to-H_P Parameter: Tissue Value: Leaf
  misc_feature: MA Experiment 20001757 PARAMETER Experiment Name: At_50mM_NH4NO3_L-to-H_P Parameter: Treatment Value: 50mM NH4NO3 vs 100mM Mannitol
  misc_feature: MA Experiment ID: 20001905 Result: Up-regulated in Transcription
  misc_feature: MA Experiment 20001905 PARAMETER Experiment Name: At_Drought_Reproduction_P Parameter: Age (day) Value: 40
  misc_feature: MA Experiment 20001905 PARAMETER Experiment Name: At_Drought_Reproduction_P Parameter: Organism Value: A. thaliana
  misc_feature: MA Experiment 20001905 PARAMETER Experiment Name: At_Drought_Reproduction_P Parameter: Plant Line Value: WS
  misc_feature: MA Experiment 20001905 PARAMETER Experiment Name: At_Drought_Reproduction_P Parameter: Timepoint (day) Value: 10
  misc_feature: MA Experiment 20001905 PARAMETER Experiment Name: At_Drought_Reproduction_P Parameter: Tissue Value: Rosettes
  misc_feature: MA Experiment 20001905 PARAMETER Experiment Name: At_Drought_Reproduction_P Parameter: Treatment Value: Drought vs. No Drought

SEQ ID NO: 93720 - protein, 166 aa, Arabidopsis thaliana; identical to SEQ ID NO: 89964
  peptide (1)..(166): Ceres Seq. ID no. 12721577
  misc_feature (2)..(87): Pfam Name: TB2/DP1, HVA22 family Pfam Description: TB2/DP1, HVA22 family
  misc_feature (1)..(166): Homolog of NCBI NO: 15222332 NR Description: hypothetical protein; protein id: At1g75700.1
  misc_feature (1)..(154): Homolog of NCBI NO: 18394805 NR Description: expressed protein; protein id: At1g19950.1, by cDNA: 147130., supported by cDNA: gi_15010625 [Arabidopsis >gi|15010626|gb|AAK73972.1| At1g19950/T20H2_25 [Arabidopsis
  misc_feature (1)..(154): Homolog of NCBI NO: 21553483 NR Description: pathogenicity protein PATH531-like protein
  misc_feature (1)..(154): Homolog of NCBI NO: 25513732 NR Description: T20H2.26 protein - Arabidopsis thaliana Contains similarity to Magnaporthe grisea pathogenicity protein
  misc_feature (1)..(145): Homolog of NCBI NO: 9759014 NR Description: gene_id:K16E1.3~unknown protein [Arabidopsis
  misc_feature (1)..(145): Homolog of NCBI NO: 18422223 NR Description: expressed protein; protein id: At5g42560.1,
  misc_feature (1)..(145): Homolog of NCBI NO: 21553813 NR Description: unknown [Arabidopsis thaliana]
  misc_feature (1)..(142): Homolog of NCBI NO: 20502988 NR Description: Putative InsB from Escherichia coli [Oryza sativa
  misc_feature (1)..(151): Homolog of NCBI NO: 37531658 NR Description: putative Magnaporthe grisea pathogenicity protein
  misc_feature (1)..(139): Homolog of NCBI NO: 21671921 NR Description: Putative protein with HVA22 domain [Oryza sativa

SEQ ID NO: 93721 - protein, 112 aa, Arabidopsis thaliana; identical to SEQ ID NO: 89965
  peptide (1)..(112): Ceres Seq. ID no. 12721578
  misc_feature (1)..(112): Homolog of NCBI NO: 15222332 NR Description: hypothetical protein; protein id: At1g75700.1
  misc_feature (1)..(100): Homolog of NCBI NO: 18394805 NR Description: expressed protein; protein id: At1g19950.1, by cDNA: 147130., supported by cDNA: gi_15010625 [Arabidopsis >gi|15010626|gb|AAK73972.1| At1g19950/T20H2_25 [Arabidopsis
  misc_feature (1)..(100): Homolog of NCBI NO: 25513732 NR Description: T20H2.26 protein - Arabidopsis thaliana Contains similarity to Magnaporthe grisea pathogenicity protein
  misc_feature (1)..(100): Homolog of NCBI NO: 21553483 NR Description: pathogenicity protein PATH531-like protein
  misc_feature (1)..(91): Homolog of NCBI NO: 9759014 NR Description: gene_id:K16E1.3~unknown protein [Arabidopsis
  misc_feature (1)..(91): Homolog of NCBI NO: 21553813 NR Description: unknown [Arabidopsis thaliana]
  misc_feature (1)..(91): Homolog of NCBI NO: 18422223 NR Description: expressed protein; protein id: At5g42560.1,
  misc_feature (1)..(88): Homolog of NCBI NO: 20502988 NR Description: Putative InsB from Escherichia coli [Oryza sativa
  misc_feature (1)..(97): Homolog of NCBI NO: 37531658 NR Description: putative Magnaporthe grisea pathogenicity protein
  misc_feature (1)..(85): Homolog of NCBI NO: 21671921 NR Description: Putative protein with HVA22 domain [Oryza sativa

SEQ ID NO: 93722 - DNA, 1140 bp, Arabidopsis thaliana; identical to SEQ ID NO: 89966
  misc_feature (1)..(1140): Ceres Seq. ID no. 12721590
  misc_feature: MA Experiment ID: 20000234 Result: Up-regulated in Transcription
  misc_feature: MA Experiment 20000234 PARAMETER Experiment Name: At_Siliques_P Parameter: Age (day) Value: 21
  misc_feature: MA Experiment 20000234 PARAMETER Experiment Name: At_Siliques_P Parameter: Organism Value: A. thaliana
  misc_feature: MA Experiment 20000234 PARAMETER Experiment Name: At_Siliques_P Parameter: Plant Line Value: WS
  misc_feature: MA Experiment 20000234 PARAMETER Experiment Name: At_Siliques_P Parameter: Tissue Value: Less Than 5mm Siliques vs. Whole Plant
  misc_feature: MA Experiment ID: 20000265 Result: Up-regulated in Transcription
  misc_feature: MA Experiment 20000265 PARAMETER Experiment Name: At_Open_Flower_P Parameter: Age (day) Value: 21
  misc_feature: MA Experiment 20000265 PARAMETER Experiment Name: At_Open_Flower_P Parameter: Plant Line Value: WS
  misc_feature: MA Experiment 20000265 PARAMETER Experiment Name: At_Open_Flower_P Parameter: Tissue Value: Closed Flower vs. Whole Plant
  misc_feature: MA Experiment ID: 20000286 Result: Up-regulated in Transcription
  misc_feature: MA Experiment 20000286 PARAMETER Experiment Name: At_Open_Flower_P Parameter: Age (day) Value: 21
  misc_feature: MA Experiment 20000286 PARAMETER Experiment Name: At_Open_Flower_P Parameter: Plant Line Value: WS
  misc_feature: MA Experiment 20000286 PARAMETER Experiment Name: At_Open_Flower_P Parameter: Tissue Value: Half Open vs. Whole Plant
  misc_feature: MA Experiment ID: 20000441 Result: Down-regulated in Transcription
  misc_feature: MA Experiment 20000441 PARAMETER Experiment Name: At_1uM_BR-BRZ__P Parameter: Tissue Value: Shoot Apices
  misc_feature: MA Experiment 20000441 PARAMETER Experiment Name: At_1uM_BR-BRZ__P Parameter: Treatment Value: 1uM BR vs. No Treatment
  misc_feature: MA Experiment ID: 20000443 Result: Down-regulated in Transcription
  misc_feature: MA Experiment 20000443 PARAMETER Experiment Name: At_1uM_BR-BRZ__P Parameter: Tissue Value: Shoot Apices
  misc_feature: MA Experiment 20000443 PARAMETER Experiment Name: At_1uM_BR-BRZ__P Parameter: Treatment Value: 1uM BRZ vs. No Treatment
  misc_feature: MA Experiment ID: 20001910 Result: Down-regulated in Transcription
  misc_feature: MA Experiment 20001910 PARAMETER Experiment Name: At_Drought_Reproduction_P Parameter: Age (day) Value: 37
  misc_feature: MA Experiment 20001910 PARAMETER Experiment Name: At_Drought_Reproduction_P Parameter: Organism Value: A. thaliana
  misc_feature: MA Experiment 20001910 PARAMETER Experiment Name: At_Drought_Reproduction_P Parameter: Plant Line Value: WS
  misc_feature: MA Experiment 20001910 PARAMETER Experiment Name: At_Drought_Reproduction_P Parameter: Timepoint (day) Value: 7
  misc_feature: MA Experiment 20001910 PARAMETER Experiment Name: At_Drought_Reproduction_P Parameter: Tissue Value: Flowers
  misc_feature: MA Experiment 20001910 PARAMETER Experiment Name: At_Drought_Reproduction_P Parameter: Treatment Value: Drought vs. No Drought

SEQ ID NO: 93723 - protein, 379 aa, Arabidopsis thaliana; identical to SEQ ID NO: 89967
  peptide (1)..(379): Ceres Seq. ID no. 12721591
  misc_feature (48)..(374): Pfam Name: GDSL-like Lipase/Acylhydrolase Pfam Description: GDSL-like Lipase/Acylhydrolase
  misc_feature (1)..(379): Homolog of NCBI NO: 18410956 NR Description: family II extracellular lipase 2 (EXL2); protein At1g75890.1, supported by cDNA: gi_15054383 [Arabidopsis >gi|15054384|gb|AAK30017.1| family II lipase EXL2 [Arabidopsis
  misc_feature (31)..(379): Homolog of NCBI NO: 8778807 NR Description: T4O12.12 [Arabidopsis thaliana]
  misc_feature (1)..(379): Homolog of NCBI NO: 18410954 NR Description: family II extracellular lipase 1 (EXL1); protein At1g75880.1, supported by cDNA: gi_15054381 [Arabidopsis >gi|15054382|gb|AAK30016.1| family II lipase EXL1 [Arabidopsis
  misc_feature (1)..(379): Homolog of NCBI NO: 28393626 NR Description: putative family II extracellular lipase 1 (EXL1) thaliana] >gi|28827430|gb|AAO50559.1| putative family II
  misc_feature (1)..(350): Homolog of NCBI NO: 8778807 NR Description: T4O12.12 [Arabidopsis thaliana]
  misc_feature (20)..(379): Homolog of NCBI NO: 15222901 NR Description: family II extracellular lipase 3 (EXL3); protein At1g75900.1, supported by cDNA: gi_15054385 [Arabidopsis >gi|15054386|gb|AAK30018.1| family II lipase EXL3 [Arabidopsis
  misc_feature (20)..(379): Homolog of NCBI NO: 26449364 NR Description: putative family II lipase EXL3 [Arabidopsis
  misc_feature (20)..(378): Homolog of NCBI NO: 25404994 NR Description: protein T4O12.13 [imported] - Arabidopsis >gi|8778808|gb|AAF79815.1|AC007396_8 T4O12.13 [Arabidopsis
  misc_feature (35)..(376): Homolog of NCBI NO: 18394825 NR Description: anter-specific proline-rich protein APG putative; protein id: At1g20120.1, supported by cDNA: 22980.
  misc_feature (35)..(376): Homolog of NCBI NO: 21592372 NR Description: anter-specific proline-rich protein APG

SEQ ID NO: 93724 - protein, 315 aa, Arabidopsis thaliana; identical to SEQ ID NO: 89968
  peptide (1)..(315): Ceres Seq. ID no. 12721592
  misc_feature (1)..(310): Pfam Name: GDSL-like Lipase/Acylhydrolase Pfam Description: GDSL-like Lipase/Acylhydrolase
  misc_feature (1)..(315): Homolog of NCBI NO: 18410956 NR Description: family II extracellular lipase 2 (EXL2); protein At1g75890.1, supported by cDNA: gi_15054383 [Arabidopsis >gi|15054384|gb|AAK30017.1| family II lipase EXL2 [Arabidopsis
  misc_feature (1)..(315): Homolog of NCBI NO: 8778807 NR Description: T4O12.12 [Arabidopsis thaliana]
  misc_feature (1)..(315): Homolog of NCBI NO: 18410954 NR Description: family II extracellular lipase 1 (EXL1); protein At1g75880.1, supported by cDNA: gi_15054381 [Arabidopsis >gi|15054382|gb|AAK30016.1| family II lipase EXL1 [Arabidopsis
  misc_feature (1)..(315): Homolog of NCBI NO: 28393626 NR Description: putative family II extracellular lipase 1 (EXL1) thaliana] >gi|28827430|gb|AAO50559.1| putative family II
  misc_feature (1)..(286): Homolog of NCBI NO: 8778807 NR Description: T4O12.12 [Arabidopsis thaliana]
  misc_feature (1)..(315): Homolog of NCBI NO: 15222901 NR Description: family II extracellular lipase 3 (EXL3); protein At1g75900.1, supported by cDNA: gi_15054385 [Arabidopsis >gi|15054386|gb|AAK30018.1| family II lipase EXL3 [Arabidopsis
  misc_feature (1)..(315): Homolog of NCBI NO: 26449364 NR Description: putative family II lipase EXL3 [Arabidopsis
  misc_feature (1)..(314): Homolog of NCBI NO: 25404994 NR Description: protein T4O12.13 [imported] - Arabidopsis >gi|8778808|gb|AAF79815.1|AC007396_8 T4O12.13 [Arabidopsis
  misc_feature (1)..(312): Homolog of NCBI NO: 18394825 NR Description: anter-specific proline-rich protein APG putative; protein id: At1g20120.1, supported by cDNA: 22980.
  misc_feature (1)..(312): Homolog of NCBI NO: 21592372 NR Description: anter-specific proline-rich protein APG

SEQ ID NO: 93725 - protein, 205 aa, Arabidopsis thaliana; identical to SEQ ID NO: 89969
  peptide (1)..(205): Ceres Seq. ID no. 12721593
  misc_feature (1)..(200): Pfam Name: GDSL-like Lipase/Acylhydrolase Pfam Description: GDSL-like Lipase/Acylhydrolase
  misc_feature (1)..(205): Homolog of NCBI NO: 18410956 NR Description: family II extracellular lipase 2 (EXL2); protein At1g75890.1, supported by cDNA: gi_15054383 [Arabidopsis >gi|15054384|gb|AAK30017.1| family II lipase EXL2 [Arabidopsis
  misc_feature (1)..(205): Homolog of NCBI NO: 8778807 NR Description: T4O12.12 [Arabidopsis thaliana]
  misc_feature (1)..(205): Homolog of NCBI NO: 18410954 NR Description: family II extracellular lipase 1 (EXL1); protein At1g75880.1, supported by cDNA: gi_15054381 [Arabidopsis >gi|15054382|gb|AAK30016.1| family II lipase EXL1 [Arabidopsis
  misc_feature (1)..(205): Homolog of NCBI NO: 28393626 NR Description: putative family II extracellular lipase 1 (EXL1) thaliana] >gi|28827430|gb|AAO50559.1| putative family II
  misc_feature (1)..(176): Homolog of NCBI NO: 8778807 NR Description: T4O12.12 [Arabidopsis thaliana]
  misc_feature (1)..(205): Homolog of NCBI NO: 15222901 NR Description: family II extracellular lipase 3 (EXL3); protein At1g75900.1, supported by cDNA: gi_15054385 [Arabidopsis >gi|15054386|gb|AAK30018.1| family II lipase EXL3 [Arabidopsis
  misc_feature (1)..(205): Homolog of NCBI NO: 26449364 NR Description: putative family II lipase EXL3 [Arabidopsis
  misc_feature (1)..(204): Homolog of NCBI NO: 25404994 NR Description: protein T4O12.13 [imported] - Arabidopsis >gi|8778808|gb|AAF79815.1|AC007396_8 T4O12.13 [Arabidopsis
  misc_feature (1)..(202): Homolog of NCBI NO: 18394825 NR Description: anter-specific proline-rich protein APG putative; protein id: At1g20120.1, supported by cDNA: 22980.
  misc_feature (1)..(202): Homolog of NCBI NO: 21592372 NR Description: anter-specific proline-rich protein APG

SEQ ID NO: 93726 - DNA, 927 bp, Arabidopsis thaliana; identical to SEQ ID NO: 89970
  misc_feature (1)..(927): Ceres Seq. ID no. 12721605
  misc_feature: MA Experiment ID: 20000169 Result: Down-regulated in Transcription
  misc_feature: MA Experiment 20000169 PARAMETER Experiment Name: At_100uM_ABA_P Parameter: Age (day) Value: 14
  misc_feature: MA Experiment 20000169 PARAMETER Experiment Name: At_100uM_ABA_P Parameter: Organism Value: A. thaliana
  misc_feature: MA Experiment 20000169 PARAMETER Experiment Name: At_100uM_ABA_P Parameter: Plant Line Value: WS
  misc_feature: MA Experiment 20000169 PARAMETER Experiment Name: At_100uM_ABA_P Parameter: Timepoint (hr) Value: 6
  misc_feature: MA Experiment 20000169 PARAMETER Experiment Name: At_100uM_ABA_P Parameter: Tissue Value: Aerial
  misc_feature: MA Experiment 20000169 PARAMETER Experiment Name: At_100uM_ABA_P Parameter: Treatment Value: 100uM ABA vs. No Treatment
  misc_feature: MA Experiment ID: 20000184 Result: Up-regulated in Transcription
  misc_feature: MA Experiment 20000184 PARAMETER Experiment Name: At_Shoots__P Parameter: Age (day) Value: 7
  misc_feature: MA Experiment 20000184 PARAMETER Experiment Name: At_Shoots__P Parameter: Tissue Value: Shoots vs. Whole Plant
  misc_feature: MA Experiment ID: 20000185 Result: Up-regulated in Transcription
  misc_feature: MA Experiment 20000185 PARAMETER Experiment Name: At_Roots__P Parameter: Age (day) Value: 7 vs. 21
  misc_feature: MA Experiment 20000185 PARAMETER Experiment Name: At_Roots__P Parameter: Organism Value: A. thaliana
  misc_feature: MA Experiment 20000185 PARAMETER Experiment Name: At_Roots__P Parameter: Tissue Value: Roots vs. Whole Plant
  misc_feature: MA Experiment ID: 20000227 Result: Up-regulated in Transcription
  misc_feature: MA Experiment 20000227 PARAMETER Experiment Name: At_Root-Tips-vs-Tops_P Parameter: Tissue Value: Root Tips vs. Root Tops
  misc_feature: MA Experiment ID: 20000234 Result: Down-regulated in Transcription
  misc_feature: MA Experiment 20000234 PARAMETER Experiment Name: At_Siliques_P Parameter: Age (day) Value: 21
  misc_feature: MA Experiment 20000234 PARAMETER Experiment Name: At_Siliques_P Parameter: Organism Value: A. thaliana
  misc_feature: MA Experiment 20000234 PARAMETER Experiment Name: At_Siliques_P Parameter: Plant Line Value: WS
  misc_feature: MA Experiment 20000234 PARAMETER Experiment Name: At_Siliques_P Parameter: Tissue Value: Less Than 5mm Siliques vs. Whole Plant
  misc_feature: MA Experiment ID: 20000264 Result: Up-regulated in Transcription
  misc_feature: MA Experiment 20000264 PARAMETER Experiment Name: At_Open_Flower_P Parameter: Age (day) Value: 21
  misc_feature: MA Experiment 20000264 PARAMETER Experiment Name: At_Open_Flower_P Parameter: Plant Line Value: WS
  misc_feature: MA Experiment 20000264 PARAMETER Experiment Name: At_Open_Flower_P Parameter: Tissue Value: Open Flower vs. Whole Plant
  misc_feature: MA Experiment ID: 20000308 Result: Down-regulated in Transcription
  misc_feature: MA Experiment 20000308 PARAMETER Experiment Name: At_100mM_NaCl__P Parameter: Age (day) Value: 17
  misc_feature: MA Experiment 20000308 PARAMETER Experiment Name: At_100mM_NaCl__P Parameter: Organism Value: A. thaliana
  misc_feature: MA Experiment 20000308 PARAMETER Experiment Name: At_100mM_NaCl__P Parameter: Plant Line Value: WS
  misc_feature: MA Experiment 20000308 PARAMETER Experiment Name: At_100mM_NaCl__P Parameter: Timepoint (hr) Value: 72
  misc_feature: MA Experiment 20000308 PARAMETER Experiment Name: At_100mM_NaCl__P Parameter: Tissue Value: Whole Plant
  misc_feature: MA Experiment 20000308 PARAMETER Experiment Name: At_100mM_NaCl__P Parameter: Treatment Value: 100mM NaCl vs. No Treatment
  misc_feature: MA Experiment ID: 20000438 Result: Up-regulated in Transcription
  misc_feature: MA Experiment 20000438 PARAMETER Experiment Name: At_Shoots__P Parameter: Age (day) Value: 14
  misc_feature: MA Experiment 20000438 PARAMETER Experiment Name: At_Shoots__P Parameter: Tissue Value: Shoots vs. Whole Plant
  misc_feature: MA Experiment ID: 20000453 Result: Down-regulated in Transcription
  misc_feature: MA Experiment 20000453 PARAMETER Experiment Name: At_100uM_ABA_P Parameter: Age (day) Value: 15
  misc_feature: MA Experiment 20000453 PARAMETER Experiment Name: At_100uM_ABA_P Parameter: Organism Value: A. thaliana
  misc_feature: MA Experiment 20000453 PARAMETER Experiment Name: At_100uM_ABA_P Parameter: Plant Line Value: WS
  misc_feature: MA Experiment 20000453 PARAMETER Experiment Name: At_100uM_ABA_P Parameter: Timepoint (hr) Value: 24
  misc_feature: MA Experiment 20000453 PARAMETER Experiment Name: At_100uM_ABA_P Parameter: Tissue Value: Aerial
  misc_feature: MA Experiment 20000453 PARAMETER Experiment Name: At_100uM_ABA_P Parameter: Treatment Value: 100uM ABA vs. No Treatment
  misc_feature: MA Experiment ID: 20000455 Result: Down-regulated in Transcription
  misc_feature: MA Experiment 20000455 PARAMETER Experiment Name: At_100uM_ABA_P Parameter: Age (day) Value: 16
  misc_feature: MA Experiment 20000455 PARAMETER Experiment Name: At_100uM_ABA_P Parameter: Organism Value: A. thaliana
  misc_feature: MA Experiment 20000455 PARAMETER Experiment Name: At_100uM_ABA_P Parameter: Plant Line Value: WS
  misc_feature: MA Experiment 20000455 PARAMETER Experiment Name: At_100uM_ABA_P Parameter: Timepoint (hr) Value: 48
  misc_feature: MA Experiment 20000455 PARAMETER Experiment Name: At_100uM_ABA_P Parameter: Tissue Value: Aerial
  misc_feature: MA Experiment 20000455 PARAMETER Experiment Name: At_100uM_ABA_P Parameter: Treatment Value: 100uM ABA vs. No Treatment
  misc_feature: MA Experiment ID: 20000794 Result: Up-regulated in Transcription
  misc_feature: MA Experiment 20000794 PARAMETER Experiment Name: At_Petals_P Parameter: Age (day) Value: 23-25 days
  misc_feature: MA Experiment 20000794 PARAMETER Experiment Name: At_Petals_P Parameter: Plant Line Value: WS
  misc_feature: MA Experiment 20000794 PARAMETER Experiment Name: At_Petals_P Parameter: Tissue Value: Petals vs. Whole plant
  misc_feature: MA Experiment ID: 20001248 Result: Down-regulated in Transcription
  misc_feature: MA Experiment 20001248 PARAMETER Experiment Name: At_Far-red-induction_P Parameter: Age (day) Value: 7
  misc_feature: MA Experiment 20001248 PARAMETER Experiment Name: At_Far-red-induction_P Parameter: Light Value: Far-red vs. White
  misc_feature: MA Experiment 20001248 PARAMETER Experiment Name: At_Far-red-induction_P Parameter: Organism Value: A. thaliana
  misc_feature: MA Experiment 20001248 PARAMETER Experiment Name: At_Far-red-induction_P Parameter: Plant Line Value: Columbia
  misc_feature: MA Experiment 20001248 PARAMETER Experiment Name: At_Far-red-induction_P Parameter: Timepoint (hr) Value: 4
  misc_feature: MA Experiment 20001248 PARAMETER Experiment Name: At_Far-red-induction_P Parameter: Tissue Value: Whole Plant
  misc_feature: MA Experiment ID: 20001554 Result: Down-regulated in Transcription
  misc_feature: MA Experiment 20001554 PARAMETER Experiment Name: At_Drought_Soil_Dry_P Parameter: Age (day) Value: 21
  misc_feature: MA Experiment 20001554 PARAMETER Experiment Name: At_Drought_Soil_Dry_P Parameter: Organism Value: A. thaliana
  misc_feature: MA Experiment 20001554 PARAMETER Experiment Name: At_Drought_Soil_Dry_P Parameter: Plant Line Value: WS
  misc_feature: MA Experiment 20001554 PARAMETER Experiment Name: At_Drought_Soil_Dry_P Parameter: Post Timepoint (hr) Value: None
  misc_feature: MA Experiment 20001554 PARAMETER Experiment Name: At_Drought_Soil_Dry_P Parameter: Post-Treatment Value: None
  misc_feature: MA Experiment 20001554 PARAMETER Experiment Name: At_Drought_Soil_Dry_P Parameter: Timepoint (day) Value: 7
  misc_feature: MA Experiment 20001554 PARAMETER Experiment Name: At_Drought_Soil_Dry_P Parameter: Treatment Value: Drought vs. No Drought
  misc_feature: MA Experiment ID: 20001555 Result: Down-regulated in Transcription
  misc_feature: MA Experiment 20001555 PARAMETER Experiment Name: At_Drought_Soil_Dry_P Parameter: Age (day) Value: 24
  misc_feature: MA Experiment 20001555 PARAMETER Experiment Name: At_Drought_Soil_Dry_P Parameter: Organism Value: A. thaliana
  misc_feature: MA Experiment 20001555 PARAMETER Experiment Name: At_Drought_Soil_Dry_P Parameter: Plant Line Value: WS
  misc_feature: MA Experiment 20001555 PARAMETER Experiment Name: At_Drought_Soil_Dry_P Parameter: Post Timepoint (hr) Value: None
  misc_feature: MA Experiment 20001555 PARAMETER Experiment Name: At_Drought_Soil_Dry_P Parameter: Post-Treatment Value: None
  misc_feature: MA Experiment 20001555 PARAMETER Experiment Name: At_Drought_Soil_Dry_P Parameter: Timepoint (day) Value: 10
  misc_feature: MA Experiment 20001555 PARAMETER Experiment Name: At_Drought_Soil_Dry_P Parameter: Treatment Value: Drought vs. No Drought
  misc_feature: MA Experiment ID: 20001556 Result: Down-regulated in Transcription
  misc_feature: MA Experiment 20001556 PARAMETER Experiment Name: At_Drought_Soil_Dry_P Parameter: Age (day) Value: 26
  misc_feature: MA Experiment 20001556 PARAMETER Experiment Name: At_Drought_Soil_Dry_P Parameter: Organism Value: A. thaliana
  misc_feature: MA Experiment 20001556 PARAMETER Experiment Name: At_Drought_Soil_Dry_P Parameter: Plant Line Value: WS
  misc_feature: MA Experiment 20001556 PARAMETER Experiment Name: At_Drought_Soil_Dry_P Parameter: Post Timepoint (hr) Value: None
  misc_feature: MA Experiment 20001556 PARAMETER Experiment Name: At_Drought_Soil_Dry_P Parameter: Post-Treatment Value: None
  misc_feature: MA Experiment 20001556 PARAMETER Experiment Name: At_Drought_Soil_Dry_P Parameter: Timepoint (day) Value: 12
  misc_feature: MA Experiment 20001556 PARAMETER Experiment Name: At_Drought_Soil_Dry_P Parameter: Treatment Value: Drought vs. No Drought
  misc_feature: MA Experiment ID: 20001557 Result: Down-regulated in Transcription
  misc_feature: MA Experiment 20001557 PARAMETER Experiment Name: At_Drought_Soil_Dry_P Parameter: Age (day) Value: 27
  misc_feature: MA Experiment 20001557 PARAMETER Experiment Name: At_Drought_Soil_Dry_P Parameter: Organism Value: A. thaliana
  misc_feature: MA Experiment 20001557 PARAMETER Experiment Name: At_Drought_Soil_Dry_P Parameter: Plant Line Value: WS
  misc_feature: MA Experiment 20001557 PARAMETER Experiment Name: At_Drought_Soil_Dry_P Parameter: Post Timepoint (hr) Value: 3
  misc_feature: MA Experiment 20001557 PARAMETER Experiment Name: At_Drought_Soil_Dry_P Parameter: Post-Treatment Value: Re-Water vs. No Drought
  misc_feature: MA Experiment 20001557 PARAMETER Experiment Name: At_Drought_Soil_Dry_P Parameter: Timepoint (day) Value: 13
  misc_feature: MA Experiment 20001557 PARAMETER Experiment Name: At_Drought_Soil_Dry_P Parameter: Treatment Value: Drought vs. No Drought
  misc_feature: MA Experiment ID: 20001911 Result: Down-regulated in Transcription
  misc_feature: MA Experiment 20001911 PARAMETER Experiment Name: At_Drought_Reproduction_P Parameter: Age (day) Value: 40
  misc_feature: MA Experiment 20001911 PARAMETER Experiment Name: At_Drought_Reproduction_P Parameter: Organism Value: A. thaliana
  misc_feature: MA Experiment 20001911 PARAMETER Experiment Name: At_Drought_Reproduction_P Parameter: Plant Line Value: WS
  misc_feature: MA Experiment 20001911 PARAMETER Experiment Name: At_Drought_Reproduction_P Parameter: Timepoint (day) Value: 10
  misc_feature: MA Experiment 20001911 PARAMETER Experiment Name: At_Drought_Reproduction_P Parameter: Tissue Value: Flowers
  misc_feature: MA Experiment 20001911 PARAMETER Experiment Name: At_Drought_Reproduction_P Parameter: Treatment Value: Drought vs. No Drought

SEQ ID NO: 93727 - protein, 308 aa, Arabidopsis thaliana; identical to SEQ ID NO: 89971
  peptide (1)..(308): Ceres Seq. ID no. 12721606
  misc_feature (74)..(305): Pfam Name: Arabidopsis protein of unknown function Pfam Description: Arabidopsis protein of unknown function
  misc_feature (1)..(308): Homolog of NCBI NO: 6573720 NR Description: T23E18.17 [Arabidopsis thaliana]
  misc_feature (1)..(308): Homolog of NCBI NO: 15222989 NR Description: hypothetical protein; protein id: At1g76240.1
  misc_feature (1)..(216): Homolog of NCBI NO: 38345858 NR Description: OSJNBa0084K11.22 [Oryza sativa (japonica
  misc_feature (233)..(307): Homolog of NCBI NO: 38345858 NR Description: OSJNBa0084K11.22 [Oryza sativa (japonica
  misc_feature (16)..(307): Homolog of NCBI NO: 37536548 NR Description: hypothetical protein [Oryza sativa (japonica group)] >gi|10140772|gb|AAG13603.1| hypothetical protein [Oryza >gi|31433334|gb|AAP54863.1| hypothetical protein [Oryza sativa
  misc_feature (32)..(279): Homolog of NCBI NO: 37535958 NR Description: hypothetical protein [Oryza sativa (japonica group)] >gi|15144300|gb|AAK84441.1| hypothetical protein [Oryza
  misc_feature (23)..(212): Homolog of NCBI NO: 37535956 NR Description: hypothetical protein [Oryza sativa (japonica group)] >gi|15144316|gb|AAK84457.1| hypothetical protein [Oryza
  misc_feature (260)..(304): Homolog of NCBI NO: 37535956 NR Description: hypothetical protein [Oryza sativa (japonica group)] >gi|15144316|gb|AAK84457.1| hypothetical protein [Oryza
  misc_feature (27)..(308): Homolog of NCBI NO: 15237099 NR Description: putative protein; protein id: At4g35690.1
  misc_feature (27)..(307): Homolog of NCBI NO: 15227881 NR Description: hypothetical protein; protein id: At2g17680.1

SEQ ID NO: 93728 - DNA, 2115 bp, Arabidopsis thaliana; identical to SEQ ID NO: 89972
  misc_feature (1)..(2115): Ceres Seq. ID no. 12721607
  misc_feature: MA Experiment ID: 20001451 Result: Down-regulated in Transcription
  misc_feature: MA Experiment 20001451 PARAMETER Experiment Name: At_Far-red-induction_P Parameter: Age (day) Value: 7
  misc_feature: MA Experiment 20001451 PARAMETER Experiment Name: At_Far-red-induction_P Parameter: Light Value: Far-red vs. White
  misc_feature: MA Experiment 20001451 PARAMETER Experiment Name: At_Far-red-induction_P Parameter: Organism Value: A. thaliana
  misc_feature: MA Experiment 20001451 PARAMETER Experiment Name: At_Far-red-induction_P Parameter: Plant Line Value: Columbia
  misc_feature: MA Experiment 20001451 PARAMETER Experiment Name: At_Far-red-induction_P Parameter: Timepoint (hr) Value: 24
  misc_feature: MA Experiment 20001451 PARAMETER Experiment Name: At_Far-red-induction_P Parameter: Tissue Value: Whole Plant

SEQ ID NO: 93729 - protein, 572 aa, Arabidopsis thaliana; identical to SEQ ID NO: 89973
  peptide (1)..(572): Ceres Seq. ID no. 12721608
  misc_feature (111)..(452): Pfam Name: Plant protein family Pfam Description: Plant protein family
  misc_feature (1)..(572): Homolog of NCBI NO: 18411065 NR Description: putative auxin-independent growth promoter; id: At1g76270.1, supported by cDNA: gi_15292904 [Arabidopsis
  misc_feature (1)..(572): Homolog of NCBI NO: 25406439 NR Description: hypothetical protein F15M4.23 [imported] -
  misc_feature (86)..(572): Homolog of NCBI NO: 6573718 NR Description: T23E18.20 [Arabidopsis thaliana]
  misc_feature (1)..(139): Homolog of NCBI NO: 6573718 NR Description: T23E18.20 [Arabidopsis thaliana]
  misc_feature (1)..(572): Homolog of NCBI NO: 8886957 NR Description: F2D10.3 [Arabidopsis thaliana]
  misc_feature (67)..(572): Homolog of NCBI NO: 8778600 NR Description: F5M15.13 [Arabidopsis thaliana]
  misc_feature (1)..(47): Homolog of NCBI NO: 8778600 NR Description: F5M15.13 [Arabidopsis thaliana]
  misc_feature (275)..(572): Homolog of NCBI NO: 30686880 NR Description: axi 1 protein -related [Arabidopsis thaliana]
  misc_feature (1)..(238): Homolog of NCBI NO: 30686880 NR Description: axi 1 protein -related [Arabidopsis thaliana]
  misc_feature (3)..(542): Homolog of NCBI NO: 322752 NR Description: auxin-independent growth promoter - common

SEQ ID NO: 93730 - protein, 381 aa, Arabidopsis thaliana; identical to SEQ ID NO: 89974
  peptide (1)..(381): Ceres Seq. ID no. 12721609
  misc_feature (1)..(261): Pfam Name: Plant protein family Pfam Description: Plant protein family
  misc_feature (1)..(381): Homolog of NCBI NO: 18411065 NR Description: putative auxin-independent growth promoter; id: At1g76270.1, supported by cDNA: gi_15292904 [Arabidopsis
  misc_feature (1)..(381): Homolog of NCBI NO: 25406439 NR Description: hypothetical protein F15M4.23 [imported] -
  misc_feature (1)..(381): Homolog of NCBI NO: 6573718 NR Description: T23E18.20 [Arabidopsis thaliana]
  misc_feature (1)..(381): Homolog of NCBI NO: 8886957 NR Description: F2D10.3 [Arabidopsis thaliana]
  misc_feature (1)..(381): Homolog of NCBI NO: 8778600 NR Description: F5M15.13 [Arabidopsis thaliana]
  misc_feature (84)..(381): Homolog of NCBI NO: 30686880 NR Description: axi 1 protein -related [Arabidopsis thaliana]
  misc_feature (1)..(47): Homolog of NCBI NO: 30686880 NR Description: axi 1 protein -related [Arabidopsis thaliana]
  misc_feature (1)..(351): Homolog of NCBI NO: 322752 NR Description: auxin-independent growth promoter - common
  misc_feature (1)..(303): Homolog of NCBI NO: 15233840 NR Description: putative growth regulator protein; protein id: [Arabidopsis thaliana] >gi|7488119|pir||T05667 probable growth
  misc_feature (1)..(338): Homolog of NCBI NO: 22328730 NR Description: growth regulator like protein; protein id: supported by cDNA: gi_20856497 [Arabidopsis thaliana] AT4g16650/dl4350w [Arabidopsis thaliana]

SEQ ID NO: 93731 - protein, 318 aa, Arabidopsis thaliana; identical to SEQ ID NO: 89975
  peptide (1)..(318): Ceres Seq. ID no. 12721610
  misc_feature (1)..(198): Pfam Name: Plant protein family Pfam Description: Plant protein family
  misc_feature (1)..(318): Homolog of NCBI NO: 18411065 NR Description: putative auxin-independent growth promoter; id: At1g76270.1, supported by cDNA: gi_15292904 [Arabidopsis
  misc_feature (1)..(318): Homolog of NCBI NO: 25406439 NR Description: hypothetical protein F15M4.23 [imported] -
  misc_feature (1)..(318): Homolog of NCBI NO: 6573718 NR Description: T23E18.20 [Arabidopsis thaliana]
  misc_feature (1)..(318): Homolog of NCBI NO: 8886957 NR Description: F2D10.3 [Arabidopsis thaliana]
  misc_feature (1)..(318): Homolog of NCBI NO: 8778600 NR Description: F5M15.13 [Arabidopsis thaliana]
  misc_feature (21)..(318): Homolog of NCBI NO: 30686880 NR Description: axi 1 protein -related [Arabidopsis thaliana]
  misc_feature (1)..(288): Homolog of NCBI NO: 322752 NR Description: auxin-independent growth promoter - common
  misc_feature (1)..(240): Homolog of NCBI NO: 15233840 NR Description: putative growth regulator protein; protein id: [Arabidopsis thaliana] >gi|7488119|pir||T05667 probable growth
  misc_feature (1)..(275): Homolog of NCBI NO: 22328730 NR Description: growth regulator like protein; protein id: supported by cDNA: gi_20856497 [Arabidopsis thaliana] AT4g16650/dl4350w [Arabidopsis thaliana]
  misc_feature (1)..(233): Homolog of NCBI NO: 38345464 NR Description: OSJNBa0010H02.2 [Oryza sativa (japonica

SEQ ID NO: 93732 - DNA, 1485 bp, Arabidopsis thaliana; identical to SEQ ID NO: 89976
  misc_feature (1)..(1485): Ceres Seq. ID no. 12721643
  misc_feature: MA Experiment ID: 20000184 Result: Down-regulated in Transcription
  misc_feature: MA Experiment 20000184 PARAMETER Experiment Name: At_Shoots__P Parameter: Age (day) Value: 7
  misc_feature: MA Experiment 20000184 PARAMETER Experiment Name: At_Shoots__P Parameter: Tissue Value: Shoots vs. Whole Plant
  misc_feature: MA Experiment ID: 20001451 Result: Down-regulated in Transcription
  misc_feature: MA Experiment 20001451 PARAMETER Experiment Name: At_Far-red-induction_P Parameter: Age (day) Value: 7
  misc_feature: MA Experiment 20001451 PARAMETER Experiment Name: At_Far-red-induction_P Parameter: Light Value: Far-red vs. White
  misc_feature: MA Experiment 20001451 PARAMETER Experiment Name: At_Far-red-induction_P Parameter: Organism Value: A. thaliana
  misc_feature: MA Experiment 20001451 PARAMETER Experiment Name: At_Far-red-induction_P Parameter: Plant Line Value: Columbia
  misc_feature: MA Experiment 20001451 PARAMETER Experiment Name: At_Far-red-induction_P Parameter: Timepoint (hr) Value: 24
  misc_feature: MA Experiment 20001451 PARAMETER Experiment Name: At_Far-red-induction_P Parameter: Tissue Value: Whole Plant

SEQ ID NO: 93733 - protein, 494 aa, Arabidopsis thaliana; identical to SEQ ID NO: 89977
  peptide (1)..(494): Ceres Seq. ID no. 12721644
  misc_feature (138)..(263): Pfam Name: ARID/BRIGHT DNA binding domain Pfam Description: ARID/BRIGHT DNA binding domain
  misc_feature (1)..(494): Homolog of NCBI NO: 25406449 NR Description: probable DNA-binding protein, 48797-45229
  misc_feature (1)..(326): Homolog of NCBI NO: 30699177 NR Description: DNA-binding protein -related [Arabidopsis
  misc_feature (394)..(494): Homolog of NCBI NO: 30699177 NR Description: DNA-binding protein -related [Arabidopsis
  misc_feature (111)..(326): Homolog of NCBI NO: 30687082 NR Description: expressed protein [Arabidopsis thaliana]
  misc_feature (396)..(494): Homolog of NCBI NO: 30687082 NR Description: expressed protein [Arabidopsis thaliana]
  misc_feature (203)..(326): Homolog of NCBI NO: 25518704 NR Description: hypothetical protein F9H16.11 - Arabidopsis >gi|4836898|gb|AAD30601.1|AC007369_11 Hypothetical protein
  misc_feature (416)..(494): Homolog of NCBI NO: 25518704 NR Description: hypothetical protein F9H16.11 - Arabidopsis >gi|4836898|gb|AAD30601.1|AC007369_11 Hypothetical protein
  misc_feature (111)..(176): Homolog of NCBI NO: 25518704 NR Description: hypothetical protein F9H16.11 - Arabidopsis >gi|4836898|gb|AAD30601.1|AC007369_11 Hypothetical protein
  misc_feature (396)..(419): Homolog of NCBI NO: 25518704 NR Description: hypothetical protein F9H16.11 - Arabidopsis >gi|4836898|gb|AAD30601.1|AC007369_11 Hypothetical protein
  misc_feature (16)..(270): Homolog of NCBI NO: 30679972 NR Description: expressed protein [Arabidopsis thaliana] At2g17400 [Arabidopsis thaliana] >gi|27363260|gb|AAO11549.1|

SEQ ID NO: 93734 - protein, 489 aa, Arabidopsis thaliana; identical to SEQ ID NO: 89978
  peptide (1)..(489): Ceres Seq. ID no. 12721645
  misc_feature (133)..(258): Pfam Name: ARID/BRIGHT DNA binding domain Pfam Description: ARID/BRIGHT DNA binding domain
  misc_feature (1)..(489): Homolog of NCBI NO: 25406449 NR Description: probable DNA-binding protein, 48797-45229
  misc_feature (1)..(321): Homolog of NCBI NO: 30699177 NR Description: DNA-binding protein -related [Arabidopsis
  misc_feature (389)..(489): Homolog of NCBI NO: 30699177 NR Description: DNA-binding protein -related [Arabidopsis
  misc_feature (106)..(321): Homolog of NCBI NO: 30687082 NR Description: expressed protein [Arabidopsis thaliana]
  misc_feature (391)..(489): Homolog of NCBI NO: 30687082 NR Description: expressed protein [Arabidopsis thaliana]
  misc_feature (198)..(321): Homolog of NCBI NO: 25518704 NR Description: hypothetical protein F9H16.11 - Arabidopsis >gi|4836898|gb|AAD30601.1|AC007369_11 Hypothetical protein
  misc_feature (411)..(489): Homolog of NCBI NO: 25518704 NR Description: hypothetical protein F9H16.11 - Arabidopsis >gi|4836898|gb|AAD30601.1|AC007369_11 Hypothetical protein
  misc_feature (106)..(171): Homolog of NCBI NO: 25518704 NR Description: hypothetical protein F9H16.11 - Arabidopsis >gi|4836898|gb|AAD30601.1|AC007369_11 Hypothetical protein
  misc_feature (391)..(414): Homolog of NCBI NO: 25518704 NR Description: hypothetical protein F9H16.11 - Arabidopsis >gi|4836898|gb|AAD30601.1|AC007369_11 Hypothetical protein
  misc_feature (11)..(265): Homolog of NCBI NO: 30679972 NR Description: expressed protein [Arabidopsis thaliana] At2g17400 [Arabidopsis thaliana] >gi|27363260|gb|AAO11549.1|

SEQ ID NO: 93735 - DNA, 1854 bp, Arabidopsis thaliana; identical to SEQ ID NO: 89979
  misc_feature (1)..(1854): Ceres Seq. ID no. 12721650
  misc_feature: MA Experiment ID: 20000235 Result: Up-regulated in Transcription
  misc_feature: MA Experiment 20000235 PARAMETER Experiment Name: At_Siliques_P Parameter: Age (day) Value: 21
  misc_feature: MA Experiment 20000235 PARAMETER Experiment Name: At_Siliques_P Parameter: Organism Value: A. thaliana
  misc_feature: MA Experiment 20000235 PARAMETER Experiment Name: At_Siliques_P Parameter: Plant Line Value: WS
  misc_feature: MA Experiment 20000235 PARAMETER Experiment Name: At_Siliques_P Parameter: Tissue Value: 5-10mm Siliques vs. Whole Plant

SEQ ID NO: 93736 - protein, 617 aa, Arabidopsis thaliana; identical to SEQ ID NO: 89980
  peptide (1)..(617): Ceres Seq. ID no. 12721651
  misc_feature (87)..(368): Pfam Name: Phosphofructokinase Pfam Description: Phosphofructokinase
  misc_feature (1)..(609): Homolog of NCBI NO: 15218074 NR Description: putative pyrophosphate-dependent alpha subunit; protein id: At1g20950.1, supported by cDNA:
  misc_feature (1)..(615): Homolog of NCBI NO: 2499488 NR Description: Pyrophosphate--fructose 6-phosphate
  misc_feature (1)..(609): Homolog of NCBI NO: 3790102 NR Description: pyrophosphate-dependent phosphofructokinase alpha
  misc_feature (1)..(616): Homolog of NCBI NO: 129881 NR Description: Pyrophosphate--fructose 6-phosphate
  misc_feature (1)..(607): Homolog of NCBI NO: 29647436 NR Description: putative pyrophosphate--fructose 6-phosphate 1-
  misc_feature (88)..(485): Homolog of NCBI NO: 29367525 NR Description: fructose-6-phosphate 1-phosphotransferase [Oryza
  misc_feature (11)..(546): Homolog of NCBI NO: 11528427 NR Description: pyrophosphate-dependent phosphofructokinase
  misc_feature (11)..(558): Homolog of NCBI NO: 15639531 NR Description: pyrophosphate--fructose 6-phosphate beta subunit [Treponema pallidum] >gi|7447685|pir||C71312
  misc_feature (12)..(561): Homolog of NCBI NO: 34540025 NR Description: phosphofructokinase [Porphyromonas gingivalis >gi|10801546|dbj|BAB16715.1| phosphofructokinase [Porphyromonas >gi|34396336|gb|AAQ65403.1| phosphofructokinase [Porphyromonas
  misc_feature (12)..(558): Homolog of NCBI NO: 15221156 NR Description: putative pyrophosphate-fructose-6-phosphate 1- protein id: At1g12000.1, supported by cDNA: gi_17064793,

SEQ ID NO: 93737 - protein, 463 aa, Arabidopsis thaliana; identical to SEQ ID NO: 89981
  peptide (1)..(463): Ceres Seq. ID no. 12721652
  misc_feature (1)..(214): Pfam Name: Phosphofructokinase Pfam Description: Phosphofructokinase
  misc_feature (1)..(455): Homolog of NCBI NO: 15218074 NR Description: putative pyrophosphate-dependent alpha subunit; protein id: At1g20950.1, supported by cDNA:
  misc_feature (1)..(461): Homolog of NCBI NO: 2499488 NR Description: Pyrophosphate--fructose 6-phosphate
  misc_feature (1)..(455): Homolog of NCBI NO: 3790102 NR Description: pyrophosphate-dependent phosphofructokinase alpha
  misc_feature (1)..(462): Homolog of NCBI NO: 129881 NR Description: Pyrophosphate--fructose 6-phosphate
  misc_feature (1)..(453): Homolog of NCBI NO: 29647436 NR Description: putative pyrophosphate--fructose 6-phosphate 1-
  misc_feature (1)..(331): Homolog of NCBI NO: 29367525 NR Description: fructose-6-phosphate 1-phosphotransferase [Oryza
  misc_feature (1)..(392): Homolog of NCBI NO: 11528427 NR Description: pyrophosphate-dependent phosphofructokinase
  misc_feature (1)..(404): Homolog of NCBI NO: 15639531 NR Description: pyrophosphate--fructose 6-phosphate beta subunit [Treponema pallidum] >gi|7447685|pir||C71312
  misc_feature (1)..(407): Homolog of NCBI NO: 34540025 NR Description: phosphofructokinase [Porphyromonas gingivalis >gi|10801546|dbj|BAB16715.1| phosphofructokinase [Porphyromonas >gi|34396336|gb|AAQ65403.1| phosphofructokinase [Porphyromonas
  misc_feature (1)..(404): Homolog of NCBI NO: 15221156 NR Description: putative pyrophosphate-fructose-6-phosphate 1- protein id: At1g12000.1, supported by cDNA: gi_17064793,

SEQ ID NO: 93738 - protein, 353 aa, Arabidopsis thaliana; identical to SEQ ID NO: 89982
  peptide (1)..(353): Ceres Seq. ID no. 12721653
  misc_feature (1)..(104): Pfam Name: Phosphofructokinase Pfam Description: Phosphofructokinase
  misc_feature (1)..(345): Homolog of NCBI NO: 15218074 NR Description: putative pyrophosphate-dependent alpha subunit; protein id: At1g20950.1, supported by cDNA:
  misc_feature (1)..(351): Homolog of NCBI NO: 2499488 NR Description: Pyrophosphate--fructose 6-phosphate
  misc_feature (1)..(345): Homolog of NCBI NO: 3790102 NR Description: pyrophosphate-dependent phosphofructokinase alpha
  misc_feature (1)..(352): Homolog of NCBI NO: 129881 NR Description: Pyrophosphate--fructose 6-phosphate
  misc_feature (1)..(343): Homolog of NCBI NO: 29647436 NR Description: putative pyrophosphate--fructose 6-phosphate 1-
  misc_feature (1)..(221): Homolog of NCBI NO: 29367525 NR Description: fructose-6-phosphate 1-phosphotransferase [Oryza
  misc_feature (1)..(282): Homolog of NCBI NO: 11528427 NR Description: pyrophosphate-dependent phosphofructokinase
  misc_feature (1)..(294): Homolog of NCBI NO: 15639531 NR Description: pyrophosphate--fructose 6-phosphate beta subunit [Treponema pallidum] >gi|7447685|pir||C71312
  misc_feature (1)..(297): Homolog of NCBI NO: 34540025 NR Description: phosphofructokinase [Porphyromonas gingivalis >gi|10801546|dbj|BAB16715.1| phosphofructokinase [Porphyromonas >gi|34396336|gb|AAQ65403.1| phosphofructokinase [Porphyromonas
  misc_feature (1)..(294): Homolog of NCBI NO: 15221156 NR Description: putative pyrophosphate-fructose-6-phosphate 1- protein id: At1g12000.1, supported by cDNA: gi_17064793,

SEQ ID NO: 93739 - DNA, 2532 bp, Arabidopsis thaliana; identical to SEQ ID NO: 89983
  misc_feature (1)..(2532): Ceres Seq. ID no. 12721679
  misc_feature: MA Experiment ID: 20000315 Result: Down-regulated in Transcription
  misc_feature: MA Experiment 20000315 PARAMETER Experiment Name: At_14day_Shoots-Roots_Sub_P Parameter: Age (day) Value: 14
  misc_feature: MA Experiment 20000315 PARAMETER Experiment Name: At_14day_Shoots-Roots_Sub_P Parameter: Organism Value: A. thaliana
  misc_feature: MA Experiment 20000315 PARAMETER Experiment Name: At_14day_Shoots-Roots_Sub_P Parameter: Plant Line Value: WS
  misc_feature: MA Experiment 20000315 PARAMETER Experiment Name: At_14day_Shoots-Roots_Sub_P Parameter: Tissue Value: Shoots vs. Whole Plant
  misc_feature: MA Experiment ID: 20000327 Result: Down-regulated in Transcription
  misc_feature: MA Experiment 20000327 PARAMETER Experiment Name: At_42deg_Heat_Sub_P Parameter: Age (day) Value: 14
  misc_feature: MA Experiment 20000327 PARAMETER Experiment Name: At_42deg_Heat_Sub_P Parameter: Organism Value: A. thaliana
  misc_feature: MA Experiment 20000327 PARAMETER Experiment Name: At_42deg_Heat_Sub_P Parameter: Plant Line Value: WS
  misc_feature: MA Experiment 20000327 PARAMETER Experiment Name: At_42deg_Heat_Sub_P Parameter: Temperature (deg C) Value: 42 vs. 22
  misc_feature: MA Experiment 20000327 PARAMETER Experiment Name: At_42deg_Heat_Sub_P Parameter: Timepoint (hr) Value: 1
  misc_feature: MA Experiment 20000327 PARAMETER Experiment Name: At_42deg_Heat_Sub_P Parameter: Tissue Value: Aerial
  misc_feature: MA Experiment ID: 20000328 Result: Down-regulated in Transcription
  misc_feature: MA Experiment 20000328 PARAMETER Experiment Name: At_42deg_Heat_Sub_P Parameter: Age (day) Value: 14
  misc_feature: MA Experiment 20000328 PARAMETER Experiment Name: At_42deg_Heat_Sub_P Parameter: Organism Value: A. thaliana
  misc_feature: MA Experiment 20000328 PARAMETER Experiment Name: At_42deg_Heat_Sub_P Parameter: Plant Line Value: WS
  misc_feature: MA Experiment 20000328 PARAMETER Experiment Name: At_42deg_Heat_Sub_P Parameter: Temperature (deg C) Value: 42 vs. 22
  misc_feature: MA Experiment 20000328 PARAMETER Experiment Name: At_42deg_Heat_Sub_P Parameter: Timepoint (hr) Value: 6
  misc_feature: MA Experiment 20000328 PARAMETER Experiment Name: At_42deg_Heat_Sub_P Parameter: Tissue Value: Aerial
  misc_feature: MA Experiment ID: 20000329 Result: Up-regulated in Transcription
  misc_feature: MA Experiment 20000329 PARAMETER Experiment Name: At_4deg_Cold_Sub_P Parameter: Age (day) Value: 14
  misc_feature: MA Experiment 20000329 PARAMETER Experiment Name: At_4deg_Cold_Sub_P Parameter: Organism Value: A. thaliana
  misc_feature: MA Experiment 20000329 PARAMETER Experiment Name: At_4deg_Cold_Sub_P Parameter: Plant Line Value: WS
  misc_feature: MA Experiment 20000329 PARAMETER Experiment Name: At_4deg_Cold_Sub_P Parameter: Temperature (deg C) Value: 4 vs. 22
  misc_feature: MA Experiment 20000329 PARAMETER Experiment Name: At_4deg_Cold_Sub_P Parameter: Timepoint (hr) Value: 6
  misc_feature: MA Experiment 20000329 PARAMETER Experiment Name: At_4deg_Cold_Sub_P Parameter: Tissue Value: Aerial
  misc_feature: MA Experiment ID: 20000347 Result: Up-regulated in Transcription
  misc_feature: MA Experiment 20000347 PARAMETER Experiment Name: At_2mM_SA_Sub_P Parameter: Age (day) Value: 14
  misc_feature: MA Experiment 20000347 PARAMETER Experiment Name: At_2mM_SA_Sub_P Parameter: Organism Value: A. thaliana
  misc_feature: MA Experiment 20000347 PARAMETER Experiment Name: At_2mM_SA_Sub_P Parameter: Plant Line Value: WS
  misc_feature: MA Experiment 20000347 PARAMETER Experiment Name: At_2mM_SA_Sub_P Parameter: Timepoint (hr) Value: 6
  misc_feature: MA Experiment 20000347 PARAMETER Experiment Name: At_2mM_SA_Sub_P Parameter: Tissue Value: Aerial
  misc_feature: MA Experiment 20000347 PARAMETER Experiment Name: At_2mM_SA_Sub_P Parameter: Treatment Value: 2mM SA vs. No Treatment
  misc_feature: MA Experiment ID: 20000355 Result: Down-regulated in Transcription
  misc_feature: MA Experiment 20000355 PARAMETER Experiment Name: At_Siliques_Sub_P Parameter: Age (day) Value: 21
  misc_feature: MA Experiment 20000355 PARAMETER Experiment Name: At_Siliques_Sub_P Parameter: Organism Value: A. thaliana
  misc_feature: MA Experiment 20000355 PARAMETER Experiment Name: At_Siliques_Sub_P Parameter: Plant Line Value: WS
  misc_feature: MA Experiment 20000355 PARAMETER Experiment Name: At_Siliques_Sub_P Parameter: Tissue Value: Less Than 5mm Siliques vs. Whole Plant
  misc_feature: MA Experiment ID: 20000440 Result: Down-regulated in Transcription
  misc_feature: MA Experiment 20000440 PARAMETER Experiment Name: At_Closed-Flower__Sub_P Parameter: Tissue Value: Closed Flower vs. Whole Plant

SEQ ID NO: 93740 - protein, 843 aa, Arabidopsis thaliana; identical to SEQ ID NO: 89984
  peptide (1)..(843): Ceres Seq. ID no. 12721680
  misc_feature (75)..(185): Pfam Name: D-mannose binding lectin Pfam Description: D-mannose binding lectin
  misc_feature (1)..(843): Homolog of NCBI NO: 30314606 NR Description: S receptor kinase [Brassica rapa]
  misc_feature (13)..(435): Homolog of NCBI NO: 15220351 NR Description: receptor kinase, putative; protein id:
  misc_feature (495)..(843): Homolog of NCBI NO: 15220351 NR Description: receptor kinase, putative; protein id:
  misc_feature (14)..(464): Homolog of NCBI NO: 30682152 NR Description: S-locus protein kinase, putative [Arabidopsis
  misc_feature (504)..(843): Homolog of NCBI NO: 30682152 NR Description: S-locus protein kinase, putative [Arabidopsis
  misc_feature (14)..(843): Homolog of NCBI NO: 30682149 NR Description: S-locus protein kinase, putative [Arabidopsis
  misc_feature (34)..(771): Homolog of NCBI NO: 25956275 NR Description: unnamed protein product [Lotus japonicus]
  misc_feature (37)..(606): Homolog of NCBI NO: 25956276 NR Description: similar to S-receptor kinase [Lotus japonicus]
  misc_feature (627)..(733): Homolog of NCBI NO: 25956276 NR Description: similar to S-receptor kinase [Lotus japonicus]
  misc_feature (11)..(458): Homolog of NCBI NO: 25287705 NR Description: protein T1F9.8 [imported] - Arabidopsis thaliana

SEQ ID NO: 93741 - protein, 683 aa, Arabidopsis thaliana; identical to SEQ ID NO: 89985
  peptide (1)..(683): Ceres Seq. ID no. 12721681
  misc_feature (181)..(289): Pfam Name: PAN domain Pfam Description: PAN domain
  misc_feature (1)..(683): Homolog of NCBI NO: 30314606 NR Description: S receptor kinase [Brassica rapa]
  misc_feature (1)..(275): Homolog of NCBI NO: 15220351 NR Description: receptor kinase, putative; protein id:
  misc_feature (335)..(683): Homolog of NCBI NO: 15220351 NR Description: receptor kinase, putative; protein id:
  misc_feature (1)..(304): Homolog of NCBI NO: 30682152 NR Description: S-locus protein kinase, putative [Arabidopsis
  misc_feature (344)..(683): Homolog of NCBI NO: 30682152 NR Description: S-locus protein kinase, putative [Arabidopsis
  misc_feature (1)..(683): Homolog of NCBI NO: 30682149 NR Description: S-locus protein kinase, putative [Arabidopsis
  misc_feature (1)..(611): Homolog of NCBI NO: 25956275 NR Description: unnamed protein product [Lotus japonicus]
  misc_feature (1)..(446): Homolog of NCBI NO: 25956276 NR Description: similar to S-receptor kinase [Lotus japonicus]
  misc_feature (467)..(573): Homolog of NCBI NO: 25956276 NR Description: similar to S-receptor kinase [Lotus japonicus]
  misc_feature (1)..(298): Homolog of NCBI NO: 25287705 NR Description: protein T1F9.8 [imported] - Arabidopsis thaliana

SEQ ID NO: 93742 - protein, 625 aa, Arabidopsis thaliana; identical to SEQ ID NO: 89986
  peptide (1)..(625): Ceres Seq. ID no. 12721682
  misc_feature (123)..(231): Pfam Name: PAN domain Pfam Description: PAN domain
  misc_feature (1)..(625): Homolog of NCBI NO: 30314606 NR Description: S receptor kinase [Brassica rapa]
  misc_feature (1)..(217): Homolog of NCBI NO: 15220351 NR Description: receptor kinase, putative; protein id:
  misc_feature (277)..(625): Homolog of NCBI NO: 15220351 NR Description: receptor kinase, putative; protein id:
  misc_feature (1)..(246): Homolog of NCBI NO: 30682152 NR Description: S-locus protein kinase, putative [Arabidopsis
  misc_feature (286)..(625): Homolog of NCBI NO: 30682152 NR Description: S-locus protein kinase, putative [Arabidopsis
  misc_feature (1)..(625): Homolog of NCBI NO: 30682149 NR Description: S-locus protein kinase, putative [Arabidopsis
  misc_feature (1)..(553): Homolog of NCBI NO: 25956275 NR Description: unnamed protein product [Lotus japonicus]
  misc_feature (1)..(388): Homolog of NCBI NO: 25956276 NR Description: similar to S-receptor kinase [Lotus japonicus]
  misc_feature (409)..(515): Homolog of NCBI NO: 25956276 NR Description: similar to S-receptor kinase [Lotus japonicus]
  misc_feature (1)..(240): Homolog of NCBI NO: 25287705 NR Description: protein T1F9.8 [imported] - Arabidopsis thaliana

SEQ ID NO: 93743 - DNA, 2773 bp, Arabidopsis thaliana; identical to SEQ ID NO: 89987
  misc_feature (1)..(2773): Ceres Seq. ID no. 12721683
  misc_feature: MA Experiment ID: 20000171 Result: Down-regulated in Transcription
  misc_feature: MA Experiment 20000171 PARAMETER Experiment Name: At_42deg_Heat_P Parameter: Age (day) Value: 14
  misc_feature: MA Experiment 20000171 PARAMETER Experiment Name: At_42deg_Heat_P Parameter: Organism Value: A. thaliana
  misc_feature: MA Experiment 20000171 PARAMETER Experiment Name: At_42deg_Heat_P Parameter: Plant Line Value: WS
  misc_feature: MA Experiment 20000171 PARAMETER Experiment Name: At_42deg_Heat_P Parameter: Temperature (deg C) Value: 42 vs. 22
  misc_feature: MA Experiment 20000171 PARAMETER Experiment Name: At_42deg_Heat_P Parameter: Timepoint (hr) Value: 1
  misc_feature: MA Experiment 20000171 PARAMETER Experiment Name: At_42deg_Heat_P Parameter: Tissue Value: Aerial
  misc_feature: MA Experiment ID: 20000173 Result: Down-regulated in Transcription
  misc_feature: MA Experiment 20000173 PARAMETER Experiment Name: At_42deg_Heat_P Parameter: Age (day) Value: 14
  misc_feature: MA Experiment 20000173 PARAMETER Experiment Name: At_42deg_Heat_P Parameter: Organism Value: A. thaliana
  misc_feature: MA Experiment 20000173 PARAMETER Experiment Name: At_42deg_Heat_P Parameter: Plant Line Value: WS
  misc_feature: MA Experiment 20000173 PARAMETER Experiment Name: At_42deg_Heat_P Parameter: Temperature (deg C) Value: 42 vs. 22
  misc_feature: MA Experiment 20000173 PARAMETER Experiment Name: At_42deg_Heat_P Parameter: Timepoint (hr) Value: 6
  misc_feature: MA Experiment 20000173 PARAMETER Experiment Name: At_42deg_Heat_P Parameter: Tissue Value: Aerial
  misc_feature: MA Experiment ID: 20000182 Result: Up-regulated in Transcription
  misc_feature: MA Experiment 20000182 PARAMETER Experiment Name: At_2mM_SA_P Parameter: Age (day) Value: 14
  misc_feature: MA Experiment 20000182 PARAMETER Experiment Name: At_2mM_SA_P Parameter: Organism Value: A. thaliana
  misc_feature: MA Experiment 20000182 PARAMETER Experiment Name: At_2mM_SA_P Parameter: Plant Line Value: WS
  misc_feature: MA Experiment 20000182 PARAMETER Experiment Name: At_2mM_SA_P Parameter: Timepoint (hr) Value: 6
  misc_feature: MA Experiment 20000182 PARAMETER Experiment Name: At_2mM_SA_P Parameter: Tissue Value: Aerial
  misc_feature: MA Experiment 20000182 PARAMETER Experiment Name: At_2mM_SA_P Parameter: Treatment Value: 2mM SA vs. No Treatment
  misc_feature: MA Experiment ID: 20000185 Result: Down-regulated in Transcription
  misc_feature: MA Experiment 20000185 PARAMETER Experiment Name: At_Roots__P Parameter: Age (day) Value: 7 vs. 21
  misc_feature: MA Experiment 20000185 PARAMETER Experiment Name: At_Roots__P Parameter: Organism Value: A. thaliana
  misc_feature: MA Experiment 20000185 PARAMETER Experiment Name: At_Roots__P Parameter: Tissue Value: Roots vs. Whole Plant
  misc_feature: MA Experiment ID: 20000234 Result: Down-regulated in Transcription
  misc_feature: MA Experiment 20000234 PARAMETER Experiment Name: At_Siliques_P Parameter: Age (day) Value: 21
  misc_feature: MA Experiment 20000234 PARAMETER Experiment Name: At_Siliques_P Parameter: Organism Value: A. thaliana
  misc_feature: MA Experiment 20000234 PARAMETER Experiment Name: At_Siliques_P Parameter: Plant Line Value: WS
  misc_feature: MA Experiment 20000234 PARAMETER Experiment Name: At_Siliques_P Parameter: Tissue Value: Less Than 5mm Siliques vs. Whole Plant
  misc_feature: MA Experiment ID: 20000235 Result: Down-regulated in Transcription
  misc_feature: MA Experiment 20000235 PARAMETER Experiment Name: At_Siliques_P Parameter: Age (day) Value: 21
  misc_feature: MA Experiment 20000235 PARAMETER Experiment Name: At_Siliques_P Parameter: Organism Value: A. thaliana
  misc_feature: MA Experiment 20000235 PARAMETER Experiment Name: At_Siliques_P Parameter: Plant Line Value: WS
  misc_feature: MA Experiment 20000235 PARAMETER Experiment Name: At_Siliques_P Parameter: Tissue Value: 5-10mm Siliques vs. Whole Plant
  misc_feature: MA Experiment ID: 20000264 Result: Down-regulated in Transcription
  misc_feature: MA Experiment 20000264 PARAMETER Experiment Name: At_Open_Flower_P Parameter: Age (day) Value: 21
  misc_feature: MA Experiment 20000264 PARAMETER Experiment Name: At_Open_Flower_P Parameter: Plant Line Value: WS
  misc_feature: MA Experiment 20000264 PARAMETER Experiment Name: At_Open_Flower_P Parameter: Tissue Value: Open Flower vs. Whole Plant
  misc_feature: MA Experiment ID: 20000265 Result: Down-regulated in Transcription
  misc_feature: MA Experiment 20000265 PARAMETER Experiment Name: At_Open_Flower_P Parameter: Age (day) Value: 21
  misc_feature: MA Experiment 20000265 PARAMETER Experiment Name: At_Open_Flower_P Parameter: Plant Line Value: WS
  misc_feature: MA Experiment 20000265 PARAMETER Experiment Name: At_Open_Flower_P Parameter: Tissue Value: Closed Flower vs. Whole Plant
  misc_feature: MA Experiment ID: 20000437 Result: Down-regulated in Transcription
  misc_feature: MA Experiment 20000437 PARAMETER Experiment Name: At_Drought_P Parameter: Age (day) Value: 8
  misc_feature: MA Experiment 20000437 PARAMETER Experiment Name: At_Drought_P Parameter: Organism Value: A. thaliana
  misc_feature: MA Experiment 20000437 PARAMETER Experiment Name: At_Drought_P Parameter: Plant Line Value: WS
  misc_feature: MA Experiment 20000437 PARAMETER Experiment Name: At_Drought_P Parameter: Timepoint (hr) Value: 24
  misc_feature: MA Experiment 20000437 PARAMETER Experiment Name: At_Drought_P Parameter: Tissue Value: Whole Plant
  misc_feature: MA Experiment 20000437 PARAMETER Experiment Name: At_Drought_P Parameter: Treatment Value: Drought vs. No Drought
  misc_feature: MA Experiment ID: 20000438 Result: Down-regulated in Transcription
  misc_feature: MA Experiment 20000438 PARAMETER Experiment Name: At_Shoots__P Parameter: Age (day) Value: 14
  misc_feature: MA Experiment 20000438 PARAMETER Experiment Name: At_Shoots__P Parameter: Tissue Value: Shoots vs. Whole Plant
  misc_feature: MA Experiment ID: 20000439 Result: Down-regulated in Transcription
  misc_feature: MA Experiment 20000439 PARAMETER Experiment Name: At_Roots__P Parameter: Age (day) Value: 14 vs. 21
  misc_feature: MA Experiment 20000439 PARAMETER Experiment Name: At_Roots__P Parameter: Organism Value: A. thaliana
  misc_feature: MA Experiment 20000439 PARAMETER Experiment Name: At_Roots__P Parameter: Tissue Value: Roots vs. Whole Plant
  misc_feature: MA Experiment ID: 20000573 Result: Down-regulated in Transcription
  misc_feature: MA Experiment 20000573 PARAMETER Experiment Name: At_100uM_ABA_Mutants__P Parameter: Organism Value: A. thaliana
  misc_feature: MA Experiment 20000573 PARAMETER Experiment Name: At_100uM_ABA_Mutants__P Parameter: Plant Line Value: CS22 vs. Ler wt
  misc_feature: MA Experiment 20000573 PARAMETER Experiment Name: At_100uM_ABA_Mutants__P Parameter: Timepoint (hr) Value: N/A
  misc_feature: MA Experiment 20000573 PARAMETER Experiment Name: At_100uM_ABA_Mutants__P Parameter: Tissue Value: Whole Plant
  misc_feature: MA Experiment 20000573 PARAMETER Experiment Name: At_100uM_ABA_Mutants__P Parameter: Treatment Value: None
  misc_feature: MA Experiment ID: 20000574 Result: Down-regulated in Transcription
  misc_feature: MA Experiment 20000574 PARAMETER Experiment Name: At_100uM_ABA_Mutants__P Parameter: Organism Value: A. thaliana
  misc_feature: MA Experiment 20000574 PARAMETER Experiment Name: At_100uM_ABA_Mutants__P Parameter: Plant Line Value: CS23 vs. Ler wt
  misc_feature: MA Experiment 20000574 PARAMETER Experiment Name: At_100uM_ABA_Mutants__P Parameter: Timepoint (hr) Value: N/A
  misc_feature: MA Experiment 20000574 PARAMETER Experiment Name: At_100uM_ABA_Mutants__P Parameter: Tissue Value: Whole Plant
  misc_feature: MA Experiment 20000574 PARAMETER Experiment Name: At_100uM_ABA_Mutants__P Parameter: Treatment Value: None
  misc_feature: MA Experiment ID: 20000794 Result: Down-regulated in Transcription
  misc_feature: MA Experiment 20000794 PARAMETER Experiment Name: At_Petals_P Parameter: Age (day) Value: 23-25 days
  misc_feature: MA Experiment 20000794 PARAMETER Experiment Name: At_Petals_P Parameter: Plant Line Value: WS
  misc_feature: MA Experiment 20000794 PARAMETER Experiment Name: At_Petals_P Parameter: Tissue Value: Petals vs. Whole plant
  misc_feature: MA Experiment ID: 20001248 Result: Down-regulated in Transcription
  misc_feature: MA Experiment 20001248 PARAMETER Experiment Name: At_Far-red-induction_P Parameter: Age (day) Value: 7
  misc_feature: MA Experiment 20001248 PARAMETER Experiment Name: At_Far-red-induction_P Parameter: Light Value: Far-red vs. White
  misc_feature: MA Experiment 20001248 PARAMETER Experiment Name: At_Far-red-induction_P Parameter: Organism Value: A. thaliana
  misc_feature: MA Experiment 20001248 PARAMETER Experiment Name: At_Far-red-induction_P Parameter: Plant Line Value: Columbia
  misc_feature: MA Experiment 20001248 PARAMETER Experiment Name: At_Far-red-induction_P Parameter: Timepoint (hr) Value: 4
  misc_feature: MA Experiment 20001248 PARAMETER Experiment Name: At_Far-red-induction_P Parameter: Tissue Value: Whole Plant
  misc_feature: MA Experiment ID: 20001450 Result: Down-regulated in Transcription
  misc_feature: MA Experiment 20001450 PARAMETER Experiment Name: At_Far-red-induction_P Parameter: Age (day) Value: 7
  misc_feature: MA Experiment 20001450 PARAMETER Experiment Name: At_Far-red-induction_P Parameter: Light Value: Far-red vs. White
  misc_feature: MA Experiment 20001450 PARAMETER Experiment Name: At_Far-red-induction_P Parameter: Organism Value: A. thaliana
  misc_feature: MA Experiment 20001450 PARAMETER Experiment Name: At_Far-red-induction_P Parameter: Plant Line Value: Columbia
  misc_feature: MA Experiment 20001450 PARAMETER Experiment Name: At_Far-red-induction_P Parameter: Timepoint (hr) Value: 8
  misc_feature: MA Experiment 20001450 PARAMETER Experiment Name: At_Far-red-induction_P Parameter: Tissue Value: Whole Plant
  misc_feature: MA Experiment ID: 20001557 Result: Down-regulated in Transcription
  misc_feature: MA Experiment 20001557 PARAMETER Experiment Name: At_Drought_Soil_Dry_P Parameter: Age (day) Value: 27
  misc_feature: MA Experiment 20001557 PARAMETER Experiment Name: At_Drought_Soil_Dry_P Parameter: Organism Value: A. thaliana
  misc_feature: MA Experiment 20001557 PARAMETER Experiment Name: At_Drought_Soil_Dry_P Parameter: Plant Line Value: WS
  misc_feature: MA Experiment 20001557 PARAMETER Experiment Name: At_Drought_Soil_Dry_P Parameter: Post Timepoint (hr) Value: 3
  misc_feature: MA Experiment 20001557 PARAMETER Experiment Name: At_Drought_Soil_Dry_P Parameter: Post-Treatment Value: Re-Water vs. No Drought
  misc_feature: MA Experiment 20001557 PARAMETER Experiment Name: At_Drought_Soil_Dry_P Parameter: Timepoint (day) Value: 13
  misc_feature: MA Experiment 20001557 PARAMETER Experiment Name: At_Drought_Soil_Dry_P Parameter: Treatment Value: Drought vs. No Drought
  misc_feature: MA Experiment ID: 20001558 Result: Down-regulated in Transcription
  misc_feature: MA Experiment 20001558 PARAMETER Experiment Name: At_Drought_Soil_Dry_P Parameter: Age (day) Value: 27
  misc_feature: MA Experiment 20001558 PARAMETER Experiment Name: At_Drought_Soil_Dry_P Parameter: Organism Value: A. thaliana
  misc_feature: MA Experiment 20001558 PARAMETER Experiment Name: At_Drought_Soil_Dry_P Parameter: Plant Line Value: WS
  misc_feature: MA Experiment 20001558 PARAMETER Experiment Name: At_Drought_Soil_Dry_P Parameter: Post Timepoint (hr) Value: 6
  misc_feature: MA Experiment 20001558 PARAMETER Experiment Name: At_Drought_Soil_Dry_P Parameter: Post-Treatment Value: Re-Water vs. No Drought
  misc_feature: MA Experiment 20001558 PARAMETER Experiment Name: At_Drought_Soil_Dry_P Parameter: Timepoint (day) Value: 13
  misc_feature: MA Experiment 20001558 PARAMETER Experiment Name: At_Drought_Soil_Dry_P Parameter: Treatment Value: Drought vs. No Drought
  misc_feature: MA Experiment ID: 20001559 Result: Down-regulated in Transcription
  misc_feature: MA Experiment 20001559 PARAMETER Experiment Name: At_Drought_Soil_Dry_P Parameter: Age (day) Value: 28
  misc_feature: MA Experiment 20001559 PARAMETER Experiment Name: At_Drought_Soil_Dry_P Parameter: Organism Value: A. thaliana
  misc_feature: MA Experiment 20001559 PARAMETER Experiment Name: At_Drought_Soil_Dry_P Parameter: Plant Line Value: WS
  misc_feature: MA Experiment 20001559 PARAMETER Experiment Name: At_Drought_Soil_Dry_P Parameter: Post Timepoint (hr) Value: 29
  misc_feature: MA Experiment 20001559 PARAMETER Experiment Name: At_Drought_Soil_Dry_P Parameter: Post-Treatment Value: Re-Water vs. No Drought
  misc_feature: MA Experiment 20001559 PARAMETER Experiment Name: At_Drought_Soil_Dry_P Parameter: Timepoint (day) Value: 14
  misc_feature: MA Experiment 20001559 PARAMETER Experiment Name: At_Drought_Soil_Dry_P Parameter: Treatment Value: Drought vs. No Drought
  misc_feature: MA Experiment ID: 20001560 Result: Down-regulated in Transcription
  misc_feature: MA Experiment 20001560 PARAMETER Experiment Name: At_Drought_Soil_Dry_P Parameter: Age (day) Value: 28
  misc_feature: MA Experiment 20001560 PARAMETER Experiment Name: At_Drought_Soil_Dry_P Parameter: Organism Value: A. thaliana
  misc_feature: MA Experiment 20001560 PARAMETER Experiment Name: At_Drought_Soil_Dry_P Parameter: Plant Line Value: WS
  misc_feature: MA Experiment 20001560 PARAMETER Experiment Name: At_Drought_Soil_Dry_P Parameter: Post Timepoint (hr) Value: None
  misc_feature: MA Experiment 20001560 PARAMETER Experiment Name: At_Drought_Soil_Dry_P Parameter: Post-Treatment Value: None
  misc_feature: MA Experiment 20001560 PARAMETER Experiment Name: At_Drought_Soil_Dry_P Parameter: Timepoint (day) Value: 14
  misc_feature: MA Experiment 20001560 PARAMETER Experiment Name: At_Drought_Soil_Dry_P Parameter: Treatment Value: Drought vs. No Drought
  misc_feature: MA Experiment ID: 20001904 Result: Down-regulated in Transcription
  misc_feature: MA Experiment 20001904 PARAMETER Experiment Name: At_Drought_Reproduction_P Parameter: Age (day) Value: 37
  misc_feature: MA Experiment 20001904 PARAMETER Experiment Name: At_Drought_Reproduction_P Parameter: Organism Value: A. thaliana
  misc_feature: MA Experiment 20001904 PARAMETER Experiment Name: At_Drought_Reproduction_P Parameter: Plant Line Value: WS
  misc_feature: MA Experiment 20001904 PARAMETER Experiment Name: At_Drought_Reproduction_P Parameter: Timepoint (day) Value: 7
  misc_feature: MA Experiment 20001904 PARAMETER Experiment Name: At_Drought_Reproduction_P Parameter: Tissue Value: Rosettes
  misc_feature: MA Experiment 20001904 PARAMETER Experiment Name: At_Drought_Reproduction_P Parameter: Treatment Value: Drought vs. No Drought
  misc_feature: MA Experiment ID: 20001905 Result: Down-regulated in Transcription
  misc_feature: MA Experiment 20001905 PARAMETER Experiment Name: At_Drought_Reproduction_P Parameter: Age (day) Value: 40
  misc_feature: MA Experiment 20001905 PARAMETER Experiment Name: At_Drought_Reproduction_P Parameter: Organism Value: A. thaliana
  misc_feature: MA Experiment 20001905 PARAMETER Experiment Name: At_Drought_Reproduction_P Parameter: Plant Line Value: WS
  misc_feature: MA Experiment 20001905 PARAMETER Experiment Name: At_Drought_Reproduction_P Parameter: Timepoint (day) Value: 10
  misc_feature: MA Experiment 20001905 PARAMETER Experiment Name: At_Drought_Reproduction_P Parameter: Tissue Value: Rosettes
  misc_feature: MA Experiment 20001905 PARAMETER Experiment Name: At_Drought_Reproduction_P Parameter: Treatment Value: Drought vs. No Drought
  misc_feature: MA Experiment ID: 20001906 Result: Down-regulated in Transcription
  misc_feature: MA Experiment 20001906 PARAMETER Experiment Name: At_Drought_Reproduction_P Parameter: Age (day) Value: 35
  misc_feature: MA Experiment 20001906 PARAMETER Experiment Name: At_Drought_Reproduction_P Parameter: Organism Value: A. thaliana
  misc_feature: MA Experiment 20001906 PARAMETER Experiment Name: At_Drought_Reproduction_P Parameter: Plant Line Value: WS
  misc_feature: MA Experiment 20001906 PARAMETER Experiment Name: At_Drought_Reproduction_P Parameter: Timepoint (day) Value: 5
  misc_feature: MA Experiment 20001906 PARAMETER Experiment Name: At_Drought_Reproduction_P Parameter: Tissue Value: Siliques
  misc_feature: MA Experiment 20001906 PARAMETER Experiment Name: At_Drought_Reproduction_P Parameter: Treatment Value: Drought vs. No Drought

SEQ ID NO: 93744 - protein, 847 aa, Arabidopsis thaliana; identical to SEQ ID NO: 89988
  peptide (1)..(847): Ceres Seq. ID no. 12721684
  misc_feature (75)..(190): Pfam Name: D-mannose binding lectin Pfam Description: D-mannose binding lectin
  misc_feature (1)..(847): Homolog of NCBI NO: 1094411 NR Description: S-receptor kinase
  misc_feature (13)..(441): Homolog of NCBI NO: 15220351 NR Description: receptor kinase, putative; protein id:
  misc_feature (495)..(847): Homolog of NCBI NO: 15220351 NR Description: receptor kinase, putative; protein id:
  misc_feature (37)..(610): Homolog of NCBI NO: 25956276 NR Description: similar to S-receptor kinase [Lotus japonicus]
  misc_feature (631)..(737): Homolog of NCBI NO: 25956276 NR Description: similar to S-receptor kinase [Lotus japonicus]
  misc_feature (144)..(847): Homolog of NCBI NO: 25956275 NR Description: unnamed protein product [Lotus japonicus]
  misc_feature (13)..(501): Homolog of NCBI NO: 25287705 NR Description: protein T1F9.8 [imported] - Arabidopsis thaliana
  misc_feature (508)..(740): Homolog of NCBI NO: 25287705 NR Description: protein T1F9.8 [imported] - Arabidopsis thaliana
  misc_feature (61)..(499): Homolog of NCBI NO: 21741575 NR Description: OSJNBa0094O15.5 [Oryza sativa (japonica
  misc_feature (516)..(810): Homolog of NCBI NO: 21741575 NR Description: OSJNBa0094O15.5 [Oryza sativa (japonica

SEQ ID NO: 93745 - protein, 683 aa, Arabidopsis thaliana; identical to SEQ ID NO: 89989
  peptide (1)..(683): Ceres Seq. ID no. 12721685
  misc_feature (181)..(289): Pfam Name: PAN domain Pfam Description: PAN domain
  misc_feature (1)..(683): Homolog of NCBI NO: 1094411 NR Description: S-receptor kinase
  misc_feature (1)..(277): Homolog of NCBI NO: 15220351 NR Description: receptor kinase, putative; protein id:
  misc_feature (331)..(683): Homolog of NCBI NO: 15220351 NR Description: receptor kinase, putative; protein id:
  misc_feature (1)..(446): Homolog of NCBI NO: 25956276 NR Description: similar to S-receptor kinase [Lotus japonicus]
  misc_feature (467)..(573): Homolog of NCBI NO: 25956276 NR Description: similar to S-receptor kinase [Lotus japonicus]
  misc_feature (1)..(683): Homolog of NCBI NO: 25956275 NR Description: unnamed protein product [Lotus japonicus]
  misc_feature (1)..(337): Homolog of NCBI NO: 25287705 NR Description: protein T1F9.8 [imported] - Arabidopsis thaliana
  misc_feature (344)..(576): Homolog of NCBI NO: 25287705 NR Description: protein T1F9.8 [imported] - Arabidopsis thaliana
  misc_feature (1)..(335): Homolog of NCBI NO: 21741575 NR Description: OSJNBa0094O15.5 [Oryza sativa (japonica
  misc_feature (352)..(646): Homolog of NCBI NO: 21741575 NR Description: OSJNBa0094O15.5 [Oryza sativa (japonica

SEQ ID NO: 93746 - protein, 681 aa, Arabidopsis thaliana; identical to SEQ ID NO: 89990
  peptide (1)..(681): Ceres Seq. ID no. 12721686
  misc_feature (179)..(287): Pfam Name: PAN domain Pfam Description: PAN domain
  misc_feature (1)..(681): Homolog of NCBI NO: 1094411 NR Description: S-receptor kinase
  misc_feature (1)..(275): Homolog of NCBI NO: 15220351 NR Description: receptor kinase, putative; protein id:
  misc_feature (329)..(681): Homolog of NCBI NO: 15220351 NR Description: receptor kinase, putative; protein id:
  misc_feature (1)..(444): Homolog of NCBI NO: 25956276 NR Description: similar to S-receptor kinase [Lotus japonicus]
  misc_feature (465)..(571): Homolog of NCBI NO: 25956276 NR Description: similar to S-receptor kinase [Lotus japonicus]
  misc_feature (1)..(681): Homolog of NCBI NO: 25956275 NR Description: unnamed protein product [Lotus japonicus]
  misc_feature (1)..(335): Homolog of NCBI NO: 25287705 NR Description: protein T1F9.8 [imported] - Arabidopsis thaliana
  misc_feature (342)..(574): Homolog of NCBI NO: 25287705 NR Description: protein T1F9.8 [imported] - Arabidopsis thaliana
  misc_feature (1)..(333): Homolog of NCBI NO: 21741575 NR Description: OSJNBa0094O15.5 [Oryza sativa (japonica
  misc_feature (350)..(644): Homolog of NCBI NO: 21741575 NR Description: OSJNBa0094O15.5 [Oryza sativa (japonica

SEQ ID NO: 93747 - DNA, 2067 bp, Arabidopsis thaliana; identical to SEQ ID NO: 89991
  misc_feature (1)..(2067): Ceres Seq. ID no. 12721687
  misc_feature: MA Experiment ID: 20000179 Result: Up-regulated in Transcription
  misc_feature: MA Experiment 20000179 PARAMETER Experiment Name: At_Germinating_Seeds_P Parameter: Age (hr) Value: 6 vs. 0
  misc_feature: MA Experiment 20000179 PARAMETER Experiment Name: At_Germinating_Seeds_P Parameter: Tissue Value: Germinating Seeds
  misc_feature: MA Experiment ID: 20000185 Result: Up-regulated in Transcription
  misc_feature: MA Experiment 20000185 PARAMETER Experiment Name: At_Roots__P Parameter: Age (day) Value: 7 vs. 21
  misc_feature: MA Experiment 20000185 PARAMETER Experiment Name: At_Roots__P Parameter: Organism Value: A. thaliana
  misc_feature: MA Experiment 20000185 PARAMETER Experiment Name: At_Roots__P Parameter: Tissue Value: Roots vs. Whole Plant
  misc_feature: MA Experiment ID: 20000213 Result: Up-regulated in Transcription
  misc_feature: MA Experiment 20000213 PARAMETER Experiment Name: At_4deg_Cold_P Parameter: Timepoint (hr) Value: 2
  misc_feature: MA Experiment ID: 20000439 Result: Up-regulated in Transcription
  misc_feature: MA Experiment 20000439 PARAMETER Experiment Name: At_Roots__P Parameter: Age (day) Value: 14 vs. 21
  misc_feature: MA Experiment 20000439 PARAMETER Experiment Name: At_Roots__P Parameter: Organism Value: A. thaliana
  misc_feature: MA Experiment 20000439 PARAMETER Experiment Name: At_Roots__P Parameter: Tissue Value: Roots vs. Whole Plant
  misc_feature: MA Experiment ID: 20000794 Result: Up-regulated in Transcription
  misc_feature: MA Experiment 20000794 PARAMETER Experiment Name: At_Petals_P Parameter: Age (day) Value: 23-25 days
  misc_feature: MA Experiment 20000794 PARAMETER Experiment Name: At_Petals_P Parameter: Plant Line Value: WS
  misc_feature: MA Experiment 20000794 PARAMETER Experiment Name: At_Petals_P Parameter: Tissue Value: Petals vs. Whole plant
  misc_feature: MA Experiment ID: 20001248 Result: Down-regulated in Transcription
  misc_feature: MA Experiment 20001248 PARAMETER Experiment Name: At_Far-red-induction_P Parameter: Age (day) Value: 7
  misc_feature: MA Experiment 20001248 PARAMETER Experiment Name: At_Far-red-induction_P Parameter: Light Value: Far-red vs. White
  misc_feature: MA Experiment 20001248 PARAMETER Experiment Name: At_Far-red-induction_P Parameter: Organism Value: A. thaliana
  misc_feature: MA Experiment 20001248 PARAMETER Experiment Name: At_Far-red-induction_P Parameter: Plant Line Value: Columbia
  misc_feature: MA Experiment 20001248 PARAMETER Experiment Name: At_Far-red-induction_P Parameter: Timepoint (hr) Value: 4
  misc_feature: MA Experiment 20001248 PARAMETER Experiment Name: At_Far-red-induction_P Parameter: Tissue Value: Whole Plant
  misc_feature: MA Experiment ID: 20001451 Result: Down-regulated in Transcription
  misc_feature: MA Experiment 20001451 PARAMETER Experiment Name: At_Far-red-induction_P Parameter: Age (day) Value: 7
  misc_feature: MA Experiment 20001451 PARAMETER Experiment Name: At_Far-red-induction_P Parameter: Light Value: Far-red vs. White
  misc_feature: MA Experiment 20001451 PARAMETER Experiment Name: At_Far-red-induction_P Parameter: Organism Value: A. thaliana
  misc_feature: MA Experiment 20001451 PARAMETER Experiment Name: At_Far-red-induction_P Parameter: Plant Line Value: Columbia
  misc_feature: MA Experiment 20001451 PARAMETER Experiment Name: At_Far-red-induction_P Parameter: Timepoint (hr) Value: 24
  misc_feature: MA Experiment 20001451 PARAMETER Experiment Name: At_Far-red-induction_P Parameter: Tissue Value: Whole Plant
  misc_feature: MA Experiment ID: 20001557 Result: Up-regulated in Transcription
  misc_feature: MA Experiment 20001557 PARAMETER Experiment Name: At_Drought_Soil_Dry_P Parameter: Age (day) Value: 27
  misc_feature: MA Experiment 20001557 PARAMETER Experiment Name: At_Drought_Soil_Dry_P Parameter: Organism Value: A. thaliana
  misc_feature: MA Experiment 20001557 PARAMETER Experiment Name: At_Drought_Soil_Dry_P Parameter: Plant Line Value: WS
  misc_feature: MA Experiment 20001557 PARAMETER Experiment Name: At_Drought_Soil_Dry_P Parameter: Post Timepoint (hr) Value: 3
  misc_feature: MA Experiment 20001557 PARAMETER Experiment Name: At_Drought_Soil_Dry_P Parameter: Post-Treatment Value: Re-Water vs. No Drought
  misc_feature: MA Experiment 20001557 PARAMETER Experiment Name: At_Drought_Soil_Dry_P Parameter: Timepoint (day) Value: 13
  misc_feature: MA Experiment 20001557 PARAMETER Experiment Name: At_Drought_Soil_Dry_P Parameter: Treatment Value: Drought vs. No Drought
  misc_feature: MA Experiment ID: 20001904 Result: Up-regulated in Transcription
  misc_feature: MA Experiment 20001904 PARAMETER Experiment Name: At_Drought_Reproduction_P Parameter: Age (day) Value: 37
  misc_feature: MA Experiment 20001904 PARAMETER Experiment Name: At_Drought_Reproduction_P Parameter: Organism Value: A. thaliana
  misc_feature: MA Experiment 20001904 PARAMETER Experiment Name: At_Drought_Reproduction_P Parameter: Plant Line Value: WS
  misc_feature: MA Experiment 20001904 PARAMETER Experiment Name: At_Drought_Reproduction_P Parameter: Timepoint (day) Value: 7
  misc_feature: MA Experiment 20001904 PARAMETER Experiment Name: At_Drought_Reproduction_P Parameter: Tissue Value: Rosettes
  misc_feature: MA Experiment 20001904 PARAMETER Experiment Name: At_Drought_Reproduction_P Parameter: Treatment Value: Drought vs. No Drought
  misc_feature: MA Experiment ID: 20001905 Result: Up-regulated in Transcription
  misc_feature: MA Experiment 20001905 PARAMETER Experiment Name: At_Drought_Reproduction_P Parameter: Age (day) Value: 40
  misc_feature: MA Experiment 20001905 PARAMETER Experiment Name: At_Drought_Reproduction_P Parameter: Organism Value: A. thaliana
  misc_feature: MA Experiment 20001905 PARAMETER Experiment Name: At_Drought_Reproduction_P Parameter: Plant Line Value: WS
  misc_feature: MA Experiment 20001905 PARAMETER Experiment Name: At_Drought_Reproduction_P Parameter: Timepoint (day) Value: 10
  misc_feature: MA Experiment 20001905 PARAMETER Experiment Name: At_Drought_Reproduction_P Parameter: Tissue Value: Rosettes
  misc_feature: MA Experiment 20001905 PARAMETER Experiment Name: At_Drought_Reproduction_P Parameter: Treatment Value: Drought vs. No Drought
  misc_feature: MA Experiment ID: 20001906 Result: Up-regulated in Transcription
  misc_feature: MA Experiment 20001906 PARAMETER Experiment Name: At_Drought_Reproduction_P Parameter: Age (day) Value: 35
  misc_feature: MA Experiment 20001906 PARAMETER Experiment Name: At_Drought_Reproduction_P Parameter: Organism Value: A. thaliana
  misc_feature: MA Experiment 20001906 PARAMETER Experiment Name: At_Drought_Reproduction_P Parameter: Plant Line Value: WS
  misc_feature: MA Experiment 20001906 PARAMETER Experiment Name: At_Drought_Reproduction_P Parameter: Timepoint (day) Value: 5
  misc_feature: MA Experiment 20001906 PARAMETER Experiment Name: At_Drought_Reproduction_P Parameter: Tissue Value: Siliques
  misc_feature: MA Experiment 20001906 PARAMETER Experiment Name: At_Drought_Reproduction_P Parameter: Treatment Value: Drought vs. No Drought

SEQ ID NO: 93748 - protein, 497 aa, Arabidopsis thaliana; identical to SEQ ID NO: 89992
  peptide (1)..(497): Ceres Seq. ID no. 12721688
  misc_feature (38)..(394): Pfam Name: Flavin containing amine oxidoreductase Pfam Description: Flavin containing amine oxidoreductase
  misc_feature (1)..(497): Homolog of NCBI NO: 15218830 NR Description: polyamine oxidase, putative; protein id: supported by cDNA: gi_13877614 [Arabidopsis thaliana] putative protein kinase gb|AAD22129 [Arabidopsis thaliana]
  misc_feature (1)..(497): Homolog of NCBI NO: 13877615 NR Description: putative protein kinase gb|AAD22129 [Arabidopsis
  misc_feature (1)..(394): Homolog of NCBI NO: 25404949 NR Description: protein F1E22.18 [imported] - Arabidopsis >gi|6686400|gb|AAF23834.1|AC007234_6 F1E22.18 [Arabidopsis
  misc_feature (391)..(497): Homolog of NCBI NO: 25404949 NR Description: protein F1E22.18 [imported] - Arabidopsis >gi|6686400|gb|AAF23834.1|AC007234_6 F1E22.18 [Arabidopsis
  misc_feature (1)..(497): Homolog of NCBI NO: 15224204 NR Description: putative amine oxidase; protein id: At2g43020.1, by cDNA: gi_18650597 [Arabidopsis thaliana]
  misc_feature (1)..(497): Homolog of NCBI NO: 18650598 NR Description: At2g43020/MFL8.12 [Arabidopsis thaliana]
  misc_feature (19)..(497): Homolog of NCBI NO: 15231622 NR Description: putative protein; protein id: At3g59050.1, by cDNA: 16421., supported by cDNA: gi_18086417 [Arabidopsis
  misc_feature (19)..(497): Homolog of NCBI NO: 21553762 NR Description: putative amine oxidase [Arabidopsis thaliana]
  misc_feature (29)..(497): Homolog of NCBI NO: 38344167 NR Description: OSJNBa0053K19.6 [Oryza sativa (japonica
  misc_feature (187)..(453): Homolog of NCBI NO: 22213173 NR Description: putative polyamine oxidase, 3'-partial [Oryza

SEQ ID NO: 93749 - protein, 477 aa, Arabidopsis thaliana; identical to SEQ ID NO: 89993
  peptide (1)..(477): Ceres Seq. ID no. 12721689
  misc_feature (18)..(374): Pfam Name: Flavin containing amine oxidoreductase Pfam Description: Flavin containing amine oxidoreductase
  misc_feature (1)..(477): Homolog of NCBI NO: 15218830 NR Description: polyamine oxidase, putative; protein id: supported by cDNA: gi_13877614 [Arabidopsis thaliana] putative protein kinase gb|AAD22129 [Arabidopsis thaliana]
  misc_feature (1)..(477): Homolog of NCBI NO: 13877615 NR Description: putative protein kinase gb|AAD22129 [Arabidopsis
  misc_feature (1)..(374): Homolog of NCBI NO: 25404949 NR Description: protein F1E22.18 [imported] - Arabidopsis >gi|6686400|gb|AAF23834.1|AC007234_6 F1E22.18 [Arabidopsis
  misc_feature (371)..(477): Homolog of NCBI NO: 25404949 NR Description: protein F1E22.18 [imported] - Arabidopsis >gi|6686400|gb|AAF23834.1|AC007234_6 F1E22.18 [Arabidopsis
  misc_feature (1)..(477): Homolog of NCBI NO: 15224204 NR Description: putative amine oxidase; protein id: At2g43020.1, by cDNA: gi_18650597 [Arabidopsis thaliana]
  misc_feature (1)..(477): Homolog of NCBI NO: 18650598 NR Description: At2g43020/MFL8.12 [Arabidopsis thaliana]
  misc_feature (1)..(477): Homolog of NCBI NO: 15231622 NR Description: putative protein; protein id: At3g59050.1, by cDNA: 16421., supported by cDNA: gi_18086417 [Arabidopsis
  misc_feature (1)..(477): Homolog of NCBI NO: 21553762 NR Description: putative amine oxidase [Arabidopsis thaliana]
  misc_feature (9)..(477): Homolog of NCBI NO: 38344167 NR Description: OSJNBa0053K19.6 [Oryza sativa (japonica
  misc_feature (167)..(433): Homolog of NCBI NO: 22213173 NR Description: putative polyamine oxidase, 3'-partial [Oryza

SEQ ID NO: 93750 - protein, 419 aa, Arabidopsis thaliana; identical to SEQ ID NO: 89994
  peptide (1)..(419): Ceres Seq. ID no. 12721690
  misc_feature (1)..(316): Pfam Name: Flavin containing amine oxidoreductase Pfam Description: Flavin containing amine oxidoreductase
  misc_feature (1)..(419): Homolog of NCBI NO: 15218830 NR Description: polyamine oxidase, putative; protein id: supported by cDNA: gi_13877614 [Arabidopsis thaliana] putative protein kinase gb|AAD22129 [Arabidopsis thaliana]
  misc_feature (1)..(419): Homolog of NCBI NO: 13877615 NR Description: putative protein kinase gb|AAD22129 [Arabidopsis
  misc_feature (1)..(316): Homolog of NCBI NO: 25404949 NR Description: protein F1E22.18 [imported] - Arabidopsis >gi|6686400|gb|AAF23834.1|AC007234_6 F1E22.18 [Arabidopsis
  misc_feature (313)..(419): Homolog of NCBI NO: 25404949 NR Description: protein F1E22.18 [imported] - Arabidopsis >gi|6686400|gb|AAF23834.1|AC007234_6 F1E22.18 [Arabidopsis
  misc_feature (1)..(419): Homolog of NCBI NO: 15224204 NR Description: putative amine oxidase; protein id: At2g43020.1, by cDNA: gi_18650597 [Arabidopsis thaliana]
  misc_feature (1)..(419): Homolog of NCBI NO: 18650598 NR Description: At2g43020/MFL8.12 [Arabidopsis thaliana]
  misc_feature (1)..(419): Homolog of NCBI NO: 15231622 NR Description: putative protein; protein id: At3g59050.1, by cDNA: 16421., supported by cDNA: gi_18086417 [Arabidopsis
  misc_feature (1)..(419): Homolog of NCBI NO: 21553762 NR Description: putative amine oxidase [Arabidopsis thaliana]
  misc_feature (1)..(419): Homolog of NCBI NO: 38344167 NR Description: OSJNBa0053K19.6 [Oryza sativa (japonica
  misc_feature (109)..(375): Homolog of NCBI NO: 22213173 NR Description: putative polyamine oxidase, 3'-partial [Oryza

SEQ ID NO: 93751 - DNA, 642 bp, Arabidopsis thaliana; identical to SEQ ID NO: 89995
  misc_feature (1)..(642): Ceres Seq. ID no. 12721749
  misc_feature: MA Experiment ID: 20000314 Result: Down-regulated in Transcription
  misc_feature: MA Experiment 20000314 PARAMETER Experiment Name: At_14day_Shoots-Roots_Sub_P Parameter: Age (day) Value: 14
  misc_feature: MA Experiment 20000314 PARAMETER Experiment Name: At_14day_Shoots-Roots_Sub_P Parameter: Organism Value: A. thaliana
  misc_feature: MA Experiment 20000314 PARAMETER Experiment Name: At_14day_Shoots-Roots_Sub_P Parameter: Plant Line Value: WS
  misc_feature: MA Experiment 20000314 PARAMETER Experiment Name: At_14day_Shoots-Roots_Sub_P Parameter: Tissue Value: Roots vs. Whole Plant
  misc_feature: MA Experiment ID: 20000315 Result: Up-regulated in Transcription
  misc_feature: MA Experiment 20000315 PARAMETER Experiment Name: At_14day_Shoots-Roots_Sub_P Parameter: Age (day) Value: 14
  misc_feature: MA Experiment 20000315 PARAMETER Experiment Name: At_14day_Shoots-Roots_Sub_P Parameter: Organism Value: A. thaliana
  misc_feature: MA Experiment 20000315 PARAMETER Experiment Name: At_14day_Shoots-Roots_Sub_P Parameter: Plant Line Value: WS
  misc_feature: MA Experiment 20000315 PARAMETER Experiment Name: At_14day_Shoots-Roots_Sub_P Parameter: Tissue Value: Shoots vs. Whole Plant
  misc_feature: MA Experiment ID: 20000355 Result: Down-regulated in Transcription
  misc_feature: MA Experiment 20000355 PARAMETER Experiment Name: At_Siliques_Sub_P Parameter: Age (day) Value: 21
  misc_feature: MA Experiment 20000355 PARAMETER Experiment Name: At_Siliques_Sub_P Parameter: Organism Value: A. thaliana
  misc_feature: MA Experiment 20000355 PARAMETER Experiment Name: At_Siliques_Sub_P Parameter: Plant Line Value: WS
  misc_feature: MA Experiment 20000355 PARAMETER Experiment Name: At_Siliques_Sub_P Parameter: Tissue Value: Less Than 5mm Siliques vs. Whole Plant
  misc_feature: MA Experiment ID: 20000440 Result: Down-regulated in Transcription
  misc_feature: MA Experiment 20000440 PARAMETER Experiment Name: At_Closed-Flower__Sub_P Parameter: Tissue Value: Closed Flower vs. Whole Plant

SEQ ID NO: 93752 - protein, 155 aa, Arabidopsis thaliana; identical to SEQ ID NO: 89996
  peptide (1)..(155): Ceres Seq. ID no. 12721750
  misc_feature (46)..(91): Pfam Name: Plant thionin Pfam Description: Plant thionin
  misc_feature (22)..(155): Homolog of NCBI NO: 15218931 NR Description: thionin, putative; protein id: At1g66100.1, by cDNA: gi_14190504, supported by cDNA: gi_15809773 [Arabidopsis
  misc_feature (22)..(155): Homolog of NCBI NO: 1181533 NR Description: thionin >gi|1586834|prf||2204399B thionin
  misc_feature (22)..(155): Homolog of NCBI NO: 1076466 NR Description: thionin variant Thi2Ca2 - Abyssinian crambe crambin precursor=thionin variant Thi2Ca2 [Crambe abyssinica,
  misc_feature (22)..(155): Homolog of NCBI NO: 15239447 NR Description: thionin Thi2.2; protein id: At5g36910.1, by cDNA: 1523., supported by cDNA: gi_1181532 [Arabidopsis
  misc_feature (22)..(155): Homolog of NCBI NO: 21553588 NR Description: thionin Thi2.2 [Arabidopsis thaliana]
  misc_feature (22)..(155): Homolog of NCBI NO: 1076462 NR Description: thionin variant Thi2Ca1 - Abyssinian crambe
  misc_feature (22)..(155): Homolog of NCBI NO: 1076463 NR Description: thionin variant Thi2Ca10 - Abyssinian crambe crambin precursor=thionin variant Thi2Ca10 [Crambe abyssinica,
  misc_feature (22)..(155): Homolog of NCBI NO: 6650328 NR Description: thionin [Brassica rapa subsp. pekinensis]
  misc_feature (22)..(155): Homolog of NCBI NO: 1076467 NR Description: thionin variant Thi2Ca3 - Abyssinian crambe crambin precursor=thionin variant Thi2Ca3 [Crambe abyssinica,
  misc_feature (22)..(155): Homolog of NCBI NO: 1076465 NR Description: thionin variant Thi2Ca12 - Abyssinian crambe crambin precursor=thionin variant Thi2Ca12 [Crambe abyssinica,

SEQ ID NO: 93753 - protein, 134 aa, Arabidopsis thaliana; identical to SEQ ID NO: 89997
  peptide (1)..(134): Ceres Seq. ID no. 12721751
  misc_feature (25)..(70): Pfam Name: Plant thionin Pfam Description: Plant thionin
  misc_feature (1)..(134): Homolog of NCBI NO: 15218931 NR Description: thionin, putative; protein id: At1g66100.1, by cDNA: gi_14190504, supported by cDNA: gi_15809773 [Arabidopsis
  misc_feature (1)..(134): Homolog of NCBI NO: 1181533 NR Description: thionin >gi|1586834|prf||2204399B thionin
  misc_feature (1)..(134): Homolog of NCBI NO: 1076466 NR Description: thionin variant Thi2Ca2 - Abyssinian crambe crambin precursor=thionin variant Thi2Ca2 [Crambe abyssinica,
  misc_feature (1)..(134): Homolog of NCBI NO: 15239447 NR Description: thionin Thi2.2; protein id: At5g36910.1, by cDNA: 1523., supported by cDNA: gi_1181532 [Arabidopsis
  misc_feature (1)..(134): Homolog of NCBI NO: 21553588 NR Description: thionin Thi2.2 [Arabidopsis thaliana]
  misc_feature (1)..(134): Homolog of NCBI NO: 1076462 NR Description: thionin variant Thi2Ca1 - Abyssinian crambe
  misc_feature (1)..(134): Homolog of NCBI NO: 1076463 NR Description: thionin variant Thi2Ca10 - Abyssinian crambe crambin precursor=thionin variant Thi2Ca10 [Crambe abyssinica,
  misc_feature (1)..(134): Homolog of NCBI NO: 6650328 NR Description: thionin [Brassica rapa subsp. pekinensis]
  misc_feature (1)..(134): Homolog of NCBI NO: 1076467 NR Description: thionin variant Thi2Ca3 - Abyssinian crambe crambin precursor=thionin variant Thi2Ca3 [Crambe abyssinica,
  misc_feature (1)..(134): Homolog of NCBI NO: 1076465 NR Description: thionin variant Thi2Ca12 - Abyssinian crambe crambin precursor=thionin variant Thi2Ca12 [Crambe abyssinica,

SEQ ID NO: 93754 - protein, 122 aa, Arabidopsis thaliana; identical to SEQ ID NO: 89998
  peptide (1)..(122): Ceres Seq. ID no. 12721752
  misc_feature (13)..(58): Pfam Name: Plant thionin Pfam Description: Plant thionin
  misc_feature (1)..(122): Homolog of NCBI NO: 15218931 NR Description: thionin, putative; protein id: At1g66100.1, by cDNA: gi_14190504, supported by cDNA: gi_15809773 [Arabidopsis
  misc_feature (1)..(122): Homolog of NCBI NO: 1181533 NR Description: thionin >gi|1586834|prf||2204399B thionin
  misc_feature (1)..(122): Homolog of NCBI NO: 1076466 NR Description: thionin variant Thi2Ca2 - Abyssinian crambe crambin precursor=thionin variant Thi2Ca2 [Crambe abyssinica,
  misc_feature (1)..(122): Homolog of NCBI NO: 15239447 NR Description: thionin Thi2.2; protein id: At5g36910.1, by cDNA: 1523., supported by cDNA: gi_1181532 [Arabidopsis
  misc_feature (1)..(122): Homolog of NCBI NO: 21553588 NR Description: thionin Thi2.2 [Arabidopsis thaliana]
  misc_feature (1)..(122): Homolog of NCBI NO: 1076462 NR Description: thionin variant Thi2Ca1 - Abyssinian crambe
  misc_feature (1)..(122): Homolog of NCBI NO: 1076463 NR Description: thionin variant Thi2Ca10 - Abyssinian crambe crambin precursor=thionin variant Thi2Ca10 [Crambe abyssinica,
  misc_feature (1)..(122): Homolog of NCBI NO: 6650328 NR Description: thionin [Brassica rapa subsp. pekinensis]
  misc_feature (1)..(122): Homolog of NCBI NO: 1076467 NR Description: thionin variant Thi2Ca3 - Abyssinian crambe crambin precursor=thionin variant Thi2Ca3 [Crambe abyssinica,
  misc_feature (1)..(122): Homolog of NCBI NO: 1076465 NR Description: thionin variant Thi2Ca12 - Abyssinian crambe crambin precursor=thionin variant Thi2Ca12 [Crambe abyssinica,

SEQ ID NO: 93755 - DNA, 1245 bp, Arabidopsis thaliana; identical to SEQ ID NO: 89999
  misc_feature (1)..(1245): Ceres Seq. ID no. 12721753
  misc_feature: MA Experiment ID: 20000166 Result: Down-regulated in Transcription
  misc_feature: MA Experiment 20000166 PARAMETER Experiment Name: At_100uM_ABA_P Parameter: Age (day) Value: 14
  misc_feature: MA Experiment 20000166 PARAMETER Experiment Name: At_100uM_ABA_P Parameter: Organism Value: A. thaliana
  misc_feature: MA Experiment 20000166 PARAMETER Experiment Name: At_100uM_ABA_P Parameter: Plant Line Value: WS
  misc_feature: MA Experiment 20000166 PARAMETER Experiment Name: At_100uM_ABA_P Parameter: Timepoint (hr) Value: 1
  misc_feature: MA Experiment 20000166 PARAMETER Experiment Name: At_100uM_ABA_P Parameter: Tissue Value: Aerial
  misc_feature: MA Experiment 20000166 PARAMETER Experiment Name: At_100uM_ABA_P Parameter: Treatment Value: 100uM ABA vs. No Treatment
  misc_feature: MA Experiment ID: 20000180 Result: Down-regulated in Transcription
  misc_feature: MA Experiment 20000180 PARAMETER Experiment Name: At_Germinating_Seeds_P Parameter: Age (hr) Value: 24 vs. 0
  misc_feature: MA Experiment 20000180 PARAMETER Experiment Name: At_Germinating_Seeds_P Parameter: Tissue Value: Germinating Seeds
  misc_feature: MA Experiment ID: 20000185 Result: Up-regulated in Transcription
  misc_feature: MA Experiment 20000185 PARAMETER Experiment Name: At_Roots__P Parameter: Age (day) Value: 7 vs. 21
  misc_feature: MA Experiment 20000185 PARAMETER Experiment Name: At_Roots__P Parameter: Organism Value: A. thaliana
  misc_feature: MA Experiment 20000185 PARAMETER Experiment Name: At_Roots__P Parameter: Tissue Value: Roots vs. Whole Plant
  misc_feature: MA Experiment ID: 20000227 Result: Down-regulated in Transcription
  misc_feature: MA Experiment 20000227 PARAMETER Experiment Name: At_Root-Tips-vs-Tops_P Parameter: Tissue Value: Root Tips vs. Root Tops
  misc_feature: MA Experiment ID: 20000234 Result: Down-regulated in Transcription
  misc_feature: MA Experiment 20000234 PARAMETER Experiment Name: At_Siliques_P Parameter: Age (day) Value: 21
  misc_feature: MA Experiment 20000234 PARAMETER Experiment Name: At_Siliques_P Parameter: Organism Value: A. thaliana
  misc_feature: MA Experiment 20000234 PARAMETER Experiment Name: At_Siliques_P Parameter: Plant Line Value: WS
  misc_feature: MA Experiment 20000234 PARAMETER Experiment Name: At_Siliques_P Parameter: Tissue Value: Less Than 5mm Siliques vs. Whole Plant
  misc_feature: MA Experiment ID: 20000264 Result: Down-regulated in Transcription
  misc_feature: MA Experiment 20000264 PARAMETER Experiment Name: At_Open_Flower_P Parameter: Age (day) Value: 21
  misc_feature: MA Experiment 20000264 PARAMETER Experiment Name: At_Open_Flower_P Parameter: Plant Line Value: WS
  misc_feature: MA Experiment 20000264 PARAMETER Experiment Name: At_Open_Flower_P Parameter: Tissue Value: Open Flower vs. Whole Plant
  misc_feature: MA Experiment ID: 20000437 Result: Down-regulated in Transcription
  misc_feature: MA Experiment 20000437 PARAMETER Experiment Name: At_Drought_P Parameter: Age (day) Value: 8
  misc_feature: MA Experiment 20000437 PARAMETER Experiment Name: At_Drought_P Parameter: Organism Value: A. thaliana
  misc_feature: MA Experiment 20000437 PARAMETER Experiment Name: At_Drought_P Parameter: Plant Line Value: WS
  misc_feature: MA Experiment 20000437 PARAMETER Experiment Name: At_Drought_P Parameter: Timepoint (hr) Value: 24
  misc_feature: MA Experiment 20000437 PARAMETER Experiment Name: At_Drought_P Parameter: Tissue Value: Whole Plant
  misc_feature: MA Experiment 20000437 PARAMETER Experiment Name: At_Drought_P Parameter: Treatment Value: Drought vs. No Drought
  misc_feature: MA Experiment ID: 20000439 Result: Up-regulated in Transcription
  misc_feature: MA Experiment 20000439 PARAMETER Experiment Name: At_Roots__P Parameter: Age (day) Value: 14 vs. 21
  misc_feature: MA Experiment 20000439 PARAMETER Experiment Name: At_Roots__P Parameter: Organism Value: A. thaliana
  misc_feature: MA Experiment 20000439 PARAMETER Experiment Name: At_Roots__P Parameter: Tissue Value: Roots vs. Whole Plant
  misc_feature: MA Experiment ID: 20000495 Result: Up-regulated in Transcription
  misc_feature: MA Experiment 20000495 PARAMETER Experiment Name: At_Guard_Cells_P Parameter: Harvest Date Value: 8/2/2002
  misc_feature: MA Experiment 20000495 PARAMETER Experiment Name: At_Guard_Cells_P Parameter: Organism Value: A. thaliana
  misc_feature: MA Experiment 20000495 PARAMETER Experiment Name: At_Guard_Cells_P Parameter: Tissue Value: Guard Cells vs. Leaves
  misc_feature: MA Experiment ID: 20001451 Result: Up-regulated in Transcription
  misc_feature: MA Experiment 20001451 PARAMETER Experiment Name: At_Far-red-induction_P Parameter: Age (day) Value: 7
  misc_feature: MA Experiment 20001451 PARAMETER Experiment Name: At_Far-red-induction_P Parameter: Light Value: Far-red vs. White
  misc_feature: MA Experiment 20001451 PARAMETER Experiment Name: At_Far-red-induction_P Parameter: Organism Value: A. thaliana
  misc_feature: MA Experiment 20001451 PARAMETER Experiment Name: At_Far-red-induction_P Parameter: Plant Line Value: Columbia
  misc_feature: MA Experiment 20001451 PARAMETER Experiment Name: At_Far-red-induction_P Parameter: Timepoint (hr) Value: 24
  misc_feature: MA Experiment 20001451 PARAMETER Experiment Name: At_Far-red-induction_P Parameter: Tissue Value: Whole Plant
  misc_feature: MA Experiment ID: 20001458 Result: Up-regulated in Transcription
  misc_feature: MA Experiment 20001458 PARAMETER Experiment Name: At_50mM_NH4NO3_L-to-H_P Parameter: Age (day) Value: Undefined
  misc_feature: MA Experiment 20001458 PARAMETER Experiment Name: At_50mM_NH4NO3_L-to-H_P Parameter: Organism Value: Undefined
  misc_feature: MA Experiment 20001458 PARAMETER Experiment Name: At_50mM_NH4NO3_L-to-H_P Parameter: Plant Line Value: Undefined
  misc_feature: MA Experiment 20001458 PARAMETER Experiment Name: At_50mM_NH4NO3_L-to-H_P Parameter: Timepoint (hr) Value: 2
  misc_feature: MA Experiment 20001458 PARAMETER Experiment Name: At_50mM_NH4NO3_L-to-H_P Parameter: Tissue Value: Siliques
  misc_feature: MA Experiment 20001458 PARAMETER Experiment Name: At_50mM_NH4NO3_L-to-H_P Parameter: Treatment Value: 50mM NH4NO3 vs. 100mM Manitol
  misc_feature: MA Experiment ID: 20001755 Result: Up-regulated in Transcription
  misc_feature: MA Experiment 20001755 PARAMETER Experiment Name: At_50mM_NH4NO3_L-to-H_P Parameter: Timepoint (hr) Value: 2
  misc_feature: MA Experiment 20001755 PARAMETER Experiment Name: At_50mM_NH4NO3_L-to-H_P Parameter: Tissue Value: Leaf
  misc_feature: MA Experiment 20001755 PARAMETER Experiment Name: At_50mM_NH4NO3_L-to-H_P Parameter: Treatment Value: 50mM NH4NO3 vs 100mM Mannitol
  misc_feature: MA Experiment ID: 20001757 Result: Up-regulated in Transcription
  misc_feature: MA Experiment 20001757 PARAMETER Experiment Name: At_50mM_NH4NO3_L-to-H_P Parameter: Timepoint (hr) Value: 6
  misc_feature: MA Experiment 20001757 PARAMETER Experiment Name: At_50mM_NH4NO3_L-to-H_P Parameter: Tissue Value: Leaf
  misc_feature: MA Experiment 20001757 PARAMETER Experiment Name: At_50mM_NH4NO3_L-to-H_P Parameter: Treatment Value: 50mM NH4NO3 vs 100mM Mannitol
  misc_feature: MA Experiment ID: 20001760 Result: Up-regulated in Transcription
  misc_feature: MA Experiment 20001760 PARAMETER Experiment Name: At_50mM_NH4NO3_L-to-H_P Parameter: Timepoint (hr) Value: 2
  misc_feature: MA Experiment 20001760 PARAMETER Experiment Name: At_50mM_NH4NO3_L-to-H_P Parameter: Tissue Value: Siliques
  misc_feature: MA Experiment 20001760 PARAMETER Experiment Name: At_50mM_NH4NO3_L-to-H_P Parameter: Treatment Value: 50mM NH4NO3 vs 100mM Mannitol
  misc_feature: MA Experiment ID: 20001905 Result: Down-regulated in Transcription
  misc_feature: MA Experiment 20001905 PARAMETER Experiment Name: At_Drought_Reproduction_P Parameter: Age (day) Value: 40
  misc_feature: MA Experiment 20001905 PARAMETER Experiment Name: At_Drought_Reproduction_P Parameter: Organism Value: A. thaliana
  misc_feature: MA Experiment 20001905 PARAMETER Experiment Name: At_Drought_Reproduction_P Parameter: Plant Line Value: WS
  misc_feature: MA Experiment 20001905 PARAMETER Experiment Name: At_Drought_Reproduction_P Parameter: Timepoint (day) Value: 10
  misc_feature: MA Experiment 20001905 PARAMETER Experiment Name: At_Drought_Reproduction_P Parameter: Tissue Value: Rosettes
  misc_feature: MA Experiment 20001905 PARAMETER Experiment Name: At_Drought_Reproduction_P Parameter: Treatment Value: Drought vs. No Drought

SEQ ID NO: 93756 - protein, 260 aa, Arabidopsis thaliana; identical to SEQ ID NO: 90000
  peptide (1)..(260): Ceres Seq. ID no. 12721754
  misc_feature (85)..(107): Pfam Name: Zinc finger, C2H2 type Pfam Description: Zinc finger, C2H2 type
  misc_feature (1)..(260): Homolog of NCBI NO: 15218939 NR Description: C2H2-type zinc finger protein, putative; protein At1g66140.1, supported by cDNA: gi_13605608, supported by cDNA: supported by cDNA: gi_790678 [Arabidopsis thaliana]
  misc_feature (1)..(260): Homolog of NCBI NO: 1362017 NR Description: CCHH finger protein 4 - Arabidopsis thaliana
  misc_feature (54)..(180): Homolog of NCBI NO: 15220823 NR Description: zinc finger protein; protein id: At1g80730.1, by cDNA: gi_790672 [Arabidopsis thaliana]
  misc_feature (41)..(175): Homolog of NCBI NO: 15238724 NR Description: ZFP3 zinc finger protein; protein id: supported by cDNA: gi_790676 [Arabidopsis thaliana]
  misc_feature (30)..(120): Homolog of NCBI NO: 15242152 NR Description: CCHH finger protein 2-like protein (pir||S55882); id: At5g57520.1, supported by cDNA: gi_790674 [Arabidopsis >gi|27923888|sp|Q39261|ZFP2_ARATH Zinc finger protein 2
  misc_feature (47)..(121): Homolog of NCBI NO: 18395528 NR Description: zinc finger protein 7, ZFP7; protein id: supported by cDNA: gi_790684 [Arabidopsis thaliana]
  misc_feature (29)..(126): Homolog of NCBI NO: 15238913 NR Description: zinc finger -like protein; protein id: At5g10970.1
  misc_feature (51)..(116): Homolog of NCBI NO: 40538953 NR Description: expressed protein [Oryza sativa (japonica
  misc_feature (60)..(156): Homolog of NCBI NO: 15241284 NR Description: putative protein; protein id: At5g14010.1 thaliana] >gi|10177667|dbj|BAB11129.1|
  misc_feature (64)..(117): Homolog of NCBI NO: 29027767 NR Description: OJ1710_H11.12 [Oryza sativa (japonica

SEQ ID NO: 93757 - protein, 143 aa, Arabidopsis thaliana; identical to SEQ ID NO: 90001
  peptide (1)..(143): Ceres Seq. ID no. 12721755
  misc_feature (1)..(143): Homolog of NCBI NO: 15218939 NR Description: C2H2-type zinc finger protein, putative; protein At1g66140.1, supported by cDNA: gi_13605608, supported by cDNA: supported by cDNA: gi_790678 [Arabidopsis thaliana]
  misc_feature (1)..(143): Homolog of NCBI NO: 1362017 NR Description: CCHH finger protein 4 - Arabidopsis thaliana
  misc_feature (1)..(63): Homolog of NCBI NO: 15220823 NR Description: zinc finger protein; protein id: At1g80730.1, by cDNA: gi_790672 [Arabidopsis thaliana]
  misc_feature (1)..(58): Homolog of NCBI NO: 15238724 NR Description: ZFP3 zinc finger protein; protein id: supported by cDNA: gi_790676 [Arabidopsis thaliana]
  misc_feature (1)..(39): Homolog of NCBI NO: 15241284 NR Description: putative protein; protein id: At5g14010.1 thaliana] >gi|10177667|dbj|BAB11129.1|
  misc_feature (1)..(22): Homolog of NCBI NO: 15240118 NR Description: zinc finger-like protein; protein id: At5g06650.1

SEQ ID NO: 93758 - protein, 141 aa, Arabidopsis thaliana; identical to SEQ ID NO: 90002
  peptide (1)..(141): Ceres Seq. ID no. 12721756
  misc_feature (1)..(141): Homolog of NCBI NO: 15218939 NR Description: C2H2-type zinc finger protein, putative; protein At1g66140.1, supported by cDNA: gi_13605608, supported by cDNA: supported by cDNA: gi_790678 [Arabidopsis thaliana]
  misc_feature (1)..(141): Homolog of NCBI NO: 1362017 NR Description: CCHH finger protein 4 - Arabidopsis thaliana
  misc_feature (1)..(61): Homolog of NCBI NO: 15220823 NR Description: zinc finger protein; protein id: At1g80730.1, by cDNA: gi_790672 [Arabidopsis thaliana]
  misc_feature (1)..(56): Homolog of NCBI NO: 15238724 NR Description: ZFP3 zinc finger protein; protein id: supported by cDNA: gi_790676 [Arabidopsis thaliana]
  misc_feature (1)..(37): Homolog of NCBI NO: 15241284 NR Description: putative protein; protein id: At5g14010.1 thaliana] >gi|10177667|dbj|BAB11129.1|
  misc_feature (1)..(20): Homolog of NCBI NO: 15240118 NR Description: zinc finger-like protein; protein id: At5g06650.1

SEQ ID NO: 93759 - DNA, 1015 bp, Arabidopsis thaliana; identical to SEQ ID NO: 90003
  misc_feature (1)..(1015): Ceres Seq. ID no. 12721767
  misc_feature: MA Experiment ID: 20000166 Result: Down-regulated in Transcription
  misc_feature: MA Experiment 20000166 PARAMETER Experiment Name: At_100uM_ABA_P Parameter: Age (day) Value: 14
  misc_feature: MA Experiment 20000166 PARAMETER Experiment Name: At_100uM_ABA_P Parameter: Organism Value: A. thaliana
  misc_feature: MA Experiment 20000166 PARAMETER Experiment Name: At_100uM_ABA_P Parameter: Plant Line Value: WS
  misc_feature: MA Experiment 20000166 PARAMETER Experiment Name: At_100uM_ABA_P Parameter: Timepoint (hr) Value: 1
  misc_feature: MA Experiment 20000166 PARAMETER Experiment Name: At_100uM_ABA_P Parameter: Tissue Value: Aerial
  misc_feature: MA Experiment 20000166 PARAMETER Experiment Name: At_100uM_ABA_P Parameter: Treatment Value: 100uM ABA vs. No Treatment
  misc_feature: MA Experiment ID: 20000180 Result: Up-regulated in Transcription
  misc_feature: MA Experiment 20000180 PARAMETER Experiment Name: At_Germinating_Seeds_P Parameter: Age (hr) Value: 24 vs. 0
  misc_feature: MA Experiment 20000180 PARAMETER Experiment Name: At_Germinating_Seeds_P Parameter: Tissue Value: Germinating Seeds
  misc_feature: MA Experiment ID: 20000182 Result: Down-regulated in Transcription
  misc_feature: MA Experiment 20000182 PARAMETER Experiment Name: At_2mM_SA_P Parameter: Age (day) Value: 14
  misc_feature: MA Experiment 20000182 PARAMETER Experiment Name: At_2mM_SA_P Parameter: Organism Value: A. thaliana
  misc_feature: MA Experiment 20000182 PARAMETER Experiment Name: At_2mM_SA_P Parameter: Plant Line Value: WS
  misc_feature: MA Experiment 20000182 PARAMETER Experiment Name: At_2mM_SA_P Parameter: Timepoint (hr) Value: 6
  misc_feature: MA Experiment 20000182 PARAMETER Experiment Name: At_2mM_SA_P Parameter: Tissue Value: Aerial
  misc_feature: MA Experiment 20000182 PARAMETER Experiment Name: At_2mM_SA_P Parameter: Treatment Value: 2mM SA vs. No Treatment
  misc_feature: MA Experiment ID: 20000184 Result: Down-regulated in Transcription
  misc_feature: MA Experiment 20000184 PARAMETER Experiment Name: At_Shoots__P Parameter: Age (day) Value: 7
  misc_feature: MA Experiment 20000184 PARAMETER Experiment Name: At_Shoots__P Parameter: Tissue Value: Shoots vs. Whole Plant
  misc_feature: MA Experiment ID: 20000213 Result: Down-regulated in Transcription
  misc_feature: MA Experiment 20000213 PARAMETER Experiment Name: At_4deg_Cold_P Parameter: Timepoint (hr) Value: 2
  misc_feature: MA Experiment ID: 20000234 Result: Down-regulated in Transcription
  misc_feature: MA Experiment 20000234 PARAMETER Experiment Name: At_Siliques_P Parameter: Age (day) Value: 21
  misc_feature: MA Experiment 20000234 PARAMETER Experiment Name: At_Siliques_P Parameter: Organism Value: A. thaliana
  misc_feature: MA Experiment 20000234 PARAMETER Experiment Name: At_Siliques_P Parameter: Plant Line Value: WS
  misc_feature: MA Experiment 20000234 PARAMETER Experiment Name: At_Siliques_P Parameter: Tissue Value: Less Than 5mm Siliques vs. Whole Plant
  misc_feature: MA Experiment ID: 20000264 Result: Down-regulated in Transcription
  misc_feature: MA Experiment 20000264 PARAMETER Experiment Name: At_Open_Flower_P Parameter: Age (day) Value: 21
  misc_feature: MA Experiment 20000264 PARAMETER Experiment Name: At_Open_Flower_P Parameter: Plant Line Value: WS
  misc_feature: MA Experiment 20000264 PARAMETER Experiment Name: At_Open_Flower_P Parameter: Tissue Value: Open Flower vs. Whole Plant
  misc_feature: MA Experiment ID: 20000265 Result: Down-regulated in Transcription
  misc_feature: MA Experiment 20000265 PARAMETER Experiment Name: At_Open_Flower_P Parameter: Age (day) Value: 21
  misc_feature: MA Experiment 20000265 PARAMETER Experiment Name: At_Open_Flower_P Parameter: Plant Line Value: WS
  misc_feature: MA Experiment 20000265 PARAMETER Experiment Name: At_Open_Flower_P Parameter: Tissue Value: Closed Flower vs. Whole Plant
  misc_feature: MA Experiment ID: 20000269 Result: Down-regulated in Transcription
  misc_feature: MA Experiment 20000269 PARAMETER Experiment Name: At_1mM_KNO3_L-vs-H_Roots_P Parameter: Age (day) Value: 7,10,12
  misc_feature: MA Experiment 20000269 PARAMETER Experiment Name: At_1mM_KNO3_L-vs-H_Roots_P Parameter: Organism Value: A. thaliana
  misc_feature: MA Experiment 20000269 PARAMETER Experiment Name: At_1mM_KNO3_L-vs-H_Roots_P Parameter: Plant Line Value: WS
  misc_feature: MA Experiment 20000269 PARAMETER Experiment Name: At_1mM_KNO3_L-vs-H_Roots_P Parameter: Timepoint (day) Value: 7,10,12
  misc_feature: MA Experiment 20000269 PARAMETER Experiment Name: At_1mM_KNO3_L-vs-H_Roots_P Parameter: Tissue Value: Roots
  misc_feature: MA Experiment 20000269 PARAMETER Experiment Name: At_1mM_KNO3_L-vs-H_Roots_P Parameter: Treatment Value: 1mM KNO3 vs. 50mM KNO3
  misc_feature: MA Experiment ID: 20000286 Result: Down-regulated in Transcription
  misc_feature: MA Experiment 20000286 PARAMETER Experiment Name: At_Open_Flower_P Parameter: Age (day) Value: 21
  misc_feature: MA Experiment 20000286 PARAMETER Experiment Name: At_Open_Flower_P Parameter: Plant Line Value: WS
  misc_feature: MA Experiment 20000286 PARAMETER Experiment Name: At_Open_Flower_P Parameter: Tissue Value: Half Open vs. Whole Plant
  misc_feature: MA Experiment ID: 20000439 Result: Down-regulated in Transcription
  misc_feature: MA Experiment 20000439 PARAMETER Experiment Name: At_Roots__P Parameter: Age (day) Value: 14 vs. 21
  misc_feature: MA Experiment 20000439 PARAMETER Experiment Name: At_Roots__P Parameter: Organism Value: A. thaliana
  misc_feature: MA Experiment 20000439 PARAMETER Experiment Name: At_Roots__P Parameter: Tissue Value: Roots vs. Whole Plant
  misc_feature: MA Experiment ID: 20000452 Result: Up-regulated in Transcription
  misc_feature: MA Experiment 20000452 PARAMETER Experiment Name: At_CS6879_Shoots-Roots_P Parameter: Age (day) Value: 14
  misc_feature: MA Experiment 20000452 PARAMETER Experiment Name: At_CS6879_Shoots-Roots_P Parameter: Organism Value: A. thaliana
  misc_feature: MA Experiment 20000452 PARAMETER Experiment Name: At_CS6879_Shoots-Roots_P Parameter: Plant Line Value: CS6879 vs. WS
  misc_feature: MA Experiment 20000452 PARAMETER Experiment Name: At_CS6879_Shoots-Roots_P Parameter: Tissue Value: Shoots
  misc_feature: MA Experiment ID: 20000453 Result: Down-regulated in Transcription
  misc_feature: MA Experiment 20000453 PARAMETER Experiment Name: At_100uM_ABA_P Parameter: Age (day) Value: 15
  misc_feature: MA Experiment 20000453 PARAMETER Experiment Name: At_100uM_ABA_P Parameter: Organism Value: A. thaliana
  misc_feature: MA Experiment 20000453 PARAMETER Experiment Name: At_100uM_ABA_P Parameter: Plant Line Value: WS
  misc_feature: MA Experiment 20000453 PARAMETER Experiment Name: At_100uM_ABA_P Parameter: Timepoint (hr) Value: 24
  misc_feature: MA Experiment 20000453 PARAMETER Experiment Name: At_100uM_ABA_P Parameter: Tissue Value: Aerial
  misc_feature: MA Experiment 20000453 PARAMETER Experiment Name: At_100uM_ABA_P Parameter: Treatment Value: 100uM ABA vs. No Treatment
  misc_feature: MA Experiment ID: 20000573 Result: Down-regulated in Transcription
  misc_feature: MA Experiment 20000573 PARAMETER Experiment Name: At_100uM_ABA_Mutants__P Parameter: Organism Value: A. thaliana
  misc_feature: MA Experiment 20000573 PARAMETER Experiment Name: At_100uM_ABA_Mutants__P Parameter: Plant Line Value: CS22 vs. Ler wt
  misc_feature: MA Experiment 20000573 PARAMETER Experiment Name: At_100uM_ABA_Mutants__P Parameter: Timepoint (hr) Value: N/A
  misc_feature: MA Experiment 20000573 PARAMETER Experiment Name: At_100uM_ABA_Mutants__P Parameter: Tissue Value: Whole Plant
  misc_feature: MA Experiment 20000573 PARAMETER Experiment Name: At_100uM_ABA_Mutants__P Parameter: Treatment Value: None
  misc_feature: MA Experiment ID: 20000794 Result: Down-regulated in Transcription
  misc_feature: MA Experiment 20000794 PARAMETER Experiment Name: At_Petals_P Parameter: Age (day) Value: 23-25 days
  misc_feature: MA Experiment 20000794 PARAMETER Experiment Name: At_Petals_P Parameter: Plant Line Value: WS
  misc_feature: MA Experiment 20000794 PARAMETER Experiment Name: At_Petals_P Parameter: Tissue Value: Petals vs. Whole plant
  misc_feature: MA Experiment ID: 20001247 Result: Up-regulated in Transcription
  misc_feature: MA Experiment 20001247 PARAMETER Experiment Name: At_Far-red-induction_P Parameter: Age (day) Value: 7
  misc_feature: MA Experiment 20001247 PARAMETER Experiment Name: At_Far-red-induction_P Parameter: Light Value: Far-red vs. White
  misc_feature: MA Experiment 20001247 PARAMETER Experiment Name: At_Far-red-induction_P Parameter: Organism Value: A. thaliana
  misc_feature: MA Experiment 20001247 PARAMETER Experiment Name: At_Far-red-induction_P Parameter: Plant Line Value: Columbia
  misc_feature: MA Experiment 20001247 PARAMETER Experiment Name: At_Far-red-induction_P Parameter: Timepoint (hr) Value: 1
  misc_feature: MA Experiment 20001247 PARAMETER Experiment Name: At_Far-red-induction_P Parameter: Tissue Value: Whole Plant
  misc_feature: MA Experiment ID: 20001554 Result: Down-regulated in Transcription
  misc_feature: MA Experiment 20001554 PARAMETER Experiment Name: At_Drought_Soil_Dry_P Parameter: Age (day) Value: 21
  misc_feature: MA Experiment 20001554 PARAMETER Experiment Name: At_Drought_Soil_Dry_P Parameter: Organism Value: A. thaliana
  misc_feature: MA Experiment 20001554 PARAMETER Experiment Name: At_Drought_Soil_Dry_P Parameter: Plant Line Value: WS
  misc_feature: MA Experiment 20001554 PARAMETER Experiment Name: At_Drought_Soil_Dry_P Parameter: Post Timepoint (hr) Value: None
  misc_feature: MA Experiment 20001554 PARAMETER Experiment Name: At_Drought_Soil_Dry_P Parameter: Post-Treatment Value: None
  misc_feature: MA Experiment 20001554 PARAMETER Experiment Name: At_Drought_Soil_Dry_P Parameter: Timepoint (day) Value: 7
  misc_feature: MA Experiment 20001554 PARAMETER Experiment Name: At_Drought_Soil_Dry_P Parameter: Treatment Value: Drought vs. No Drought
  misc_feature: MA Experiment ID: 20001556 Result: Down-regulated in Transcription
  misc_feature: MA Experiment 20001556 PARAMETER Experiment Name: At_Drought_Soil_Dry_P Parameter: Age (day) Value: 26
  misc_feature: MA Experiment 20001556 PARAMETER Experiment Name: At_Drought_Soil_Dry_P Parameter: Organism Value: A. thaliana
  misc_feature: MA Experiment 20001556 PARAMETER Experiment Name: At_Drought_Soil_Dry_P Parameter: Plant Line Value: WS
  misc_feature: MA Experiment 20001556 PARAMETER Experiment Name: At_Drought_Soil_Dry_P Parameter: Post Timepoint (hr) Value: None
  misc_feature: MA Experiment 20001556 PARAMETER Experiment Name: At_Drought_Soil_Dry_P Parameter: Post-Treatment Value: None
  misc_feature: MA Experiment 20001556 PARAMETER Experiment Name: At_Drought_Soil_Dry_P Parameter: Timepoint (day) Value: 12
  misc_feature: MA Experiment 20001556 PARAMETER Experiment Name: At_Drought_Soil_Dry_P Parameter: Treatment Value: Drought vs. No Drought
  misc_feature: MA Experiment ID: 20001906 Result: Down-regulated in Transcription
  misc_feature: MA Experiment 20001906 PARAMETER Experiment Name: At_Drought_Reproduction_P Parameter: Age (day) Value: 35
  misc_feature: MA Experiment 20001906 PARAMETER Experiment Name: At_Drought_Reproduction_P Parameter: Organism Value: A. thaliana
  misc_feature: MA Experiment 20001906 PARAMETER Experiment Name: At_Drought_Reproduction_P Parameter: Plant Line Value: WS
  misc_feature: MA Experiment 20001906 PARAMETER Experiment Name: At_Drought_Reproduction_P Parameter: Timepoint (day) Value: 5
  misc_feature: MA Experiment 20001906 PARAMETER Experiment Name: At_Drought_Reproduction_P Parameter: Tissue Value: Siliques
  misc_feature: MA Experiment 20001906 PARAMETER Experiment Name: At_Drought_Reproduction_P Parameter: Treatment Value: Drought vs. No Drought

SEQ ID NO: 93760 - protein, 282 aa, Arabidopsis thaliana; identical to SEQ ID NO: 90004
  peptide (1)..(282): Ceres Seq. ID no. 12721768
  misc_feature (14)..(61): Pfam Name: Myb-like DNA-binding domain Pfam Description: Myb-like DNA-binding domain
  misc_feature (1)..(282): Homolog of NCBI NO: 15219601 NR Description: myb family transcription factor(MYB20); protein At1g66230.1 [Arabidopsis thaliana] >gi|25294090|pir||C96687
  misc_feature (1)..(278): Homolog of NCBI NO: 11358532 NR Description: myb-related transcription factor MYB20 [imported] Arabidopsis thaliana >gi|3941430|gb|AAC83591.1| putative
  misc_feature (1)..(275): Homolog of NCBI NO: 15237380 NR Description: myb family transcription factor; protein id: supported by cDNA: gi_5823312 [Arabidopsis thaliana] putative transcription factor [Arabidopsis thaliana]
  misc_feature (1)..(152): Homolog of NCBI NO: 7446177 NR Description: myb-related transcription factor - tomato
  misc_feature (1)..(235): Homolog of NCBI NO: 23343575 NR Description: Myb51 protein [Oryza sativa]
  misc_feature (1)..(235): Homolog of NCBI NO: 7446182 NR Description: probable myb factor - rice
  misc_feature (1)..(129): Homolog of NCBI NO: 19072740 NR Description: typical P-type R2R3 Myb protein [Zea mays]
  misc_feature (1)..(201): Homolog of NCBI NO: 6651292 NR Description: myb-related transcription factor [Pimpinella
  misc_feature (1)..(147): Homolog of NCBI NO: 19073330 NR Description: typical P-type R2R3 Myb protein [Sorghum bicolor]
  misc_feature (1)..(147): Homolog of NCBI NO: 19073336 NR Description: typical P-type R2R3 Myb protein [Sorghum bicolor]

SEQ ID NO: 93761 - protein, 206 aa, Arabidopsis thaliana; identical to SEQ ID NO: 90005
  peptide (1)..(206): Ceres Seq. ID no. 12721769
  misc_feature (1)..(206): Homolog of NCBI NO: 15219601 NR Description: myb family transcription factor(MYB20); protein At1g66230.1 [Arabidopsis thaliana] >gi|25294090|pir||C96687
  misc_feature (1)..(202): Homolog of NCBI NO: 11358532 NR Description: myb-related transcription factor MYB20 [imported] Arabidopsis thaliana >gi|3941430|gb|AAC83591.1| putative
  misc_feature (1)..(199): Homolog of NCBI NO: 15237380 NR Description: myb family transcription factor; protein id: supported by cDNA: gi_5823312 [Arabidopsis thaliana] putative transcription factor [Arabidopsis thaliana]
  misc_feature (1)..(76): Homolog of NCBI NO: 7446177 NR Description: myb-related transcription factor - tomato
  misc_feature (1)..(159): Homolog of NCBI NO: 23343575 NR Description: Myb51 protein [Oryza sativa]
  misc_feature (1)..(159): Homolog of NCBI NO: 7446182 NR Description: probable myb factor - rice
  misc_feature (1)..(53): Homolog of NCBI NO: 19072740 NR Description: typical P-type R2R3 Myb protein [Zea mays]
  misc_feature (1)..(125): Homolog of NCBI NO: 6651292 NR Description: myb-related transcription factor [Pimpinella
  misc_feature (1)..(71): Homolog of NCBI NO: 19073330 NR Description: typical P-type R2R3 Myb protein [Sorghum bicolor]
  misc_feature (1)..(71): Homolog of NCBI NO: 19073336 NR Description: typical P-type R2R3 Myb protein [Sorghum bicolor]

SEQ ID NO: 93762 - protein, 164 aa, Arabidopsis thaliana; identical to SEQ ID NO: 90006
  peptide (1)..(164): Ceres Seq. ID no. 12721770
  misc_feature (1)..(164): Homolog of NCBI NO: 15219601 NR Description: myb family transcription factor(MYB20); protein At1g66230.1 [Arabidopsis thaliana] >gi|25294090|pir||C96687
  misc_feature (1)..(160): Homolog of NCBI NO: 11358532 NR Description: myb-related transcription factor MYB20 [imported] Arabidopsis thaliana >gi|3941430|gb|AAC83591.1| putative
  misc_feature (1)..(157): Homolog of NCBI NO: 15237380 NR Description: myb family transcription factor; protein id: supported by cDNA: gi_5823312 [Arabidopsis thaliana] putative transcription factor [Arabidopsis thaliana]
  misc_feature (1)..(34): Homolog of NCBI NO: 7446177 NR Description: myb-related transcription factor - tomato
  misc_feature (1)..(117): Homolog of NCBI NO: 23343575 NR Description: Myb51 protein [Oryza sativa]
  misc_feature (1)..(117): Homolog of NCBI NO: 7446182 NR Description: probable myb factor - rice
  misc_feature (1)..(11): Homolog of NCBI NO: 19072740 NR Description: typical P-type R2R3 Myb protein [Zea mays]
  misc_feature (1)..(83): Homolog of NCBI NO: 6651292 NR Description: myb-related transcription factor [Pimpinella
  misc_feature (1)..(29): Homolog of NCBI NO: 19073330 NR Description: typical P-type R2R3 Myb protein [Sorghum bicolor]
  misc_feature (1)..(29): Homolog of NCBI NO: 19073336 NR Description: typical P-type R2R3 Myb protein [Sorghum bicolor]

SEQ ID NO: 93763 - DNA, 741 bp, Arabidopsis thaliana; identical to SEQ ID NO: 90007
  misc_feature (1)..(741): Ceres Seq. ID no. 12721795
  misc_feature: MA Experiment ID: 20000527 Result: Down-regulated in Transcription
  misc_feature: MA Experiment 20000527 PARAMETER Experiment Name: At_10percent_PEG_P Parameter: Age (day) Value: 20
  misc_feature: MA Experiment 20000527 PARAMETER Experiment Name: At_10percent_PEG_P Parameter: Organism Value: A. thaliana
  misc_feature: MA Experiment 20000527 PARAMETER Experiment Name: At_10percent_PEG_P Parameter: Plant Line Value: WS
  misc_feature: MA Experiment 20000527 PARAMETER Experiment Name: At_10percent_PEG_P Parameter: Timepoint (day) Value: 20
  misc_feature: MA Experiment 20000527 PARAMETER Experiment Name: At_10percent_PEG_P Parameter: Tissue Value: Whole Plant
  misc_feature: MA Experiment 20000527 PARAMETER Experiment Name: At_10percent_PEG_P Parameter: Treatment Value: 10percent PEG vs. No Treatment

SEQ ID NO: 93764 - protein, 246 aa, Arabidopsis thaliana; identical to SEQ ID NO: 90008
  peptide (1)..(246): Ceres Seq. ID no. 12721796
  misc_feature (10)..(57): Pfam Name: Myb-like DNA-binding domain Pfam Description: Myb-like DNA-binding domain
  misc_feature (1)..(246): Homolog of NCBI NO: 15219632 NR Description: Myb-related transcription factor, putative; id: At1g66370.1, supported by cDNA: gi_11641121 [Arabidopsis
  misc_feature (1)..(246): Homolog of NCBI NO: 15219651 NR Description: Myb-related transcription factor, putative; id: At1g66390.1, supported by cDNA: gi_11935172, supported by
  misc_feature (1)..(246): Homolog of NCBI NO: 15223582 NR Description: myb-related protein anthocyanin2, putative; id: At1g56650.1, supported by cDNA: gi_3941507 [Arabidopsis
  misc_feature (1)..(209): Homolog of NCBI NO: 11358560 NR Description: myb-related transcription factor MYB75 [imported] Arabidopsis thaliana >gi|3941508|gb|AAC83630.1| putative
  misc_feature (1)..(139): Homolog of NCBI NO: 15219650 NR Description: myb family transcription factor (MYB114); protein At1g66380.1, supported by cDNA: gi_11641123 [Arabidopsis
  misc_feature (4)..(148): Homolog of NCBI NO: 7673084 NR Description: An2 protein [Petunia x hybrida]
  misc_feature (4)..(213): Homolog of NCBI NO: 7673088 NR Description: An2 protein [Petunia integrifolia]
  misc_feature (4)..(213): Homolog of NCBI NO: 7673086 NR Description: An2 protein [Petunia integrifolia]
  misc_feature (1)..(148): Homolog of NCBI NO: 40643886 NR Description: MYB10 protein [Gerbera hybrid cv. 'Terra Regina']
  misc_feature (4)..(159): Homolog of NCBI NO: 33867693 NR Description: anthocyanin 1 [Lycopersicon esculentum]

SEQ ID NO: 93765 - protein, 126 aa, Arabidopsis thaliana; identical to SEQ ID NO: 90009
  peptide (1)..(126): Ceres Seq. ID no. 12721797
  misc_feature (1)..(126): Homolog of NCBI NO: 15219632 NR Description: Myb-related transcription factor, putative; id: At1g66370.1, supported by cDNA: gi_11641121 [Arabidopsis
  misc_feature (1)..(126): Homolog of NCBI NO: 15219651 NR Description: Myb-related transcription factor, putative; id: At1g66390.1, supported by cDNA: gi_11935172, supported by
  misc_feature (1)..(126): Homolog of NCBI NO: 15223582 NR Description: myb-related protein anthocyanin2, putative; id: At1g56650.1, supported by cDNA: gi_3941507 [Arabidopsis
  misc_feature (1)..(89): Homolog of NCBI NO: 11358560 NR Description: myb-related transcription factor MYB75 [imported] Arabidopsis thaliana >gi|3941508|gb|AAC83630.1| putative
  misc_feature (1)..(19): Homolog of NCBI NO: 15219650 NR Description: myb family transcription factor (MYB114); protein At1g66380.1, supported by cDNA: gi_11641123 [Arabidopsis
  misc_feature (1)..(28): Homolog of NCBI NO: 7673084 NR Description: An2 protein [Petunia x hybrida]
  misc_feature (1)..(93): Homolog of NCBI NO: 7673088 NR Description: An2 protein [Petunia integrifolia]
  misc_feature (1)..(93): Homolog of NCBI NO: 7673086 NR Description: An2 protein [Petunia integrifolia]
  misc_feature (1)..(28): Homolog of NCBI NO: 40643886 NR Description: MYB10 protein [Gerbera hybrid cv. 'Terra Regina']
  misc_feature (1)..(39): Homolog of NCBI NO: 33867693 NR Description: anthocyanin 1 [Lycopersicon esculentum]

SEQ ID NO: 93766 - DNA, 1367 bp, Arabidopsis thaliana; identical to SEQ ID NO: 90010
  misc_feature (1)..(1367): Ceres Seq. ID no. 12721807
  misc_feature: MA Experiment ID: 20000180 Result: Up-regulated in Transcription
  misc_feature: MA Experiment 20000180 PARAMETER Experiment Name: At_Germinating_Seeds_P Parameter: Age (hr) Value: 24 vs. 0
  misc_feature: MA Experiment 20000180 PARAMETER Experiment Name: At_Germinating_Seeds_P Parameter: Tissue Value: Germinating Seeds
  misc_feature: MA Experiment ID: 20000437 Result: Down-regulated in Transcription
  misc_feature: MA Experiment 20000437 PARAMETER Experiment Name: At_Drought_P Parameter: Age (day) Value: 8
  misc_feature: MA Experiment 20000437 PARAMETER Experiment Name: At_Drought_P Parameter: Organism Value: A. thaliana
  misc_feature: MA Experiment 20000437 PARAMETER Experiment Name: At_Drought_P Parameter: Plant Line Value: WS
  misc_feature: MA Experiment 20000437 PARAMETER Experiment Name: At_Drought_P Parameter: Timepoint (hr) Value: 24
  misc_feature: MA Experiment 20000437 PARAMETER Experiment Name: At_Drought_P Parameter: Tissue Value: Whole Plant
  misc_feature: MA Experiment 20000437 PARAMETER Experiment Name: At_Drought_P Parameter: Treatment Value: Drought vs. No Drought
  misc_feature: MA Experiment ID: 20000439 Result: Down-regulated in Transcription
  misc_feature: MA Experiment 20000439 PARAMETER Experiment Name: At_Roots__P Parameter: Age (day) Value: 14 vs. 21
  misc_feature: MA Experiment 20000439 PARAMETER Experiment Name: At_Roots__P Parameter: Organism Value: A. thaliana
  misc_feature: MA Experiment 20000439 PARAMETER Experiment Name: At_Roots__P Parameter: Tissue Value: Roots vs. Whole Plant
  misc_feature: MA Experiment ID: 20000451 Result: Up-regulated in Transcription
  misc_feature: MA Experiment 20000451 PARAMETER Experiment Name: At_CS6879_Shoots-Roots_P Parameter: Age (day) Value: 14
  misc_feature: MA Experiment 20000451 PARAMETER Experiment Name: At_CS6879_Shoots-Roots_P Parameter: Organism Value: A. thaliana
  misc_feature: MA Experiment 20000451 PARAMETER Experiment Name: At_CS6879_Shoots-Roots_P Parameter: Plant Line Value: CS6879 vs. WS
  misc_feature: MA Experiment 20000451 PARAMETER Experiment Name: At_CS6879_Shoots-Roots_P Parameter: Tissue Value: Roots
  misc_feature: MA Experiment ID: 20000452 Result: Up-regulated in Transcription
  misc_feature: MA Experiment 20000452 PARAMETER Experiment Name: At_CS6879_Shoots-Roots_P Parameter: Age (day) Value: 14
  misc_feature: MA Experiment 20000452 PARAMETER Experiment Name: At_CS6879_Shoots-Roots_P Parameter: Organism Value: A. thaliana
  misc_feature: MA Experiment 20000452 PARAMETER Experiment Name: At_CS6879_Shoots-Roots_P Parameter: Plant Line Value: CS6879 vs. WS
  misc_feature: MA Experiment 20000452 PARAMETER Experiment Name: At_CS6879_Shoots-Roots_P Parameter: Tissue Value: Shoots
  misc_feature: MA Experiment ID: 20000573 Result: Down-regulated in Transcription
  misc_feature: MA Experiment 20000573 PARAMETER Experiment Name: At_100uM_ABA_Mutants__P Parameter: Organism Value: A. thaliana
  misc_feature: MA Experiment 20000573 PARAMETER Experiment Name: At_100uM_ABA_Mutants__P Parameter: Plant Line Value: CS22 vs. Ler wt
  misc_feature: MA Experiment 20000573 PARAMETER Experiment Name: At_100uM_ABA_Mutants__P Parameter: Timepoint (hr) Value: N/A
  misc_feature: MA Experiment 20000573 PARAMETER Experiment Name: At_100uM_ABA_Mutants__P Parameter: Tissue Value: Whole Plant
  misc_feature: MA Experiment 20000573 PARAMETER Experiment Name: At_100uM_ABA_Mutants__P Parameter: Treatment Value: None
  misc_feature: MA Experiment ID: 20000794 Result: Down-regulated in Transcription
  misc_feature: MA Experiment 20000794 PARAMETER Experiment Name: At_Petals_P Parameter: Age (day) Value: 23-25 days
  misc_feature: MA Experiment 20000794 PARAMETER Experiment Name: At_Petals_P Parameter: Plant Line Value: WS
  misc_feature: MA Experiment 20000794 PARAMETER Experiment Name: At_Petals_P Parameter: Tissue Value: Petals vs. Whole plant
  misc_feature: MA Experiment ID: 20001451 Result: Down-regulated in Transcription
  misc_feature: MA Experiment 20001451 PARAMETER Experiment Name: At_Far-red-induction_P Parameter: Age (day) Value: 7
  misc_feature: MA Experiment 20001451 PARAMETER Experiment Name: At_Far-red-induction_P Parameter: Light Value: Far-red vs. White
  misc_feature: MA Experiment 20001451 PARAMETER Experiment Name: At_Far-red-induction_P Parameter: Organism Value: A. thaliana
  misc_feature: MA Experiment 20001451 PARAMETER Experiment Name: At_Far-red-induction_P Parameter: Plant Line Value: Columbia
  misc_feature: MA Experiment 20001451 PARAMETER Experiment Name: At_Far-red-induction_P Parameter: Timepoint (hr) Value: 24
  misc_feature: MA Experiment 20001451 PARAMETER Experiment Name: At_Far-red-induction_P Parameter: Tissue Value: Whole Plant
  misc_feature: MA Experiment ID: 20001560 Result: Up-regulated in Transcription
  misc_feature: MA Experiment 20001560 PARAMETER Experiment Name: At_Drought_Soil_Dry_P Parameter: Age (day) Value: 28
  misc_feature: MA Experiment 20001560 PARAMETER Experiment Name: At_Drought_Soil_Dry_P Parameter: Organism Value: A. thaliana
  misc_feature: MA Experiment 20001560 PARAMETER Experiment Name: At_Drought_Soil_Dry_P Parameter: Plant Line Value: WS
  misc_feature: MA Experiment 20001560 PARAMETER Experiment Name: At_Drought_Soil_Dry_P Parameter: Post Timepoint (hr) Value: None
  misc_feature: MA Experiment 20001560 PARAMETER Experiment Name: At_Drought_Soil_Dry_P Parameter: Post-Treatment Value: None
  misc_feature: MA Experiment 20001560 PARAMETER Experiment Name: At_Drought_Soil_Dry_P Parameter: Timepoint (day) Value: 14
  misc_feature: MA Experiment 20001560 PARAMETER Experiment Name: At_Drought_Soil_Dry_P Parameter: Treatment Value: Drought vs. No Drought

SEQ ID NO: 93767 - protein, 384 aa, Arabidopsis thaliana; identical to SEQ ID NO: 90011
  peptide (1)..(384): Ceres Seq. ID no. 12721808
  misc_feature (63)..(372): Pfam Name: pfkB family carbohydrate kinase Pfam Description: pfkB family carbohydrate kinase
  misc_feature (1)..(384): Homolog of NCBI NO: 22330456 NR Description: fructokinase, putative; protein id: At1g66430.1
  misc_feature (36)..(379): Homolog of NCBI NO: 23476263 NR Description: fructokinase [Lycopersicon esculentum]
  misc_feature (142)..(384): Homolog of NCBI NO: 24030222 NR Description: putative fructokinase [Arabidopsis thaliana]
  misc_feature (48)..(379): Homolog of NCBI NO: 15242193 NR Description: fructokinase 1; protein id: At5g51830.1, by cDNA: gi_13878052, supported by cDNA: gi_17104644 [Arabidopsis >gi|10177882|dbj|BAB11252.1| fructokinase 1 [Arabidopsis
  misc_feature (48)..(379): Homolog of NCBI NO: 7434220 NR Description: fructokinase (EC 2.7.1.4) 1 - tomato
  misc_feature (158)..(384): Homolog of NCBI NO: 23397332 NR Description: putative fructokinase [Arabidopsis thaliana]
  misc_feature (54)..(381): Homolog of NCBI NO: 7434223 NR Description: fructokinase (EC 2.7.1.4) - beet
  misc_feature (59)..(381): Homolog of NCBI NO: 15231692 NR Description: fructokinase-like protein; protein id: supported by cDNA: 24751. [Arabidopsis thaliana]
  misc_feature (59)..(381): Homolog of NCBI NO: 21592495 NR Description: fructokinase-like protein [Arabidopsis thaliana]
  misc_feature (66)..(381): Homolog of NCBI NO: 33329198 NR Description: putative fructokinase; S1 self-incompatibility

SEQ ID NO: 93768 - protein, 313 aa, Arabidopsis thaliana; identical to SEQ ID NO: 90012
  peptide (1)..(313): Ceres Seq. ID no. 12721809
  misc_feature (1)..(301): Pfam Name: pfkB family carbohydrate kinase Pfam Description: pfkB family carbohydrate kinase
  misc_feature (1)..(313): Homolog of NCBI NO: 22330456 NR Description: fructokinase, putative; protein id: At1g66430.1
  misc_feature (1)..(308): Homolog of NCBI NO: 23476263 NR Description: fructokinase [Lycopersicon esculentum]
  misc_feature (71)..(313): Homolog of NCBI NO: 24030222 NR Description: putative fructokinase [Arabidopsis thaliana]
  misc_feature (1)..(308): Homolog of NCBI NO: 15242193 NR Description: fructokinase 1; protein id: At5g51830.1, by cDNA: gi_13878052, supported by cDNA: gi_17104644 [Arabidopsis >gi|10177882|dbj|BAB11252.1| fructokinase 1 [Arabidopsis
  misc_feature (1)..(308): Homolog of NCBI NO: 7434220 NR Description: fructokinase (EC 2.7.1.4) 1 - tomato
  misc_feature (87)..(313): Homolog of NCBI NO: 23397332 NR Description: putative fructokinase [Arabidopsis thaliana]
  misc_feature (1)..(310): Homolog of NCBI NO: 7434223 NR Description: fructokinase (EC 2.7.1.4) - beet
  misc_feature (1)..(310): Homolog of NCBI NO: 15231692 NR Description: fructokinase-like protein; protein id: supported by cDNA: 24751. [Arabidopsis thaliana]
  misc_feature (1)..(310): Homolog of NCBI NO: 21592495 NR Description: fructokinase-like protein [Arabidopsis thaliana]
  misc_feature (1)..(310): Homolog of NCBI NO: 33329198 NR Description: putative fructokinase; S1 self-incompatibility

SEQ ID NO: 93769 - protein, 258 aa, Arabidopsis thaliana; identical to SEQ ID NO: 90013
  peptide (1)..(258): Ceres Seq. ID no. 12721810
  misc_feature (1)..(246): Pfam Name: pfkB family carbohydrate kinase Pfam Description: pfkB family carbohydrate kinase
  misc_feature (1)..(258): Homolog of NCBI NO: 22330456 NR Description: fructokinase, putative; protein id: At1g66430.1
  misc_feature (1)..(253): Homolog of NCBI NO: 23476263 NR Description: fructokinase [Lycopersicon esculentum]
  misc_feature (16)..(258): Homolog of NCBI NO: 24030222 NR Description: putative fructokinase [Arabidopsis thaliana]
  misc_feature (1)..(253): Homolog of NCBI NO: 15242193 NR Description: fructokinase 1; protein id: At5g51830.1, by cDNA: gi_13878052, supported by cDNA: gi_17104644 [Arabidopsis >gi|10177882|dbj|BAB11252.1| fructokinase 1 [Arabidopsis
  misc_feature (1)..(253): Homolog of NCBI NO: 7434220 NR Description: fructokinase (EC 2.7.1.4) 1 - tomato
  misc_feature (32)..(258): Homolog of NCBI NO: 23397332 NR Description: putative fructokinase [Arabidopsis thaliana]
  misc_feature (1)..(255): Homolog of NCBI NO: 7434223 NR Description: fructokinase (EC 2.7.1.4) - beet
  misc_feature (1)..(255): Homolog of NCBI NO: 15231692 NR Description: fructokinase-like protein; protein id: supported by cDNA: 24751. [Arabidopsis thaliana]
  misc_feature (1)..(255): Homolog of NCBI NO: 21592495 NR Description: fructokinase-like protein [Arabidopsis thaliana]
  misc_feature (1)..(255): Homolog of NCBI NO: 33329198 NR Description: putative fructokinase; S1 self-incompatibility

SEQ ID NO: 93770 - DNA, 1404 bp, Arabidopsis thaliana; identical to SEQ ID NO: 90014
  misc_feature (1)..(1404): Ceres Seq. ID no. 12721811
  misc_feature: MA Experiment ID: 20000173 Result: Down-regulated in Transcription
  misc_feature: MA Experiment 20000173 PARAMETER Experiment Name: At_42deg_Heat_P Parameter: Age (day) Value: 14
  misc_feature: MA Experiment 20000173 PARAMETER Experiment Name: At_42deg_Heat_P Parameter: Organism Value: A. thaliana
  misc_feature: MA Experiment 20000173 PARAMETER Experiment Name: At_42deg_Heat_P Parameter: Plant Line Value: WS
  misc_feature: MA Experiment 20000173 PARAMETER Experiment Name: At_42deg_Heat_P Parameter: Temperature (deg C) Value: 42 vs. 22
  misc_feature: MA Experiment 20000173 PARAMETER Experiment Name: At_42deg_Heat_P Parameter: Timepoint (hr) Value: 6
  misc_feature: MA Experiment 20000173 PARAMETER Experiment Name: At_42deg_Heat_P Parameter: Tissue Value: Aerial
  misc_feature: MA Experiment ID: 20000227 Result: Up-regulated in Transcription
  misc_feature: MA Experiment 20000227 PARAMETER Experiment Name: At_Root-Tips-vs-Tops_P Parameter: Tissue Value: Root Tips vs. Root Tops
  misc_feature: MA Experiment ID: 20000234 Result: Up-regulated in Transcription
  misc_feature: MA Experiment 20000234 PARAMETER Experiment Name: At_Siliques_P Parameter: Age (day) Value: 21
  misc_feature: MA Experiment 20000234 PARAMETER Experiment Name: At_Siliques_P Parameter: Organism Value: A. thaliana
  misc_feature: MA Experiment 20000234 PARAMETER Experiment Name: At_Siliques_P Parameter: Plant Line Value: WS
  misc_feature: MA Experiment 20000234 PARAMETER Experiment Name: At_Siliques_P Parameter: Tissue Value: Less Than 5mm Siliques vs. Whole Plant
  misc_feature: MA Experiment ID: 20000235 Result: Up-regulated in Transcription
  misc_feature: MA Experiment 20000235 PARAMETER Experiment Name: At_Siliques_P Parameter: Age (day) Value: 21
  misc_feature: MA Experiment 20000235 PARAMETER Experiment Name: At_Siliques_P Parameter: Organism Value: A. thaliana
  misc_feature: MA Experiment 20000235 PARAMETER Experiment Name: At_Siliques_P Parameter: Plant Line Value: WS
  misc_feature: MA Experiment 20000235 PARAMETER Experiment Name: At_Siliques_P Parameter: Tissue Value: 5-10mm Siliques vs. Whole Plant
  misc_feature: MA Experiment ID: 20000439 Result: Up-regulated in Transcription
  misc_feature: MA Experiment 20000439 PARAMETER Experiment Name: At_Roots__P Parameter: Age (day) Value: 14 vs. 21
  misc_feature: MA Experiment 20000439 PARAMETER Experiment Name: At_Roots__P Parameter: Organism Value: A. thaliana
  misc_feature: MA Experiment 20000439 PARAMETER Experiment Name: At_Roots__P Parameter: Tissue Value: Roots vs. Whole Plant
  misc_feature: MA Experiment ID: 20000451 Result: Down-regulated in Transcription
  misc_feature: MA Experiment 20000451 PARAMETER Experiment Name: At_CS6879_Shoots-Roots_P Parameter: Age (day) Value: 14
  misc_feature: MA Experiment 20000451 PARAMETER Experiment Name: At_CS6879_Shoots-Roots_P Parameter: Organism Value: A. thaliana
  misc_feature: MA Experiment 20000451 PARAMETER Experiment Name: At_CS6879_Shoots-Roots_P Parameter: Plant Line Value: CS6879 vs. WS
  misc_feature: MA Experiment 20000451 PARAMETER Experiment Name: At_CS6879_Shoots-Roots_P Parameter: Tissue Value: Roots
  misc_feature: MA Experiment ID: 20000573 Result: Down-regulated in Transcription
  misc_feature: MA Experiment 20000573 PARAMETER Experiment Name: At_100uM_ABA_Mutants__P Parameter: Organism Value: A. thaliana
  misc_feature: MA Experiment 20000573 PARAMETER Experiment Name: At_100uM_ABA_Mutants__P Parameter: Plant Line Value: CS22 vs. Ler wt
  misc_feature: MA Experiment 20000573 PARAMETER Experiment Name: At_100uM_ABA_Mutants__P Parameter: Timepoint (hr) Value: N/A
  misc_feature: MA Experiment 20000573 PARAMETER Experiment Name: At_100uM_ABA_Mutants__P Parameter: Tissue Value: Whole Plant
  misc_feature: MA Experiment 20000573 PARAMETER Experiment Name: At_100uM_ABA_Mutants__P Parameter: Treatment Value: None
  misc_feature: MA Experiment ID: 20000574 Result: Down-regulated in Transcription
  misc_feature: MA Experiment 20000574 PARAMETER Experiment Name: At_100uM_ABA_Mutants__P Parameter: Organism Value: A. thaliana
  misc_feature: MA Experiment 20000574 PARAMETER Experiment Name: At_100uM_ABA_Mutants__P Parameter: Plant Line Value: CS23 vs. Ler wt
  misc_feature: MA Experiment 20000574 PARAMETER Experiment Name: At_100uM_ABA_Mutants__P Parameter: Timepoint (hr) Value: N/A
  misc_feature: MA Experiment 20000574 PARAMETER Experiment Name: At_100uM_ABA_Mutants__P Parameter: Tissue Value: Whole Plant
  misc_feature: MA Experiment 20000574 PARAMETER Experiment Name: At_100uM_ABA_Mutants__P Parameter: Treatment Value: None
  misc_feature: MA Experiment ID: 20000794 Result: Up-regulated in Transcription
  misc_feature: MA Experiment 20000794 PARAMETER Experiment Name: At_Petals_P Parameter: Age (day) Value: 23-25 days
  misc_feature: MA Experiment 20000794 PARAMETER Experiment Name: At_Petals_P Parameter: Plant Line Value: WS
  misc_feature: MA Experiment 20000794 PARAMETER Experiment Name: At_Petals_P Parameter: Tissue Value: Petals vs. Whole plant

SEQ ID NO: 93771 - protein, 467 aa, Arabidopsis thaliana; identical to SEQ ID NO: 90015
  peptide (1)..(467): Ceres Seq. ID no. 12721812
  misc_feature (1)..(467): Homolog of NCBI NO: 15219657 NR Description: protein kinase, putative; protein id: At1g66460.1
  misc_feature (19)..(465): Homolog of NCBI NO: 15240345 NR Description: protein kinase - like protein; protein id: supported by cDNA: 105458. [Arabidopsis thaliana]
  misc_feature (236)..(465): Homolog of NCBI NO: 10177167 NR Description: Ser/Thr protein kinase-like protein [Arabidopsis
  misc_feature (150)..(221): Homolog of NCBI NO: 10177167 NR Description: Ser/Thr protein kinase-like protein [Arabidopsis
  misc_feature (117)..(466): Homolog of NCBI NO: 22329713 NR Description: hypothetical protein; protein id: At1g21590.1, by cDNA: gi_18086337 [Arabidopsis thaliana] At1g21590/F24J8_9 [Arabidopsis thaliana]
  misc_feature (104)..(460): Homolog of NCBI NO: 15227291 NR Description: putative protein kinase; protein id: At2g16750.1
  misc_feature (117)..(460): Homolog of NCBI NO: 28376688 NR Description: putative serine/threonine kinase [Oryza sativa
  misc_feature (117)..(465): Homolog of NCBI NO: 15237563 NR Description: putative protein; protein id: At5g63940.1, by cDNA: gi_20260317 [Arabidopsis thaliana] contains similarity to protein kinase~gene_id:MBM17.4
  misc_feature (95)..(462): Homolog of NCBI NO: 15236248 NR Description: protein kinase - like; protein id: At4g35030.1
  misc_feature (117)..(353): Homolog of NCBI NO: 15223890 NR Description: hypothetical protein; protein id: At1g77280.1

SEQ ID NO: 93772 - protein, 373 aa, Arabidopsis thaliana; identical to SEQ ID NO: 90016
  peptide (1)..(373): Ceres Seq. ID no. 12721813
  misc_feature (1)..(373): Homolog of NCBI NO: 15219657 NR Description: protein kinase, putative; protein id: At1g66460.1
  misc_feature (1)..(371): Homolog of NCBI NO: 15240345 NR Description: protein kinase - like protein; protein id: supported by cDNA: 105458. [Arabidopsis thaliana]
  misc_feature (142)..(371): Homolog of NCBI NO: 10177167 NR Description: Ser/Thr protein kinase-like protein [Arabidopsis
  misc_feature (56)..(127): Homolog of NCBI NO: 10177167 NR Description: Ser/Thr protein kinase-like protein [Arabidopsis
  misc_feature (23)..(372): Homolog of NCBI NO: 22329713 NR Description: hypothetical protein; protein id: At1g21590.1, by cDNA: gi_18086337 [Arabidopsis thaliana] At1g21590/F24J8_9 [Arabidopsis thaliana]
  misc_feature (10)..(366): Homolog of NCBI NO: 15227291 NR Description: putative protein kinase; protein id: At2g16750.1
  misc_feature (23)..(366): Homolog of NCBI NO: 28376688 NR Description: putative serine/threonine kinase [Oryza sativa
  misc_feature (23)..(371): Homolog of NCBI NO: 15237563 NR Description: putative protein; protein id: At5g63940.1, by cDNA: gi_20260317 [Arabidopsis thaliana] contains similarity to protein kinase~gene_id:MBM17.4
  misc_feature (1)..(368): Homolog of NCBI NO: 15236248 NR Description: protein kinase - like; protein id: At4g35030.1
  misc_feature (23)..(259): Homolog of NCBI NO: 15223890 NR Description: hypothetical protein; protein id: At1g77280.1

SEQ ID NO: 93773 - protein, 292 aa, Arabidopsis thaliana; identical to SEQ ID NO: 90017
  peptide (1)..(292): Ceres Seq. ID no. 12721814
  misc_feature (1)..(292): Homolog of NCBI NO: 15219657 NR Description: protein kinase, putative; protein id: At1g66460.1
  misc_feature (1)..(290): Homolog of NCBI NO: 15240345 NR Description: protein kinase - like protein; protein id: supported by cDNA: 105458. [Arabidopsis thaliana]
  misc_feature (61)..(290): Homolog of NCBI NO: 10177167 NR Description: Ser/Thr protein kinase-like protein [Arabidopsis
  misc_feature (1)..(46): Homolog of NCBI NO: 10177167 NR Description: Ser/Thr protein kinase-like protein [Arabidopsis
  misc_feature (1)..(291): Homolog of NCBI NO: 22329713 NR Description: hypothetical protein; protein id: At1g21590.1, by cDNA: gi_18086337 [Arabidopsis thaliana] At1g21590/F24J8_9 [Arabidopsis thaliana]
  misc_feature (1)..(285): Homolog of NCBI NO: 15227291 NR Description: putative protein kinase; protein id: At2g16750.1
  misc_feature (1)..(285): Homolog of NCBI NO: 28376688 NR Description: putative serine/threonine kinase [Oryza sativa
  misc_feature (1)..(290): Homolog of NCBI NO: 15237563 NR Description: putative protein; protein id: At5g63940.1, by cDNA: gi_20260317 [Arabidopsis thaliana] contains similarity to protein kinase~gene_id:MBM17.4
  misc_feature (1)..(287): Homolog of NCBI NO: 15236248 NR Description: protein kinase - like; protein id: At4g35030.1
  misc_feature (1)..(178): Homolog of NCBI NO: 15223890 NR Description: hypothetical protein; protein id: At1g77280.1

SEQ ID NO: 93774 - DNA, 1161 bp, Arabidopsis thaliana; identical to SEQ ID NO: 90018
  misc_feature (1)..(1161): Ceres Seq. ID no. 12721826
  misc_feature: MA Experiment ID: 20000185 Result: Up-regulated in Transcription
  misc_feature: MA Experiment 20000185 PARAMETER Experiment Name: At_Roots__P Parameter: Age (day) Value: 7 vs. 21
  misc_feature: MA Experiment 20000185 PARAMETER Experiment Name: At_Roots__P Parameter: Organism Value: A. thaliana
  misc_feature: MA Experiment 20000185 PARAMETER Experiment Name: At_Roots__P Parameter: Tissue Value: Roots vs. Whole Plant
  misc_feature: MA Experiment ID: 20000439 Result: Up-regulated in Transcription
  misc_feature: MA Experiment 20000439 PARAMETER Experiment Name: At_Roots__P Parameter: Age (day) Value: 14 vs. 21
  misc_feature: MA Experiment 20000439 PARAMETER Experiment Name: At_Roots__P Parameter: Organism Value: A. thaliana
  misc_feature: MA Experiment 20000439 PARAMETER Experiment Name: At_Roots__P Parameter: Tissue Value: Roots vs. Whole Plant

SEQ ID NO: 93775 - protein, 386 aa, Arabidopsis thaliana; identical to SEQ ID NO: 90019
  peptide (1)..(386): Ceres Seq. ID no. 12721827
  misc_feature (1)..(386): Homolog of NCBI NO: 22330459 NR Description: cytochrome p450 family; protein id: At1g66540.1
  misc_feature (11)..(386): Homolog of NCBI NO: 25282574 NR Description: probable cytochrome P450 F28G11.4 [imported] - thaliana >gi|12322266|gb|AAG51161.1|AC074025_11 cytochrome P450,
  misc_feature (1)..(385): Homolog of NCBI NO: 15235534 NR Description: cytochrome P450 monooxygenase, putative; protein
  misc_feature (1)..(385): Homolog of NCBI NO: 15235535 NR Description: cytochrome p450 family; protein id: At4g37360.1
  misc_feature (1)..(385): Homolog of NCBI NO: 15235536 NR Description: cytochrome p450 family; protein id: At4g37370.1, by cDNA: 253698., supported by cDNA: gi_17473897 [Arabidopsis
  misc_feature (1)..(381): Homolog of NCBI NO: 21554381 NR Description: cytochrome P450-like protein [Arabidopsis
  misc_feature (1)..(380): Homolog of NCBI NO: 15235517 NR Description: cytochrome p450 family; protein id: At4g37320.1
  misc_feature (1)..(381): Homolog of NCBI NO: 15235533 NR Description: cytochrome p450 family; protein id: At4g37330.1
  misc_feature (1)..(381): Homolog of NCBI NO: 25282604 NR Description: cytochrome P450 monooxygenase [imported] - thaliana (fragment) >gi|3164142|dbj|BAA28538.1| cytochrome P450
  misc_feature (1)..(381): Homolog of NCBI NO: 30692923 NR Description: cytochrome P450 91A1 [Arabidopsis thaliana] Cytochrome P450 81D1 >gi|9759034|dbj|BAB09361.1| cytochrome P450 thaliana] >gi|20147351|gb|AAM10388.1| AT5g36220/T30G6_3

SEQ ID NO: 93776 - protein, 327 aa, Arabidopsis thaliana; identical to SEQ ID NO: 90020
  peptide (1)..(327): Ceres Seq. ID no. 12721828
  misc_feature (1)..(327): Homolog of NCBI NO: 22330459 NR Description: cytochrome p450 family; protein id: At1g66540.1
  misc_feature (1)..(327): Homolog of NCBI NO: 25282574 NR Description: probable cytochrome P450 F28G11.4 [imported] - thaliana >gi|12322266|gb|AAG51161.1|AC074025_11 cytochrome P450,
  misc_feature (1)..(326): Homolog of NCBI NO: 15235534 NR Description: cytochrome P450 monooxygenase, putative; protein
  misc_feature (1)..(326): Homolog of NCBI NO: 15235535 NR Description: cytochrome p450 family; protein id: At4g37360.1
  misc_feature (1)..(326): Homolog of NCBI NO: 15235536 NR Description: cytochrome p450 family; protein id: At4g37370.1, by cDNA: 253698., supported by cDNA: gi_17473897 [Arabidopsis
  misc_feature (1)..(322): Homolog of NCBI NO: 21554381 NR Description: cytochrome P450-like protein [Arabidopsis
  misc_feature (1)..(321): Homolog of NCBI NO: 15235517 NR Description: cytochrome p450 family; protein id: At4g37320.1
  misc_feature (1)..(322): Homolog of NCBI NO: 15235533 NR Description: cytochrome p450 family; protein id: At4g37330.1
  misc_feature (1)..(322): Homolog of NCBI NO: 25282604 NR Description: cytochrome P450 monooxygenase [imported] - thaliana (fragment) >gi|3164142|dbj|BAA28538.1| cytochrome P450
  misc_feature (1)..(322): Homolog of NCBI NO: 30692923 NR Description: cytochrome P450 91A1 [Arabidopsis thaliana] Cytochrome P450 81D1 >gi|9759034|dbj|BAB09361.1| cytochrome P450 thaliana] >gi|20147351|gb|AAM10388.1| AT5g36220/T30G6_3

SEQ ID NO: 93777 - protein, 324 aa, Arabidopsis thaliana; identical to SEQ ID NO: 90021
  peptide (1)..(324): Ceres Seq. ID no. 12721829
  misc_feature (1)..(324): Homolog of NCBI NO: 22330459 NR Description: cytochrome p450 family; protein id: At1g66540.1
  misc_feature (1)..(324): Homolog of NCBI NO: 25282574 NR Description: probable cytochrome P450 F28G11.4 [imported] - thaliana >gi|12322266|gb|AAG51161.1|AC074025_11 cytochrome P450,
  misc_feature (1)..(323): Homolog of NCBI NO: 15235534 NR Description: cytochrome P450 monooxygenase, putative; protein
  misc_feature (1)..(323): Homolog of NCBI NO: 15235535 NR Description: cytochrome p450 family; protein id: At4g37360.1
  misc_feature (1)..(323): Homolog of NCBI NO: 15235536 NR Description: cytochrome p450 family; protein id: At4g37370.1, by cDNA: 253698., supported by cDNA: gi_17473897 [Arabidopsis
  misc_feature (1)..(319): Homolog of NCBI NO: 21554381 NR Description: cytochrome P450-like protein [Arabidopsis
  misc_feature (1)..(318): Homolog of NCBI NO: 15235517 NR Description: cytochrome p450 family; protein id: At4g37320.1
  misc_feature (1)..(319): Homolog of NCBI NO: 15235533 NR Description: cytochrome p450 family; protein id: At4g37330.1
  misc_feature (1)..(319): Homolog of NCBI NO: 25282604 NR Description: cytochrome P450 monooxygenase [imported] - thaliana (fragment) >gi|3164142|dbj|BAA28538.1| cytochrome P450
  misc_feature (1)..(319): Homolog of NCBI NO: 30692923 NR Description: cytochrome P450 91A1 [Arabidopsis thaliana] Cytochrome P450 81D1 >gi|9759034|dbj|BAB09361.1| cytochrome P450 thaliana] >gi|20147351|gb|AAM10388.1| AT5g36220/T30G6_3

SEQ ID NO: 93778 - DNA, 765 bp, Arabidopsis thaliana; identical to SEQ ID NO: 90022
  misc_feature (1)..(765): Ceres Seq. ID no. 12721830
  misc_feature: MA Experiment ID: 20000184 Result: Up-regulated in Transcription
  misc_feature: MA Experiment 20000184 PARAMETER Experiment Name: At_Shoots__P Parameter: Age (day) Value: 7
  misc_feature: MA Experiment 20000184 PARAMETER Experiment Name: At_Shoots__P Parameter: Tissue Value: Shoots vs. Whole Plant

SEQ ID NO: 93779 - protein, 254 aa, Arabidopsis thaliana; identical to SEQ ID NO: 90023
  peptide (1)..(254): Ceres Seq. ID no. 12721831
  misc_feature (1)..(254): Homolog of NCBI NO: 18408541 NR Description: WRKY family transcription factor; protein id: supported by cDNA: gi_15991731 [Arabidopsis thaliana]
  misc_feature (1)..(254): Homolog of NCBI NO: 25404630 NR Description: probable wrky-type DNA binding protein F28G11.3
  misc_feature (1)..(254): Homolog of NCBI NO: 15219685 NR Description: WRKY family transcription factor; protein id: supported by cDNA: gi_18252118 [Arabidopsis thaliana]
  misc_feature (1)..(245): Homolog of NCBI NO: 15219706 NR Description: hypothetical protein; protein id: At1g66600.1, by cDNA: gi_17980953 [Arabidopsis thaliana]
  misc_feature (67)..(231): Homolog of NCBI NO: 15220174 NR Description: WRKY family transcription factor; protein id: [Arabidopsis thaliana] >gi|25406675|pir||A96838 hypothetical
  misc_feature (2)..(168): Homolog of NCBI NO: 13506735 NR Description: WRKY DNA-binding protein 62 [Arabidopsis thaliana]
  misc_feature (2)..(168): Homolog of NCBI NO: 30679452 NR Description: WRKY family transcription factor [Arabidopsis >gi|29839652|sp|Q9LZV6|WR62_ARATH Probable WRKY transcription
  misc_feature (10)..(168): Homolog of NCBI NO: 11358138 NR Description: hypothetical protein T20L15.170 - Arabidopsis >gi|7329663|emb|CAB82760.1| putative protein [Arabidopsis
  misc_feature (1)..(244): Homolog of NCBI NO: 30688540 NR Description: WRKY family transcription factor [Arabidopsis >gi|29839548|sp|Q8GWF1|WR38_ARATH Probable WRKY transcription
  misc_feature (4)..(244): Homolog of NCBI NO: 9758663 NR Description: contains similarity to DNA-binding [Arabidopsis thaliana] >gi|17064162|gb|AAL35288.1|AF442395_1 WRKY

SEQ ID NO: 93780 - protein, 245 aa, Arabidopsis thaliana; identical to SEQ ID NO: 90024
  peptide (1)..(245): Ceres Seq. ID no. 12721832
  misc_feature (1)..(245): Homolog of NCBI NO: 18408541 NR Description: WRKY family transcription factor; protein id: supported by cDNA: gi_15991731 [Arabidopsis thaliana]
  misc_feature (1)..(245): Homolog of NCBI NO: 25404630 NR Description: probable wrky-type DNA binding protein F28G11.3
  misc_feature (1)..(245): Homolog of NCBI NO: 15219685 NR Description: WRKY family transcription factor; protein id: supported by cDNA: gi_18252118 [Arabidopsis thaliana]
  misc_feature (1)..(236): Homolog of NCBI NO: 15219706 NR Description: hypothetical protein; protein id: At1g66600.1, by cDNA: gi_17980953 [Arabidopsis thaliana]
  misc_feature (58)..(222): Homolog of NCBI NO: 15220174 NR Description: WRKY family transcription factor; protein id: [Arabidopsis thaliana] >gi|25406675|pir||A96838 hypothetical
  misc_feature (1)..(159): Homolog of NCBI NO: 13506735 NR Description: WRKY DNA-binding protein 62 [Arabidopsis thaliana]
  misc_feature (1)..(159): Homolog of NCBI NO: 30679452 NR Description: WRKY family transcription factor [Arabidopsis >gi|29839652|sp|Q9LZV6|WR62_ARATH Probable WRKY transcription
  misc_feature (1)..(159): Homolog of NCBI NO: 11358138 NR Description: hypothetical protein T20L15.170 - Arabidopsis >gi|7329663|emb|CAB82760.1| putative protein [Arabidopsis
  misc_feature (1)..(235): Homolog of NCBI NO: 30688540 NR Description: WRKY family transcription factor [Arabidopsis >gi|29839548|sp|Q8GWF1|WR38_ARATH Probable WRKY transcription
  misc_feature (1)..(235): Homolog of NCBI NO: 9758663 NR Description: contains similarity to DNA-binding [Arabidopsis thaliana] >gi|17064162|gb|AAL35288.1|AF442395_1 WRKY

SEQ ID NO: 93781 - protein, 200 aa, Arabidopsis thaliana; identical to SEQ ID NO: 90025
  peptide (1)..(200): Ceres Seq. ID no. 12721833
  misc_feature (1)..(200): Homolog of NCBI NO: 18408541 NR Description: WRKY family transcription factor; protein id: supported by cDNA: gi_15991731 [Arabidopsis thaliana]
  misc_feature (1)..(200): Homolog of NCBI NO: 25404630 NR Description: probable wrky-type DNA binding protein F28G11.3
  misc_feature (1)..(200): Homolog of NCBI NO: 15219685 NR Description: WRKY family transcription factor; protein id: supported by cDNA: gi_18252118 [Arabidopsis thaliana]
  misc_feature (1)..(191): Homolog of NCBI NO: 15219706 NR Description: hypothetical protein; protein id: At1g66600.1, by cDNA: gi_17980953 [Arabidopsis thaliana]
  misc_feature (13)..(177): Homolog of NCBI NO: 15220174 NR Description: WRKY family transcription factor; protein id: [Arabidopsis thaliana] >gi|25406675|pir||A96838 hypothetical
  misc_feature (1)..(114): Homolog of NCBI NO: 13506735 NR Description: WRKY DNA-binding protein 62 [Arabidopsis thaliana]
  misc_feature (1)..(114): Homolog of NCBI NO: 30679452 NR Description: WRKY family transcription factor [Arabidopsis >gi|29839652|sp|Q9LZV6|WR62_ARATH Probable WRKY transcription
  misc_feature (1)..(114): Homolog of NCBI NO: 11358138 NR Description: hypothetical protein T20L15.170 - Arabidopsis >gi|7329663|emb|CAB82760.1| putative protein [Arabidopsis
  misc_feature (1)..(190): Homolog of NCBI NO: 30688540 NR Description: WRKY family transcription factor [Arabidopsis >gi|29839548|sp|Q8GWF1|WR38_ARATH Probable WRKY transcription
  misc_feature (1)..(190): Homolog of NCBI NO: 9758663 NR Description: contains similarity to DNA-binding [Arabidopsis thaliana] >gi|17064162|gb|AAL35288.1|AF442395_1 WRKY

SEQ ID NO: 93782 - DNA, 1476 bp, Arabidopsis thaliana; identical to SEQ ID NO: 90026
  misc_feature (1)..(1476): Ceres Seq. ID no. 12721837
  misc_feature: MA Experiment ID: 20000314 Result: Down-regulated in Transcription
  misc_feature: MA Experiment 20000314 PARAMETER Experiment Name: At_14day_Shoots-Roots_Sub_P Parameter: Age (day) Value: 14
  misc_feature: MA Experiment 20000314 PARAMETER Experiment Name: At_14day_Shoots-Roots_Sub_P Parameter: Organism Value: A. thaliana
  misc_feature: MA Experiment 20000314 PARAMETER Experiment Name: At_14day_Shoots-Roots_Sub_P Parameter: Plant Line Value: WS
  misc_feature: MA Experiment 20000314 PARAMETER Experiment Name: At_14day_Shoots-Roots_Sub_P Parameter: Tissue Value: Roots vs. Whole Plant
  misc_feature: MA Experiment ID: 20000346 Result: Up-regulated in Transcription
  misc_feature: MA Experiment 20000346 PARAMETER Experiment Name: At_2mM_SA_Sub_P Parameter: Age (day) Value: 14
  misc_feature: MA Experiment 20000346 PARAMETER Experiment Name: At_2mM_SA_Sub_P Parameter: Organism Value: A. thaliana
  misc_feature: MA Experiment 20000346 PARAMETER Experiment Name: At_2mM_SA_Sub_P Parameter: Plant Line Value: WS
  misc_feature: MA Experiment 20000346 PARAMETER Experiment Name: At_2mM_SA_Sub_P Parameter: Timepoint (hr) Value: 1
  misc_feature: MA Experiment 20000346 PARAMETER Experiment Name: At_2mM_SA_Sub_P Parameter: Tissue Value: Aerial
  misc_feature: MA Experiment 20000346 PARAMETER Experiment Name: At_2mM_SA_Sub_P Parameter: Treatment Value: 2mM SA vs. No Treatment
  misc_feature: MA Experiment ID: 20000347 Result: Up-regulated in Transcription
  misc_feature: MA Experiment 20000347 PARAMETER Experiment Name: At_2mM_SA_Sub_P Parameter: Age (day) Value: 14
  misc_feature: MA Experiment 20000347 PARAMETER Experiment Name: At_2mM_SA_Sub_P Parameter: Organism Value: A. thaliana
  misc_feature: MA Experiment 20000347 PARAMETER Experiment Name: At_2mM_SA_Sub_P Parameter: Plant Line Value: WS
  misc_feature: MA Experiment 20000347 PARAMETER Experiment Name: At_2mM_SA_Sub_P Parameter: Timepoint (hr) Value: 6
  misc_feature: MA Experiment 20000347 PARAMETER Experiment Name: At_2mM_SA_Sub_P Parameter: Tissue Value: Aerial
  misc_feature: MA Experiment 20000347 PARAMETER Experiment Name: At_2mM_SA_Sub_P Parameter: Treatment Value: 2mM SA vs. No Treatment
  misc_feature: MA Experiment ID: 20000348 Result: Up-regulated in Transcription
  misc_feature: MA Experiment 20000348 PARAMETER Experiment Name: At_100uM_ABA_Sub_P Parameter: Age (day) Value: 14
  misc_feature: MA Experiment 20000348 PARAMETER Experiment Name: At_100uM_ABA_Sub_P Parameter: Organism Value: A. thaliana
  misc_feature: MA Experiment 20000348 PARAMETER Experiment Name: At_100uM_ABA_Sub_P Parameter: Plant Line Value: WS
  misc_feature: MA Experiment 20000348 PARAMETER Experiment Name: At_100uM_ABA_Sub_P Parameter: Timepoint (hr) Value: 1
  misc_feature: MA Experiment 20000348 PARAMETER Experiment Name: At_100uM_ABA_Sub_P Parameter: Tissue Value: Aerial
  misc_feature: MA Experiment 20000348 PARAMETER Experiment Name: At_100uM_ABA_Sub_P Parameter: Treatment Value: 100uM ABA vs. No Treatment

SEQ ID NO: 93783 - protein, 491 aa, Arabidopsis thaliana; identical to SEQ ID NO: 90027
  peptide (1)..(491): Ceres Seq. ID no. 12721838
  misc_feature (32)..(467): Pfam Name: Sugar (and other) transporter Pfam Description: Sugar (and other) transporter
  misc_feature (1)..(491): Homolog of NCBI NO: 15219686 NR Description: sucrose-proton symporter, putative; protein id:
  misc_feature (1)..(491): Homolog of NCBI NO: 15225986 NR Description: putative sucrose-proton symporter; protein id:
  misc_feature (1)..(491): Homolog of NCBI NO: 15239921 NR Description: sucrose transporter protein; protein id: [Arabidopsis thaliana] >gi|10178200|dbj|BAB11624.1| sucrose
  misc_feature (1)..(491): Homolog of NCBI NO: 15239949 NR Description: sucrose transporter protein; protein id: [Arabidopsis thaliana] >gi|9759315|dbj|BAB09682.1| sucrose
  misc_feature (8)..(491): Homolog of NCBI NO: 18091779 NR Description: sucrose transporter SUC1 [Brassica oleracea]
  misc_feature (8)..(491): Homolog of NCBI NO: 15217601 NR Description: sucrose transport protein SUC1; protein id: supported by cDNA: gi_15146267 [Arabidopsis thaliana]
  misc_feature (5)..(491): Homolog of NCBI NO: 12057172 NR Description: sucrose trasporter [Arabidopsis thaliana]
  misc_feature (5)..(491): Homolog of NCBI NO: 15217602 NR Description: putative sucrose transport protein; protein id: [Arabidopsis thaliana] >gi|25344713|pir||F96741 probable sucrose
  misc_feature (22)..(491): Homolog of NCBI NO: 15219938 NR Description: putative sucrose transport protein, SUC2; protein At1g22710.1, supported by cDNA: 7894., supported by cDNA: supported by cDNA: gi_15293104, supported by cDNA: gi_20147212,
  misc_feature (22)..(491): Homolog of NCBI NO: 18091781 NR Description: sucrose transporter SUC2 [Brassica oleracea]

SEQ ID NO: 93784 - protein, 460 aa, Arabidopsis thaliana; identical to SEQ ID NO: 90028
  peptide (1)..(460): Ceres Seq. ID no. 12721839
  misc_feature (1)..(436): Pfam Name: Sugar (and other) transporter Pfam Description: Sugar (and other) transporter
  misc_feature (1)..(460): Homolog of NCBI NO: 15219686 NR Description: sucrose-proton symporter, putative; protein id:
  misc_feature (1)..(460): Homolog of NCBI NO: 15225986 NR Description: putative sucrose-proton symporter; protein id:
  misc_feature (1)..(460): Homolog of NCBI NO: 15239921 NR Description: sucrose transporter protein; protein id: [Arabidopsis thaliana] >gi|10178200|dbj|BAB11624.1| sucrose
  misc_feature (1)..(460): Homolog of NCBI NO: 15239949 NR Description: sucrose transporter protein; protein id: [Arabidopsis thaliana] >gi|9759315|dbj|BAB09682.1| sucrose
  misc_feature (1)..(460): Homolog of NCBI NO: 18091779 NR Description: sucrose transporter SUC1 [Brassica oleracea]
  misc_feature (1)..(460): Homolog of NCBI NO: 15217601 NR Description: sucrose transport protein SUC1; protein id: supported by cDNA: gi_15146267 [Arabidopsis thaliana]
  misc_feature (1)..(460): Homolog of NCBI NO: 12057172 NR Description: sucrose trasporter [Arabidopsis thaliana]
  misc_feature (1)..(460): Homolog of NCBI NO: 15217602 NR Description: putative sucrose transport protein; protein id: [Arabidopsis thaliana] >gi|25344713|pir||F96741 probable sucrose
  misc_feature (1)..(460): Homolog of NCBI NO: 15219938 NR Description: putative sucrose transport protein, SUC2; protein At1g22710.1, supported by cDNA: 7894., supported by cDNA: supported by cDNA: gi_15293104, supported by cDNA: gi_20147212,
  misc_feature (1)..(460): Homolog of NCBI NO: 18091781 NR Description: sucrose transporter SUC2 [Brassica oleracea]

SEQ ID NO: 93785 - protein, 365 aa, Arabidopsis thaliana; identical to SEQ ID NO: 90029
  peptide (1)..(365): Ceres Seq. ID no. 12721840
  misc_feature (1)..(341): Pfam Name: Sugar (and other) transporter Pfam Description: Sugar (and other) transporter
  misc_feature (1)..(365): Homolog of NCBI NO: 15219686 NR Description: sucrose-proton symporter, putative; protein id:
  misc_feature (1)..(365): Homolog of NCBI NO: 15225986 NR Description: putative sucrose-proton symporter; protein id:
  misc_feature (1)..(365): Homolog of NCBI NO: 15239921 NR Description: sucrose transporter protein; protein id: [Arabidopsis thaliana] >gi|10178200|dbj|BAB11624.1| sucrose
  misc_feature (1)..(365): Homolog of NCBI NO: 15239949 NR Description: sucrose transporter protein; protein id: [Arabidopsis thaliana] >gi|9759315|dbj|BAB09682.1| sucrose
  misc_feature (1)..(365): Homolog of NCBI NO: 18091779 NR Description: sucrose transporter SUC1 [Brassica oleracea]
  misc_feature (1)..(365): Homolog of NCBI NO: 15217601 NR Description: sucrose transport protein SUC1; protein id: supported by cDNA: gi_15146267 [Arabidopsis thaliana]
  misc_feature (1)..(365): Homolog of NCBI NO: 12057172 NR Description: sucrose trasporter [Arabidopsis thaliana]
  misc_feature (1)..(365): Homolog of NCBI NO: 15217602 NR Description: putative sucrose transport protein; protein id: [Arabidopsis thaliana] >gi|25344713|pir||F96741 probable sucrose
  misc_feature (1)..(365): Homolog of NCBI NO: 15219938 NR Description: putative sucrose transport protein, SUC2; protein At1g22710.1, supported by cDNA: 7894., supported by cDNA: supported by cDNA: gi_15293104, supported by cDNA: gi_20147212,
  misc_feature (1)..(365): Homolog of NCBI NO: 18091781 NR Description: sucrose transporter SUC2 [Brassica oleracea]

SEQ ID NO: 93786 - DNA, 726 bp, Arabidopsis thaliana; identical to SEQ ID NO: 90030
  misc_feature (1)..(726): Ceres Seq. ID no. 12721845
  misc_feature: MA Experiment ID: 20000315 Result: Down-regulated in Transcription
  misc_feature: MA Experiment 20000315 PARAMETER Experiment Name: At_14day_Shoots-Roots_Sub_P Parameter: Age (day) Value: 14
  misc_feature: MA Experiment 20000315 PARAMETER Experiment Name: At_14day_Shoots-Roots_Sub_P Parameter: Organism Value: A. thaliana
  misc_feature: MA Experiment 20000315 PARAMETER Experiment Name: At_14day_Shoots-Roots_Sub_P Parameter: Plant Line Value: WS
  misc_feature: MA Experiment 20000315 PARAMETER Experiment Name: At_14day_Shoots-Roots_Sub_P Parameter: Tissue Value: Shoots vs. Whole Plant
  misc_feature: MA Experiment ID: 20000347 Result: Up-regulated in Transcription
  misc_feature: MA Experiment 20000347 PARAMETER Experiment Name: At_2mM_SA_Sub_P Parameter: Age (day) Value: 14
  misc_feature: MA Experiment 20000347 PARAMETER Experiment Name: At_2mM_SA_Sub_P Parameter: Organism Value: A. thaliana
  misc_feature: MA Experiment 20000347 PARAMETER Experiment Name: At_2mM_SA_Sub_P Parameter: Plant Line Value: WS
  misc_feature: MA Experiment 20000347 PARAMETER Experiment Name: At_2mM_SA_Sub_P Parameter: Timepoint (hr) Value: 6
  misc_feature: MA Experiment 20000347 PARAMETER Experiment Name: At_2mM_SA_Sub_P Parameter: Tissue Value: Aerial
  misc_feature: MA Experiment 20000347 PARAMETER Experiment Name: At_2mM_SA_Sub_P Parameter: Treatment Value: 2mM SA vs. No Treatment
  misc_feature: MA Experiment ID: 20000440 Result: Down-regulated in Transcription
  misc_feature: MA Experiment 20000440 PARAMETER Experiment Name: At_Closed-Flower__Sub_P Parameter: Tissue Value: Closed Flower vs. Whole Plant

SEQ ID NO: 93787 - protein, 241 aa, Arabidopsis thaliana; identical to SEQ ID NO: 90031
  peptide (1)..(241): Ceres Seq. ID no. 12721846
  misc_feature (102)..(164): Pfam Name: WRKY DNA -binding domain Pfam Description: WRKY DNA -binding domain
  misc_feature (1)..(241): Homolog of NCBI NO: 15219706 NR Description: hypothetical protein; protein id: At1g66600.1, by cDNA: gi_17980953 [Arabidopsis thaliana]
  misc_feature (1)..(241): Homolog of NCBI NO: 15219685 NR Description: WRKY family transcription factor; protein id: supported by cDNA: gi_18252118 [Arabidopsis thaliana]
  misc_feature (1)..(239): Homolog of NCBI NO: 25404630 NR Description: probable wrky-type DNA binding protein F28G11.3
  misc_feature (1)..(239): Homolog of NCBI NO: 18408541 NR Description: WRKY family transcription factor; protein id: supported by cDNA: gi_15991731 [Arabidopsis thaliana]
  misc_feature (67)..(231): Homolog of NCBI NO: 15220174 NR Description: WRKY family transcription factor; protein id: [Arabidopsis thaliana] >gi|25406675|pir||A96838 hypothetical
  misc_feature (1)..(163): Homolog of NCBI NO: 30688540 NR Description: WRKY family transcription factor [Arabidopsis >gi|29839548|sp|Q8GWF1|WR38_ARATH Probable WRKY transcription
  misc_feature (4)..(163): Homolog of NCBI NO: 9758663 NR Description: contains similarity to DNA-binding [Arabidopsis thaliana] >gi|17064162|gb|AAL35288.1|AF442395_1 WRKY
  misc_feature (3)..(189): Homolog of NCBI NO: 13506735 NR Description: WRKY DNA-binding protein 62 [Arabidopsis thaliana]
  misc_feature (3)..(189): Homolog of NCBI NO: 30679452 NR Description: WRKY family transcription factor [Arabidopsis >gi|29839652|sp|Q9LZV6|WR62_ARATH Probable WRKY transcription
  misc_feature (13)..(189): Homolog of NCBI NO: 11358138 NR Description: hypothetical protein T20L15.170 - Arabidopsis >gi|7329663|emb|CAB82760.1| putative protein [Arabidopsis

SEQ ID NO: 93788 - protein, 171 aa, Arabidopsis thaliana; identical to SEQ ID NO: 90032
  peptide (1)..(171): Ceres Seq. ID no. 12721847
  misc_feature (32)..(94): Pfam Name: WRKY DNA -binding domain Pfam Description: WRKY DNA -binding domain
  misc_feature (1)..(171): Homolog of NCBI NO: 15219706 NR Description: hypothetical protein; protein id: At1g66600.1, by cDNA: gi_17980953 [Arabidopsis thaliana]
  misc_feature (1)..(171): Homolog of NCBI NO: 15219685 NR Description: WRKY family transcription factor; protein id: supported by cDNA: gi_18252118 [Arabidopsis thaliana]
  misc_feature (1)..(169): Homolog of NCBI NO: 25404630 NR Description: probable wrky-type DNA binding protein F28G11.3
  misc_feature (1)..(169): Homolog of NCBI NO: 18408541 NR Description: WRKY family transcription factor; protein id: supported by cDNA: gi_15991731 [Arabidopsis thaliana]
  misc_feature (1)..(161): Homolog of NCBI NO: 15220174 NR Description: WRKY family transcription factor; protein id: [Arabidopsis thaliana] >gi|25406675|pir||A96838 hypothetical
  misc_feature (1)..(93): Homolog of NCBI NO: 30688540 NR Description: WRKY family transcription factor [Arabidopsis >gi|29839548|sp|Q8GWF1|WR38_ARATH Probable WRKY transcription
  misc_feature (1)..(93): Homolog of NCBI NO: 9758663 NR Description: contains similarity to DNA-binding [Arabidopsis thaliana] >gi|17064162|gb|AAL35288.1|AF442395_1 WRKY
  misc_feature (1)..(119): Homolog of NCBI NO: 13506735 NR Description: WRKY DNA-binding protein 62 [Arabidopsis thaliana]
  misc_feature (1)..(119): Homolog of NCBI NO: 30679452 NR Description: WRKY family transcription factor [Arabidopsis >gi|29839652|sp|Q9LZV6|WR62_ARATH Probable WRKY transcription
  misc_feature (1)..(119): Homolog of NCBI NO: 11358138 NR Description: hypothetical protein T20L15.170 - Arabidopsis >gi|7329663|emb|CAB82760.1| putative protein [Arabidopsis

SEQ ID NO: 93789 - DNA, 1190 bp, Arabidopsis thaliana; identical to SEQ ID NO: 90033
  misc_feature (1)..(1190): Ceres Seq. ID no. 12721862
  misc_feature: MA Experiment ID: 108595 Result: Down-regulated in Transcription
  misc_feature: MA Experiment 108595 PARAMETER Experiment Name: At_Ler-pi_Ovule_cDNA_P Parameter: Plant Line Value: null
  misc_feature: MA Experiment ID: 20000184 Result: Down-regulated in Transcription
  misc_feature: MA Experiment 20000184 PARAMETER Experiment Name: At_Shoots__P Parameter: Age (day) Value: 7
  misc_feature: MA Experiment 20000184 PARAMETER Experiment Name: At_Shoots__P Parameter: Tissue Value: Shoots vs. Whole Plant
  misc_feature: MA Experiment ID: 20000185 Result: Down-regulated in Transcription
  misc_feature: MA Experiment 20000185 PARAMETER Experiment Name: At_Roots__P Parameter: Age (day) Value: 7 vs. 21
  misc_feature: MA Experiment 20000185 PARAMETER Experiment Name: At_Roots__P Parameter: Organism Value: A. thaliana
  misc_feature: MA Experiment 20000185 PARAMETER Experiment Name: At_Roots__P Parameter: Tissue Value: Roots vs. Whole Plant
  misc_feature: MA Experiment ID: 20000224 Result: Up-regulated in Transcription
  misc_feature: MA Experiment ID: 20000438 Result: Down-regulated in Transcription
  misc_feature: MA Experiment 20000438 PARAMETER Experiment Name: At_Shoots__P Parameter: Age (day) Value: 14
  misc_feature: MA Experiment 20000438 PARAMETER Experiment Name: At_Shoots__P Parameter: Tissue Value: Shoots vs. Whole Plant
  misc_feature: MA Experiment ID: 20000439 Result: Down-regulated in Transcription
  misc_feature: MA Experiment 20000439 PARAMETER Experiment Name: At_Roots__P Parameter: Age (day) Value: 14 vs. 21
  misc_feature: MA Experiment 20000439 PARAMETER Experiment Name: At_Roots__P Parameter: Organism Value: A. thaliana
  misc_feature: MA Experiment 20000439 PARAMETER Experiment Name: At_Roots__P Parameter: Tissue Value: Roots vs. Whole Plant
  misc_feature: MA Experiment ID: 20001247 Result: Down-regulated in Transcription
  misc_feature: MA Experiment 20001247 PARAMETER Experiment Name: At_Far-red-induction_P Parameter: Age (day) Value: 7
  misc_feature: MA Experiment 20001247 PARAMETER Experiment Name: At_Far-red-induction_P Parameter: Light Value: Far-red vs. White
  misc_feature: MA Experiment 20001247 PARAMETER Experiment Name: At_Far-red-induction_P Parameter: Organism Value: A. thaliana
  misc_feature: MA Experiment 20001247 PARAMETER Experiment Name: At_Far-red-induction_P Parameter: Plant Line Value: Columbia
  misc_feature: MA Experiment 20001247 PARAMETER Experiment Name: At_Far-red-induction_P Parameter: Timepoint (hr) Value: 1
  misc_feature: MA Experiment 20001247 PARAMETER Experiment Name: At_Far-red-induction_P Parameter: Tissue Value: Whole Plant

SEQ ID NO: 93790 - protein, 327 aa, Arabidopsis thaliana; identical to SEQ ID NO: 22751
  peptide (1)..(327): Ceres Seq. ID no. 12721863
  misc_feature (98)..(277): Pfam Name: Clp protease Pfam Description: Clp protease
  misc_feature (19)..(327): Homolog of NCBI NO: 18408572 NR Description: ATP-dependent Clp protease proteolytic subunit protein id: At1g66670.1, supported by cDNA: 34480., supported by gi_13899066, supported by cDNA: gi_18377549, supported by cDNA:
  misc_feature (19)..(327): Homolog of NCBI NO: 13899067 NR Description: ATP-dependent Clp protease; nClpP3 [Arabidopsis
  misc_feature (23)..(327): Homolog of NCBI NO: 25456012 NR Description: probable ATP-dependent clp proteinase (EC
  misc_feature (19)..(327): Homolog of NCBI NO: 15864561 NR Description: ClpP putative protein [Brassica napus]
  misc_feature (19)..(327): Homolog of NCBI NO: 7657879 NR Description: ClpP [Brassica napus var. napus]
  misc_feature (21)..(327): Homolog of NCBI NO: 6069464 NR Description: S-locus protein 2 [Brassica rapa]
  misc_feature (52)..(327): Homolog of NCBI NO: 17028170 NR Description: ClpP [Brassica oleracea]
  misc_feature (61)..(322): Homolog of NCBI NO: 34914540 NR Description: putative ATP-dependent Clp protease [Oryza sativa
  misc_feature (159)..(322): Homolog of NCBI NO: 21449427 NR Description: ATP-dependent Clp protease [Oryza sativa (indica
  misc_feature (4)..(274): Homolog of NCBI NO: 25019682 NR Description: ClpP2 [Synechococcus sp. PCC 7942]

SEQ ID NO: 93791 - protein, 309 aa, Arabidopsis thaliana; identical to SEQ ID NO: 22752
  peptide (1)..(309): Ceres Seq. ID no. 12721864
  misc_feature (80)..(259): Pfam Name: Clp protease Pfam Description: Clp protease
  misc_feature (1)..(309): Homolog of NCBI NO: 18408572 NR Description: ATP-dependent Clp protease proteolytic subunit protein id: At1g66670.1, supported by cDNA: 34480., supported by gi_13899066, supported by cDNA: gi_18377549, supported by cDNA:
  misc_feature (1)..(309): Homolog of NCBI NO: 13899067 NR Description: ATP-dependent Clp protease; nClpP3 [Arabidopsis
  misc_feature (5)..(309): Homolog of NCBI NO: 25456012 NR Description: probable ATP-dependent clp proteinase (EC
  misc_feature (1)..(309): Homolog of NCBI NO: 15864561 NR Description: ClpP putative protein [Brassica napus]
  misc_feature (1)..(309): Homolog of NCBI NO: 7657879 NR Description: ClpP [Brassica napus var. napus]
  misc_feature (3)..(309): Homolog of NCBI NO: 6069464 NR Description: S-locus protein 2 [Brassica rapa]
  misc_feature (34)..(309): Homolog of NCBI NO: 17028170 NR Description: ClpP [Brassica oleracea]
  misc_feature (43)..(304): Homolog of NCBI NO: 34914540 NR Description: putative ATP-dependent Clp protease [Oryza sativa
  misc_feature (141)..(304): Homolog of NCBI NO: 21449427 NR Description: ATP-dependent Clp protease [Oryza sativa (indica
  misc_feature (1)..(256): Homolog of NCBI NO: 25019682 NR Description: ClpP2 [Synechococcus sp. PCC 7942]

SEQ ID NO: 93792 - protein, 307 aa, Arabidopsis thaliana; identical to SEQ ID NO: 22753
  peptide (1)..(307): Ceres Seq. ID no. 12721865
  misc_feature (78)..(257): Pfam Name: Clp protease Pfam Description: Clp protease
  misc_feature (1)..(307): Homolog of NCBI NO: 18408572 NR Description: ATP-dependent Clp protease proteolytic subunit protein id: At1g66670.1, supported by cDNA: 34480., supported by gi_13899066, supported by cDNA: gi_18377549, supported by cDNA:
  misc_feature (1)..(307): Homolog of NCBI NO: 13899067 NR Description: ATP-dependent Clp protease; nClpP3 [Arabidopsis
  misc_feature (3)..(307): Homolog of NCBI NO: 25456012 NR Description: probable ATP-dependent clp proteinase (EC
  misc_feature (1)..(307): Homolog of NCBI NO: 15864561 NR Description: ClpP putative protein [Brassica napus]
  misc_feature (1)..(307): Homolog of NCBI NO: 7657879 NR Description: ClpP [Brassica napus var. napus]
  misc_feature (1)..(307): Homolog of NCBI NO: 6069464 NR Description: S-locus protein 2 [Brassica rapa]
  misc_feature (32)..(307): Homolog of NCBI NO: 17028170 NR Description: ClpP [Brassica oleracea]
  misc_feature (41)..(302): Homolog of NCBI NO: 34914540 NR Description: putative ATP-dependent Clp protease [Oryza sativa
  misc_feature (139)..(302): Homolog of NCBI NO: 21449427 NR Description: ATP-dependent Clp protease [Oryza sativa (indica
  misc_feature (1)..(254): Homolog of NCBI NO: 25019682 NR Description: ClpP2 [Synechococcus sp. PCC 7942]

SEQ ID NO: 93793 - DNA, 1482 bp, Arabidopsis thaliana; identical to SEQ ID NO: 90037
  misc_feature (1)..(1482): Ceres Seq. ID no. 12721920
  misc_feature: MA Experiment ID: 20000166 Result: Up-regulated in Transcription
  misc_feature: MA Experiment 20000166 PARAMETER Experiment Name: At_100uM_ABA_P Parameter: Age (day) Value: 14
  misc_feature: MA Experiment 20000166 PARAMETER Experiment Name: At_100uM_ABA_P Parameter: Organism Value: A. thaliana
  misc_feature: MA Experiment 20000166 PARAMETER Experiment Name: At_100uM_ABA_P Parameter: Plant Line Value: WS
  misc_feature: MA Experiment 20000166 PARAMETER Experiment Name: At_100uM_ABA_P Parameter: Timepoint (hr) Value: 1
  misc_feature: MA Experiment 20000166 PARAMETER Experiment Name: At_100uM_ABA_P Parameter: Tissue Value: Aerial
  misc_feature: MA Experiment 20000166 PARAMETER Experiment Name: At_100uM_ABA_P Parameter: Treatment Value: 100uM ABA vs. No Treatment
  misc_feature: MA Experiment ID: 20000169 Result: Up-regulated in Transcription
  misc_feature: MA Experiment 20000169 PARAMETER Experiment Name: At_100uM_ABA_P Parameter: Age (day) Value: 14
  misc_feature: MA Experiment 20000169 PARAMETER Experiment Name: At_100uM_ABA_P Parameter: Organism Value: A. thaliana
  misc_feature: MA Experiment 20000169 PARAMETER Experiment Name: At_100uM_ABA_P Parameter: Plant Line Value: WS
  misc_feature: MA Experiment 20000169 PARAMETER Experiment Name: At_100uM_ABA_P Parameter: Timepoint (hr) Value: 6
  misc_feature: MA Experiment 20000169 PARAMETER Experiment Name: At_100uM_ABA_P Parameter: Tissue Value: Aerial
  misc_feature: MA Experiment 20000169 PARAMETER Experiment Name: At_100uM_ABA_P Parameter: Treatment Value: 100uM ABA vs. No Treatment
  misc_feature: MA Experiment ID: 20000179 Result: Up-regulated in Transcription
  misc_feature: MA Experiment 20000179 PARAMETER Experiment Name: At_Germinating_Seeds_P Parameter: Age (hr) Value: 6 vs. 0
  misc_feature: MA Experiment 20000179 PARAMETER Experiment Name: At_Germinating_Seeds_P Parameter: Tissue Value: Germinating Seeds
  misc_feature: MA Experiment ID: 20000184 Result: Down-regulated in Transcription
  misc_feature: MA Experiment 20000184 PARAMETER Experiment Name: At_Shoots__P Parameter: Age (day) Value: 7
  misc_feature: MA Experiment 20000184 PARAMETER Experiment Name: At_Shoots__P Parameter: Tissue Value: Shoots vs. Whole Plant
  misc_feature: MA Experiment ID: 20000227 Result: Down-regulated in Transcription
  misc_feature: MA Experiment 20000227 PARAMETER Experiment Name: At_Root-Tips-vs-Tops_P Parameter: Tissue Value: Root Tips vs. Root Tops
  misc_feature: MA Experiment ID: 20000267 Result: Up-regulated in Transcription
  misc_feature: MA Experiment 20000267 PARAMETER Experiment Name: At_Drought_P Parameter: Age (day) Value: 7
  misc_feature: MA Experiment 20000267 PARAMETER Experiment Name: At_Drought_P Parameter: Organism Value: A. thaliana
  misc_feature: MA Experiment 20000267 PARAMETER Experiment Name: At_Drought_P Parameter: Plant Line Value: WS
  misc_feature: MA Experiment 20000267 PARAMETER Experiment Name: At_Drought_P Parameter: Timepoint (hr) Value: 6
  misc_feature: MA Experiment 20000267 PARAMETER Experiment Name: At_Drought_P Parameter: Tissue Value: Whole Plant
  misc_feature: MA Experiment 20000267 PARAMETER Experiment Name: At_Drought_P Parameter: Treatment Value: Drought vs. No Drought
  misc_feature: MA Experiment ID: 20000268 Result: Up-regulated in Transcription
  misc_feature: MA Experiment 20000268 PARAMETER Experiment Name: At_100mM_NaCl__P Parameter: Age (day) Value: 14
  misc_feature: MA Experiment 20000268 PARAMETER Experiment Name: At_100mM_NaCl__P Parameter: Organism Value: A. thaliana
  misc_feature: MA Experiment 20000268 PARAMETER Experiment Name: At_100mM_NaCl__P Parameter: Plant Line Value: WS
  misc_feature: MA Experiment 20000268 PARAMETER Experiment Name: At_100mM_NaCl__P Parameter: Timepoint (hr) Value: 6
  misc_feature: MA Experiment 20000268 PARAMETER Experiment Name: At_100mM_NaCl__P Parameter: Tissue Value: Whole Plant
  misc_feature: MA Experiment 20000268 PARAMETER Experiment Name: At_100mM_NaCl__P Parameter: Treatment Value: 100mM NaCl vs. No Treatment
  misc_feature: MA Experiment ID: 20000436 Result: Up-regulated in Transcription
  misc_feature: MA Experiment 20000436 PARAMETER Experiment Name: At_Drought_P Parameter: Age (day) Value: 7
  misc_feature: MA Experiment 20000436 PARAMETER Experiment Name: At_Drought_P Parameter: Organism Value: A. thaliana
  misc_feature: MA Experiment 20000436 PARAMETER Experiment Name: At_Drought_P Parameter: Plant Line Value: WS
  misc_feature: MA Experiment 20000436 PARAMETER Experiment Name: At_Drought_P Parameter: Timepoint (hr) Value: 12
  misc_feature: MA Experiment 20000436 PARAMETER Experiment Name: At_Drought_P Parameter: Tissue Value: Whole Plant
  misc_feature: MA Experiment 20000436 PARAMETER Experiment Name: At_Drought_P Parameter: Treatment Value: Drought vs. No Drought
  misc_feature: MA Experiment ID: 20000437 Result: Up-regulated in Transcription
  misc_feature: MA Experiment 20000437 PARAMETER Experiment Name: At_Drought_P Parameter: Age (day) Value: 8
  misc_feature: MA Experiment 20000437 PARAMETER Experiment Name: At_Drought_P Parameter: Organism Value: A. thaliana
  misc_feature: MA Experiment 20000437 PARAMETER Experiment Name: At_Drought_P Parameter: Plant Line Value: WS
  misc_feature: MA Experiment 20000437 PARAMETER Experiment Name: At_Drought_P Parameter: Timepoint (hr) Value: 24
  misc_feature: MA Experiment 20000437 PARAMETER Experiment Name: At_Drought_P Parameter: Tissue Value: Whole Plant
  misc_feature: MA Experiment 20000437 PARAMETER Experiment Name: At_Drought_P Parameter: Treatment Value: Drought vs. No Drought
  misc_feature: MA Experiment ID: 20000453 Result: Up-regulated in Transcription
  misc_feature: MA Experiment 20000453 PARAMETER Experiment Name: At_100uM_ABA_P Parameter: Age (day) Value: 15
  misc_feature: MA Experiment 20000453 PARAMETER Experiment Name: At_100uM_ABA_P Parameter: Organism Value: A. thaliana
  misc_feature: MA Experiment 20000453 PARAMETER Experiment Name: At_100uM_ABA_P Parameter: Plant Line Value: WS
  misc_feature: MA Experiment 20000453 PARAMETER Experiment Name: At_100uM_ABA_P Parameter: Timepoint (hr) Value: 24
  misc_feature: MA Experiment 20000453 PARAMETER Experiment Name: At_100uM_ABA_P Parameter: Tissue Value: Aerial
  misc_feature: MA Experiment 20000453 PARAMETER Experiment Name: At_100uM_ABA_P Parameter: Treatment Value: 100uM ABA vs. No Treatment
  misc_feature: MA Experiment ID: 20001554 Result: Up-regulated in Transcription
  misc_feature: MA Experiment 20001554 PARAMETER Experiment Name: At_Drought_Soil_Dry_P Parameter: Age (day) Value: 21
  misc_feature: MA Experiment 20001554 PARAMETER Experiment Name: At_Drought_Soil_Dry_P Parameter: Organism Value: A. thaliana
  misc_feature: MA Experiment 20001554 PARAMETER Experiment Name: At_Drought_Soil_Dry_P Parameter: Plant Line Value: WS
  misc_feature: MA Experiment 20001554 PARAMETER Experiment Name: At_Drought_Soil_Dry_P Parameter: Post Timepoint (hr) Value: None
  misc_feature: MA Experiment 20001554 PARAMETER Experiment Name: At_Drought_Soil_Dry_P Parameter: Post-Treatment Value: None
  misc_feature: MA Experiment 20001554 PARAMETER Experiment Name: At_Drought_Soil_Dry_P Parameter: Timepoint (day) Value: 7
  misc_feature: MA Experiment 20001554 PARAMETER Experiment Name: At_Drought_Soil_Dry_P Parameter: Treatment Value: Drought vs. No Drought
  misc_feature: MA Experiment ID: 20001555 Result: Up-regulated in Transcription
  misc_feature: MA Experiment 20001555 PARAMETER Experiment Name: At_Drought_Soil_Dry_P Parameter: Age (day) Value: 24
  misc_feature: MA Experiment 20001555 PARAMETER Experiment Name: At_Drought_Soil_Dry_P Parameter: Organism Value: A. thaliana
  misc_feature: MA Experiment 20001555 PARAMETER Experiment Name: At_Drought_Soil_Dry_P Parameter: Plant Line Value: WS
  misc_feature: MA Experiment 20001555 PARAMETER Experiment Name: At_Drought_Soil_Dry_P Parameter: Post Timepoint (hr) Value: None
  misc_feature: MA Experiment 20001555 PARAMETER Experiment Name: At_Drought_Soil_Dry_P Parameter: Post-Treatment Value: None
  misc_feature: MA Experiment 20001555 PARAMETER Experiment Name: At_Drought_Soil_Dry_P Parameter: Timepoint (day) Value: 10
  misc_feature: MA Experiment 20001555 PARAMETER Experiment Name: At_Drought_Soil_Dry_P Parameter: Treatment Value: Drought vs. No Drought
  misc_feature: MA Experiment ID: 20001556 Result: Up-regulated in Transcription
  misc_feature: MA Experiment 20001556 PARAMETER Experiment Name: At_Drought_Soil_Dry_P Parameter: Age (day) Value: 26
  misc_feature: MA Experiment 20001556 PARAMETER Experiment Name: At_Drought_Soil_Dry_P Parameter: Organism Value: A. thaliana
  misc_feature: MA Experiment 20001556 PARAMETER Experiment Name: At_Drought_Soil_Dry_P Parameter: Plant Line Value: WS
  misc_feature: MA Experiment 20001556 PARAMETER Experiment Name: At_Drought_Soil_Dry_P Parameter: Post Timepoint (hr) Value: None
  misc_feature: MA Experiment 20001556 PARAMETER Experiment Name: At_Drought_Soil_Dry_P Parameter: Post-Treatment Value: None
  misc_feature: MA Experiment 20001556 PARAMETER Experiment Name: At_Drought_Soil_Dry_P Parameter: Timepoint (day) Value: 12
  misc_feature: MA Experiment 20001556 PARAMETER Experiment Name: At_Drought_Soil_Dry_P Parameter: Treatment Value: Drought vs. No Drought
  misc_feature: MA Experiment ID: 20001558 Result: Down-regulated in Transcription
  misc_feature: MA Experiment 20001558 PARAMETER Experiment Name: At_Drought_Soil_Dry_P Parameter: Age (day) Value: 27
  misc_feature: MA Experiment 20001558 PARAMETER Experiment Name: At_Drought_Soil_Dry_P Parameter: Organism Value: A. thaliana
  misc_feature: MA Experiment 20001558 PARAMETER Experiment Name: At_Drought_Soil_Dry_P Parameter: Plant Line Value: WS
  misc_feature: MA Experiment 20001558 PARAMETER Experiment Name: At_Drought_Soil_Dry_P Parameter: Post Timepoint (hr) Value: 6
  misc_feature: MA Experiment 20001558 PARAMETER Experiment Name: At_Drought_Soil_Dry_P Parameter: Post-Treatment Value: Re-Water vs. No Drought
  misc_feature: MA Experiment 20001558 PARAMETER Experiment Name: At_Drought_Soil_Dry_P Parameter: Timepoint (day) Value: 13
  misc_feature: MA Experiment 20001558 PARAMETER Experiment Name: At_Drought_Soil_Dry_P Parameter: Treatment Value: Drought vs. No Drought
  misc_feature: MA Experiment ID: 20001904 Result: Up-regulated in Transcription
  misc_feature: MA Experiment 20001904 PARAMETER Experiment Name: At_Drought_Reproduction_P Parameter: Age (day) Value: 37
  misc_feature: MA Experiment 20001904 PARAMETER Experiment Name: At_Drought_Reproduction_P Parameter: Organism Value: A. thaliana
  misc_feature: MA Experiment 20001904 PARAMETER Experiment Name: At_Drought_Reproduction_P Parameter: Plant Line Value: WS
  misc_feature: MA Experiment 20001904 PARAMETER Experiment Name: At_Drought_Reproduction_P Parameter: Timepoint (day) Value: 7
  misc_feature: MA Experiment 20001904 PARAMETER Experiment Name: At_Drought_Reproduction_P Parameter: Tissue Value: Rosettes
  misc_feature: MA Experiment 20001904 PARAMETER Experiment Name: At_Drought_Reproduction_P Parameter: Treatment Value: Drought vs. No Drought
  misc_feature: MA Experiment ID: 20001905 Result: Up-regulated in Transcription
  misc_feature: MA Experiment 20001905 PARAMETER Experiment Name: At_Drought_Reproduction_P Parameter: Age (day) Value: 40
  misc_feature: MA Experiment 20001905 PARAMETER Experiment Name: At_Drought_Reproduction_P Parameter: Organism Value: A. thaliana
  misc_feature: MA Experiment 20001905 PARAMETER Experiment Name: At_Drought_Reproduction_P Parameter: Plant Line Value: WS
  misc_feature: MA Experiment 20001905 PARAMETER Experiment Name: At_Drought_Reproduction_P Parameter: Timepoint (day) Value: 10
  misc_feature: MA Experiment 20001905 PARAMETER Experiment Name: At_Drought_Reproduction_P Parameter: Tissue Value: Rosettes
  misc_feature: MA Experiment 20001905 PARAMETER Experiment Name: At_Drought_Reproduction_P Parameter: Treatment Value: Drought vs. No Drought
  misc_feature: MA Experiment ID: 20001911 Result: Up-regulated in Transcription
  misc_feature: MA Experiment 20001911 PARAMETER Experiment Name: At_Drought_Reproduction_P Parameter: Age (day) Value: 40
  misc_feature: MA Experiment 20001911 PARAMETER Experiment Name: At_Drought_Reproduction_P Parameter: Organism Value: A. thaliana
  misc_feature: MA Experiment 20001911 PARAMETER Experiment Name: At_Drought_Reproduction_P Parameter: Plant Line Value: WS
  misc_feature: MA Experiment 20001911 PARAMETER Experiment Name: At_Drought_Reproduction_P Parameter: Timepoint (day) Value: 10
  misc_feature: MA Experiment 20001911 PARAMETER Experiment Name: At_Drought_Reproduction_P Parameter: Tissue Value: Flowers
  misc_feature: MA Experiment 20001911 PARAMETER Experiment Name: At_Drought_Reproduction_P Parameter: Treatment Value: Drought vs. No Drought

SEQ ID NO: 93794 - protein, 493 aa, Arabidopsis thaliana; identical to SEQ ID NO: 90038
  peptide (1)..(493): Ceres Seq. ID no. 12721921
  misc_feature (54)..(489): Pfam Name: Sugar (and other) transporter Pfam Description: Sugar (and other) transporter
  misc_feature (1)..(493): Homolog of NCBI NO: 15220399 NR Description: integral membrane protein, putative; protein id:
  misc_feature (1)..(490): Homolog of NCBI NO: 27261731 NR Description: sugar transporter [Citrus unshiu]
  misc_feature (13)..(491): Homolog of NCBI NO: 30699453 NR Description: hexose transporter, putative [Arabidopsis >gi|30699455|ref|NP_178100.3| hexose transporter, putative
  misc_feature (61)..(491): Homolog of NCBI NO: 25308946 NR Description: probable sugar transporter, 77409-81599 - Arabidopsis thaliana >gi|12324590|gb|AAG52251.1|AC011717_19
  misc_feature (61)..(491): Homolog of NCBI NO: 7715596 NR Description: F20B17.24 [Arabidopsis thaliana]
  misc_feature (130)..(491): Homolog of NCBI NO: 19347894 NR Description: putative hexose transporter protein [Arabidopsis
  misc_feature (52)..(489): Homolog of NCBI NO: 8347246 NR Description: hexose transporter [Solanum tuberosum]
  misc_feature (52)..(489): Homolog of NCBI NO: 9858106 NR Description: putative glucose translocator [Mesembryanthemum
  misc_feature (52)..(489): Homolog of NCBI NO: 8347242 NR Description: hexose transporter [Spinacia oleracea]
  misc_feature (2)..(489): Homolog of NCBI NO: 8347244 NR Description: hexose transporter [Nicotiana tabacum]

SEQ ID NO: 93795 - protein, 483 aa, Arabidopsis thaliana; identical to SEQ ID NO: 90039
  peptide (1)..(483): Ceres Seq. ID no. 12721922
  misc_feature (44)..(479): Pfam Name: Sugar (and other) transporter Pfam Description: Sugar (and other) transporter
  misc_feature (1)..(483): Homolog of NCBI NO: 15220399 NR Description: integral membrane protein, putative; protein id:
  misc_feature (1)..(480): Homolog of NCBI NO: 27261731 NR Description: sugar transporter [Citrus unshiu]
  misc_feature (3)..(481): Homolog of NCBI NO: 30699453 NR Description: hexose transporter, putative [Arabidopsis >gi|30699455|ref|NP_178100.3| hexose transporter, putative
  misc_feature (51)..(481): Homolog of NCBI NO: 25308946 NR Description: probable sugar transporter, 77409-81599 - Arabidopsis thaliana >gi|12324590|gb|AAG52251.1|AC011717_19
  misc_feature (51)..(481): Homolog of NCBI NO: 7715596 NR Description: F20B17.24 [Arabidopsis thaliana]
  misc_feature (120)..(481): Homolog of NCBI NO: 19347894 NR Description: putative hexose transporter protein [Arabidopsis
  misc_feature (42)..(479): Homolog of NCBI NO: 8347246 NR Description: hexose transporter [Solanum tuberosum]
  misc_feature (42)..(479): Homolog of NCBI NO: 9858106 NR Description: putative glucose translocator [Mesembryanthemum
  misc_feature (42)..(479): Homolog of NCBI NO: 8347242 NR Description: hexose transporter [Spinacia oleracea]
  misc_feature (1)..(479): Homolog of NCBI NO: 8347244 NR Description: hexose transporter [Nicotiana tabacum]

SEQ ID NO: 93796 - protein, 471 aa, Arabidopsis thaliana; identical to SEQ ID NO: 90040
  peptide (1)..(471): Ceres Seq. ID no. 12721923
  misc_feature (32)..(467): Pfam Name: Sugar (and other) transporter Pfam Description: Sugar (and other) transporter
  misc_feature (1)..(471): Homolog of NCBI NO: 15220399 NR Description: integral membrane protein, putative; protein id:
  misc_feature (1)..(468): Homolog of NCBI NO: 27261731 NR Description: sugar transporter [Citrus unshiu]
  misc_feature (1)..(469): Homolog of NCBI NO: 30699453 NR Description: hexose transporter, putative [Arabidopsis >gi|30699455|ref|NP_178100.3| hexose transporter, putative
  misc_feature (39)..(469): Homolog of NCBI NO: 25308946 NR Description: probable sugar transporter, 77409-81599 - Arabidopsis thaliana >gi|12324590|gb|AAG52251.1|AC011717_19
  misc_feature (39)..(469): Homolog of NCBI NO: 7715596 NR Description: F20B17.24 [Arabidopsis thaliana]
  misc_feature (108)..(469): Homolog of NCBI NO: 19347894 NR Description: putative hexose transporter protein [Arabidopsis
  misc_feature (30)..(467): Homolog of NCBI NO: 8347246 NR Description: hexose transporter [Solanum tuberosum]
  misc_feature (30)..(467): Homolog of NCBI NO: 9858106 NR Description: putative glucose translocator [Mesembryanthemum
  misc_feature (30)..(467): Homolog of NCBI NO: 8347242 NR Description: hexose transporter [Spinacia oleracea]
  misc_feature (1)..(467): Homolog of NCBI NO: 8347244 NR Description: hexose transporter [Nicotiana tabacum]

SEQ ID NO: 93797 - DNA, 2061 bp, Arabidopsis thaliana; identical to SEQ ID NO: 90041
  misc_feature (1)..(2061): Ceres Seq. ID no. 12721956
  misc_feature: MA Experiment ID: 20000234 Result: Up-regulated in Transcription
  misc_feature: MA Experiment 20000234 PARAMETER Experiment Name: At_Siliques_P Parameter: Age (day) Value: 21
  misc_feature: MA Experiment 20000234 PARAMETER Experiment Name: At_Siliques_P Parameter: Organism Value: A. thaliana
  misc_feature: MA Experiment 20000234 PARAMETER Experiment Name: At_Siliques_P Parameter: Plant Line Value: WS
  misc_feature: MA Experiment 20000234 PARAMETER Experiment Name: At_Siliques_P Parameter: Tissue Value: Less Than 5mm Siliques vs. Whole Plant
  misc_feature: MA Experiment ID: 20000439 Result: Up-regulated in Transcription
  misc_feature: MA Experiment 20000439 PARAMETER Experiment Name: At_Roots__P Parameter: Age (day) Value: 14 vs. 21
  misc_feature: MA Experiment 20000439 PARAMETER Experiment Name: At_Roots__P Parameter: Organism Value: A. thaliana
  misc_feature: MA Experiment 20000439 PARAMETER Experiment Name: At_Roots__P Parameter: Tissue Value: Roots vs. Whole Plant

SEQ ID NO: 93798 - protein, 686 aa, Arabidopsis thaliana; identical to SEQ ID NO: 90042
  peptide (1)..(686): Ceres Seq. ID no. 12721957
  misc_feature (146)..(424): Pfam Name: Protein kinase domain Pfam Description: Protein kinase domain
  misc_feature (25)..(686): Homolog of NCBI NO: 15217565 NR Description: putative protein kinase; protein id: At1g09600.1
  misc_feature (25)..(686): Homolog of NCBI NO: 25402555 NR Description: hypothetical protein [imported] - Arabidopsis >gi|3482933|gb|AAC33218.1| Similar to cdc2 protein kinases
  misc_feature (1)..(670): Homolog of NCBI NO: 15219169 NR Description: cell division-related protein, putative; protein At1g53050.1 [Arabidopsis thaliana] >gi|25405618|pir||A96571
  misc_feature (1)..(670): Homolog of NCBI NO: 28393523 NR Description: putative cell division-related protein
  misc_feature (99)..(585): Homolog of NCBI NO: 15217521 NR Description: putative protein kinase; protein id: At1g71530.1
  misc_feature (629)..(679): Homolog of NCBI NO: 15217521 NR Description: putative protein kinase; protein id: At1g71530.1
  misc_feature (118)..(681): Homolog of NCBI NO: 34903662 NR Description: putative CRK1 protein [Oryza sativa (japonica group)] >gi|20804521|dbj|BAB92215.1| putative CRK1 protein [Oryza
  misc_feature (1)..(541): Homolog of NCBI NO: 7488162 NR Description: probable protein kinase T5L19.140 (EC 2.7.1.-) - thaliana >gi|4539004|emb|CAB39625.1| putative protein kinase thaliana] >gi|7267697|emb|CAB78124.1| putative protein kinase
  misc_feature (555)..(675): Homolog of NCBI NO: 7488162 NR Description: probable protein kinase T5L19.140 (EC 2.7.1.-) - thaliana >gi|4539004|emb|CAB39625.1| putative protein kinase thaliana] >gi|7267697|emb|CAB78124.1| putative protein kinase
  misc_feature (1)..(524): Homolog of NCBI NO: 15217643 NR Description: protein kinase, putative; protein id: At1g33770.1

SEQ ID NO: 93799 - protein, 609 aa, Arabidopsis thaliana; identical to SEQ ID NO: 90043
  peptide (1)..(609): Ceres Seq. ID no. 12721958
  misc_feature (69)..(347): Pfam Name: Protein kinase domain Pfam Description: Protein kinase domain
  misc_feature (1)..(609): Homolog of NCBI NO: 15217565 NR Description: putative protein kinase; protein id: At1g09600.1
  misc_feature (1)..(609): Homolog of NCBI NO: 25402555 NR Description: hypothetical protein [imported] - Arabidopsis >gi|3482933|gb|AAC33218.1| Similar to cdc2 protein kinases
  misc_feature (1)..(593): Homolog of NCBI NO: 15219169 NR Description: cell division-related protein, putative; protein At1g53050.1 [Arabidopsis thaliana] >gi|25405618|pir||A96571
  misc_feature (1)..(593): Homolog of NCBI NO: 28393523 NR Description: putative cell division-related protein
  misc_feature (22)..(508): Homolog of NCBI NO: 15217521 NR Description: putative protein kinase; protein id: At1g71530.1
  misc_feature (552)..(602): Homolog of NCBI NO: 15217521 NR Description: putative protein kinase; protein id: At1g71530.1
  misc_feature (41)..(604): Homolog of NCBI NO: 34903662 NR Description: putative CRK1 protein [Oryza sativa (japonica group)] >gi|20804521|dbj|BAB92215.1| putative CRK1 protein [Oryza
  misc_feature (1)..(464): Homolog of NCBI NO: 7488162 NR Description: probable protein kinase T5L19.140 (EC 2.7.1.-) - thaliana >gi|4539004|emb|CAB39625.1| putative protein kinase thaliana] >gi|7267697|emb|CAB78124.1| putative protein kinase
  misc_feature (478)..(598): Homolog of NCBI NO: 7488162 NR Description: probable protein kinase T5L19.140 (EC 2.7.1.-) - thaliana >gi|4539004|emb|CAB39625.1| putative protein kinase thaliana] >gi|7267697|emb|CAB78124.1| putative protein kinase
  misc_feature (1)..(447): Homolog of NCBI NO: 15217643 NR Description: protein kinase, putative; protein id: At1g33770.1

SEQ ID NO: 93800 - protein, 583 aa, Arabidopsis thaliana; identical to SEQ ID NO: 90044
  peptide (1)..(583): Ceres Seq. ID no. 12721959
  misc_feature (43)..(321): Pfam Name: Protein kinase domain Pfam Description: Protein kinase domain
  misc_feature (1)..(583): Homolog of NCBI NO: 15217565 NR Description: putative protein kinase; protein id: At1g09600.1
  misc_feature (1)..(583): Homolog of NCBI NO: 25402555 NR Description: hypothetical protein [imported] - Arabidopsis >gi|3482933|gb|AAC33218.1| Similar to cdc2 protein kinases
  misc_feature (1)..(567): Homolog of NCBI NO: 15219169 NR Description: cell division-related protein, putative; protein At1g53050.1 [Arabidopsis thaliana] >gi|25405618|pir||A96571
  misc_feature (1)..(567): Homolog of NCBI NO: 28393523 NR Description: putative cell division-related protein
  misc_feature (1)..(482): Homolog of NCBI NO: 15217521 NR Description: putative protein kinase; protein id: At1g71530.1
  misc_feature (526)..(576): Homolog of NCBI NO: 15217521 NR Description: putative protein kinase; protein id: At1g71530.1
  misc_feature (15)..(578): Homolog of NCBI NO: 34903662 NR Description: putative CRK1 protein [Oryza sativa (japonica group)] >gi|20804521|dbj|BAB92215.1| putative CRK1 protein [Oryza
  misc_feature (1)..(438): Homolog of NCBI NO: 7488162 NR Description: probable protein kinase T5L19.140 (EC 2.7.1.-) - thaliana >gi|4539004|emb|CAB39625.1| putative protein kinase thaliana] >gi|7267697|emb|CAB78124.1| putative protein kinase
  misc_feature (452)..(572): Homolog of NCBI NO: 7488162 NR Description: probable protein kinase T5L19.140 (EC 2.7.1.-) - thaliana >gi|4539004|emb|CAB39625.1| putative protein kinase thaliana] >gi|7267697|emb|CAB78124.1| putative protein kinase
  misc_feature (1)..(421): Homolog of NCBI NO: 15217643 NR Description: protein kinase, putative; protein id: At1g33770.1

SEQ ID NO: 93801 - DNA, 1649 bp, Arabidopsis thaliana; identical to SEQ ID NO: 90045
  misc_feature (1)..(1649): Ceres Seq. ID no. 12721960
  misc_feature: MA Experiment ID: 108434 Result: Up-regulated in Transcription
  misc_feature: MA Experiment 108434 PARAMETER Experiment Name: At_Root_Tips_cDNA_P Parameter: Tissue Value: Root Tips
  misc_feature: MA Experiment ID: 108462 Result: Down-regulated in Transcription
  misc_feature: MA Experiment 108462 PARAMETER Experiment Name: At_Germinating_Seeds_cDNA_P Parameter: Age (day) Value: 2 vs. 0
  misc_feature: MA Experiment 108462 PARAMETER Experiment Name: At_Germinating_Seeds_cDNA_P Parameter: Tissue Value: Germinating Seeds
  misc_feature: MA Experiment ID: 108463 Result: Down-regulated in Transcription
  misc_feature: MA Experiment 108463 PARAMETER Experiment Name: At_Germinating_Seeds_cDNA_P Parameter: Age (day) Value: 3 vs. 0
  misc_feature: MA Experiment 108463 PARAMETER Experiment Name: At_Germinating_Seeds_cDNA_P Parameter: Tissue Value: Germinating Seeds
  misc_feature: MA Experiment ID: 108464 Result: Down-regulated in Transcription
  misc_feature: MA Experiment 108464 PARAMETER Experiment Name: At_Germinating_Seeds_cDNA_P Parameter: Age (day) Value: 4 vs. 0
  misc_feature: MA Experiment 108464 PARAMETER Experiment Name: At_Germinating_Seeds_cDNA_P Parameter: Tissue Value: Germinating Seeds
  misc_feature: MA Experiment ID: 20000111 Result: Up-regulated in Transcription
  misc_feature: MA Experiment 20000111 PARAMETER Experiment Name: At_42deg_Heat_cDNA_P Parameter: Temperature (deg C) Value: 42 vs. 22
  misc_feature: MA Experiment 20000111 PARAMETER Experiment Name: At_42deg_Heat_cDNA_P Parameter: Timepoint (hr) Value: 6
  misc_feature: MA Experiment 20000111 PARAMETER Experiment Name: At_42deg_Heat_cDNA_P Parameter: Tissue Value: Aerial
  misc_feature: MA Experiment ID: 20000227 Result: Up-regulated in Transcription
  misc_feature: MA Experiment 20000227 PARAMETER Experiment Name: At_Root-Tips-vs-Tops_P Parameter: Tissue Value: Root Tips vs. Root Tops
  misc_feature: MA Experiment ID: 20000794 Result: Down-regulated in Transcription
  misc_feature: MA Experiment 20000794 PARAMETER Experiment Name: At_Petals_P Parameter: Age (day) Value: 23-25 days
  misc_feature: MA Experiment 20000794 PARAMETER Experiment Name: At_Petals_P Parameter: Plant Line Value: WS
  misc_feature: MA Experiment 20000794 PARAMETER Experiment Name: At_Petals_P Parameter: Tissue Value: Petals vs. Whole plant
  misc_feature: MA Experiment ID: 20001558 Result: Up-regulated in Transcription
  misc_feature: MA Experiment 20001558 PARAMETER Experiment Name: At_Drought_Soil_Dry_P Parameter: Age (day) Value: 27
  misc_feature: MA Experiment 20001558 PARAMETER Experiment Name: At_Drought_Soil_Dry_P Parameter: Organism Value: A. thaliana
  misc_feature: MA Experiment 20001558 PARAMETER Experiment Name: At_Drought_Soil_Dry_P Parameter: Plant Line Value: WS
  misc_feature: MA Experiment 20001558 PARAMETER Experiment Name: At_Drought_Soil_Dry_P Parameter: Post Timepoint (hr) Value: 6
  misc_feature: MA Experiment 20001558 PARAMETER Experiment Name: At_Drought_Soil_Dry_P Parameter: Post-Treatment Value: Re-Water vs. No Drought
  misc_feature: MA Experiment 20001558 PARAMETER Experiment Name: At_Drought_Soil_Dry_P Parameter: Timepoint (day) Value: 13
  misc_feature: MA Experiment 20001558 PARAMETER Experiment Name: At_Drought_Soil_Dry_P Parameter: Treatment Value: Drought vs. No Drought
  misc_feature: MA Experiment ID: 20001559 Result: Up-regulated in Transcription
  misc_feature: MA Experiment 20001559 PARAMETER Experiment Name: At_Drought_Soil_Dry_P Parameter: Age (day) Value: 28
  misc_feature: MA Experiment 20001559 PARAMETER Experiment Name: At_Drought_Soil_Dry_P Parameter: Organism Value: A. thaliana
  misc_feature: MA Experiment 20001559 PARAMETER Experiment Name: At_Drought_Soil_Dry_P Parameter: Plant Line Value: WS
  misc_feature: MA Experiment 20001559 PARAMETER Experiment Name: At_Drought_Soil_Dry_P Parameter: Post Timepoint (hr) Value: 29
  misc_feature: MA Experiment 20001559 PARAMETER Experiment Name: At_Drought_Soil_Dry_P Parameter: Post-Treatment Value: Re-Water vs. No Drought
  misc_feature: MA Experiment 20001559 PARAMETER Experiment Name: At_Drought_Soil_Dry_P Parameter: Timepoint (day) Value: 14
  misc_feature: MA Experiment 20001559 PARAMETER Experiment Name: At_Drought_Soil_Dry_P Parameter: Treatment Value: Drought vs. No Drought
  misc_feature: MA Experiment ID: 20001905 Result: Down-regulated in Transcription
  misc_feature: MA Experiment 20001905 PARAMETER Experiment Name: At_Drought_Reproduction_P Parameter: Age (day) Value: 40
  misc_feature: MA Experiment 20001905 PARAMETER Experiment Name: At_Drought_Reproduction_P Parameter: Organism Value: A. thaliana
  misc_feature: MA Experiment 20001905 PARAMETER Experiment Name: At_Drought_Reproduction_P Parameter: Plant Line Value: WS
  misc_feature: MA Experiment 20001905 PARAMETER Experiment Name: At_Drought_Reproduction_P Parameter: Timepoint (day) Value: 10
  misc_feature: MA Experiment 20001905 PARAMETER Experiment Name: At_Drought_Reproduction_P Parameter: Tissue Value: Rosettes
  misc_feature: MA Experiment 20001905 PARAMETER Experiment Name: At_Drought_Reproduction_P Parameter: Treatment Value: Drought vs. No Drought

SEQ ID NO: 93802 - protein, 413 aa, Arabidopsis thaliana; identical to SEQ ID NO: 42171
  peptide (1)..(413): Ceres Seq. ID no. 12721961
  misc_feature (252)..(360): Pfam Name: Elongation factor 1 gamma, conserved domain Pfam Description: Elongation factor 1 gamma, conserved domain
  misc_feature (1)..(413): Homolog of NCBI NO: 15223649 NR Description: elongation factor 1B-gamma, putative (eEF-1B protein id: At1g57720.1, supported by cDNA: 141963., supported by gi_13877602, supported by cDNA: gi_14334817, supported by cDNA:
  misc_feature (1)..(413): Homolog of NCBI NO: 14334818 NR Description: putative elongation factor 1B gamma [Arabidopsis
  misc_feature (1)..(413): Homolog of NCBI NO: 18391048 NR Description: elongation factor 1B-gamma, putative (eEF-1B protein id: At1g09640.1, supported by cDNA: 39525. [Arabidopsis >gi|13626364|sp|O04487|EF1G_ARATH Probable elongation factor
  misc_feature (1)..(413): Homolog of NCBI NO: 13626515 NR Description: Elongation factor 1-gamma (EF-1-gamma) (eEF-1B >gi|3868758|dbj|BAA34206.1| elongation factor 1B gamma [Oryza
  misc_feature (10)..(413): Homolog of NCBI NO: 29367403 NR Description: elongation factor 1 gamma-like protein [Oryza
  misc_feature (1)..(413): Homolog of NCBI NO: 13626392 NR Description: Elongation factor 1-gamma (EF-1-gamma) (eEF-1B
  misc_feature (70)..(413): Homolog of NCBI NO: 19423960 NR Description: unknown protein [Arabidopsis thaliana]

SEQ ID NO: 93803 - protein, 409 aa, Arabidopsis thaliana; identical to SEQ ID NO: 42172
  peptide (1)..(409): Ceres Seq. ID no. 12721962
  misc_feature (248)..(356): Pfam Name: Elongation factor 1 gamma, conserved domain Pfam Description: Elongation factor 1 gamma, conserved domain
  misc_feature (1)..(409): Homolog of NCBI NO: 15223649 NR Description: elongation factor 1B-gamma, putative (eEF-1B protein id: At1g57720.1, supported by cDNA: 141963., supported by gi_13877602, supported by cDNA: gi_14334817, supported by cDNA:
  misc_feature (1)..(409): Homolog of NCBI NO: 14334818 NR Description: putative elongation factor 1B gamma [Arabidopsis
  misc_feature (1)..(409): Homolog of NCBI NO: 18391048 NR Description: elongation factor 1B-gamma, putative (eEF-1B protein id: At1g09640.1, supported by cDNA: 39525. [Arabidopsis >gi|13626364|sp|O04487|EF1G_ARATH Probable elongation factor
  misc_feature (1)..(409): Homolog of NCBI NO: 13626515 NR Description: Elongation factor 1-gamma (EF-1-gamma) (eEF-1B >gi|3868758|dbj|BAA34206.1| elongation factor 1B gamma [Oryza
  misc_feature (6)..(409): Homolog of NCBI NO: 29367403 NR Description: elongation factor 1 gamma-like protein [Oryza
  misc_feature (1)..(409): Homolog of NCBI NO: 13626392 NR Description: Elongation factor 1-gamma (EF-1-gamma) (eEF-1B
  misc_feature (66)..(409): Homolog of NCBI NO: 19423960 NR Description: unknown protein [Arabidopsis thaliana]

SEQ ID NO: 93804 - protein, 378 aa, Arabidopsis thaliana; identical to SEQ ID NO: 42173
  peptide (1)..(378): Ceres Seq. ID no. 12721963
  misc_feature (217)..(325): Pfam Name: Elongation factor 1 gamma, conserved domain Pfam Description: Elongation factor 1 gamma, conserved domain
  misc_feature (1)..(378): Homolog of NCBI NO: 15223649 NR Description: elongation factor 1B-gamma, putative (eEF-1B protein id: At1g57720.1, supported by cDNA: 141963., supported by gi_13877602, supported by cDNA: gi_14334817, supported by cDNA:
  misc_feature (1)..(378): Homolog of NCBI NO: 14334818 NR Description: putative elongation factor 1B gamma [Arabidopsis
  misc_feature (1)..(378): Homolog of NCBI NO: 18391048 NR Description: elongation factor 1B-gamma, putative (eEF-1B protein id: At1g09640.1, supported by cDNA: 39525. [Arabidopsis >gi|13626364|sp|O04487|EF1G_ARATH Probable elongation factor
  misc_feature (1)..(378): Homolog of NCBI NO: 13626515 NR Description: Elongation factor 1-gamma (EF-1-gamma) (eEF-1B >gi|3868758|dbj|BAA34206.1| elongation factor 1B gamma [Oryza
  misc_feature (1)..(378): Homolog of NCBI NO: 29367403 NR Description: elongation factor 1 gamma-like protein [Oryza
  misc_feature (1)..(378): Homolog of NCBI NO: 13626392 NR Description: Elongation factor 1-gamma (EF-1-gamma) (eEF-1B
  misc_feature (35)..(378): Homolog of NCBI NO: 19423960 NR Description: unknown protein [Arabidopsis thaliana]

SEQ ID NO: 93805 - DNA, 1045 bp, Arabidopsis thaliana; identical to SEQ ID NO: 90049
  misc_feature (1)..(1045): Ceres Seq. ID no. 12722002
  misc_feature: MA Experiment ID: 20000180 Result: Up-regulated in Transcription
  misc_feature: MA Experiment 20000180 PARAMETER Experiment Name: At_Germinating_Seeds_P Parameter: Age (hr) Value: 24 vs. 0
  misc_feature: MA Experiment 20000180 PARAMETER Experiment Name: At_Germinating_Seeds_P Parameter: Tissue Value: Germinating Seeds
  misc_feature: MA Experiment ID: 20000185 Result: Up-regulated in Transcription
  misc_feature: MA Experiment 20000185 PARAMETER Experiment Name: At_Roots__P Parameter: Age (day) Value: 7 vs. 21
  misc_feature: MA Experiment 20000185 PARAMETER Experiment Name: At_Roots__P Parameter: Organism Value: A. thaliana
  misc_feature: MA Experiment 20000185 PARAMETER Experiment Name: At_Roots__P Parameter: Tissue Value: Roots vs. Whole Plant
  misc_feature: MA Experiment ID: 20000265 Result: Down-regulated in Transcription
  misc_feature: MA Experiment 20000265 PARAMETER Experiment Name: At_Open_Flower_P Parameter: Age (day) Value: 21
  misc_feature: MA Experiment 20000265 PARAMETER Experiment Name: At_Open_Flower_P Parameter: Plant Line Value: WS
  misc_feature: MA Experiment 20000265 PARAMETER Experiment Name: At_Open_Flower_P Parameter: Tissue Value: Closed Flower vs. Whole Plant
  misc_feature: MA Experiment ID: 20000286 Result: Down-regulated in Transcription
  misc_feature: MA Experiment 20000286 PARAMETER Experiment Name: At_Open_Flower_P Parameter: Age (day) Value: 21
  misc_feature: MA Experiment 20000286 PARAMETER Experiment Name: At_Open_Flower_P Parameter: Plant Line Value: WS
  misc_feature: MA Experiment 20000286 PARAMETER Experiment Name: At_Open_Flower_P Parameter: Tissue Value: Half Open vs. Whole Plant
  misc_feature: MA Experiment ID: 20000439 Result: Up-regulated in Transcription
  misc_feature: MA Experiment 20000439 PARAMETER Experiment Name: At_Roots__P Parameter: Age (day) Value: 14 vs. 21
  misc_feature: MA Experiment 20000439 PARAMETER Experiment Name: At_Roots__P Parameter: Organism Value: A. thaliana
  misc_feature: MA Experiment 20000439 PARAMETER Experiment Name: At_Roots__P Parameter: Tissue Value: Roots vs. Whole Plant
  misc_feature: MA Experiment ID: 20000495 Result: Down-regulated in Transcription
  misc_feature: MA Experiment 20000495 PARAMETER Experiment Name: At_Guard_Cells_P Parameter: Harvest Date Value: 8/2/2002
  misc_feature: MA Experiment 20000495 PARAMETER Experiment Name: At_Guard_Cells_P Parameter: Organism Value: A. thaliana
  misc_feature: MA Experiment 20000495 PARAMETER Experiment Name: At_Guard_Cells_P Parameter: Tissue Value: Guard Cells vs. Leaves
  misc_feature: MA Experiment ID: 20000496 Result: Down-regulated in Transcription
  misc_feature: MA Experiment 20000496 PARAMETER Experiment Name: At_Guard_Cells_P Parameter: Harvest Date Value: 7/19/2002
  misc_feature: MA Experiment 20000496 PARAMETER Experiment Name: At_Guard_Cells_P Parameter: Organism Value: Canola
  misc_feature: MA Experiment 20000496 PARAMETER Experiment Name: At_Guard_Cells_P Parameter: Tissue Value: Guard Cells vs. Leaves
  misc_feature: MA Experiment ID: 20000527 Result: Down-regulated in Transcription
  misc_feature: MA Experiment 20000527 PARAMETER Experiment Name: At_10percent_PEG_P Parameter: Age (day) Value: 20
  misc_feature: MA Experiment 20000527 PARAMETER Experiment Name: At_10percent_PEG_P Parameter: Organism Value: A. thaliana
  misc_feature: MA Experiment 20000527 PARAMETER Experiment Name: At_10percent_PEG_P Parameter: Plant Line Value: WS
  misc_feature: MA Experiment 20000527 PARAMETER Experiment Name: At_10percent_PEG_P Parameter: Timepoint (day) Value: 20
  misc_feature: MA Experiment 20000527 PARAMETER Experiment Name: At_10percent_PEG_P Parameter: Tissue Value: Whole Plant
  misc_feature: MA Experiment 20000527 PARAMETER Experiment Name: At_10percent_PEG_P Parameter: Treatment Value: 10percent PEG vs. No Treatment
  misc_feature: MA Experiment ID: 20000573 Result: Down-regulated in Transcription
  misc_feature: MA Experiment 20000573 PARAMETER Experiment Name: At_100uM_ABA_Mutants__P Parameter: Organism Value: A. thaliana
  misc_feature: MA Experiment 20000573 PARAMETER Experiment Name: At_100uM_ABA_Mutants__P Parameter: Plant Line Value: CS22 vs. Ler wt
  misc_feature: MA Experiment 20000573 PARAMETER Experiment Name: At_100uM_ABA_Mutants__P Parameter: Timepoint (hr) Value: N/A
  misc_feature: MA Experiment 20000573 PARAMETER Experiment Name: At_100uM_ABA_Mutants__P Parameter: Tissue Value: Whole Plant
  misc_feature: MA Experiment 20000573 PARAMETER Experiment Name: At_100uM_ABA_Mutants__P Parameter: Treatment Value: None
  misc_feature: MA Experiment ID: 20000574 Result: Down-regulated in Transcription
  misc_feature: MA Experiment 20000574 PARAMETER Experiment Name: At_100uM_ABA_Mutants__P Parameter: Organism Value: A. thaliana
  misc_feature: MA Experiment 20000574 PARAMETER Experiment Name: At_100uM_ABA_Mutants__P Parameter: Plant Line Value: CS23 vs. Ler wt
  misc_feature: MA Experiment 20000574 PARAMETER Experiment Name: At_100uM_ABA_Mutants__P Parameter: Timepoint (hr) Value: N/A
  misc_feature: MA Experiment 20000574 PARAMETER Experiment Name: At_100uM_ABA_Mutants__P Parameter: Tissue Value: Whole Plant
  misc_feature: MA Experiment 20000574 PARAMETER Experiment Name: At_100uM_ABA_Mutants__P Parameter: Treatment Value: None
  misc_feature: MA Experiment ID: 20000794 Result: Down-regulated in Transcription
  misc_feature: MA Experiment 20000794 PARAMETER Experiment Name: At_Petals_P Parameter: Age (day) Value: 23-25 days
  misc_feature: MA Experiment 20000794 PARAMETER Experiment Name: At_Petals_P Parameter: Plant Line Value: WS
  misc_feature: MA Experiment 20000794 PARAMETER Experiment Name: At_Petals_P Parameter: Tissue Value: Petals vs. Whole plant
  misc_feature: MA Experiment ID: 20001248 Result: Down-regulated in Transcription
  misc_feature: MA Experiment 20001248 PARAMETER Experiment Name: At_Far-red-induction_P Parameter: Age (day) Value: 7
  misc_feature: MA Experiment 20001248 PARAMETER Experiment Name: At_Far-red-induction_P Parameter: Light Value: Far-red vs. White
  misc_feature: MA Experiment 20001248 PARAMETER Experiment Name: At_Far-red-induction_P Parameter: Organism Value: A. thaliana
  misc_feature: MA Experiment 20001248 PARAMETER Experiment Name: At_Far-red-induction_P Parameter: Plant Line Value: Columbia
  misc_feature: MA Experiment 20001248 PARAMETER Experiment Name: At_Far-red-induction_P Parameter: Timepoint (hr) Value: 4
  misc_feature: MA Experiment 20001248 PARAMETER Experiment Name: At_Far-red-induction_P Parameter: Tissue Value: Whole Plant
  misc_feature: MA Experiment ID: 20001556 Result: Down-regulated in Transcription
  misc_feature: MA Experiment 20001556 PARAMETER Experiment Name: At_Drought_Soil_Dry_P Parameter: Age (day) Value: 26
  misc_feature: MA Experiment 20001556 PARAMETER Experiment Name: At_Drought_Soil_Dry_P Parameter: Organism Value: A. thaliana
  misc_feature: MA Experiment 20001556 PARAMETER Experiment Name: At_Drought_Soil_Dry_P Parameter: Plant Line Value: WS
  misc_feature: MA Experiment 20001556 PARAMETER Experiment Name: At_Drought_Soil_Dry_P Parameter: Post Timepoint (hr) Value: None
  misc_feature: MA Experiment 20001556 PARAMETER Experiment Name: At_Drought_Soil_Dry_P Parameter: Post-Treatment Value: None
  misc_feature: MA Experiment 20001556 PARAMETER Experiment Name: At_Drought_Soil_Dry_P Parameter: Timepoint (day) Value: 12
  misc_feature: MA Experiment 20001556 PARAMETER Experiment Name: At_Drought_Soil_Dry_P Parameter: Treatment Value: Drought vs. No Drought
  misc_feature: MA Experiment ID: 20001557 Result: Down-regulated in Transcription
  misc_feature: MA Experiment 20001557 PARAMETER Experiment Name: At_Drought_Soil_Dry_P Parameter: Age (day) Value: 27
  misc_feature: MA Experiment 20001557 PARAMETER Experiment Name: At_Drought_Soil_Dry_P Parameter: Organism Value: A. thaliana
  misc_feature: MA Experiment 20001557 PARAMETER Experiment Name: At_Drought_Soil_Dry_P Parameter: Plant Line Value: WS
  misc_feature: MA Experiment 20001557 PARAMETER Experiment Name: At_Drought_Soil_Dry_P Parameter: Post Timepoint (hr) Value: 3
  misc_feature: MA Experiment 20001557 PARAMETER Experiment Name: At_Drought_Soil_Dry_P Parameter: Post-Treatment Value: Re-Water vs. No Drought
  misc_feature: MA Experiment 20001557 PARAMETER Experiment Name: At_Drought_Soil_Dry_P Parameter: Timepoint (day) Value: 13
  misc_feature: MA Experiment 20001557 PARAMETER Experiment Name: At_Drought_Soil_Dry_P Parameter: Treatment Value: Drought vs. No Drought
  misc_feature: MA Experiment ID: 20001558 Result: Down-regulated in Transcription
  misc_feature: MA Experiment 20001558 PARAMETER Experiment Name: At_Drought_Soil_Dry_P Parameter: Age (day) Value: 27
  misc_feature: MA Experiment 20001558 PARAMETER Experiment Name: At_Drought_Soil_Dry_P Parameter: Organism Value: A. thaliana
  misc_feature: MA Experiment 20001558 PARAMETER Experiment Name: At_Drought_Soil_Dry_P Parameter: Plant Line Value: WS
  misc_feature: MA Experiment 20001558 PARAMETER Experiment Name: At_Drought_Soil_Dry_P Parameter: Post Timepoint (hr) Value: 6
  misc_feature: MA Experiment 20001558 PARAMETER Experiment Name: At_Drought_Soil_Dry_P Parameter: Post-Treatment Value: Re-Water vs. No Drought
  misc_feature: MA Experiment 20001558 PARAMETER Experiment Name: At_Drought_Soil_Dry_P Parameter: Timepoint (day) Value: 13
  misc_feature: MA Experiment 20001558 PARAMETER Experiment Name: At_Drought_Soil_Dry_P Parameter: Treatment Value: Drought vs. No Drought
  misc_feature: MA Experiment ID: 20001560 Result: Down-regulated in Transcription
  misc_feature: MA Experiment 20001560 PARAMETER Experiment Name: At_Drought_Soil_Dry_P Parameter: Age (day) Value: 28
  misc_feature: MA Experiment 20001560 PARAMETER Experiment Name: At_Drought_Soil_Dry_P Parameter: Organism Value: A. thaliana
  misc_feature: MA Experiment 20001560 PARAMETER Experiment Name: At_Drought_Soil_Dry_P Parameter: Plant Line Value: WS
  misc_feature: MA Experiment 20001560 PARAMETER Experiment Name: At_Drought_Soil_Dry_P Parameter: Post Timepoint (hr) Value: None
  misc_feature: MA Experiment 20001560 PARAMETER Experiment Name: At_Drought_Soil_Dry_P Parameter: Post-Treatment Value: None
  misc_feature: MA Experiment 20001560 PARAMETER Experiment Name: At_Drought_Soil_Dry_P Parameter: Timepoint (day) Value: 14
  misc_feature: MA Experiment 20001560 PARAMETER Experiment Name: At_Drought_Soil_Dry_P Parameter: Treatment Value: Drought vs. No Drought

SEQ ID NO: 93806 - protein, 299 aa, Arabidopsis thaliana; identical to SEQ ID NO: 90050
  peptide (1)..(299): Ceres Seq. ID no. 12722003
  misc_feature (39)..(269): Pfam Name: Phosphoglycerate mutase family Pfam Description: Phosphoglycerate mutase family
  misc_feature (1)..(299): Homolog of NCBI NO: 25372930 NR Description: hypothetical protein ZW10 [imported] - thaliana (fragment) >gi|6520148|dbj|BAA87937.1| ZW10 [Arabidopsis
  misc_feature (1)..(299): Homolog of NCBI NO: 25372931 NR Description: hypothetical protein F19C14.10 [imported] - thaliana >gi|8979945|gb|AAF82259.1|AC008051_10 Identical to gene from Arabidopsis thaliana gb|AB028195 and is a member of the
  misc_feature (1)..(160): Homolog of NCBI NO: 30696245 NR Description: expressed protein [Arabidopsis thaliana]
  misc_feature (161)..(299): Homolog of NCBI NO: 30696245 NR Description: expressed protein [Arabidopsis thaliana]
  misc_feature (24)..(299): Homolog of NCBI NO: 15217922 NR Description: unknown protein; protein id: At1g58280.1

SEQ ID NO: 93807 - protein, 276 aa, Arabidopsis thaliana; identical to SEQ ID NO: 90051
  peptide (1)..(276): Ceres Seq. ID no. 12722004
  misc_feature (16)..(246): Pfam Name: Phosphoglycerate mutase family Pfam Description: Phosphoglycerate mutase family
  misc_feature (1)..(276): Homolog of NCBI NO: 25372930 NR Description: hypothetical protein ZW10 [imported] - thaliana (fragment) >gi|6520148|dbj|BAA87937.1| ZW10 [Arabidopsis
  misc_feature (1)..(276): Homolog of NCBI NO: 25372931 NR Description: hypothetical protein F19C14.10 [imported] - thaliana >gi|8979945|gb|AAF82259.1|AC008051_10 Identical to gene from Arabidopsis thaliana gb|AB028195 and is a member of the
  misc_feature (1)..(137): Homolog of NCBI NO: 30696245 NR Description: expressed protein [Arabidopsis thaliana]
  misc_feature (138)..(276): Homolog of NCBI NO: 30696245 NR Description: expressed protein [Arabidopsis thaliana]
  misc_feature (1)..(276): Homolog of NCBI NO: 15217922 NR Description: unknown protein; protein id: At1g58280.1

SEQ ID NO: 93808 - protein, 170 aa, Arabidopsis thaliana; identical to SEQ ID NO: 90052
  peptide (1)..(170): Ceres Seq. ID no. 12722005
  misc_feature (1)..(140): Pfam Name: Phosphoglycerate mutase family Pfam Description: Phosphoglycerate mutase family
  misc_feature (1)..(170): Homolog of NCBI NO: 25372930 NR Description: hypothetical protein ZW10 [imported] - thaliana (fragment) >gi|6520148|dbj|BAA87937.1| ZW10 [Arabidopsis
  misc_feature (1)..(170): Homolog of NCBI NO: 25372931 NR Description: hypothetical protein F19C14.10 [imported] - thaliana >gi|8979945|gb|AAF82259.1|AC008051_10 Identical to gene from Arabidopsis thaliana gb|AB028195 and is a member of the
  misc_feature (1)..(31): Homolog of NCBI NO: 30696245 NR Description: expressed protein [Arabidopsis thaliana]
  misc_feature (32)..(170): Homolog of NCBI NO: 30696245 NR Description: expressed protein [Arabidopsis thaliana]
  misc_feature (1)..(170): Homolog of NCBI NO: 15217922 NR Description: unknown protein; protein id: At1g58280.1

SEQ ID NO: 93809 - DNA, 852 bp, Arabidopsis thaliana; identical to SEQ ID NO: 90053
  misc_feature (1)..(852): Ceres Seq. ID no. 12722006
  misc_feature: MA Experiment ID: 20000440 Result: Down-regulated in Transcription
  misc_feature: MA Experiment 20000440 PARAMETER Experiment Name: At_Closed-Flower__Sub_P Parameter: Tissue Value: Closed Flower vs. Whole Plant

SEQ ID NO: 93810 - protein, 283 aa, Arabidopsis thaliana; identical to SEQ ID NO: 90054
  peptide (1)..(283): Ceres Seq. ID no. 12722007
  misc_feature (83)..(279): Pfam Name: Heme oxygenase Pfam Description: Heme oxygenase
  misc_feature (1)..(283): Homolog of NCBI NO: 15217926 NR Description: plastid heme oxygenase, putative; protein id: [Arabidopsis thaliana] >gi|25370569|pir||F96616 hypothetical
  misc_feature (1)..(283): Homolog of NCBI NO: 14485565 NR Description: heme oxygenase 4 [Arabidopsis thaliana]
  misc_feature (1)..(283): Homolog of NCBI NO: 15222425 NR Description: putative heme oxygenase; protein id: At1g69720.1, by cDNA: 101223. [Arabidopsis thaliana] >gi|25370568|pir||B96719
  misc_feature (42)..(283): Homolog of NCBI NO: 15225771 NR Description: heme oxygenase 1 (HO1); protein id: At2g26670.1, by cDNA: 33692., supported by cDNA: gi_4877396 [Arabidopsis >gi|25370567|pir||T52457 heme oxygenase (decyclizing) (EC
  misc_feature (42)..(283): Homolog of NCBI NO: 21450864 NR Description: putative heme oxygenase HO1 [Arabidopsis thaliana]
  misc_feature (51)..(283): Homolog of NCBI NO: 14030647 NR Description: At2g26670/F18A8.4 [Arabidopsis thaliana]
  misc_feature (52)..(283): Homolog of NCBI NO: 14485575 NR Description: heme oxygenase 1 [Lycopersicon esculentum]

SEQ ID NO: 93811 - protein, 201 aa, Arabidopsis thaliana; identical to SEQ ID NO: 90055
  peptide (1)..(201): Ceres Seq. ID no. 12722008
  misc_feature (1)..(197): Pfam Name: Heme oxygenase Pfam Description: Heme oxygenase
  misc_feature (1)..(201): Homolog of NCBI NO: 15217926 NR Description: plastid heme oxygenase, putative; protein id: [Arabidopsis thaliana] >gi|25370569|pir||F96616 hypothetical
  misc_feature (1)..(201): Homolog of NCBI NO: 14485565 NR Description: heme oxygenase 4 [Arabidopsis thaliana]
  misc_feature (1)..(201): Homolog of NCBI NO: 15222425 NR Description: putative heme oxygenase; protein id: At1g69720.1, by cDNA: 101223. [Arabidopsis thaliana] >gi|25370568|pir||B96719
  misc_feature (1)..(201): Homolog of NCBI NO: 15225771 NR Description: heme oxygenase 1 (HO1); protein id: At2g26670.1, by cDNA: 33692., supported by cDNA: gi_4877396 [Arabidopsis >gi|25370567|pir||T52457 heme oxygenase (decyclizing) (EC
  misc_feature (1)..(201): Homolog of NCBI NO: 21450864 NR Description: putative heme oxygenase HO1 [Arabidopsis thaliana]
  misc_feature (1)..(201): Homolog of NCBI NO: 14030647 NR Description: At2g26670/F18A8.4 [Arabidopsis thaliana]
  misc_feature (1)..(201): Homolog of NCBI NO: 14485575 NR Description: heme oxygenase 1 [Lycopersicon esculentum]

SEQ ID NO: 93812 - protein, 196 aa, Arabidopsis thaliana; identical to SEQ ID NO: 90056
  peptide (1)..(196): Ceres Seq. ID no. 12722009
  misc_feature (1)..(192): Pfam Name: Heme oxygenase Pfam Description: Heme oxygenase
  misc_feature (1)..(196): Homolog of NCBI NO: 15217926 NR Description: plastid heme oxygenase, putative; protein id: [Arabidopsis thaliana] >gi|25370569|pir||F96616 hypothetical
  misc_feature (1)..(196): Homolog of NCBI NO: 14485565 NR Description: heme oxygenase 4 [Arabidopsis thaliana]
  misc_feature (1)..(196): Homolog of NCBI NO: 15222425 NR Description: putative heme oxygenase; protein id: At1g69720.1, by cDNA: 101223. [Arabidopsis thaliana] >gi|25370568|pir||B96719
  misc_feature (1)..(196): Homolog of NCBI NO: 15225771 NR Description: heme oxygenase 1 (HO1); protein id: At2g26670.1, by cDNA: 33692., supported by cDNA: gi_4877396 [Arabidopsis >gi|25370567|pir||T52457 heme oxygenase (decyclizing) (EC
  misc_feature (1)..(196): Homolog of NCBI NO: 21450864 NR Description: putative heme oxygenase HO1 [Arabidopsis thaliana]
  misc_feature (1)..(196): Homolog of NCBI NO: 14030647 NR Description: At2g26670/F18A8.4 [Arabidopsis thaliana]
  misc_feature (1)..(196): Homolog of NCBI NO: 14485575 NR Description: heme oxygenase 1 [Lycopersicon esculentum]

SEQ ID NO: 93813 - DNA, 2057 bp, Arabidopsis thaliana; identical to SEQ ID NO: 90057
  misc_feature (1)..(2057): Ceres Seq. ID no. 12722014
  misc_feature: MA Experiment ID: 20000436 Result: Up-regulated in Transcription
  misc_feature: MA Experiment 20000436 PARAMETER Experiment Name: At_Drought_P Parameter: Age (day) Value: 7
  misc_feature: MA Experiment 20000436 PARAMETER Experiment Name: At_Drought_P Parameter: Organism Value: A. thaliana
  misc_feature: MA Experiment 20000436 PARAMETER Experiment Name: At_Drought_P Parameter: Plant Line Value: WS
  misc_feature: MA Experiment 20000436 PARAMETER Experiment Name: At_Drought_P Parameter: Timepoint (hr) Value: 12
  misc_feature: MA Experiment 20000436 PARAMETER Experiment Name: At_Drought_P Parameter: Tissue Value: Whole Plant
  misc_feature: MA Experiment 20000436 PARAMETER Experiment Name: At_Drought_P Parameter: Treatment Value: Drought vs. No Drought
  misc_feature: MA Experiment ID: 20000437 Result: Up-regulated in Transcription
  misc_feature: MA Experiment 20000437 PARAMETER Experiment Name: At_Drought_P Parameter: Age (day) Value: 8
  misc_feature: MA Experiment 20000437 PARAMETER Experiment Name: At_Drought_P Parameter: Organism Value: A. thaliana
  misc_feature: MA Experiment 20000437 PARAMETER Experiment Name: At_Drought_P Parameter: Plant Line Value: WS
  misc_feature: MA Experiment 20000437 PARAMETER Experiment Name: At_Drought_P Parameter: Timepoint (hr) Value: 24
  misc_feature: MA Experiment 20000437 PARAMETER Experiment Name: At_Drought_P Parameter: Tissue Value: Whole Plant
  misc_feature: MA Experiment 20000437 PARAMETER Experiment Name: At_Drought_P Parameter: Treatment Value: Drought vs. No Drought
  misc_feature: MA Experiment ID: 20000527 Result: Down-regulated in Transcription
  misc_feature: MA Experiment 20000527 PARAMETER Experiment Name: At_10percent_PEG_P Parameter: Age (day) Value: 20
  misc_feature: MA Experiment 20000527 PARAMETER Experiment Name: At_10percent_PEG_P Parameter: Organism Value: A. thaliana
  misc_feature: MA Experiment 20000527 PARAMETER Experiment Name: At_10percent_PEG_P Parameter: Plant Line Value: WS
  misc_feature: MA Experiment 20000527 PARAMETER Experiment Name: At_10percent_PEG_P Parameter: Timepoint (day) Value: 20
  misc_feature: MA Experiment 20000527 PARAMETER Experiment Name: At_10percent_PEG_P Parameter: Tissue Value: Whole Plant
  misc_feature: MA Experiment 20000527 PARAMETER Experiment Name: At_10percent_PEG_P Parameter: Treatment Value: 10percent PEG vs. No Treatment
  misc_feature: MA Experiment ID: 20001757 Result: Down-regulated in Transcription
  misc_feature: MA Experiment 20001757 PARAMETER Experiment Name: At_50mM_NH4NO3_L-to-H_P Parameter: Timepoint (hr) Value: 6
  misc_feature: MA Experiment 20001757 PARAMETER Experiment Name: At_50mM_NH4NO3_L-to-H_P Parameter: Tissue Value: Leaf
  misc_feature: MA Experiment 20001757 PARAMETER Experiment Name: At_50mM_NH4NO3_L-to-H_P Parameter: Treatment Value: 50mM NH4NO3 vs 100mM Mannitol
  misc_feature: MA Experiment ID: 20001904 Result: Up-regulated in Transcription
  misc_feature: MA Experiment 20001904 PARAMETER Experiment Name: At_Drought_Reproduction_P Parameter: Age (day) Value: 37
  misc_feature: MA Experiment 20001904 PARAMETER Experiment Name: At_Drought_Reproduction_P Parameter: Organism Value: A. thaliana
  misc_feature: MA Experiment 20001904 PARAMETER Experiment Name: At_Drought_Reproduction_P Parameter: Plant Line Value: WS
  misc_feature: MA Experiment 20001904 PARAMETER Experiment Name: At_Drought_Reproduction_P Parameter: Timepoint (day) Value: 7
  misc_feature: MA Experiment 20001904 PARAMETER Experiment Name: At_Drought_Reproduction_P Parameter: Tissue Value: Rosettes
  misc_feature: MA Experiment 20001904 PARAMETER Experiment Name: At_Drought_Reproduction_P Parameter: Treatment Value: Drought vs. No Drought
  misc_feature: MA Experiment ID: 20001905 Result: Up-regulated in Transcription
  misc_feature: MA Experiment 20001905 PARAMETER Experiment Name: At_Drought_Reproduction_P Parameter: Age (day) Value: 40
  misc_feature: MA Experiment 20001905 PARAMETER Experiment Name: At_Drought_Reproduction_P Parameter: Organism Value: A. thaliana
  misc_feature: MA Experiment 20001905 PARAMETER Experiment Name: At_Drought_Reproduction_P Parameter: Plant Line Value: WS
  misc_feature: MA Experiment 20001905 PARAMETER Experiment Name: At_Drought_Reproduction_P Parameter: Timepoint (day) Value: 10
  misc_feature: MA Experiment 20001905 PARAMETER Experiment Name: At_Drought_Reproduction_P Parameter: Tissue Value: Rosettes
  misc_feature: MA Experiment 20001905 PARAMETER Experiment Name: At_Drought_Reproduction_P Parameter: Treatment Value: Drought vs. No Drought

SEQ ID NO: 93814 - protein, 532 aa, Arabidopsis thaliana; identical to SEQ ID NO: 90058
  peptide (1)..(532): Ceres Seq. ID no. 12722015
  misc_feature (1)..(532): Homolog of NCBI NO: 18406257 NR Description: expressed protein; protein id: At1g58340.1, by cDNA: gi_6520160 [Arabidopsis thaliana]
  misc_feature (50)..(502): Homolog of NCBI NO: 15235905 NR Description: putative protein; protein id: At4g23030.1
  misc_feature (1)..(504): Homolog of NCBI NO: 20532318 NR Description: Putative membrane protein [Oryza sativa (japonica group)] >gi|27356666|gb|AAO06955.1| Putative membrane protein
  misc_feature (58)..(499): Homolog of NCBI NO: 38567909 NR Description: OSJNBa0088I22.5 [Oryza sativa (japonica
  misc_feature (58)..(498): Homolog of NCBI NO: 37536202 NR Description: putative membrane protein [Oryza sativa (japonica group)] >gi|27311284|gb|AAO00710.1| putative membrane protein
  misc_feature (1)..(531): Homolog of NCBI NO: 15233459 NR Description: putative protein; protein id: At4g29140.1
  misc_feature (49)..(499): Homolog of NCBI NO: 15241158 NR Description: putative protein; protein id: At5g19700.1
  misc_feature (46)..(500): Homolog of NCBI NO: 15242265 NR Description: integral membrane protein-like; protein id:
  misc_feature (46)..(500): Homolog of NCBI NO: 39104576 NR Description: putative integral membrane protein [Arabidopsis
  misc_feature (57)..(506): Homolog of NCBI NO: 15224891 NR Description: hypothetical protein; protein id: At2g38510.1

SEQ ID NO: 93815 - protein, 462 aa, Arabidopsis thaliana; identical to SEQ ID NO: 90059
  peptide (1)..(462): Ceres Seq. ID no. 12722016
  misc_feature (1)..(462): Homolog of NCBI NO: 18406257 NR Description: expressed protein; protein id: At1g58340.1, by cDNA: gi_6520160 [Arabidopsis thaliana]
  misc_feature (1)..(432): Homolog of NCBI NO: 15235905 NR Description: putative protein; protein id: At4g23030.1
  misc_feature (1)..(434): Homolog of NCBI NO: 20532318 NR Description: Putative membrane protein [Oryza sativa (japonica group)] >gi|27356666|gb|AAO06955.1| Putative membrane protein
  misc_feature (1)..(429): Homolog of NCBI NO: 38567909 NR Description: OSJNBa0088I22.5 [Oryza sativa (japonica
  misc_feature (1)..(428): Homolog of NCBI NO: 37536202 NR Description: putative membrane protein [Oryza sativa (japonica group)] >gi|27311284|gb|AAO00710.1| putative membrane protein
  misc_feature (1)..(461): Homolog of NCBI NO: 15233459 NR Description: putative protein; protein id: At4g29140.1
  misc_feature (1)..(429): Homolog of NCBI NO: 15241158 NR Description: putative protein; protein id: At5g19700.1
  misc_feature (1)..(430): Homolog of NCBI NO: 15242265 NR Description: integral membrane protein-like; protein id:
  misc_feature (1)..(430): Homolog of NCBI NO: 39104576 NR Description: putative integral membrane protein [Arabidopsis
  misc_feature (1)..(436): Homolog of NCBI NO: 15224891 NR Description: hypothetical protein; protein id: At2g38510.1

SEQ ID NO: 93816 - protein, 457 aa, Arabidopsis thaliana; identical to SEQ ID NO: 90060
  peptide (1)..(457): Ceres Seq. ID no. 12722017
  misc_feature (1)..(457): Homolog of NCBI NO: 18406257 NR Description: expressed protein; protein id: At1g58340.1, by cDNA: gi_6520160 [Arabidopsis thaliana]
  misc_feature (1)..(427): Homolog of NCBI NO: 15235905 NR Description: putative protein; protein id: At4g23030.1
  misc_feature (1)..(429): Homolog of NCBI NO: 20532318 NR Description: Putative membrane protein [Oryza sativa (japonica group)] >gi|27356666|gb|AAO06955.1| Putative membrane protein
  misc_feature (1)..(424): Homolog of NCBI NO: 38567909 NR Description: OSJNBa0088I22.5 [Oryza sativa (japonica
  misc_feature (1)..(423): Homolog of NCBI NO: 37536202 NR Description: putative membrane protein [Oryza sativa (japonica group)] >gi|27311284|gb|AAO00710.1| putative membrane protein
  misc_feature (1)..(456): Homolog of NCBI NO: 15233459 NR Description: putative protein; protein id: At4g29140.1
  misc_feature (1)..(424): Homolog of NCBI NO: 15241158 NR Description: putative protein; protein id: At5g19700.1
  misc_feature (1)..(425): Homolog of NCBI NO: 15242265 NR Description: integral membrane protein-like; protein id:
  misc_feature (1)..(425): Homolog of NCBI NO: 39104576 NR Description: putative integral membrane protein [Arabidopsis
  misc_feature (1)..(431): Homolog of NCBI NO: 15224891 NR Description: hypothetical protein; protein id: At2g38510.1

SEQ ID NO: 93817 - DNA, 1066 bp, Arabidopsis thaliana; identical to SEQ ID NO: 90061
  misc_feature (1)..(1066): Ceres Seq. ID no. 12722058
  misc_feature: MA Experiment ID: 20000166 Result: Up-regulated in Transcription
  misc_feature: MA Experiment 20000166 PARAMETER Experiment Name: At_100uM_ABA_P Parameter: Age (day) Value: 14
  misc_feature: MA Experiment 20000166 PARAMETER Experiment Name: At_100uM_ABA_P Parameter: Organism Value: A. thaliana
  misc_feature: MA Experiment 20000166 PARAMETER Experiment Name: At_100uM_ABA_P Parameter: Plant Line Value: WS
  misc_feature: MA Experiment 20000166 PARAMETER Experiment Name: At_100uM_ABA_P Parameter: Timepoint (hr) Value: 1
  misc_feature: MA Experiment 20000166 PARAMETER Experiment Name: At_100uM_ABA_P Parameter: Tissue Value: Aerial
  misc_feature: MA Experiment 20000166 PARAMETER Experiment Name: At_100uM_ABA_P Parameter: Treatment Value: 100uM ABA vs. No Treatment
  misc_feature: MA Experiment ID: 20000169 Result: Up-regulated in Transcription
  misc_feature: MA Experiment 20000169 PARAMETER Experiment Name: At_100uM_ABA_P Parameter: Age (day) Value: 14
  misc_feature: MA Experiment 20000169 PARAMETER Experiment Name: At_100uM_ABA_P Parameter: Organism Value: A. thaliana
  misc_feature: MA Experiment 20000169 PARAMETER Experiment Name: At_100uM_ABA_P Parameter: Plant Line Value: WS
  misc_feature: MA Experiment 20000169 PARAMETER Experiment Name: At_100uM_ABA_P Parameter: Timepoint (hr) Value: 6
  misc_feature: MA Experiment 20000169 PARAMETER Experiment Name: At_100uM_ABA_P Parameter: Tissue Value: Aerial
  misc_feature: MA Experiment 20000169 PARAMETER Experiment Name: At_100uM_ABA_P Parameter: Treatment Value: 100uM ABA vs. No Treatment
  misc_feature: MA Experiment ID: 20000182 Result: Up-regulated in Transcription
  misc_feature: MA Experiment 20000182 PARAMETER Experiment Name: At_2mM_SA_P Parameter: Age (day) Value: 14
  misc_feature: MA Experiment 20000182 PARAMETER Experiment Name: At_2mM_SA_P Parameter: Organism Value: A. thaliana
  misc_feature: MA Experiment 20000182 PARAMETER Experiment Name: At_2mM_SA_P Parameter: Plant Line Value: WS
  misc_feature: MA Experiment 20000182 PARAMETER Experiment Name: At_2mM_SA_P Parameter: Timepoint (hr) Value: 6
  misc_feature: MA Experiment 20000182 PARAMETER Experiment Name: At_2mM_SA_P Parameter: Tissue Value: Aerial
  misc_feature: MA Experiment 20000182 PARAMETER Experiment Name: At_2mM_SA_P Parameter: Treatment Value: 2mM SA vs. No Treatment
  misc_feature: MA Experiment ID: 20000184 Result: Up-regulated in Transcription
  misc_feature: MA Experiment 20000184 PARAMETER Experiment Name: At_Shoots__P Parameter: Age (day) Value: 7
  misc_feature: MA Experiment 20000184 PARAMETER Experiment Name: At_Shoots__P Parameter: Tissue Value: Shoots vs. Whole Plant
  misc_feature: MA Experiment ID: 20000185 Result: Up-regulated in Transcription
  misc_feature: MA Experiment 20000185 PARAMETER Experiment Name: At_Roots__P Parameter: Age (day) Value: 7 vs. 21
  misc_feature: MA Experiment 20000185 PARAMETER Experiment Name: At_Roots__P Parameter: Organism Value: A. thaliana
  misc_feature: MA Experiment 20000185 PARAMETER Experiment Name: At_Roots__P Parameter: Tissue Value: Roots vs. Whole Plant
  misc_feature: MA Experiment ID: 20000265 Result: Down-regulated in Transcription
  misc_feature: MA Experiment 20000265 PARAMETER Experiment Name: At_Open_Flower_P Parameter: Age (day) Value: 21
  misc_feature: MA Experiment 20000265 PARAMETER Experiment Name: At_Open_Flower_P Parameter: Plant Line Value: WS
  misc_feature: MA Experiment 20000265 PARAMETER Experiment Name: At_Open_Flower_P Parameter: Tissue Value: Closed Flower vs. Whole Plant
  misc_feature: MA Experiment ID: 20000267 Result: Up-regulated in Transcription
  misc_feature: MA Experiment 20000267 PARAMETER Experiment Name: At_Drought_P Parameter: Age (day) Value: 7
  misc_feature: MA Experiment 20000267 PARAMETER Experiment Name: At_Drought_P Parameter: Organism Value: A. thaliana
  misc_feature: MA Experiment 20000267 PARAMETER Experiment Name: At_Drought_P Parameter: Plant Line Value: WS
  misc_feature: MA Experiment 20000267 PARAMETER Experiment Name: At_Drought_P Parameter: Timepoint (hr) Value: 6
  misc_feature: MA Experiment 20000267 PARAMETER Experiment Name: At_Drought_P Parameter: Tissue Value: Whole Plant
  misc_feature: MA Experiment 20000267 PARAMETER Experiment Name: At_Drought_P Parameter: Treatment Value: Drought vs. No Drought
  misc_feature: MA Experiment ID: 20000269 Result: Down-regulated in Transcription
  misc_feature: MA Experiment 20000269 PARAMETER Experiment Name: At_1mM_KNO3_L-vs-H_Roots_P Parameter: Age (day) Value: 7,10,12
  misc_feature: MA Experiment 20000269 PARAMETER Experiment Name: At_1mM_KNO3_L-vs-H_Roots_P Parameter: Organism Value: A. thaliana
  misc_feature: MA Experiment 20000269 PARAMETER Experiment Name: At_1mM_KNO3_L-vs-H_Roots_P Parameter: Plant Line Value: WS
  misc_feature: MA Experiment 20000269 PARAMETER Experiment Name: At_1mM_KNO3_L-vs-H_Roots_P Parameter: Timepoint (day) Value: 7,10,12
  misc_feature: MA Experiment 20000269 PARAMETER Experiment Name: At_1mM_KNO3_L-vs-H_Roots_P Parameter: Tissue Value: Roots
  misc_feature: MA Experiment 20000269 PARAMETER Experiment Name: At_1mM_KNO3_L-vs-H_Roots_P Parameter: Treatment Value: 1mM KNO3 vs. 50mM KNO3
  misc_feature: MA Experiment ID: 20000286 Result: Down-regulated in Transcription
  misc_feature: MA Experiment 20000286 PARAMETER Experiment Name: At_Open_Flower_P Parameter: Age (day) Value: 21
  misc_feature: MA Experiment 20000286 PARAMETER Experiment Name: At_Open_Flower_P Parameter: Plant Line Value: WS
  misc_feature: MA Experiment 20000286 PARAMETER Experiment Name: At_Open_Flower_P Parameter: Tissue Value: Half Open vs. Whole Plant
  misc_feature: MA Experiment ID: 20000436 Result: Up-regulated in Transcription
  misc_feature: MA Experiment 20000436 PARAMETER Experiment Name: At_Drought_P Parameter: Age (day) Value: 7
  misc_feature: MA Experiment 20000436 PARAMETER Experiment Name: At_Drought_P Parameter: Organism Value: A. thaliana
  misc_feature: MA Experiment 20000436 PARAMETER Experiment Name: At_Drought_P Parameter: Plant Line Value: WS
  misc_feature: MA Experiment 20000436 PARAMETER Experiment Name: At_Drought_P Parameter: Timepoint (hr) Value: 12
  misc_feature: MA Experiment 20000436 PARAMETER Experiment Name: At_Drought_P Parameter: Tissue Value: Whole Plant
  misc_feature: MA Experiment 20000436 PARAMETER Experiment Name: At_Drought_P Parameter: Treatment Value: Drought vs. No Drought
  misc_feature: MA Experiment ID: 20000439 Result: Up-regulated in Transcription
  misc_feature: MA Experiment 20000439 PARAMETER Experiment Name: At_Roots__P Parameter: Age (day) Value: 14 vs. 21
  misc_feature: MA Experiment 20000439 PARAMETER Experiment Name: At_Roots__P Parameter: Organism Value: A. thaliana
  misc_feature: MA Experiment 20000439 PARAMETER Experiment Name: At_Roots__P Parameter: Tissue Value: Roots vs. Whole Plant
  misc_feature: MA Experiment ID: 20000453 Result: Up-regulated in Transcription
  misc_feature: MA Experiment 20000453 PARAMETER Experiment Name: At_100uM_ABA_P Parameter: Age (day) Value: 15
  misc_feature: MA Experiment 20000453 PARAMETER Experiment Name: At_100uM_ABA_P Parameter: Organism Value: A. thaliana
  misc_feature: MA Experiment 20000453 PARAMETER Experiment Name: At_100uM_ABA_P Parameter: Plant Line Value: WS
  misc_feature: MA Experiment 20000453 PARAMETER Experiment Name: At_100uM_ABA_P Parameter: Timepoint (hr) Value: 24
  misc_feature: MA Experiment 20000453 PARAMETER Experiment Name: At_100uM_ABA_P Parameter: Tissue Value: Aerial
  misc_feature: MA Experiment 20000453 PARAMETER Experiment Name: At_100uM_ABA_P Parameter: Treatment Value: 100uM ABA vs. No Treatment
  misc_feature: MA Experiment ID: 20000455 Result: Up-regulated in Transcription
  misc_feature: MA Experiment 20000455 PARAMETER Experiment Name: At_100uM_ABA_P Parameter: Age (day) Value: 16
  misc_feature: MA Experiment 20000455 PARAMETER Experiment Name: At_100uM_ABA_P Parameter: Organism Value: A. thaliana
  misc_feature: MA Experiment 20000455 PARAMETER Experiment Name: At_100uM_ABA_P Parameter: Plant Line Value: WS
  misc_feature: MA Experiment 20000455 PARAMETER Experiment Name: At_100uM_ABA_P Parameter: Timepoint (hr) Value: 48
  misc_feature: MA Experiment 20000455 PARAMETER Experiment Name: At_100uM_ABA_P Parameter: Tissue Value: Aerial
  misc_feature: MA Experiment 20000455 PARAMETER Experiment Name: At_100uM_ABA_P Parameter: Treatment Value: 100uM ABA vs. No Treatment
  misc_feature: MA Experiment ID: 20000527 Result: Down-regulated in Transcription
  misc_feature: MA Experiment 20000527 PARAMETER Experiment Name: At_10percent_PEG_P Parameter: Age (day) Value: 20
  misc_feature: MA Experiment 20000527 PARAMETER Experiment Name: At_10percent_PEG_P Parameter: Organism Value: A. thaliana
  misc_feature: MA Experiment 20000527 PARAMETER Experiment Name: At_10percent_PEG_P Parameter: Plant Line Value: WS
  misc_feature: MA Experiment 20000527 PARAMETER Experiment Name: At_10percent_PEG_P Parameter: Timepoint (day) Value: 20
  misc_feature: MA Experiment 20000527 PARAMETER Experiment Name: At_10percent_PEG_P Parameter: Tissue Value: Whole Plant
  misc_feature: MA Experiment 20000527 PARAMETER Experiment Name: At_10percent_PEG_P Parameter: Treatment Value: 10percent PEG vs. No Treatment
  misc_feature: MA Experiment ID: 20000573 Result: Down-regulated in Transcription
  misc_feature: MA Experiment 20000573 PARAMETER Experiment Name: At_100uM_ABA_Mutants__P Parameter: Organism Value: A. thaliana
  misc_feature: MA Experiment 20000573 PARAMETER Experiment Name: At_100uM_ABA_Mutants__P Parameter: Plant Line Value: CS22 vs. Ler wt
  misc_feature: MA Experiment 20000573 PARAMETER Experiment Name: At_100uM_ABA_Mutants__P Parameter: Timepoint (hr) Value: N/A
  misc_feature: MA Experiment 20000573 PARAMETER Experiment Name: At_100uM_ABA_Mutants__P Parameter: Tissue Value: Whole Plant
  misc_feature: MA Experiment 20000573 PARAMETER Experiment Name: At_100uM_ABA_Mutants__P Parameter: Treatment Value: None
  misc_feature: MA Experiment ID: 20000574 Result: Down-regulated in Transcription
  misc_feature: MA Experiment 20000574 PARAMETER Experiment Name: At_100uM_ABA_Mutants__P Parameter: Organism Value: A. thaliana
  misc_feature: MA Experiment 20000574 PARAMETER Experiment Name: At_100uM_ABA_Mutants__P Parameter: Plant Line Value: CS23 vs. Ler wt
  misc_feature: MA Experiment 20000574 PARAMETER Experiment Name: At_100uM_ABA_Mutants__P Parameter: Timepoint (hr) Value: N/A
  misc_feature: MA Experiment 20000574 PARAMETER Experiment Name: At_100uM_ABA_Mutants__P Parameter: Tissue Value: Whole Plant
  misc_feature: MA Experiment 20000574 PARAMETER Experiment Name: At_100uM_ABA_Mutants__P Parameter: Treatment Value: None
  misc_feature: MA Experiment ID: 20000794 Result: Up-regulated in Transcription
  misc_feature: MA Experiment 20000794 PARAMETER Experiment Name: At_Petals_P Parameter: Age (day) Value: 23-25 days
  misc_feature: MA Experiment 20000794 PARAMETER Experiment Name: At_Petals_P Parameter: Plant Line Value: WS
  misc_feature: MA Experiment 20000794 PARAMETER Experiment Name: At_Petals_P Parameter: Tissue Value: Petals vs. Whole plant
  misc_feature: MA Experiment ID: 20001555 Result: Up-regulated in Transcription
  misc_feature: MA Experiment 20001555 PARAMETER Experiment Name: At_Drought_Soil_Dry_P Parameter: Age (day) Value: 24
  misc_feature: MA Experiment 20001555 PARAMETER Experiment Name: At_Drought_Soil_Dry_P Parameter: Organism Value: A. thaliana
  misc_feature: MA Experiment 20001555 PARAMETER Experiment Name: At_Drought_Soil_Dry_P Parameter: Plant Line Value: WS
  misc_feature: MA Experiment 20001555 PARAMETER Experiment Name: At_Drought_Soil_Dry_P Parameter: Post Timepoint (hr) Value: None
  misc_feature: MA Experiment 20001555 PARAMETER Experiment Name: At_Drought_Soil_Dry_P Parameter: Post-Treatment Value: None
  misc_feature: MA Experiment 20001555 PARAMETER Experiment Name: At_Drought_Soil_Dry_P Parameter: Timepoint (day) Value: 10
  misc_feature: MA Experiment 20001555 PARAMETER Experiment Name: At_Drought_Soil_Dry_P Parameter: Treatment Value: Drought vs. No Drought
  misc_feature: MA Experiment ID: 20001905 Result: Up-regulated in Transcription
  misc_feature: MA Experiment 20001905 PARAMETER Experiment Name: At_Drought_Reproduction_P Parameter: Age (day) Value: 40
  misc_feature: MA Experiment 20001905 PARAMETER Experiment Name: At_Drought_Reproduction_P Parameter: Organism Value: A. thaliana
  misc_feature: MA Experiment 20001905 PARAMETER Experiment Name: At_Drought_Reproduction_P Parameter: Plant Line Value: WS
  misc_feature: MA Experiment 20001905 PARAMETER Experiment Name: At_Drought_Reproduction_P Parameter: Timepoint (day) Value: 10
  misc_feature: MA Experiment 20001905 PARAMETER Experiment Name: At_Drought_Reproduction_P Parameter: Tissue Value: Rosettes
  misc_feature: MA Experiment 20001905 PARAMETER Experiment Name: At_Drought_Reproduction_P Parameter: Treatment Value: Drought vs. No Drought
  misc_feature: MA Experiment ID: 20001906 Result: Up-regulated in Transcription
  misc_feature: MA Experiment 20001906 PARAMETER Experiment Name: At_Drought_Reproduction_P Parameter: Age (day) Value: 35
  misc_feature: MA Experiment 20001906 PARAMETER Experiment Name: At_Drought_Reproduction_P Parameter: Organism Value: A. thaliana
  misc_feature: MA Experiment 20001906 PARAMETER Experiment Name: At_Drought_Reproduction_P Parameter: Plant Line Value: WS
  misc_feature: MA Experiment 20001906 PARAMETER Experiment Name: At_Drought_Reproduction_P Parameter: Timepoint (day) Value: 5
  misc_feature: MA Experiment 20001906 PARAMETER Experiment Name: At_Drought_Reproduction_P Parameter: Tissue Value: Siliques
  misc_feature: MA Experiment 20001906 PARAMETER Experiment Name: At_Drought_Reproduction_P Parameter: Treatment Value: Drought vs. No Drought
  misc_feature: MA Experiment ID: 20001908 Result: Up-regulated in Transcription
  misc_feature: MA Experiment 20001908 PARAMETER Experiment Name: At_Drought_Reproduction_P Parameter: Age (day) Value: 40
  misc_feature: MA Experiment 20001908 PARAMETER Experiment Name: At_Drought_Reproduction_P Parameter: Organism Value: A. thaliana
  misc_feature: MA Experiment 20001908 PARAMETER Experiment Name: At_Drought_Reproduction_P Parameter: Plant Line Value: WS
  misc_feature: MA Experiment 20001908 PARAMETER Experiment Name: At_Drought_Reproduction_P Parameter: Timepoint (day) Value: 10
  misc_feature: MA Experiment 20001908 PARAMETER Experiment Name: At_Drought_Reproduction_P Parameter: Tissue Value: Siliques
  misc_feature: MA Experiment 20001908 PARAMETER Experiment Name: At_Drought_Reproduction_P Parameter: Treatment Value: Drought vs. No Drought
  misc_feature: MA Experiment ID: 20001910 Result: Up-regulated in Transcription
  misc_feature: MA Experiment 20001910 PARAMETER Experiment Name: At_Drought_Reproduction_P Parameter: Age (day) Value: 37
  misc_feature: MA Experiment 20001910 PARAMETER Experiment Name: At_Drought_Reproduction_P Parameter: Organism Value: A. thaliana
  misc_feature: MA Experiment 20001910 PARAMETER Experiment Name: At_Drought_Reproduction_P Parameter: Plant Line Value: WS
  misc_feature: MA Experiment 20001910 PARAMETER Experiment Name: At_Drought_Reproduction_P Parameter: Timepoint (day) Value: 7
  misc_feature: MA Experiment 20001910 PARAMETER Experiment Name: At_Drought_Reproduction_P Parameter: Tissue Value: Flowers
  misc_feature: MA Experiment 20001910 PARAMETER Experiment Name: At_Drought_Reproduction_P Parameter: Treatment Value: Drought vs. No Drought

SEQ ID NO: 93818 - protein, 327 aa, Arabidopsis thaliana; identical to SEQ ID NO: 90062
  peptide (1)..(327): Ceres Seq. ID no. 12722059
  misc_feature (25)..(65): Pfam Name: Chitin recognition protein Pfam Description: Chitin recognition protein
  misc_feature (1)..(327): Homolog of NCBI NO: 320556 NR Description: chitinase (EC 3.2.1.14) precursor, basic - thaliana >gi|166666|gb|AAA32769.1| basic chitinase basic endochitinase [Arabidopsis thaliana]
  misc_feature (1)..(327): Homolog of NCBI NO: 5689102 NR Description: basic endochitinase [Arabidopsis thaliana]
  misc_feature (1)..(327): Homolog of NCBI NO: 5689130 NR Description: basic endochitinase [Arabidopsis thaliana]
  misc_feature (1)..(327): Homolog of NCBI NO: 5689110 NR Description: basic endochitinase [Arabidopsis thaliana]
  misc_feature (1)..(327): Homolog of NCBI NO: 5689118 NR Description: basic endochitinase [Arabidopsis thaliana]
  misc_feature (1)..(327): Homolog of NCBI NO: 227774 NR Description: basic chitinase
  misc_feature (6)..(327): Homolog of NCBI NO: 18399632 NR Description: glycosyl hydrolase family 19 (basic protein id: At3g12500.1 [Arabidopsis thaliana] Basic endochitinase precursor >gi|15451096|gb|AAK96819.1| basic
  misc_feature (1)..(327): Homolog of NCBI NO: 5689134 NR Description: basic endochitinase [Arabis gemmifera]
  misc_feature (5)..(327): Homolog of NCBI NO: 7798646 NR Description: class I chitinase [Arabis fecunda]
  misc_feature (7)..(327): Homolog of NCBI NO: 7798652 NR Description: class I chitinase [Arabis glabra]

SEQ ID NO: 93819 - protein, 322 aa, Arabidopsis thaliana; identical to SEQ ID NO: 90063
  peptide (1)..(322): Ceres Seq. ID no. 12722060
  misc_feature (20)..(60): Pfam Name: Chitin recognition protein Pfam Description: Chitin recognition protein
  misc_feature (1)..(322): Homolog of NCBI NO: 320556 NR Description: chitinase (EC 3.2.1.14) precursor, basic - thaliana >gi|166666|gb|AAA32769.1| basic chitinase basic endochitinase [Arabidopsis thaliana]
  misc_feature (1)..(322): Homolog of NCBI NO: 5689102 NR Description: basic endochitinase [Arabidopsis thaliana]
  misc_feature (1)..(322): Homolog of NCBI NO: 5689130 NR Description: basic endochitinase [Arabidopsis thaliana]
  misc_feature (1)..(322): Homolog of NCBI NO: 5689110 NR Description: basic endochitinase [Arabidopsis thaliana]
  misc_feature (1)..(322): Homolog of NCBI NO: 5689118 NR Description: basic endochitinase [Arabidopsis thaliana]
  misc_feature (1)..(322): Homolog of NCBI NO: 227774 NR Description: basic chitinase
  misc_feature (1)..(322): Homolog of NCBI NO: 18399632 NR Description: glycosyl hydrolase family 19 (basic protein id: At3g12500.1 [Arabidopsis thaliana] Basic endochitinase precursor >gi|15451096|gb|AAK96819.1| basic
  misc_feature (1)..(322): Homolog of NCBI NO: 5689134 NR Description: basic endochitinase [Arabis gemmifera]
  misc_feature (1)..(322): Homolog of NCBI NO: 7798646 NR Description: class I chitinase [Arabis fecunda]
  misc_feature (2)..(322): Homolog of NCBI NO: 7798652 NR Description: class I chitinase [Arabis glabra]

SEQ ID NO: 93820 - protein, 238 aa, Arabidopsis thaliana; identical to SEQ ID NO: 90064
  peptide (1)..(238): Ceres Seq. ID no. 12722061
  misc_feature (1)..(238): Homolog of NCBI NO: 320556 NR Description: chitinase (EC 3.2.1.14) precursor, basic - thaliana >gi|166666|gb|AAA32769.1| basic chitinase basic endochitinase [Arabidopsis thaliana]
  misc_feature (1)..(238): Homolog of NCBI NO: 5689102 NR Description: basic endochitinase [Arabidopsis thaliana]
  misc_feature (1)..(238): Homolog of NCBI NO: 5689130 NR Description: basic endochitinase [Arabidopsis thaliana]
  misc_feature (1)..(238): Homolog of NCBI NO: 5689110 NR Description: basic endochitinase [Arabidopsis thaliana]
  misc_feature (1)..(238): Homolog of NCBI NO: 5689118 NR Description: basic endochitinase [Arabidopsis thaliana]
  misc_feature (1)..(238): Homolog of NCBI NO: 227774 NR Description: basic chitinase
  misc_feature (1)..(238): Homolog of NCBI NO: 18399632 NR Description: glycosyl hydrolase family 19 (basic protein id: At3g12500.1 [Arabidopsis thaliana] Basic endochitinase precursor >gi|15451096|gb|AAK96819.1| basic
  misc_feature (1)..(238): Homolog of NCBI NO: 5689134 NR Description: basic endochitinase [Arabis gemmifera]
  misc_feature (1)..(238): Homolog of NCBI NO: 7798646 NR Description: class I chitinase [Arabis fecunda]
  misc_feature (1)..(238): Homolog of NCBI NO: 7798652 NR Description: class I chitinase [Arabis glabra]

SEQ ID NO: 93821 - DNA, 2221 bp, Arabidopsis thaliana; identical to SEQ ID NO: 90065
  misc_feature (1)..(2221): Ceres Seq. ID no. 12722066
  misc_feature: MA Experiment ID: 20000179 Result: Up-regulated in Transcription
  misc_feature: MA Experiment 20000179 PARAMETER Experiment Name: At_Germinating_Seeds_P Parameter: Age (hr) Value: 6 vs. 0
  misc_feature: MA Experiment 20000179 PARAMETER Experiment Name: At_Germinating_Seeds_P Parameter: Tissue Value: Germinating Seeds
  misc_feature: MA Experiment ID: 20000180 Result: Up-regulated in Transcription
  misc_feature: MA Experiment 20000180 PARAMETER Experiment Name: At_Germinating_Seeds_P Parameter: Age (hr) Value: 24 vs. 0
  misc_feature: MA Experiment 20000180 PARAMETER Experiment Name: At_Germinating_Seeds_P Parameter: Tissue Value: Germinating Seeds
  misc_feature: MA Experiment ID: 20000182 Result: Down-regulated in Transcription
  misc_feature: MA Experiment 20000182 PARAMETER Experiment Name: At_2mM_SA_P Parameter: Age (day) Value: 14
  misc_feature: MA Experiment 20000182 PARAMETER Experiment Name: At_2mM_SA_P Parameter: Organism Value: A. thaliana
  misc_feature: MA Experiment 20000182 PARAMETER Experiment Name: At_2mM_SA_P Parameter: Plant Line Value: WS
  misc_feature: MA Experiment 20000182 PARAMETER Experiment Name: At_2mM_SA_P Parameter: Timepoint (hr) Value: 6
  misc_feature: MA Experiment 20000182 PARAMETER Experiment Name: At_2mM_SA_P Parameter: Tissue Value: Aerial
  misc_feature: MA Experiment 20000182 PARAMETER Experiment Name: At_2mM_SA_P Parameter: Treatment Value: 2mM SA vs. No Treatment
  misc_feature: MA Experiment ID: 20000184 Result: Down-regulated in Transcription
  misc_feature: MA Experiment 20000184 PARAMETER Experiment Name: At_Shoots__P Parameter: Age (day) Value: 7
  misc_feature: MA Experiment 20000184 PARAMETER Experiment Name: At_Shoots__P Parameter: Tissue Value: Shoots vs. Whole Plant
  misc_feature: MA Experiment ID: 20000227 Result: Down-regulated in Transcription
  misc_feature: MA Experiment 20000227 PARAMETER Experiment Name: At_Root-Tips-vs-Tops_P Parameter: Tissue Value: Root Tips vs. Root Tops
  misc_feature: MA Experiment ID: 20000234 Result: Up-regulated in Transcription
  misc_feature: MA Experiment 20000234 PARAMETER Experiment Name: At_Siliques_P Parameter: Age (day) Value: 21
  misc_feature: MA Experiment 20000234 PARAMETER Experiment Name: At_Siliques_P Parameter: Organism Value: A. thaliana
  misc_feature: MA Experiment 20000234 PARAMETER Experiment Name: At_Siliques_P Parameter: Plant Line Value: WS
  misc_feature: MA Experiment 20000234 PARAMETER Experiment Name: At_Siliques_P Parameter: Tissue Value: Less Than 5mm Siliques vs. Whole Plant
  misc_feature: MA Experiment ID: 20000235 Result: Up-regulated in Transcription
  misc_feature: MA Experiment 20000235 PARAMETER Experiment Name: At_Siliques_P Parameter: Age (day) Value: 21
  misc_feature: MA Experiment 20000235 PARAMETER Experiment Name: At_Siliques_P Parameter: Organism Value: A. thaliana
  misc_feature: MA Experiment 20000235 PARAMETER Experiment Name: At_Siliques_P Parameter: Plant Line Value: WS
  misc_feature: MA Experiment 20000235 PARAMETER Experiment Name: At_Siliques_P Parameter: Tissue Value: 5-10mm Siliques vs. Whole Plant
  misc_feature: MA Experiment ID: 20000264 Result: Up-regulated in Transcription
  misc_feature: MA Experiment 20000264 PARAMETER Experiment Name: At_Open_Flower_P Parameter: Age (day) Value: 21
  misc_feature: MA Experiment 20000264 PARAMETER Experiment Name: At_Open_Flower_P Parameter: Plant Line Value: WS
  misc_feature: MA Experiment 20000264 PARAMETER Experiment Name: At_Open_Flower_P Parameter: Tissue Value: Open Flower vs. Whole Plant
  misc_feature: MA Experiment ID: 20000265 Result: Up-regulated in Transcription
  misc_feature: MA Experiment 20000265 PARAMETER Experiment Name: At_Open_Flower_P Parameter: Age (day) Value: 21
  misc_feature: MA Experiment 20000265 PARAMETER Experiment Name: At_Open_Flower_P Parameter: Plant Line Value: WS
  misc_feature: MA Experiment 20000265 PARAMETER Experiment Name: At_Open_Flower_P Parameter: Tissue Value: Closed Flower vs. Whole Plant
  misc_feature: MA Experiment ID: 20000439 Result: Up-regulated in Transcription
  misc_feature: MA Experiment 20000439 PARAMETER Experiment Name: At_Roots__P Parameter: Age (day) Value: 14 vs. 21
  misc_feature: MA Experiment 20000439 PARAMETER Experiment Name: At_Roots__P Parameter: Organism Value: A. thaliana
  misc_feature: MA Experiment 20000439 PARAMETER Experiment Name: At_Roots__P Parameter: Tissue Value: Roots vs. Whole Plant
  misc_feature: MA Experiment ID: 20000441 Result: Down-regulated in Transcription
  misc_feature: MA Experiment 20000441 PARAMETER Experiment Name: At_1uM_BR-BRZ__P Parameter: Tissue Value: Shoot Apices
  misc_feature: MA Experiment 20000441 PARAMETER Experiment Name: At_1uM_BR-BRZ__P Parameter: Treatment Value: 1uM BR vs. No Treatment
  misc_feature: MA Experiment ID: 20000443 Result: Down-regulated in Transcription
  misc_feature: MA Experiment 20000443 PARAMETER Experiment Name: At_1uM_BR-BRZ__P Parameter: Tissue Value: Shoot Apices
  misc_feature: MA Experiment 20000443 PARAMETER Experiment Name: At_1uM_BR-BRZ__P Parameter: Treatment Value: 1uM BRZ vs. No Treatment
  misc_feature: MA Experiment ID: 20000495 Result: Up-regulated in Transcription
  misc_feature: MA Experiment 20000495 PARAMETER Experiment Name: At_Guard_Cells_P Parameter: Harvest Date Value: 8/2/2002
  misc_feature: MA Experiment 20000495 PARAMETER Experiment Name: At_Guard_Cells_P Parameter: Organism Value: A. thaliana
  misc_feature: MA Experiment 20000495 PARAMETER Experiment Name: At_Guard_Cells_P Parameter: Tissue Value: Guard Cells vs. Leaves
  misc_feature: MA Experiment ID: 20000527 Result: Down-regulated in Transcription
  misc_feature: MA Experiment 20000527 PARAMETER Experiment Name: At_10percent_PEG_P Parameter: Age (day) Value: 20
  misc_feature: MA Experiment 20000527 PARAMETER Experiment Name: At_10percent_PEG_P Parameter: Organism Value: A. thaliana
  misc_feature: MA Experiment 20000527 PARAMETER Experiment Name: At_10percent_PEG_P Parameter: Plant Line Value: WS
  misc_feature: MA Experiment 20000527 PARAMETER Experiment Name: At_10percent_PEG_P Parameter: Timepoint (day) Value: 20
  misc_feature: MA Experiment 20000527 PARAMETER Experiment Name: At_10percent_PEG_P Parameter: Tissue Value: Whole Plant
  misc_feature: MA Experiment 20000527 PARAMETER Experiment Name: At_10percent_PEG_P Parameter: Treatment Value: 10percent PEG vs. No Treatment
  misc_feature: MA Experiment ID: 20001248 Result: Down-regulated in Transcription
  misc_feature: MA Experiment 20001248 PARAMETER Experiment Name: At_Far-red-induction_P Parameter: Age (day) Value: 7
  misc_feature: MA Experiment 20001248 PARAMETER Experiment Name: At_Far-red-induction_P Parameter: Light Value: Far-red vs. White
  misc_feature: MA Experiment 20001248 PARAMETER Experiment Name: At_Far-red-induction_P Parameter: Organism Value: A. thaliana
  misc_feature: MA Experiment 20001248 PARAMETER Experiment Name: At_Far-red-induction_P Parameter: Plant Line Value: Columbia
  misc_feature: MA Experiment 20001248 PARAMETER Experiment Name: At_Far-red-induction_P Parameter: Timepoint (hr) Value: 4
  misc_feature: MA Experiment 20001248 PARAMETER Experiment Name: At_Far-red-induction_P Parameter: Tissue Value: Whole Plant
  misc_feature: MA Experiment ID: 20001450 Result: Down-regulated in Transcription
  misc_feature: MA Experiment 20001450 PARAMETER Experiment Name: At_Far-red-induction_P Parameter: Age (day) Value: 7
  misc_feature: MA Experiment 20001450 PARAMETER Experiment Name: At_Far-red-induction_P Parameter: Light Value: Far-red vs. White
  misc_feature: MA Experiment 20001450 PARAMETER Experiment Name: At_Far-red-induction_P Parameter: Organism Value: A. thaliana
  misc_feature: MA Experiment 20001450 PARAMETER Experiment Name: At_Far-red-induction_P Parameter: Plant Line Value: Columbia
  misc_feature: MA Experiment 20001450 PARAMETER Experiment Name: At_Far-red-induction_P Parameter: Timepoint (hr) Value: 8
  misc_feature: MA Experiment 20001450 PARAMETER Experiment Name: At_Far-red-induction_P Parameter: Tissue Value: Whole Plant
  misc_feature: MA Experiment ID: 20001451 Result: Down-regulated in Transcription
  misc_feature: MA Experiment 20001451 PARAMETER Experiment Name: At_Far-red-induction_P Parameter: Age (day) Value: 7
  misc_feature: MA Experiment 20001451 PARAMETER Experiment Name: At_Far-red-induction_P Parameter: Light Value: Far-red vs. White
  misc_feature: MA Experiment 20001451 PARAMETER Experiment Name: At_Far-red-induction_P Parameter: Organism Value: A. thaliana
  misc_feature: MA Experiment 20001451 PARAMETER Experiment Name: At_Far-red-induction_P Parameter: Plant Line Value: Columbia
  misc_feature: MA Experiment 20001451 PARAMETER Experiment Name: At_Far-red-induction_P Parameter: Timepoint (hr) Value: 24
  misc_feature: MA Experiment 20001451 PARAMETER Experiment Name: At_Far-red-induction_P Parameter: Tissue Value: Whole Plant
  misc_feature: MA Experiment ID: 20001458 Result: Up-regulated in Transcription
  misc_feature: MA Experiment 20001458 PARAMETER Experiment Name: At_50mM_NH4NO3_L-to-H_P Parameter: Age (day) Value: Undefined
  misc_feature: MA Experiment 20001458 PARAMETER Experiment Name: At_50mM_NH4NO3_L-to-H_P Parameter: Organism Value: Undefined
  misc_feature: MA Experiment 20001458 PARAMETER Experiment Name: At_50mM_NH4NO3_L-to-H_P Parameter: Plant Line Value: Undefined
  misc_feature: MA Experiment 20001458 PARAMETER Experiment Name: At_50mM_NH4NO3_L-to-H_P Parameter: Timepoint (hr) Value: 2
  misc_feature: MA Experiment 20001458 PARAMETER Experiment Name: At_50mM_NH4NO3_L-to-H_P Parameter: Tissue Value: Siliques
  misc_feature: MA Experiment 20001458 PARAMETER Experiment Name: At_50mM_NH4NO3_L-to-H_P Parameter: Treatment Value: 50mM NH4NO3 vs. 100mM Manitol
  misc_feature: MA Experiment ID: 20001554 Result: Up-regulated in Transcription
  misc_feature: MA Experiment 20001554 PARAMETER Experiment Name: At_Drought_Soil_Dry_P Parameter: Age (day) Value: 21
  misc_feature: MA Experiment 20001554 PARAMETER Experiment Name: At_Drought_Soil_Dry_P Parameter: Organism Value: A. thaliana
  misc_feature: MA Experiment 20001554 PARAMETER Experiment Name: At_Drought_Soil_Dry_P Parameter: Plant Line Value: WS
  misc_feature: MA Experiment 20001554 PARAMETER Experiment Name: At_Drought_Soil_Dry_P Parameter: Post Timepoint (hr) Value: None
  misc_feature: MA Experiment 20001554 PARAMETER Experiment Name: At_Drought_Soil_Dry_P Parameter: Post-Treatment Value: None
  misc_feature: MA Experiment 20001554 PARAMETER Experiment Name: At_Drought_Soil_Dry_P Parameter: Timepoint (day) Value: 7
  misc_feature: MA Experiment 20001554 PARAMETER Experiment Name: At_Drought_Soil_Dry_P Parameter: Treatment Value: Drought vs. No Drought
  misc_feature: MA Experiment ID: 20001556 Result: Up-regulated in Transcription
  misc_feature: MA Experiment 20001556 PARAMETER Experiment Name: At_Drought_Soil_Dry_P Parameter: Age (day) Value: 26
  misc_feature: MA Experiment 20001556 PARAMETER Experiment Name: At_Drought_Soil_Dry_P Parameter: Organism Value: A. thaliana
  misc_feature: MA Experiment 20001556 PARAMETER Experiment Name: At_Drought_Soil_Dry_P Parameter: Plant Line Value: WS
  misc_feature: MA Experiment 20001556 PARAMETER Experiment Name: At_Drought_Soil_Dry_P Parameter: Post Timepoint (hr) Value: None
  misc_feature: MA Experiment 20001556 PARAMETER Experiment Name: At_Drought_Soil_Dry_P Parameter: Post-Treatment Value: None
  misc_feature: MA Experiment 20001556 PARAMETER Experiment Name: At_Drought_Soil_Dry_P Parameter: Timepoint (day) Value: 12
  misc_feature: MA Experiment 20001556 PARAMETER Experiment Name: At_Drought_Soil_Dry_P Parameter: Treatment Value: Drought vs. No Drought
  misc_feature: MA Experiment ID: 20001560 Result: Down-regulated in Transcription
  misc_feature: MA Experiment 20001560 PARAMETER Experiment Name: At_Drought_Soil_Dry_P Parameter: Age (day) Value: 28
  misc_feature: MA Experiment 20001560 PARAMETER Experiment Name: At_Drought_Soil_Dry_P Parameter: Organism Value: A. thaliana
  misc_feature: MA Experiment 20001560 PARAMETER Experiment Name: At_Drought_Soil_Dry_P Parameter: Plant Line Value: WS
  misc_feature: MA Experiment 20001560 PARAMETER Experiment Name: At_Drought_Soil_Dry_P Parameter: Post Timepoint (hr) Value: None
  misc_feature: MA Experiment 20001560 PARAMETER Experiment Name: At_Drought_Soil_Dry_P Parameter: Post-Treatment Value: None
  misc_feature: MA Experiment 20001560 PARAMETER Experiment Name: At_Drought_Soil_Dry_P Parameter: Timepoint (day) Value: 14
  misc_feature: MA Experiment 20001560 PARAMETER Experiment Name: At_Drought_Soil_Dry_P Parameter: Treatment Value: Drought vs. No Drought

SEQ ID NO: 93822 - protein, 686 aa, Arabidopsis thaliana; identical to SEQ ID NO: 90066
  peptide (1)..(686): Ceres Seq. ID no. 12722067
  misc_feature (235)..(475): Pfam Name: Permease family Pfam Description: Permease family
  misc_feature (11)..(686): Homolog of NCBI NO: 15240652 NR Description: sulfate transporter; protein id: At5g13550.1, by cDNA: gi_2626752 [Arabidopsis thaliana]
  misc_feature (11)..(686): Homolog of NCBI NO: 2626753 NR Description: sulfate transporter [Arabidopsis thaliana]
  misc_feature (11)..(686): Homolog of NCBI NO: 16197734 NR Description: sulfate transporter [Brassica napus]
  misc_feature (104)..(666): Homolog of NCBI NO: 37998897 NR Description: sulfate transporter [Brassica oleracea var.
  misc_feature (30)..(672): Homolog of NCBI NO: 20162451 NR Description: putative sulphate transporter [Oryza sativa]
  misc_feature (11)..(385): Homolog of NCBI NO: 11022647 NR Description: sulfate transporter-like protein [Arabidopsis
  misc_feature (11)..(348): Homolog of NCBI NO: 26453094 NR Description: putative sulfate transporter [Arabidopsis
  misc_feature (48)..(638): Homolog of NCBI NO: 11279063 NR Description: sulfate transport protein [imported] - thaliana >gi|3777483|dbj|BAA33932.1| sulfate transporter
  misc_feature (72)..(638): Homolog of NCBI NO: 13487717 NR Description: sulfate transporter 2 [Lycopersicon esculentum]
  misc_feature (72)..(638): Homolog of NCBI NO: 14270243 NR Description: sulfate transporter [Brassica napus]

SEQ ID NO: 93823 - protein, 677 aa, Arabidopsis thaliana; identical to SEQ ID NO: 90067
  peptide (1)..(677): Ceres Seq. ID no. 12722068
  misc_feature (226)..(466): Pfam Name: Permease family Pfam Description: Permease family
  misc_feature (2)..(677): Homolog of NCBI NO: 15240652 NR Description: sulfate transporter; protein id: At5g13550.1, by cDNA: gi_2626752 [Arabidopsis thaliana]
  misc_feature (2)..(677): Homolog of NCBI NO: 2626753 NR Description: sulfate transporter [Arabidopsis thaliana]
  misc_feature (2)..(677): Homolog of NCBI NO: 16197734 NR Description: sulfate transporter [Brassica napus]
  misc_feature (95)..(657): Homolog of NCBI NO: 37998897 NR Description: sulfate transporter [Brassica oleracea var.
  misc_feature (21)..(663): Homolog of NCBI NO: 20162451 NR Description: putative sulphate transporter [Oryza sativa]
  misc_feature (2)..(376): Homolog of NCBI NO: 11022647 NR Description: sulfate transporter-like protein [Arabidopsis
  misc_feature (2)..(339): Homolog of NCBI NO: 26453094 NR Description: putative sulfate transporter [Arabidopsis
  misc_feature (39)..(629): Homolog of NCBI NO: 11279063 NR Description: sulfate transport protein [imported] - thaliana >gi|3777483|dbj|BAA33932.1| sulfate transporter
  misc_feature (63)..(629): Homolog of NCBI NO: 13487717 NR Description: sulfate transporter 2 [Lycopersicon esculentum]
  misc_feature (63)..(629): Homolog of NCBI NO: 14270243 NR Description: sulfate transporter [Brassica napus]

SEQ ID NO: 93824 - protein, 621 aa, Arabidopsis thaliana; identical to SEQ ID NO: 90068
  peptide (1)..(621): Ceres Seq. ID no. 12722069
  misc_feature (170)..(410): Pfam Name: Permease family Pfam Description: Permease family
  misc_feature (1)..(621): Homolog of NCBI NO: 15240652 NR Description: sulfate transporter; protein id: At5g13550.1, by cDNA: gi_2626752 [Arabidopsis thaliana]
  misc_feature (1)..(621): Homolog of NCBI NO: 2626753 NR Description: sulfate transporter [Arabidopsis thaliana]
  misc_feature (1)..(621): Homolog of NCBI NO: 16197734 NR Description: sulfate transporter [Brassica napus]
  misc_feature (39)..(601): Homolog of NCBI NO: 37998897 NR Description: sulfate transporter [Brassica oleracea var.
  misc_feature (1)..(607): Homolog of NCBI NO: 20162451 NR Description: putative sulphate transporter [Oryza sativa]
  misc_feature (1)..(320): Homolog of NCBI NO: 11022647 NR Description: sulfate transporter-like protein [Arabidopsis
  misc_feature (1)..(283): Homolog of NCBI NO: 26453094 NR Description: putative sulfate transporter [Arabidopsis
  misc_feature (1)..(573): Homolog of NCBI NO: 11279063 NR Description: sulfate transport protein [imported] - thaliana >gi|3777483|dbj|BAA33932.1| sulfate transporter
  misc_feature (7)..(573): Homolog of NCBI NO: 13487717 NR Description: sulfate transporter 2 [Lycopersicon esculentum]
  misc_feature (7)..(573): Homolog of NCBI NO: 14270243 NR Description: sulfate transporter [Brassica napus]

SEQ ID NO: 93825 - DNA, 1913 bp, Arabidopsis thaliana; identical to SEQ ID NO: 90069
  misc_feature (1)..(1913): Ceres Seq. ID no. 12722077

SEQ ID NO: 93826 - protein, 524 aa, Arabidopsis thaliana; identical to SEQ ID NO: 90070
  peptide (1)..(524): Ceres Seq. ID no. 12722078
  misc_feature (226)..(252): Pfam Name: Zinc finger C-x8-C-x5-C-x3-H type (and similar) Pfam Description: Zinc finger C-x8-C-x5-C-x3-H type (and similar)
  misc_feature (1)..(524): Homolog of NCBI NO: 22331028 NR Description: hypothetical protein; protein id: At3g12680.1, by cDNA: gi_16797660 [Arabidopsis thaliana]
  misc_feature (197)..(524): Homolog of NCBI NO: 12321969 NR Description: zinc finger protein, putative, 5' partial;
  misc_feature (184)..(524): Homolog of NCBI NO: 11994409 NR Description: zinc finger protein-like [Arabidopsis thaliana]
  misc_feature (126)..(443): Homolog of NCBI NO: 22507458 NR Description: Unknown (protein for MGC:30371) [Mus musculus]
  misc_feature (200)..(511): Homolog of NCBI NO: 22507458 NR Description: Unknown (protein for MGC:30371) [Mus musculus]
  misc_feature (1)..(139): Homolog of NCBI NO: 11994410 NR Description: emb|CAB71107.1~gene_id:MBK21.6~similar to unknown
  misc_feature (112)..(499): Homolog of NCBI NO: 34912676 NR Description: P0686E09.7 [Oryza sativa (japonica
  misc_feature (171)..(499): Homolog of NCBI NO: 25409067 NR Description: hypothetical protein At2g47850 [imported] - thaliana >gi|3738297|gb|AAC63639.1| unknown protein [Arabidopsis
  misc_feature (171)..(499): Homolog of NCBI NO: 30690809 NR Description: expressed protein [Arabidopsis thaliana]
  misc_feature (221)..(506): Homolog of NCBI NO: 34906988 NR Description: putative zinc finger protein [Oryza sativa

SEQ ID NO: 93827 - protein, 445 aa, Arabidopsis thaliana; identical to SEQ ID NO: 90071
  peptide (1)..(445): Ceres Seq. ID no. 12722079
  misc_feature (147)..(173): Pfam Name: Zinc finger C-x8-C-x5-C-x3-H type (and similar) Pfam Description: Zinc finger C-x8-C-x5-C-x3-H type (and similar)
  misc_feature (1)..(445): Homolog of NCBI NO: 22331028 NR Description: hypothetical protein; protein id: At3g12680.1, by cDNA: gi_16797660 [Arabidopsis thaliana]
  misc_feature (118)..(445): Homolog of NCBI NO: 12321969 NR Description: zinc finger protein, putative, 5' partial;
  misc_feature (105)..(445): Homolog of NCBI NO: 11994409 NR Description: zinc finger protein-like [Arabidopsis thaliana]
  misc_feature (47)..(364): Homolog of NCBI NO: 22507458 NR Description: Unknown (protein for MGC:30371) [Mus musculus]
  misc_feature (121)..(432): Homolog of NCBI NO: 22507458 NR Description: Unknown (protein for MGC:30371) [Mus musculus]
  misc_feature (1)..(60): Homolog of NCBI NO: 11994410 NR Description: emb|CAB71107.1~gene_id:MBK21.6~similar to unknown
  misc_feature (33)..(420): Homolog of NCBI NO: 34912676 NR Description: P0686E09.7 [Oryza sativa (japonica
  misc_feature (92)..(420): Homolog of NCBI NO: 25409067 NR Description: hypothetical protein At2g47850 [imported] - thaliana >gi|3738297|gb|AAC63639.1| unknown protein [Arabidopsis
  misc_feature (92)..(420): Homolog of NCBI NO: 30690809 NR Description: expressed protein [Arabidopsis thaliana]
  misc_feature (142)..(427): Homolog of NCBI NO: 34906988 NR Description: putative zinc finger protein [Oryza sativa

SEQ ID NO: 93828 - protein, 341 aa, Arabidopsis thaliana; identical to SEQ ID NO: 90072
  peptide (1)..(341): Ceres Seq. ID no. 12722080
  misc_feature (43)..(69): Pfam Name: Zinc finger C-x8-C-x5-C-x3-H type (and similar) Pfam Description: Zinc finger C-x8-C-x5-C-x3-H type (and similar)
  misc_feature (1)..(341): Homolog of NCBI NO: 22331028 NR Description: hypothetical protein; protein id: At3g12680.1, by cDNA: gi_16797660 [Arabidopsis thaliana]
  misc_feature (14)..(341): Homolog of NCBI NO: 12321969 NR Description: zinc finger protein, putative, 5' partial;
  misc_feature (1)..(341): Homolog of NCBI NO: 11994409 NR Description: zinc finger protein-like [Arabidopsis thaliana]
  misc_feature (1)..(260): Homolog of NCBI NO: 22507458 NR Description: Unknown (protein for MGC:30371) [Mus musculus]
  misc_feature (17)..(328): Homolog of NCBI NO: 22507458 NR Description: Unknown (protein for MGC:30371) [Mus musculus]
  misc_feature (1)..(316): Homolog of NCBI NO: 34912676 NR Description: P0686E09.7 [Oryza sativa (japonica
  misc_feature (1)..(316): Homolog of NCBI NO: 25409067 NR Description: hypothetical protein At2g47850 [imported] - thaliana >gi|3738297|gb|AAC63639.1| unknown protein [Arabidopsis
  misc_feature (1)..(316): Homolog of NCBI NO: 30690809 NR Description: expressed protein [Arabidopsis thaliana]
  misc_feature (38)..(323): Homolog of NCBI NO: 34906988 NR Description: putative zinc finger protein [Oryza sativa
  misc_feature (39)..(58): Homolog of NCBI NO: 34906988 NR Description: putative zinc finger protein [Oryza sativa

SEQ ID NO: 93829 - DNA, 798 bp, Arabidopsis thaliana; identical to SEQ ID NO: 90073
  misc_feature (1)..(798): Ceres Seq. ID no. 12722081
  misc_feature: MA Experiment ID: 20000182 Result: Down-regulated in Transcription
  misc_feature: MA Experiment 20000182 PARAMETER Experiment Name: At_2mM_SA_P Parameter: Age (day) Value: 14
  misc_feature: MA Experiment 20000182 PARAMETER Experiment Name: At_2mM_SA_P Parameter: Organism Value: A. thaliana
  misc_feature: MA Experiment 20000182 PARAMETER Experiment Name: At_2mM_SA_P Parameter: Plant Line Value: WS
  misc_feature: MA Experiment 20000182 PARAMETER Experiment Name: At_2mM_SA_P Parameter: Timepoint (hr) Value: 6
  misc_feature: MA Experiment 20000182 PARAMETER Experiment Name: At_2mM_SA_P Parameter: Tissue Value: Aerial
  misc_feature: MA Experiment 20000182 PARAMETER Experiment Name: At_2mM_SA_P Parameter: Treatment Value: 2mM SA vs. No Treatment
  misc_feature: MA Experiment ID: 20000185 Result: Down-regulated in Transcription
  misc_feature: MA Experiment 20000185 PARAMETER Experiment Name: At_Roots__P Parameter: Age (day) Value: 7 vs. 21
  misc_feature: MA Experiment 20000185 PARAMETER Experiment Name: At_Roots__P Parameter: Organism Value: A. thaliana
  misc_feature: MA Experiment 20000185 PARAMETER Experiment Name: At_Roots__P Parameter: Tissue Value: Roots vs. Whole Plant
  misc_feature: MA Experiment ID: 20000437 Result: Down-regulated in Transcription
  misc_feature: MA Experiment 20000437 PARAMETER Experiment Name: At_Drought_P Parameter: Age (day) Value: 8
  misc_feature: MA Experiment 20000437 PARAMETER Experiment Name: At_Drought_P Parameter: Organism Value: A. thaliana
  misc_feature: MA Experiment 20000437 PARAMETER Experiment Name: At_Drought_P Parameter: Plant Line Value: WS
  misc_feature: MA Experiment 20000437 PARAMETER Experiment Name: At_Drought_P Parameter: Timepoint (hr) Value: 24
  misc_feature: MA Experiment 20000437 PARAMETER Experiment Name: At_Drought_P Parameter: Tissue Value: Whole Plant
  misc_feature: MA Experiment 20000437 PARAMETER Experiment Name: At_Drought_P Parameter: Treatment Value: Drought vs. No Drought
  misc_feature: MA Experiment ID: 20000439 Result: Down-regulated in Transcription
  misc_feature: MA Experiment 20000439 PARAMETER Experiment Name: At_Roots__P Parameter: Age (day) Value: 14 vs. 21
  misc_feature: MA Experiment 20000439 PARAMETER Experiment Name: At_Roots__P Parameter: Organism Value: A. thaliana
  misc_feature: MA Experiment 20000439 PARAMETER Experiment Name: At_Roots__P Parameter: Tissue Value: Roots vs. Whole Plant
  misc_feature: MA Experiment ID: 20001248 Result: Down-regulated in Transcription
  misc_feature: MA Experiment 20001248 PARAMETER Experiment Name: At_Far-red-induction_P Parameter: Age (day) Value: 7
  misc_feature: MA Experiment 20001248 PARAMETER Experiment Name: At_Far-red-induction_P Parameter: Light Value: Far-red vs. White
  misc_feature: MA Experiment 20001248 PARAMETER Experiment Name: At_Far-red-induction_P Parameter: Organism Value: A. thaliana
  misc_feature: MA Experiment 20001248 PARAMETER Experiment Name: At_Far-red-induction_P Parameter: Plant Line Value: Columbia
  misc_feature: MA Experiment 20001248 PARAMETER Experiment Name: At_Far-red-induction_P Parameter: Timepoint (hr) Value: 4
  misc_feature: MA Experiment 20001248 PARAMETER Experiment Name: At_Far-red-induction_P Parameter: Tissue Value: Whole Plant

SEQ ID NO: 93830 - protein, 213 aa, Arabidopsis thaliana; identical to SEQ ID NO: 90074
  peptide (1)..(213): Ceres Seq. ID no. 12722082
  misc_feature (48)..(213): Pfam Name: Divergent PAP2 family Pfam Description: Divergent PAP2 family
  misc_feature (1)..(213): Homolog of NCBI NO: 18399713 NR Description: Expressed protein; protein id: At3g12685.1, by cDNA: gi_15810238, supported by cDNA: gi_20465354 [Arabidopsis >gi|15810239|gb|AAL07237.1| unknown protein [Arabidopsis
  misc_feature (1)..(213): Homolog of NCBI NO: 11994410 NR Description: emb|CAB71107.1~gene_id:MBK21.6~similar to unknown
  misc_feature (49)..(210): Homolog of NCBI NO: 15615964 NR Description: BH3402~unknown conserved protein [Bacillus
  misc_feature (49)..(207): Homolog of NCBI NO: 16080259 NR Description: similar to hypothetical proteins [Bacillus
  misc_feature (50)..(205): Homolog of NCBI NO: 16804424 NR Description: similar to B. subtilis YuiD protein [Listeria
  misc_feature (53)..(212): Homolog of NCBI NO: 23099802 NR Description: hypothetical protein [Oceanobacillus iheyensis >gi|22778033|dbj|BAC14303.1| hypothetical conserved protein
  misc_feature (50)..(205): Homolog of NCBI NO: 16801547 NR Description: similar to B. subtilis YuiD protein [Listeria
  misc_feature (49)..(159): Homolog of NCBI NO: 15672981 NR Description: conserved hypothetical protein [Lactococcus subsp. lactis] >gi|25303764|pir||G86749 conserved hypothetical
  misc_feature (47)..(150): Homolog of NCBI NO: 22297563 NR Description: ORF_ID:tll0019~hypothetical protein
  misc_feature (45)..(150): Homolog of NCBI NO: 16329803 NR Description: hypothetical protein [Synechocystis sp. PCC 6803]

SEQ ID NO: 93831 - protein, 211 aa, Arabidopsis thaliana; identical to SEQ ID NO: 90075
  peptide (1)..(211): Ceres Seq. ID no. 12722083
  misc_feature (46)..(211): Pfam Name: Divergent PAP2 family Pfam Description: Divergent PAP2 family
  misc_feature (1)..(211): Homolog of NCBI NO: 18399713 NR Description: Expressed protein; protein id: At3g12685.1, by cDNA: gi_15810238, supported by cDNA: gi_20465354 [Arabidopsis >gi|15810239|gb|AAL07237.1| unknown protein [Arabidopsis
  misc_feature (1)..(211): Homolog of NCBI NO: 11994410 NR Description: emb|CAB71107.1~gene_id:MBK21.6~similar to unknown
  misc_feature (47)..(208): Homolog of NCBI NO: 15615964 NR Description: BH3402~unknown conserved protein [Bacillus
  misc_feature (47)..(205): Homolog of NCBI NO: 16080259 NR Description: similar to hypothetical proteins [Bacillus
  misc_feature (48)..(203): Homolog of NCBI NO: 16804424 NR Description: similar to B. subtilis YuiD protein [Listeria
  misc_feature (51)..(210): Homolog of NCBI NO: 23099802 NR Description: hypothetical protein [Oceanobacillus iheyensis >gi|22778033|dbj|BAC14303.1| hypothetical conserved protein
  misc_feature (48)..(203): Homolog of NCBI NO: 16801547 NR Description: similar to B. subtilis YuiD protein [Listeria
  misc_feature (47)..(157): Homolog of NCBI NO: 15672981 NR Description: conserved hypothetical protein [Lactococcus subsp. lactis] >gi|25303764|pir||G86749 conserved hypothetical
  misc_feature (45)..(148): Homolog of NCBI NO: 22297563 NR Description: ORF_ID:tll0019~hypothetical protein
  misc_feature (43)..(148): Homolog of NCBI NO: 16329803 NR Description: hypothetical protein [Synechocystis sp. PCC 6803]

SEQ ID NO: 93832 - DNA, 680 bp, Arabidopsis thaliana; identical to SEQ ID NO: 90076
  misc_feature (1)..(680): Ceres Seq. ID no. 12722096
  misc_feature: MA Experiment ID: 20000574 Result: Up-regulated in Transcription
  misc_feature: MA Experiment 20000574 PARAMETER Experiment Name: At_100uM_ABA_Mutants__P Parameter: Organism Value: A. thaliana
  misc_feature: MA Experiment 20000574 PARAMETER Experiment Name: At_100uM_ABA_Mutants__P Parameter: Plant Line Value: CS23 vs. Ler wt
  misc_feature: MA Experiment 20000574 PARAMETER Experiment Name: At_100uM_ABA_Mutants__P Parameter: Timepoint (hr) Value: N/A
  misc_feature: MA Experiment 20000574 PARAMETER Experiment Name: At_100uM_ABA_Mutants__P Parameter: Tissue Value: Whole Plant
  misc_feature: MA Experiment 20000574 PARAMETER Experiment Name: At_100uM_ABA_Mutants__P Parameter: Treatment Value: None

SEQ ID NO: 93833 - protein, 141 aa, Arabidopsis thaliana; identical to SEQ ID NO: 90077
  peptide (1)..(141): Ceres Seq. ID no. 12722097
  misc_feature (23)..(132): Pfam Name: Oleosin Pfam Description: Oleosin
  misc_feature (1)..(141): Homolog of NCBI NO: 15241406 NR Description: oleosin; protein id: At5g51210.1 [Arabidopsis >gi|18206251|sp|Q43284|OLE3_ARATH Oleosin 14.9 kDa
  misc_feature (1)..(141): Homolog of NCBI NO: 27754368 NR Description: putative oleosin [Arabidopsis thaliana]
  misc_feature (1)..(139): Homolog of NCBI NO: 15234945 NR Description: oleosin; protein id: At4g25140.1 [Arabidopsis >gi|266693|sp|P29525|OLE1_ARATH Oleosin 18.5 kDa
  misc_feature (1)..(139): Homolog of NCBI NO: 228416 NR Description: oleosin
  misc_feature (1)..(139): Homolog of NCBI NO: 129082 NR Description: Oleosin Bn-III (BnIII) >gi|81692|pir||S22475
  misc_feature (1)..(134): Homolog of NCBI NO: 129097 NR Description: Major oleosin NAP-II >gi|2119750|pir||S70915
  misc_feature (1)..(139): Homolog of NCBI NO: 129083 NR Description: Oleosin Bn-V (BnV) >gi|280390|pir||S25089 oleosin
  misc_feature (8)..(136): Homolog of NCBI NO: 7442009 NR Description: oleosin-like protein, salt stress-induced - sweet
  misc_feature (14)..(137): Homolog of NCBI NO: 29170509 NR Description: oleosin [Corylus avellana]
  misc_feature (1)..(137): Homolog of NCBI NO: 3914199 NR Description: OLEOSIN 1 >gi|460803|emb|CAA55008.1| oleosin

SEQ ID NO: 93834 - protein, 131 aa, Arabidopsis thaliana; identical to SEQ ID NO: 90078
  peptide (1)..(131): Ceres Seq. ID no. 12722098
  misc_feature (13)..(122): Pfam Name: Oleosin Pfam Description: Oleosin
  misc_feature (1)..(131): Homolog of NCBI NO: 15241406 NR Description: oleosin; protein id: At5g51210.1 [Arabidopsis >gi|18206251|sp|Q43284|OLE3_ARATH Oleosin 14.9 kDa
  misc_feature (1)..(131): Homolog of NCBI NO: 27754368 NR Description: putative oleosin [Arabidopsis thaliana]
  misc_feature (1)..(129): Homolog of NCBI NO: 15234945 NR Description: oleosin; protein id: At4g25140.1 [Arabidopsis >gi|266693|sp|P29525|OLE1_ARATH Oleosin 18.5 kDa
  misc_feature (1)..(129): Homolog of NCBI NO: 228416 NR Description: oleosin
  misc_feature (1)..(129): Homolog of NCBI NO: 129082 NR Description: Oleosin Bn-III (BnIII) >gi|81692|pir||S22475
  misc_feature (1)..(124): Homolog of NCBI NO: 129097 NR Description: Major oleosin NAP-II >gi|2119750|pir||S70915
  misc_feature (1)..(129): Homolog of NCBI NO: 129083 NR Description: Oleosin Bn-V (BnV) >gi|280390|pir||S25089 oleosin
  misc_feature (1)..(126): Homolog of NCBI NO: 7442009 NR Description: oleosin-like protein, salt stress-induced - sweet
  misc_feature (4)..(127): Homolog of NCBI NO: 29170509 NR Description: oleosin [Corylus avellana]
  misc_feature (1)..(127): Homolog of NCBI NO: 3914199 NR Description: OLEOSIN 1 >gi|460803|emb|CAA55008.1| oleosin

SEQ ID NO: 93835 - protein, 115 aa, Arabidopsis thaliana; identical to SEQ ID NO: 90079
  peptide (1)..(115): Ceres Seq. ID no. 12722099
  misc_feature (1)..(106): Pfam Name: Oleosin Pfam Description: Oleosin
  misc_feature (1)..(115): Homolog of NCBI NO: 15241406 NR Description: oleosin; protein id: At5g51210.1 [Arabidopsis >gi|18206251|sp|Q43284|OLE3_ARATH Oleosin 14.9 kDa
  misc_feature (1)..(115): Homolog of NCBI NO: 27754368 NR Description: putative oleosin [Arabidopsis thaliana]
  misc_feature (1)..(113): Homolog of NCBI NO: 15234945 NR Description: oleosin; protein id: At4g25140.1 [Arabidopsis >gi|266693|sp|P29525|OLE1_ARATH Oleosin 18.5 kDa
  misc_feature (1)..(113): Homolog of NCBI NO: 228416 NR Description: oleosin
  misc_feature (1)..(113): Homolog of NCBI NO: 129082 NR Description: Oleosin Bn-III (BnIII) >gi|81692|pir||S22475
  misc_feature (1)..(108): Homolog of NCBI NO: 129097 NR Description: Major oleosin NAP-II >gi|2119750|pir||S70915
  misc_feature (1)..(113): Homolog of NCBI NO: 129083 NR Description: Oleosin Bn-V (BnV) >gi|280390|pir||S25089 oleosin
  misc_feature (1)..(110): Homolog of NCBI NO: 7442009 NR Description: oleosin-like protein, salt stress-induced - sweet
  misc_feature (1)..(111): Homolog of NCBI NO: 29170509 NR Description: oleosin [Corylus avellana]
  misc_feature (1)..(111): Homolog of NCBI NO: 3914199 NR Description: OLEOSIN 1 >gi|460803|emb|CAA55008.1| oleosin

SEQ ID NO: 93836 - DNA, 2460 bp, Arabidopsis thaliana; identical to SEQ ID NO: 90080
  misc_feature (1)..(2460): Ceres Seq. ID no. 12722108
  misc_feature: MA Experiment ID: 20000180 Result: Up-regulated in Transcription
  misc_feature: MA Experiment 20000180 PARAMETER Experiment Name: At_Germinating_Seeds_P Parameter: Age (hr) Value: 24 vs. 0
  misc_feature: MA Experiment 20000180 PARAMETER Experiment Name: At_Germinating_Seeds_P Parameter: Tissue Value: Germinating Seeds
  misc_feature: MA Experiment ID: 20000495 Result: Down-regulated in Transcription
  misc_feature: MA Experiment 20000495 PARAMETER Experiment Name: At_Guard_Cells_P Parameter: Harvest Date Value: 8/2/2002
  misc_feature: MA Experiment 20000495 PARAMETER Experiment Name: At_Guard_Cells_P Parameter: Organism Value: A. thaliana
  misc_feature: MA Experiment 20000495 PARAMETER Experiment Name: At_Guard_Cells_P Parameter: Tissue Value: Guard Cells vs. Leaves
  misc_feature: MA Experiment ID: 20001451 Result: Up-regulated in Transcription
  misc_feature: MA Experiment 20001451 PARAMETER Experiment Name: At_Far-red-induction_P Parameter: Age (day) Value: 7
  misc_feature: MA Experiment 20001451 PARAMETER Experiment Name: At_Far-red-induction_P Parameter: Light Value: Far-red vs. White
  misc_feature: MA Experiment 20001451 PARAMETER Experiment Name: At_Far-red-induction_P Parameter: Organism Value: A. thaliana
  misc_feature: MA Experiment 20001451 PARAMETER Experiment Name: At_Far-red-induction_P Parameter: Plant Line Value: Columbia
  misc_feature: MA Experiment 20001451 PARAMETER Experiment Name: At_Far-red-induction_P Parameter: Timepoint (hr) Value: 24
  misc_feature: MA Experiment 20001451 PARAMETER Experiment Name: At_Far-red-induction_P Parameter: Tissue Value: Whole Plant

SEQ ID NO: 93837 - protein, 819 aa, Arabidopsis thaliana; identical to SEQ ID NO: 90081
  peptide (1)..(819): Ceres Seq. ID no. 12722109
  misc_feature (32)..(197): Pfam Name: Universal stress protein family Pfam Description: Universal stress protein family
  misc_feature (348)..(816): Homolog of NCBI NO: 15234952 NR Description: putative Ser Thr protein kinase; protein id:
  misc_feature (20)..(109): Homolog of NCBI NO: 15234952 NR Description: putative Ser Thr protein kinase; protein id:
  misc_feature (348)..(819): Homolog of NCBI NO: 15240280 NR Description: putative protein; protein id: At5g61550.1
  misc_feature (32)..(817): Homolog of NCBI NO: 30697549 NR Description: protein kinase family [Arabidopsis thaliana]
  misc_feature (178)..(817): Homolog of NCBI NO: 9758471 NR Description: contains similarity to receptor-like protein
  misc_feature (32)..(70): Homolog of NCBI NO: 9758471 NR Description: contains similarity to receptor-like protein
  misc_feature (134)..(815): Homolog of NCBI NO: 37536860 NR Description: putative protein kinase [Oryza sativa (japonica group)] >gi|13569983|gb|AAK31267.1| putative protein kinase sativa] >gi|31433514|gb|AAP55019.1| putative protein kinase
  misc_feature (378)..(818): Homolog of NCBI NO: 29367517 NR Description: putative serine/threonine protein kinase [Oryza
  misc_feature (39)..(819): Homolog of NCBI NO: 22327904 NR Description: similar to putative protein kinase; protein id:
  misc_feature (277)..(817): Homolog of NCBI NO: 15224775 NR Description: putative protein kinase; protein id: At2g19410.1 thaliana] >gi|7486244|pir||T01289 probable protein kinase

SEQ ID NO: 93838 - protein, 788 aa, Arabidopsis thaliana; identical to SEQ ID NO: 90082
  peptide (1)..(788): Ceres Seq. ID no. 12722110
  misc_feature (1)..(166): Pfam Name: Universal stress protein family Pfam Description: Universal stress protein family
  misc_feature (317)..(785): Homolog of NCBI NO: 15234952 NR Description: putative Ser Thr protein kinase; protein id:
  misc_feature (1)..(78): Homolog of NCBI NO: 15234952 NR Description: putative Ser Thr protein kinase; protein id:
  misc_feature (317)..(788): Homolog of NCBI NO: 15240280 NR Description: putative protein; protein id: At5g61550.1
  misc_feature (1)..(786): Homolog of NCBI NO: 30697549 NR Description: protein kinase family [Arabidopsis thaliana]
  misc_feature (147)..(786): Homolog of NCBI NO: 9758471 NR Description: contains similarity to receptor-like protein
  misc_feature (1)..(39): Homolog of NCBI NO: 9758471 NR Description: contains similarity to receptor-like protein
  misc_feature (103)..(784): Homolog of NCBI NO: 37536860 NR Description: putative protein kinase [Oryza sativa (japonica group)] >gi|13569983|gb|AAK31267.1| putative protein kinase sativa] >gi|31433514|gb|AAP55019.1| putative protein kinase
  misc_feature (347)..(787): Homolog of NCBI NO: 29367517 NR Description: putative serine/threonine protein kinase [Oryza
  misc_feature (8)..(788): Homolog of NCBI NO: 22327904 NR Description: similar to putative protein kinase; protein id:
  misc_feature (246)..(786): Homolog of NCBI NO: 15224775 NR Description: putative protein kinase; protein id: At2g19410.1 thaliana] >gi|7486244|pir||T01289 probable protein kinase

SEQ ID NO: 93839 - protein, 719 aa, Arabidopsis thaliana; identical to SEQ ID NO: 90083
  peptide (1)..(719): Ceres Seq. ID no. 12722111
  misc_feature (1)..(97): Pfam Name: Universal stress protein family Pfam Description: Universal stress protein family
  misc_feature (248)..(716): Homolog of NCBI NO: 15234952 NR Description: putative Ser Thr protein kinase; protein id:
  misc_feature (248)..(719): Homolog of NCBI NO: 15240280 NR Description: putative protein; protein id: At5g61550.1
  misc_feature (1)..(717): Homolog of NCBI NO: 30697549 NR Description: protein kinase family [Arabidopsis thaliana]
  misc_feature (78)..(717): Homolog of NCBI NO: 9758471 NR Description: contains similarity to receptor-like protein
  misc_feature (34)..(715): Homolog of NCBI NO: 37536860 NR Description: putative protein kinase [Oryza sativa (japonica group)] >gi|13569983|gb|AAK31267.1| putative protein kinase sativa] >gi|31433514|gb|AAP55019.1| putative protein kinase
  misc_feature (278)..(718): Homolog of NCBI NO: 29367517 NR Description: putative serine/threonine protein kinase [Oryza
  misc_feature (1)..(719): Homolog of NCBI NO: 22327904 NR Description: similar to putative protein kinase; protein id:
  misc_feature (177)..(717): Homolog of NCBI NO: 15224775 NR Description: putative protein kinase; protein id: At2g19410.1 thaliana] >gi|7486244|pir||T01289 probable protein kinase
  misc_feature (41)..(634): Homolog of NCBI NO: 15239834 NR Description: putative receptor - like kinase; protein id:
  misc_feature (244)..(651): Homolog of NCBI NO: 15224129 NR Description: putative protein kinase; protein id: At2g24370.1

SEQ ID NO: 93840 - DNA, 1308 bp, Arabidopsis thaliana; identical to SEQ ID NO: 90084
  misc_feature (1)..(1308): Ceres Seq. ID no. 12722125

SEQ ID NO: 93841 - protein, 435 aa, Arabidopsis thaliana; identical to SEQ ID NO: 90085
  peptide (1)..(435): Ceres Seq. ID no. 12722126
  misc_feature (50)..(325): Pfam Name: MBOAT family Pfam Description: MBOAT family
  misc_feature (1)..(435): Homolog of NCBI NO: 15242082 NR Description: putative protein; protein id: At5g51420.1 thaliana] >gi|9759288|dbj|BAB09753.1| contains similarity to wax
  misc_feature (1)..(347): Homolog of NCBI NO: 15240497 NR Description: wax synthase-like protein; protein id: At5g55350.1
  misc_feature (1)..(347): Homolog of NCBI NO: 15240498 NR Description: wax synthase-like protein; protein id: At5g55360.1
  misc_feature (1)..(344): Homolog of NCBI NO: 15240496 NR Description: putative protein; protein id: At5g55340.1, by cDNA: 115917. [Arabidopsis thaliana] contains similarity to wax synthase~gene_id:MTE17.5 [Arabidopsis
  misc_feature (1)..(348): Homolog of NCBI NO: 15218659 NR Description: hypothetical protein; protein id: At1g34490.1
  misc_feature (1)..(351): Homolog of NCBI NO: 8778260 NR Description: F12K21.17 [Arabidopsis thaliana]
  misc_feature (1)..(348): Homolog of NCBI NO: 15218662 NR Description: hypothetical protein; protein id: At1g34500.1
  misc_feature (1)..(347): Homolog of NCBI NO: 15240494 NR Description: wax synthase-like protein; protein id: At5g55320.1
  misc_feature (1)..(353): Homolog of NCBI NO: 8778259 NR Description: F12K21.19 [Arabidopsis thaliana]
  misc_feature (5)..(348): Homolog of NCBI NO: 8778259 NR Description: F12K21.19 [Arabidopsis thaliana]

SEQ ID NO: 93842 - protein, 294 aa, Arabidopsis thaliana; identical to SEQ ID NO: 90086
  peptide (1)..(294): Ceres Seq. ID no. 12722127
  misc_feature (1)..(184): Pfam Name: MBOAT family Pfam Description: MBOAT family
  misc_feature (1)..(294): Homolog of NCBI NO: 15242082 NR Description: putative protein; protein id: At5g51420.1 thaliana] >gi|9759288|dbj|BAB09753.1| contains similarity to wax
  misc_feature (1)..(206): Homolog of NCBI NO: 15240497 NR Description: wax synthase-like protein; protein id: At5g55350.1
  misc_feature (1)..(206): Homolog of NCBI NO: 15240498 NR Description: wax synthase-like protein; protein id: At5g55360.1
  misc_feature (1)..(203): Homolog of NCBI NO: 15240496 NR Description: putative protein; protein id: At5g55340.1, by cDNA: 115917. [Arabidopsis thaliana] contains similarity to wax synthase~gene_id:MTE17.5 [Arabidopsis
  misc_feature (1)..(207): Homolog of NCBI NO: 15218659 NR Description: hypothetical protein; protein id: At1g34490.1
  misc_feature (1)..(210): Homolog of NCBI NO: 8778260 NR Description: F12K21.17 [Arabidopsis thaliana]
  misc_feature (1)..(207): Homolog of NCBI NO: 15218662 NR Description: hypothetical protein; protein id: At1g34500.1
  misc_feature (1)..(206): Homolog of NCBI NO: 15240494 NR Description: wax synthase-like protein; protein id: At5g55320.1
  misc_feature (1)..(212): Homolog of NCBI NO: 8778259 NR Description: F12K21.19 [Arabidopsis thaliana]
  misc_feature (1)..(207): Homolog of NCBI NO: 8778259 NR Description: F12K21.19 [Arabidopsis thaliana]

SEQ ID NO: 93843 - protein, 227 aa, Arabidopsis thaliana; identical to SEQ ID NO: 90087
  peptide (1)..(227): Ceres Seq. ID no. 12722128
  misc_feature (1)..(117): Pfam Name: MBOAT family Pfam Description: MBOAT family
  misc_feature (1)..(227): Homolog of NCBI NO: 15242082 NR Description: putative protein; protein id: At5g51420.1 thaliana] >gi|9759288|dbj|BAB09753.1| contains similarity to wax
  misc_feature (1)..(139): Homolog of NCBI NO: 15240497 NR Description: wax synthase-like protein; protein id: At5g55350.1
  misc_feature (1)..(139): Homolog of NCBI NO: 15240498 NR Description: wax synthase-like protein; protein id: At5g55360.1
  misc_feature (1)..(136): Homolog of NCBI NO: 15240496 NR Description: putative protein; protein id: At5g55340.1, by cDNA: 115917. [Arabidopsis thaliana] contains similarity to wax synthase~gene_id:MTE17.5 [Arabidopsis
  misc_feature (1)..(140): Homolog of NCBI NO: 15218659 NR Description: hypothetical protein; protein id: At1g34490.1
  misc_feature (1)..(143): Homolog of NCBI NO: 8778260 NR Description: F12K21.17 [Arabidopsis thaliana]
  misc_feature (1)..(140): Homolog of NCBI NO: 15218662 NR Description: hypothetical protein; protein id: At1g34500.1
  misc_feature (1)..(139): Homolog of NCBI NO: 15240494 NR Description: wax synthase-like protein; protein id: At5g55320.1
  misc_feature (1)..(145): Homolog of NCBI NO: 8778259 NR Description: F12K21.19 [Arabidopsis thaliana]
  misc_feature (1)..(140): Homolog of NCBI NO: 8778259 NR Description: F12K21.19 [Arabidopsis thaliana]

SEQ ID NO: 93844 - DNA, 1611 bp, Arabidopsis thaliana; identical to SEQ ID NO: 90088
  misc_feature (1)..(1611): Ceres Seq. ID no. 12722145
  misc_feature: MA Experiment ID: 20000180 Result: Up-regulated in Transcription
  misc_feature: MA Experiment 20000180 PARAMETER Experiment Name: At_Germinating_Seeds_P Parameter: Age (hr) Value: 24 vs. 0
  misc_feature: MA Experiment 20000180 PARAMETER Experiment Name: At_Germinating_Seeds_P Parameter: Tissue Value: Germinating Seeds
  misc_feature: MA Experiment ID: 20000227 Result: Up-regulated in Transcription
  misc_feature: MA Experiment 20000227 PARAMETER Experiment Name: At_Root-Tips-vs-Tops_P Parameter: Tissue Value: Root Tips vs. Root Tops
  misc_feature: MA Experiment ID: 20001451 Result: Up-regulated in Transcription
  misc_feature: MA Experiment 20001451 PARAMETER Experiment Name: At_Far-red-induction_P Parameter: Age (day) Value: 7
  misc_feature: MA Experiment 20001451 PARAMETER Experiment Name: At_Far-red-induction_P Parameter: Light Value: Far-red vs. White
  misc_feature: MA Experiment 20001451 PARAMETER Experiment Name: At_Far-red-induction_P Parameter: Organism Value: A. thaliana
  misc_feature: MA Experiment 20001451 PARAMETER Experiment Name: At_Far-red-induction_P Parameter: Plant Line Value: Columbia
  misc_feature: MA Experiment 20001451 PARAMETER Experiment Name: At_Far-red-induction_P Parameter: Timepoint (hr) Value: 24
  misc_feature: MA Experiment 20001451 PARAMETER Experiment Name: At_Far-red-induction_P Parameter: Tissue Value: Whole Plant
  misc_feature: MA Experiment ID: 20001906 Result: Up-regulated in Transcription
  misc_feature: MA Experiment 20001906 PARAMETER Experiment Name: At_Drought_Reproduction_P Parameter: Age (day) Value: 35
  misc_feature: MA Experiment 20001906 PARAMETER Experiment Name: At_Drought_Reproduction_P Parameter: Organism Value: A. thaliana
  misc_feature: MA Experiment 20001906 PARAMETER Experiment Name: At_Drought_Reproduction_P Parameter: Plant Line Value: WS
  misc_feature: MA Experiment 20001906 PARAMETER Experiment Name: At_Drought_Reproduction_P Parameter: Timepoint (day) Value: 5
  misc_feature: MA Experiment 20001906 PARAMETER Experiment Name: At_Drought_Reproduction_P Parameter: Tissue Value: Siliques
  misc_feature: MA Experiment 20001906 PARAMETER Experiment Name: At_Drought_Reproduction_P Parameter: Treatment Value: Drought vs. No Drought

SEQ ID NO: 93845 - protein, 536 aa, Arabidopsis thaliana; identical to SEQ ID NO: 90089
  peptide (1)..(536): Ceres Seq. ID no. 12722146
  misc_feature (221)..(522): Pfam Name: Pectinesterase Pfam Description: Pectinesterase
  misc_feature (1)..(536): Homolog of NCBI NO: 15242109 NR Description: pectinesterase family; protein id: At5g51490.1 thaliana] >gi|9758191|dbj|BAB08665.1| pectinesterase [Arabidopsis
  misc_feature (1)..(536): Homolog of NCBI NO: 15242110 NR Description: pectinesterase family; protein id: At5g51500.1 thaliana] >gi|9758192|dbj|BAB08666.1| pectinesterase [Arabidopsis
  misc_feature (35)..(536): Homolog of NCBI NO: 15232793 NR Description: pectinesterase-like protein; protein id: [Arabidopsis thaliana] >gi|7447382|pir||T12995 pectinesterase
  misc_feature (14)..(536): Homolog of NCBI NO: 18406733 NR Description: pectinesterase family; protein id: At2g45220.1, by cDNA: gi_13605695 [Arabidopsis thaliana] At2g45220/F4L23.27 [Arabidopsis thaliana]
  misc_feature (14)..(536): Homolog of NCBI NO: 25313433 NR Description: probable pectinesterase [imported] - Arabidopsis
  misc_feature (118)..(536): Homolog of NCBI NO: 6174914 NR Description: Pectinesterase 2.1 precursor (Pectin
  misc_feature (118)..(536): Homolog of NCBI NO: 7447381 NR Description: pectinesterase (EC 3.1.1.11) PECS-c2 - sweet
  misc_feature (8)..(536): Homolog of NCBI NO: 34908778 NR Description: putative pectin esterase [Oryza sativa (japonica group)] >gi|20161185|dbj|BAB90112.1| putative pectin esterase
  misc_feature (38)..(536): Homolog of NCBI NO: 6174912 NR Description: Pectinesterase 1.1 precursor (Pectin
  misc_feature (38)..(536): Homolog of NCBI NO: 2098711 NR Description: pectinesterase [Citrus sinensis]

SEQ ID NO: 93846 - protein, 534 aa, Arabidopsis thaliana; identical to SEQ ID NO: 90090
  peptide (1)..(534): Ceres Seq. ID no. 12722147
  misc_feature (219)..(520): Pfam Name: Pectinesterase Pfam Description: Pectinesterase
  misc_feature (1)..(534): Homolog of NCBI NO: 15242109 NR Description: pectinesterase family; protein id: At5g51490.1 thaliana] >gi|9758191|dbj|BAB08665.1| pectinesterase [Arabidopsis
  misc_feature (1)..(534): Homolog of NCBI NO: 15242110 NR Description: pectinesterase family; protein id: At5g51500.1 thaliana] >gi|9758192|dbj|BAB08666.1| pectinesterase [Arabidopsis
  misc_feature (33)..(534): Homolog of NCBI NO: 15232793 NR Description: pectinesterase-like protein; protein id: [Arabidopsis thaliana] >gi|7447382|pir||T12995 pectinesterase
  misc_feature (12)..(534): Homolog of NCBI NO: 18406733 NR Description: pectinesterase family; protein id: At2g45220.1, by cDNA: gi_13605695 [Arabidopsis thaliana] At2g45220/F4L23.27 [Arabidopsis thaliana]
  misc_feature (12)..(534): Homolog of NCBI NO: 25313433 NR Description: probable pectinesterase [imported] - Arabidopsis
  misc_feature (116)..(534): Homolog of NCBI NO: 6174914 NR Description: Pectinesterase 2.1 precursor (Pectin
  misc_feature (116)..(534): Homolog of NCBI NO: 7447381 NR Description: pectinesterase (EC 3.1.1.11) PECS-c2 - sweet
  misc_feature (6)..(534): Homolog of NCBI NO: 34908778 NR Description: putative pectin esterase [Oryza sativa (japonica group)] >gi|20161185|dbj|BAB90112.1| putative pectin esterase
  misc_feature (36)..(534): Homolog of NCBI NO: 6174912 NR Description: Pectinesterase 1.1 precursor (Pectin
  misc_feature (36)..(534): Homolog of NCBI NO: 2098711 NR Description: pectinesterase [Citrus sinensis]

SEQ ID NO: 93847 - protein, 533 aa, Arabidopsis thaliana; identical to SEQ ID NO: 90091
  peptide (1)..(533): Ceres Seq. ID no. 12722148
  misc_feature (218)..(519): Pfam Name: Pectinesterase Pfam Description: Pectinesterase
  misc_feature (1)..(533): Homolog of NCBI NO: 15242109 NR Description: pectinesterase family; protein id: At5g51490.1 thaliana] >gi|9758191|dbj|BAB08665.1| pectinesterase [Arabidopsis
  misc_feature (1)..(533): Homolog of NCBI NO: 15242110 NR Description: pectinesterase family; protein id: At5g51500.1 thaliana] >gi|9758192|dbj|BAB08666.1| pectinesterase [Arabidopsis
  misc_feature (32)..(533): Homolog of NCBI NO: 15232793 NR Description: pectinesterase-like protein; protein id: [Arabidopsis thaliana] >gi|7447382|pir||T12995 pectinesterase
  misc_feature (11)..(533): Homolog of NCBI NO: 18406733 NR Description: pectinesterase family; protein id: At2g45220.1, by cDNA: gi_13605695 [Arabidopsis thaliana] At2g45220/F4L23.27 [Arabidopsis thaliana]
  misc_feature (11)..(533): Homolog of NCBI NO: 25313433 NR Description: probable pectinesterase [imported] - Arabidopsis
  misc_feature (115)..(533): Homolog of NCBI NO: 6174914 NR Description: Pectinesterase 2.1 precursor (Pectin
  misc_feature (115)..(533): Homolog of NCBI NO: 7447381 NR Description: pectinesterase (EC 3.1.1.11) PECS-c2 - sweet
  misc_feature (5)..(533): Homolog of NCBI NO: 34908778 NR Description: putative pectin esterase [Oryza sativa (japonica group)] >gi|20161185|dbj|BAB90112.1| putative pectin esterase
  misc_feature (35)..(533): Homolog of NCBI NO: 6174912 NR Description: Pectinesterase 1.1 precursor (Pectin
  misc_feature (35)..(533): Homolog of NCBI NO: 2098711 NR Description: pectinesterase [Citrus sinensis]

SEQ ID NO: 93848 - DNA, 1623 bp, Arabidopsis thaliana; identical to SEQ ID NO: 90092
  misc_feature (1)..(1623): Ceres Seq. ID no. 12722149
  misc_feature: MA Experiment ID: 20000227 Result: Up-regulated in Transcription
  misc_feature: MA Experiment 20000227 PARAMETER Experiment Name: At_Root-Tips-vs-Tops_P Parameter: Tissue Value: Root Tips vs. Root Tops

SEQ ID NO: 93849 - protein, 540 aa, Arabidopsis thaliana; identical to SEQ ID NO: 90093
  peptide (1)..(540): Ceres Seq. ID no. 12722150
  misc_feature (225)..(526): Pfam Name: Pectinesterase Pfam Description: Pectinesterase
  misc_feature (1)..(540): Homolog of NCBI NO: 15242110 NR Description: pectinesterase family; protein id: At5g51500.1 thaliana] >gi|9758192|dbj|BAB08666.1| pectinesterase [Arabidopsis
  misc_feature (1)..(540): Homolog of NCBI NO: 15242109 NR Description: pectinesterase family; protein id: At5g51490.1 thaliana] >gi|9758191|dbj|BAB08665.1| pectinesterase [Arabidopsis
  misc_feature (26)..(540): Homolog of NCBI NO: 15232793 NR Description: pectinesterase-like protein; protein id: [Arabidopsis thaliana] >gi|7447382|pir||T12995 pectinesterase
  misc_feature (127)..(540): Homolog of NCBI NO: 7447381 NR Description: pectinesterase (EC 3.1.1.11) PECS-c2 - sweet
  misc_feature (127)..(540): Homolog of NCBI NO: 6174914 NR Description: Pectinesterase 2.1 precursor (Pectin
  misc_feature (133)..(540): Homolog of NCBI NO: 18406733 NR Description: pectinesterase family; protein id: At2g45220.1, by cDNA: gi_13605695 [Arabidopsis thaliana] At2g45220/F4L23.27 [Arabidopsis thaliana]
  misc_feature (133)..(540): Homolog of NCBI NO: 25313433 NR Description: probable pectinesterase [imported] - Arabidopsis
  misc_feature (223)..(540): Homolog of NCBI NO: 15236734 NR Description: pectinesterase family; protein id: At4g00190.1
  misc_feature (42)..(194): Homolog of NCBI NO: 15236734 NR Description: pectinesterase family; protein id: At4g00190.1
  misc_feature (93)..(540): Homolog of NCBI NO: 15081598 NR Description: pectin methylesterase PME1 [Vitis vinifera]

SEQ ID NO: 93850 - protein, 537 aa, Arabidopsis thaliana; identical to SEQ ID NO: 90094
  peptide (1)..(537): Ceres Seq. ID no. 12722151
  misc_feature (222)..(523): Pfam Name: Pectinesterase Pfam Description: Pectinesterase
  misc_feature (1)..(537): Homolog of NCBI NO: 15242110 NR Description: pectinesterase family; protein id: At5g51500.1 thaliana] >gi|9758192|dbj|BAB08666.1| pectinesterase [Arabidopsis
  misc_feature (1)..(537): Homolog of NCBI NO: 15242109 NR Description: pectinesterase family; protein id: At5g51490.1 thaliana] >gi|9758191|dbj|BAB08665.1| pectinesterase [Arabidopsis
  misc_feature (23)..(537): Homolog of NCBI NO: 15232793 NR Description: pectinesterase-like protein; protein id: [Arabidopsis thaliana] >gi|7447382|pir||T12995 pectinesterase
  misc_feature (124)..(537): Homolog of NCBI NO: 7447381 NR Description: pectinesterase (EC 3.1.1.11) PECS-c2 - sweet
  misc_feature (124)..(537): Homolog of NCBI NO: 6174914 NR Description: Pectinesterase 2.1 precursor (Pectin
  misc_feature (130)..(537): Homolog of NCBI NO: 18406733 NR Description: pectinesterase family; protein id: At2g45220.1, by cDNA: gi_13605695 [Arabidopsis thaliana] At2g45220/F4L23.27 [Arabidopsis thaliana]
  misc_feature (130)..(537): Homolog of NCBI NO: 25313433 NR Description: probable pectinesterase [imported] - Arabidopsis
  misc_feature (220)..(537): Homolog of NCBI NO: 15236734 NR Description: pectinesterase family; protein id: At4g00190.1
  misc_feature (39)..(191): Homolog of NCBI NO: 15236734 NR Description: pectinesterase family; protein id: At4g00190.1
  misc_feature (90)..(537): Homolog of NCBI NO: 15081598 NR Description: pectin methylesterase PME1 [Vitis vinifera]

SEQ ID NO: 93851 - protein, 536 aa, Arabidopsis thaliana; identical to SEQ ID NO: 90095
  peptide (1)..(536): Ceres Seq. ID no. 12722152
  misc_feature (221)..(522): Pfam Name: Pectinesterase Pfam Description: Pectinesterase
  misc_feature (1)..(536): Homolog of NCBI NO: 15242110 NR Description: pectinesterase family; protein id: At5g51500.1 thaliana] >gi|9758192|dbj|BAB08666.1| pectinesterase [Arabidopsis
  misc_feature (1)..(536): Homolog of NCBI NO: 15242109 NR Description: pectinesterase family; protein id: At5g51490.1 thaliana] >gi|9758191|dbj|BAB08665.1| pectinesterase [Arabidopsis
  misc_feature (22)..(536): Homolog of NCBI NO: 15232793 NR Description: pectinesterase-like protein; protein id: [Arabidopsis thaliana] >gi|7447382|pir||T12995 pectinesterase
  misc_feature (123)..(536): Homolog of NCBI NO: 7447381 NR Description: pectinesterase (EC 3.1.1.11) PECS-c2 - sweet
  misc_feature (123)..(536): Homolog of NCBI NO: 6174914 NR Description: Pectinesterase 2.1 precursor (Pectin
  misc_feature (129)..(536): Homolog of NCBI NO: 18406733 NR Description: pectinesterase family; protein id: At2g45220.1, by cDNA: gi_13605695 [Arabidopsis thaliana] At2g45220/F4L23.27 [Arabidopsis thaliana]
  misc_feature (129)..(536): Homolog of NCBI NO: 25313433 NR Description: probable pectinesterase [imported] - Arabidopsis
  misc_feature (219)..(536): Homolog of NCBI NO: 15236734 NR Description: pectinesterase family; protein id: At4g00190.1
  misc_feature (38)..(190): Homolog of NCBI NO: 15236734 NR Description: pectinesterase family; protein id: At4g00190.1
  misc_feature (89)..(536): Homolog of NCBI NO: 15081598 NR Description: pectin methylesterase PME1 [Vitis vinifera]

SEQ ID NO: 93852 - DNA, 1260 bp, Arabidopsis thaliana; identical to SEQ ID NO: 90096
  misc_feature (1)..(1260): Ceres Seq. ID no. 12722158
  misc_feature: MA Experiment ID: 20000307 Result: Down-regulated in Transcription
  misc_feature: MA Experiment 20000307 PARAMETER Experiment Name: At_Germinating_Seeds_Sub_P Parameter: Age (hr) Value: 24 vs. 0
  misc_feature: MA Experiment 20000307 PARAMETER Experiment Name: At_Germinating_Seeds_Sub_P Parameter: Organism Value: A. thaliana
  misc_feature: MA Experiment 20000307 PARAMETER Experiment Name: At_Germinating_Seeds_Sub_P Parameter: Plant Line Value: WS
  misc_feature: MA Experiment 20000307 PARAMETER Experiment Name: At_Germinating_Seeds_Sub_P Parameter: Tissue Value: Germinating Seeds
  misc_feature: MA Experiment ID: 20000355 Result: Up-regulated in Transcription
  misc_feature: MA Experiment 20000355 PARAMETER Experiment Name: At_Siliques_Sub_P Parameter: Age (day) Value: 21
  misc_feature: MA Experiment 20000355 PARAMETER Experiment Name: At_Siliques_Sub_P Parameter: Organism Value: A. thaliana
  misc_feature: MA Experiment 20000355 PARAMETER Experiment Name: At_Siliques_Sub_P Parameter: Plant Line Value: WS
  misc_feature: MA Experiment 20000355 PARAMETER Experiment Name: At_Siliques_Sub_P Parameter: Tissue Value: Less Than 5mm Siliques vs. Whole Plant
  misc_feature: MA Experiment ID: 20000440 Result: Up-regulated in Transcription
  misc_feature: MA Experiment 20000440 PARAMETER Experiment Name: At_Closed-Flower__Sub_P Parameter: Tissue Value: Closed Flower vs. Whole Plant

SEQ ID NO: 93853 - protein, 419 aa, Arabidopsis thaliana; identical to SEQ ID NO: 90097
  peptide (1)..(419): Ceres Seq. ID no. 12722159
  misc_feature (1)..(419): Homolog of NCBI NO: 15242131 NR Description: putative protein; protein id: At5g51590.1
  misc_feature (127)..(419): Homolog of NCBI NO: 15235023 NR Description: putative protein; protein id: At4g25320.1, by cDNA: gi_20466212 [Arabidopsis thaliana]
  misc_feature (1)..(144): Homolog of NCBI NO: 15235023 NR Description: putative protein; protein id: At4g25320.1, by cDNA: gi_20466212 [Arabidopsis thaliana]
  misc_feature (163)..(402): Homolog of NCBI NO: 15241763 NR Description: putative protein; protein id: At5g62260.1
  misc_feature (32)..(121): Homolog of NCBI NO: 15241763 NR Description: putative protein; protein id: At5g62260.1
  misc_feature (157)..(345): Homolog of NCBI NO: 22328578 NR Description: putative DNA-binding protein; protein id: supported by cDNA: gi_17979484 [Arabidopsis thaliana] AT4g12080/F16J13_150 [Arabidopsis thaliana]
  misc_feature (33)..(105): Homolog of NCBI NO: 22328578 NR Description: putative DNA-binding protein; protein id: supported by cDNA: gi_17979484 [Arabidopsis thaliana] AT4g12080/F16J13_150 [Arabidopsis thaliana]
  misc_feature (32)..(402): Homolog of NCBI NO: 8809639 NR Description: contains similarity to DNA-binding [Arabidopsis thaliana] >gi|26451694|dbj|BAC42942.1| unknown [Arabidopsis thaliana] >gi|28973553|gb|AAO64101.1| unknown
  misc_feature (177)..(334): Homolog of NCBI NO: 37537056 NR Description: putative AT-Hook DNA-binding protein [Oryza
  misc_feature (53)..(139): Homolog of NCBI NO: 37537056 NR Description: putative AT-Hook DNA-binding protein [Oryza

SEQ ID NO: 93854 - protein, 352 aa, Arabidopsis thaliana; identical to SEQ ID NO: 90098
  peptide (1)..(352): Ceres Seq. ID no. 12722160
  misc_feature (1)..(352): Homolog of NCBI NO: 15242131 NR Description: putative protein; protein id: At5g51590.1
  misc_feature (60)..(352): Homolog of NCBI NO: 15235023 NR Description: putative protein; protein id: At4g25320.1, by cDNA: gi_20466212 [Arabidopsis thaliana]
  misc_feature (1)..(77): Homolog of NCBI NO: 15235023 NR Description: putative protein; protein id: At4g25320.1, by cDNA: gi_20466212 [Arabidopsis thaliana]
  misc_feature (96)..(335): Homolog of NCBI NO: 15241763 NR Description: putative protein; protein id: At5g62260.1
  misc_feature (1)..(54): Homolog of NCBI NO: 15241763 NR Description: putative protein; protein id: At5g62260.1
  misc_feature (90)..(278): Homolog of NCBI NO: 22328578 NR Description: putative DNA-binding protein; protein id: supported by cDNA: gi_17979484 [Arabidopsis thaliana] AT4g12080/F16J13_150 [Arabidopsis thaliana]
  misc_feature (1)..(38): Homolog of NCBI NO: 22328578 NR Description: putative DNA-binding protein; protein id: supported by cDNA: gi_17979484 [Arabidopsis thaliana] AT4g12080/F16J13_150 [Arabidopsis thaliana]
  misc_feature (1)..(335): Homolog of NCBI NO: 8809639 NR Description: contains similarity to DNA-binding [Arabidopsis thaliana] >gi|26451694|dbj|BAC42942.1| unknown [Arabidopsis thaliana] >gi|28973553|gb|AAO64101.1| unknown
  misc_feature (110)..(267): Homolog of NCBI NO: 37537056 NR Description: putative AT-Hook DNA-binding protein [Oryza
  misc_feature (1)..(72): Homolog of NCBI NO: 37537056 NR Description: putative AT-Hook DNA-binding protein [Oryza

SEQ ID NO: 93855 - protein, 320 aa, Arabidopsis thaliana; identical to SEQ ID NO: 90099
  peptide (1)..(320): Ceres Seq. ID no. 12722161
  misc_feature (1)..(320): Homolog of NCBI NO: 15242131 NR Description: putative protein; protein id: At5g51590.1
  misc_feature (28)..(320): Homolog of NCBI NO: 15235023 NR Description: putative protein; protein id: At4g25320.1, by cDNA: gi_20466212 [Arabidopsis thaliana]
  misc_feature (1)..(45): Homolog of NCBI NO: 15235023 NR Description: putative protein; protein id: At4g25320.1, by cDNA: gi_20466212 [Arabidopsis thaliana]
  misc_feature (64)..(303): Homolog of NCBI NO: 15241763 NR Description: putative protein; protein id: At5g62260.1
  misc_feature (1)..(22): Homolog of NCBI NO: 15241763 NR Description: putative protein; protein id: At5g62260.1
  misc_feature (58)..(246): Homolog of NCBI NO: 22328578 NR Description: putative DNA-binding protein; protein id: supported by cDNA: gi_17979484 [Arabidopsis thaliana] AT4g12080/F16J13_150 [Arabidopsis thaliana]
  misc_feature (1)..(303): Homolog of NCBI NO: 8809639 NR Description: contains similarity to DNA-binding [Arabidopsis thaliana] >gi|26451694|dbj|BAC42942.1| unknown [Arabidopsis thaliana] >gi|28973553|gb|AAO64101.1| unknown
  misc_feature (78)..(235): Homolog of NCBI NO: 37537056 NR Description: putative AT-Hook DNA-binding protein [Oryza
  misc_feature (1)..(40): Homolog of NCBI NO: 37537056 NR Description: putative AT-Hook DNA-binding protein [Oryza
  misc_feature (1)..(246): Homolog of NCBI NO: 7485570 NR Description: hypothetical protein F16J13.150 - Arabidopsis

SEQ ID NO: 93856 - DNA, 1828 bp, Arabidopsis thaliana; identical to SEQ ID NO: 90100
  misc_feature (1)..(1828): Ceres Seq. ID no. 12722162
  misc_feature: MA Experiment ID: 20000234 Result: Down-regulated in Transcription
  misc_feature: MA Experiment 20000234 PARAMETER Experiment Name: At_Siliques_P Parameter: Age (day) Value: 21
  misc_feature: MA Experiment 20000234 PARAMETER Experiment Name: At_Siliques_P Parameter: Organism Value: A. thaliana
  misc_feature: MA Experiment 20000234 PARAMETER Experiment Name: At_Siliques_P Parameter: Plant Line Value: WS
  misc_feature: MA Experiment 20000234 PARAMETER Experiment Name: At_Siliques_P Parameter: Tissue Value: Less Than 5mm Siliques vs. Whole Plant
  misc_feature: MA Experiment ID: 20000495 Result: Down-regulated in Transcription
  misc_feature: MA Experiment 20000495 PARAMETER Experiment Name: At_Guard_Cells_P Parameter: Harvest Date Value: 8/2/2002
  misc_feature: MA Experiment 20000495 PARAMETER Experiment Name: At_Guard_Cells_P Parameter: Organism Value: A. thaliana
  misc_feature: MA Experiment 20000495 PARAMETER Experiment Name: At_Guard_Cells_P Parameter: Tissue Value: Guard Cells vs. Leaves
  misc_feature: MA Experiment ID: 20001451 Result: Down-regulated in Transcription
  misc_feature: MA Experiment 20001451 PARAMETER Experiment Name: At_Far-red-induction_P Parameter: Age (day) Value: 7
  misc_feature: MA Experiment 20001451 PARAMETER Experiment Name: At_Far-red-induction_P Parameter: Light Value: Far-red vs. White
  misc_feature: MA Experiment 20001451 PARAMETER Experiment Name: At_Far-red-induction_P Parameter: Organism Value: A. thaliana
  misc_feature: MA Experiment 20001451 PARAMETER Experiment Name: At_Far-red-induction_P Parameter: Plant Line Value: Columbia
  misc_feature: MA Experiment 20001451 PARAMETER Experiment Name: At_Far-red-induction_P Parameter: Timepoint (hr) Value: 24
  misc_feature: MA Experiment 20001451 PARAMETER Experiment Name: At_Far-red-induction_P Parameter: Tissue Value: Whole Plant

SEQ ID NO: 93857 - protein, 535 aa, Arabidopsis thaliana; identical to SEQ ID NO: 90101
  peptide (1)..(535): Ceres Seq. ID no. 12722163
  misc_feature (339)..(522): Pfam Name: Arabidopsis proteins of unknown function Pfam Description: Arabidopsis proteins of unknown function
  misc_feature (35)..(535): Homolog of NCBI NO: 15242138 NR Description: putative protein; protein id: At5g51640.1, by cDNA: gi_19424020 [Arabidopsis thaliana] gene_id:K17N15.19~pir||T10216~strong similarity to unknown
  misc_feature (112)..(532): Homolog of NCBI NO: 22328922 NR Description: putative protein; protein id: At4g25360.1, by cDNA: gi_17979114 [Arabidopsis thaliana] unknown protein [Arabidopsis thaliana]
  misc_feature (35)..(128): Homolog of NCBI NO: 22328922 NR Description: putative protein; protein id: At4g25360.1, by cDNA: gi_17979114 [Arabidopsis thaliana] unknown protein [Arabidopsis thaliana]
  misc_feature (112)..(532): Homolog of NCBI NO: 7487578 NR Description: hypothetical protein T30C3.30 - Arabidopsis >gi|5123925|emb|CAB45513.1| putative protein [Arabidopsis >gi|7269387|emb|CAB81347.1| putative protein [Arabidopsis
  misc_feature (35)..(128): Homolog of NCBI NO: 7487578 NR Description: hypothetical protein T30C3.30 - Arabidopsis >gi|5123925|emb|CAB45513.1| putative protein [Arabidopsis >gi|7269387|emb|CAB81347.1| putative protein [Arabidopsis
  misc_feature (115)..(531): Homolog of NCBI NO: 34906936 NR Description: leaf senescence related protein-like [Oryza
  misc_feature (157)..(522): Homolog of NCBI NO: 15237044 NR Description: putative protein; protein id: At4g11090.1
  misc_feature (115)..(530): Homolog of NCBI NO: 30678135 NR Description: expressed protein [Arabidopsis thaliana] unknown protein [Arabidopsis thaliana]
  misc_feature (160)..(522): Homolog of NCBI NO: 30686312 NR Description: expressed protein [Arabidopsis thaliana]
  misc_feature (109)..(525): Homolog of NCBI NO: 15237211 NR Description: putative protein; protein id: At5g15890.1

SEQ ID NO: 93858 - protein, 501 aa, Arabidopsis thaliana; identical to SEQ ID NO: 90102
  peptide (1)..(501): Ceres Seq. ID no. 12722164
  misc_feature (305)..(488): Pfam Name: Arabidopsis proteins of unknown function Pfam Description: Arabidopsis proteins of unknown function
  misc_feature (1)..(501): Homolog of NCBI NO: 15242138 NR Description: putative protein; protein id: At5g51640.1, by cDNA: gi_19424020 [Arabidopsis thaliana] gene_id:K17N15.19~pir||T10216~strong similarity to unknown
  misc_feature (78)..(498): Homolog of NCBI NO: 22328922 NR Description: putative protein; protein id: At4g25360.1, by cDNA: gi_17979114 [Arabidopsis thaliana] unknown protein [Arabidopsis thaliana]
  misc_feature (1)..(94): Homolog of NCBI NO: 22328922 NR Description: putative protein; protein id: At4g25360.1, by cDNA: gi_17979114 [Arabidopsis thaliana] unknown protein [Arabidopsis thaliana]
  misc_feature (78)..(498): Homolog of NCBI NO: 7487578 NR Description: hypothetical protein T30C3.30 - Arabidopsis >gi|5123925|emb|CAB45513.1| putative protein [Arabidopsis >gi|7269387|emb|CAB81347.1| putative protein [Arabidopsis
  misc_feature (1)..(94): Homolog of NCBI NO: 7487578 NR Description: hypothetical protein T30C3.30 - Arabidopsis >gi|5123925|emb|CAB45513.1| putative protein [Arabidopsis >gi|7269387|emb|CAB81347.1| putative protein [Arabidopsis
  misc_feature (81)..(497): Homolog of NCBI NO: 34906936 NR Description: leaf senescence related protein-like [Oryza
  misc_feature (123)..(488): Homolog of NCBI NO: 15237044 NR Description: putative protein; protein id: At4g11090.1
  misc_feature (81)..(496): Homolog of NCBI NO: 30678135 NR Description: expressed protein [Arabidopsis thaliana] unknown protein [Arabidopsis thaliana]
  misc_feature (126)..(488): Homolog of NCBI NO: 30686312 NR Description: expressed protein [Arabidopsis thaliana]
  misc_feature (75)..(491): Homolog of NCBI NO: 15237211 NR Description: putative protein; protein id: At5g15890.1

SEQ ID NO: 93859 - protein, 352 aa, Arabidopsis thaliana; identical to SEQ ID NO: 90103
  peptide (1)..(352): Ceres Seq. ID no. 12722165
  misc_feature (156)..(339): Pfam Name: Arabidopsis proteins of unknown function Pfam Description: Arabidopsis proteins of unknown function
  misc_feature (1)..(352): Homolog of NCBI NO: 15242138 NR Description: putative protein; protein id: At5g51640.1, by cDNA: gi_19424020 [Arabidopsis thaliana] gene_id:K17N15.19~pir||T10216~strong similarity to unknown
  misc_feature (1)..(349): Homolog of NCBI NO: 22328922 NR Description: putative protein; protein id: At4g25360.1, by cDNA: gi_17979114 [Arabidopsis thaliana] unknown protein [Arabidopsis thaliana]
  misc_feature (1)..(349): Homolog of NCBI NO: 7487578 NR Description: hypothetical protein T30C3.30 - Arabidopsis >gi|5123925|emb|CAB45513.1| putative protein [Arabidopsis >gi|7269387|emb|CAB81347.1| putative protein [Arabidopsis
  misc_feature (1)..(348): Homolog of NCBI NO: 34906936 NR Description: leaf senescence related protein-like [Oryza
  misc_feature (1)..(339): Homolog of NCBI NO: 15237044 NR Description: putative protein; protein id: At4g11090.1
  misc_feature (1)..(347): Homolog of NCBI NO: 30678135 NR Description: expressed protein [Arabidopsis thaliana] unknown protein [Arabidopsis thaliana]
  misc_feature (1)..(339): Homolog of NCBI NO: 30686312 NR Description: expressed protein [Arabidopsis thaliana]
  misc_feature (1)..(342): Homolog of NCBI NO: 15237211 NR Description: putative protein; protein id: At5g15890.1
  misc_feature (1)..(344): Homolog of NCBI NO: 15234058 NR Description: hypothetical protein; protein id: At4g01080.1
  misc_feature (1)..(344): Homolog of NCBI NO: 28393189 NR Description: unknown protein [Arabidopsis thaliana]

SEQ ID NO: 93860 - DNA, 1425 bp, Arabidopsis thaliana; identical to SEQ ID NO: 90104
  misc_feature (1)..(1425): Ceres Seq. ID no. 12722173
  misc_feature: MA Experiment ID: 20000180 Result: Up-regulated in Transcription
  misc_feature: MA Experiment 20000180 PARAMETER Experiment Name: At_Germinating_Seeds_P Parameter: Age (hr) Value: 24 vs. 0
  misc_feature: MA Experiment 20000180 PARAMETER Experiment Name: At_Germinating_Seeds_P Parameter: Tissue Value: Germinating Seeds
  misc_feature: MA Experiment ID: 20000265 Result: Down-regulated in Transcription
  misc_feature: MA Experiment 20000265 PARAMETER Experiment Name: At_Open_Flower_P Parameter: Age (day) Value: 21
  misc_feature: MA Experiment 20000265 PARAMETER Experiment Name: At_Open_Flower_P Parameter: Plant Line Value: WS
  misc_feature: MA Experiment 20000265 PARAMETER Experiment Name: At_Open_Flower_P Parameter: Tissue Value: Closed Flower vs. Whole Plant
  misc_feature: MA Experiment ID: 20000439 Result: Up-regulated in Transcription
  misc_feature: MA Experiment 20000439 PARAMETER Experiment Name: At_Roots__P Parameter: Age (day) Value: 14 vs. 21
  misc_feature: MA Experiment 20000439 PARAMETER Experiment Name: At_Roots__P Parameter: Organism Value: A. thaliana
  misc_feature: MA Experiment 20000439 PARAMETER Experiment Name: At_Roots__P Parameter: Tissue Value: Roots vs. Whole Plant
  misc_feature: MA Experiment ID: 20000444 Result: Up-regulated in Transcription
  misc_feature: MA Experiment 20000444 PARAMETER Experiment Name: At_100uM_NAA__P Parameter: Age (day) Value: 14
  misc_feature: MA Experiment 20000444 PARAMETER Experiment Name: At_100uM_NAA__P Parameter: Organism Value: A. thaliana
  misc_feature: MA Experiment 20000444 PARAMETER Experiment Name: At_100uM_NAA__P Parameter: Plant Line Value: WS
  misc_feature: MA Experiment 20000444 PARAMETER Experiment Name: At_100uM_NAA__P Parameter: Timepoint (hr) Value: 1
  misc_feature: MA Experiment 20000444 PARAMETER Experiment Name: At_100uM_NAA__P Parameter: Tissue Value: Aerial
  misc_feature: MA Experiment 20000444 PARAMETER Experiment Name: At_100uM_NAA__P Parameter: Treatment Value: 100uM NAA vs. No Treatment
  misc_feature: MA Experiment ID: 20000453 Result: Up-regulated in Transcription
  misc_feature: MA Experiment 20000453 PARAMETER Experiment Name: At_100uM_ABA_P Parameter: Age (day) Value: 15
  misc_feature: MA Experiment 20000453 PARAMETER Experiment Name: At_100uM_ABA_P Parameter: Organism Value: A. thaliana
  misc_feature: MA Experiment 20000453 PARAMETER Experiment Name: At_100uM_ABA_P Parameter: Plant Line Value: WS
  misc_feature: MA Experiment 20000453 PARAMETER Experiment Name: At_100uM_ABA_P Parameter: Timepoint (hr) Value: 24
  misc_feature: MA Experiment 20000453 PARAMETER Experiment Name: At_100uM_ABA_P Parameter: Tissue Value: Aerial
  misc_feature: MA Experiment 20000453 PARAMETER Experiment Name: At_100uM_ABA_P Parameter: Treatment Value: 100uM ABA vs. No Treatment
  misc_feature: MA Experiment ID: 20001247 Result: Up-regulated in Transcription
  misc_feature: MA Experiment 20001247 PARAMETER Experiment Name: At_Far-red-induction_P Parameter: Age (day) Value: 7
  misc_feature: MA Experiment 20001247 PARAMETER Experiment Name: At_Far-red-induction_P Parameter: Light Value: Far-red vs. White
  misc_feature: MA Experiment 20001247 PARAMETER Experiment Name: At_Far-red-induction_P Parameter: Organism Value: A. thaliana
  misc_feature: MA Experiment 20001247 PARAMETER Experiment Name: At_Far-red-induction_P Parameter: Plant Line Value: Columbia
  misc_feature: MA Experiment 20001247 PARAMETER Experiment Name: At_Far-red-induction_P Parameter: Timepoint (hr) Value: 1
  misc_feature: MA Experiment 20001247 PARAMETER Experiment Name: At_Far-red-induction_P Parameter: Tissue Value: Whole Plant
  misc_feature: MA Experiment ID: 20001556 Result: Down-regulated in Transcription
  misc_feature: MA Experiment 20001556 PARAMETER Experiment Name: At_Drought_Soil_Dry_P Parameter: Age (day) Value: 26
  misc_feature: MA Experiment 20001556 PARAMETER Experiment Name: At_Drought_Soil_Dry_P Parameter: Organism Value: A. thaliana
  misc_feature: MA Experiment 20001556 PARAMETER Experiment Name: At_Drought_Soil_Dry_P Parameter: Plant Line Value: WS
  misc_feature: MA Experiment 20001556 PARAMETER Experiment Name: At_Drought_Soil_Dry_P Parameter: Post Timepoint (hr) Value: None
  misc_feature: MA Experiment 20001556 PARAMETER Experiment Name: At_Drought_Soil_Dry_P Parameter: Post-Treatment Value: None
  misc_feature: MA Experiment 20001556 PARAMETER Experiment Name: At_Drought_Soil_Dry_P Parameter: Timepoint (day) Value: 12
  misc_feature: MA Experiment 20001556 PARAMETER Experiment Name: At_Drought_Soil_Dry_P Parameter: Treatment Value: Drought vs. No Drought

SEQ ID NO: 93861 - protein, 474 aa, Arabidopsis thaliana; identical to SEQ ID NO: 90105
  peptide (1)..(474): Ceres Seq. ID no. 12722174
  misc_feature (314)..(401): Pfam Name: Protein of unknown function (DUF668) Pfam Description: Protein of unknown function (DUF668)
  misc_feature (1)..(474): Homolog of NCBI NO: 15242144 NR Description: putative protein; protein id: At5g51670.1 thaliana] >gi|8953735|dbj|BAA98099.1| contains similarity to
  misc_feature (173)..(474): Homolog of NCBI NO: 27754455 NR Description: unknown protein [Arabidopsis thaliana]
  misc_feature (1)..(76): Homolog of NCBI NO: 27754455 NR Description: unknown protein [Arabidopsis thaliana]
  misc_feature (1)..(459): Homolog of NCBI NO: 30102981 NR Description: hypothetical protein [Oryza sativa (japonica
  misc_feature (37)..(251): Homolog of NCBI NO: 15238198 NR Description: putative protein; protein id: At5g04550.1, by cDNA: gi_13605828, supported by cDNA: gi_17064801, supported cDNA: gi_20259825, supported by cDNA: gi_20260407 [Arabidopsis
  misc_feature (263)..(463): Homolog of NCBI NO: 15238198 NR Description: putative protein; protein id: At5g04550.1, by cDNA: gi_13605828, supported by cDNA: gi_17064801, supported cDNA: gi_20259825, supported by cDNA: gi_20260407 [Arabidopsis
  misc_feature (1)..(280): Homolog of NCBI NO: 7939524 NR Description: contains similarity to unknown
  misc_feature (305)..(460): Homolog of NCBI NO: 7939524 NR Description: contains similarity to unknown
  misc_feature (10)..(280): Homolog of NCBI NO: 15228977 NR Description: hypothetical protein; protein id: At3g23160.1
  misc_feature (305)..(460): Homolog of NCBI NO: 15228977 NR Description: hypothetical protein; protein id: At3g23160.1

SEQ ID NO: 93862 - protein, 427 aa, Arabidopsis thaliana; identical to SEQ ID NO: 90106
  peptide (1)..(427): Ceres Seq. ID no. 12722175
  misc_feature (267)..(354): Pfam Name: Protein of unknown function (DUF668) Pfam Description: Protein of unknown function (DUF668)
  misc_feature (1)..(427): Homolog of NCBI NO: 15242144 NR Description: putative protein; protein id: At5g51670.1 thaliana] >gi|8953735|dbj|BAA98099.1| contains similarity to
  misc_feature (126)..(427): Homolog of NCBI NO: 27754455 NR Description: unknown protein [Arabidopsis thaliana]
  misc_feature (1)..(29): Homolog of NCBI NO: 27754455 NR Description: unknown protein [Arabidopsis thaliana]
  misc_feature (1)..(412): Homolog of NCBI NO: 30102981 NR Description: hypothetical protein [Oryza sativa (japonica
  misc_feature (1)..(204): Homolog of NCBI NO: 15238198 NR Description: putative protein; protein id: At5g04550.1, by cDNA: gi_13605828, supported by cDNA: gi_17064801, supported cDNA: gi_20259825, supported by cDNA: gi_20260407 [Arabidopsis
  misc_feature (216)..(416): Homolog of NCBI NO: 15238198 NR Description: putative protein; protein id: At5g04550.1, by cDNA: gi_13605828, supported by cDNA: gi_17064801, supported cDNA: gi_20259825, supported by cDNA: gi_20260407 [Arabidopsis
  misc_feature (1)..(233): Homolog of NCBI NO: 7939524 NR Description: contains similarity to unknown
  misc_feature (258)..(413): Homolog of NCBI NO: 7939524 NR Description: contains similarity to unknown
  misc_feature (1)..(233): Homolog of NCBI NO: 15228977 NR Description: hypothetical protein; protein id: At3g23160.1
  misc_feature (258)..(413): Homolog of NCBI NO: 15228977 NR Description: hypothetical protein; protein id: At3g23160.1

SEQ ID NO: 93863 - protein, 344 aa, Arabidopsis thaliana; identical to SEQ ID NO: 90107
  peptide (1)..(344): Ceres Seq. ID no. 12722176
  misc_feature (184)..(271): Pfam Name: Protein of unknown function (DUF668) Pfam Description: Protein of unknown function (DUF668)
  misc_feature (1)..(344): Homolog of NCBI NO: 15242144 NR Description: putative protein; protein id: At5g51670.1 thaliana] >gi|8953735|dbj|BAA98099.1| contains similarity to
  misc_feature (43)..(344): Homolog of NCBI NO: 27754455 NR Description: unknown protein [Arabidopsis thaliana]
  misc_feature (1)..(329): Homolog of NCBI NO: 30102981 NR Description: hypothetical protein [Oryza sativa (japonica
  misc_feature (1)..(121): Homolog of NCBI NO: 15238198 NR Description: putative protein; protein id: At5g04550.1, by cDNA: gi_13605828, supported by cDNA: gi_17064801, supported cDNA: gi_20259825, supported by cDNA: gi_20260407 [Arabidopsis
  misc_feature (133)..(333): Homolog of NCBI NO: 15238198 NR Description: putative protein; protein id: At5g04550.1, by cDNA: gi_13605828, supported by cDNA: gi_17064801, supported cDNA: gi_20259825, supported by cDNA: gi_20260407 [Arabidopsis
  misc_feature (1)..(150): Homolog of NCBI NO: 7939524 NR Description: contains similarity to unknown
  misc_feature (175)..(330): Homolog of NCBI NO: 7939524 NR Description: contains similarity to unknown
  misc_feature (1)..(150): Homolog of NCBI NO: 15228977 NR Description: hypothetical protein; protein id: At3g23160.1
  misc_feature (175)..(330): Homolog of NCBI NO: 15228977 NR Description: hypothetical protein; protein id: At3g23160.1
  misc_feature (1)..(327): Homolog of NCBI NO: 34902086 NR Description: SR-rich pre-mRNA splicing activator [Oryza sativa

SEQ ID NO: 93864 - DNA, 1251 bp, Arabidopsis thaliana; identical to SEQ ID NO: 90108
  misc_feature (1)..(1251): Ceres Seq. ID no. 12722181
  misc_feature: MA Experiment ID: 20000180 Result: Down-regulated in Transcription
  misc_feature: MA Experiment 20000180 PARAMETER Experiment Name: At_Germinating_Seeds_P Parameter: Age (hr) Value: 24 vs. 0
  misc_feature: MA Experiment 20000180 PARAMETER Experiment Name: At_Germinating_Seeds_P Parameter: Tissue Value: Germinating Seeds
  misc_feature: MA Experiment ID: 20000227 Result: Up-regulated in Transcription
  misc_feature: MA Experiment 20000227 PARAMETER Experiment Name: At_Root-Tips-vs-Tops_P Parameter: Tissue Value: Root Tips vs. Root Tops
  misc_feature: MA Experiment ID: 20000267 Result: Up-regulated in Transcription
  misc_feature: MA Experiment 20000267 PARAMETER Experiment Name: At_Drought_P Parameter: Age (day) Value: 7
  misc_feature: MA Experiment 20000267 PARAMETER Experiment Name: At_Drought_P Parameter: Organism Value: A. thaliana
  misc_feature: MA Experiment 20000267 PARAMETER Experiment Name: At_Drought_P Parameter: Plant Line Value: WS
  misc_feature: MA Experiment 20000267 PARAMETER Experiment Name: At_Drought_P Parameter: Timepoint (hr) Value: 6
  misc_feature: MA Experiment 20000267 PARAMETER Experiment Name: At_Drought_P Parameter: Tissue Value: Whole Plant
  misc_feature: MA Experiment 20000267 PARAMETER Experiment Name: At_Drought_P Parameter: Treatment Value: Drought vs. No Drought
  misc_feature: MA Experiment ID: 20000436 Result: Up-regulated in Transcription
  misc_feature: MA Experiment 20000436 PARAMETER Experiment Name: At_Drought_P Parameter: Age (day) Value: 7
  misc_feature: MA Experiment 20000436 PARAMETER Experiment Name: At_Drought_P Parameter: Organism Value: A. thaliana
  misc_feature: MA Experiment 20000436 PARAMETER Experiment Name: At_Drought_P Parameter: Plant Line Value: WS
  misc_feature: MA Experiment 20000436 PARAMETER Experiment Name: At_Drought_P Parameter: Timepoint (hr) Value: 12
  misc_feature: MA Experiment 20000436 PARAMETER Experiment Name: At_Drought_P Parameter: Tissue Value: Whole Plant
  misc_feature: MA Experiment 20000436 PARAMETER Experiment Name: At_Drought_P Parameter: Treatment Value: Drought vs. No Drought
  misc_feature: MA Experiment ID: 20000437 Result: Up-regulated in Transcription
  misc_feature: MA Experiment 20000437 PARAMETER Experiment Name: At_Drought_P Parameter: Age (day) Value: 8
  misc_feature: MA Experiment 20000437 PARAMETER Experiment Name: At_Drought_P Parameter: Organism Value: A. thaliana
  misc_feature: MA Experiment 20000437 PARAMETER Experiment Name: At_Drought_P Parameter: Plant Line Value: WS
  misc_feature: MA Experiment 20000437 PARAMETER Experiment Name: At_Drought_P Parameter: Timepoint (hr) Value: 24
  misc_feature: MA Experiment 20000437 PARAMETER Experiment Name: At_Drought_P Parameter: Tissue Value: Whole Plant
  misc_feature: MA Experiment 20000437 PARAMETER Experiment Name: At_Drought_P Parameter: Treatment Value: Drought vs. No Drought
  misc_feature: MA Experiment ID: 20001556 Result: Up-regulated in Transcription
  misc_feature: MA Experiment 20001556 PARAMETER Experiment Name: At_Drought_Soil_Dry_P Parameter: Age (day) Value: 26
  misc_feature: MA Experiment 20001556 PARAMETER Experiment Name: At_Drought_Soil_Dry_P Parameter: Organism Value: A. thaliana
  misc_feature: MA Experiment 20001556 PARAMETER Experiment Name: At_Drought_Soil_Dry_P Parameter: Plant Line Value: WS
  misc_feature: MA Experiment 20001556 PARAMETER Experiment Name: At_Drought_Soil_Dry_P Parameter: Post Timepoint (hr) Value: None
  misc_feature: MA Experiment 20001556 PARAMETER Experiment Name: At_Drought_Soil_Dry_P Parameter: Post-Treatment Value: None
  misc_feature: MA Experiment 20001556 PARAMETER Experiment Name: At_Drought_Soil_Dry_P Parameter: Timepoint (day) Value: 12
  misc_feature: MA Experiment 20001556 PARAMETER Experiment Name: At_Drought_Soil_Dry_P Parameter: Treatment Value: Drought vs. No Drought
  misc_feature: MA Experiment ID: 20001757 Result: Down-regulated in Transcription
  misc_feature: MA Experiment 20001757 PARAMETER Experiment Name: At_50mM_NH4NO3_L-to-H_P Parameter: Timepoint (hr) Value: 6
  misc_feature: MA Experiment 20001757 PARAMETER Experiment Name: At_50mM_NH4NO3_L-to-H_P Parameter: Tissue Value: Leaf
  misc_feature: MA Experiment 20001757 PARAMETER Experiment Name: At_50mM_NH4NO3_L-to-H_P Parameter: Treatment Value: 50mM NH4NO3 vs 100mM Mannitol
  misc_feature: MA Experiment ID: 20001904 Result: Up-regulated in Transcription
  misc_feature: MA Experiment 20001904 PARAMETER Experiment Name: At_Drought_Reproduction_P Parameter: Age (day) Value: 37
  misc_feature: MA Experiment 20001904 PARAMETER Experiment Name: At_Drought_Reproduction_P Parameter: Organism Value: A. thaliana
  misc_feature: MA Experiment 20001904 PARAMETER Experiment Name: At_Drought_Reproduction_P Parameter: Plant Line Value: WS
  misc_feature: MA Experiment 20001904 PARAMETER Experiment Name: At_Drought_Reproduction_P Parameter: Timepoint (day) Value: 7
  misc_feature: MA Experiment 20001904 PARAMETER Experiment Name: At_Drought_Reproduction_P Parameter: Tissue Value: Rosettes
  misc_feature: MA Experiment 20001904 PARAMETER Experiment Name: At_Drought_Reproduction_P Parameter: Treatment Value: Drought vs. No Drought
  misc_feature: MA Experiment ID: 20001910 Result: Up-regulated in Transcription
  misc_feature: MA Experiment 20001910 PARAMETER Experiment Name: At_Drought_Reproduction_P Parameter: Age (day) Value: 37
  misc_feature: MA Experiment 20001910 PARAMETER Experiment Name: At_Drought_Reproduction_P Parameter: Organism Value: A. thaliana
  misc_feature: MA Experiment 20001910 PARAMETER Experiment Name: At_Drought_Reproduction_P Parameter: Plant Line Value: WS
  misc_feature: MA Experiment 20001910 PARAMETER Experiment Name: At_Drought_Reproduction_P Parameter: Timepoint (day) Value: 7
  misc_feature: MA Experiment 20001910 PARAMETER Experiment Name: At_Drought_Reproduction_P Parameter: Tissue Value: Flowers
  misc_feature: MA Experiment 20001910 PARAMETER Experiment Name: At_Drought_Reproduction_P Parameter: Treatment Value: Drought vs. No Drought

SEQ ID NO: 93865 - protein, 416 aa, Arabidopsis thaliana; identical to SEQ ID NO: 90109
  peptide (1)..(416): Ceres Seq. ID no. 12722182
  misc_feature (107)..(404): Pfam Name: Protein phosphatase 2C Pfam Description: Protein phosphatase 2C
  misc_feature (1)..(416): Homolog of NCBI NO: 15242182 NR Description: protein phosphatase 2C (PP2C); protein id:
  misc_feature (22)..(412): Homolog of NCBI NO: 33309516 NR Description: protein phosphatase 2C [Prunus avium]
  misc_feature (88)..(412): Homolog of NCBI NO: 15227078 NR Description: protein phosphatase 2C (PP2C), putative; protein At2g29380.1 [Arabidopsis thaliana] >gi|25352214|pir||F84695
  misc_feature (43)..(412): Homolog of NCBI NO: 10432446 NR Description: protein phosphatase 2C [Nicotiana tabacum]
  misc_feature (101)..(382): Homolog of NCBI NO: 34902050 NR Description: putative Serine/threonine phosphatases [Oryza
  misc_feature (370)..(412): Homolog of NCBI NO: 34902050 NR Description: putative Serine/threonine phosphatases [Oryza
  misc_feature (35)..(361): Homolog of NCBI NO: 34908256 NR Description: putative protein phosphatase 2C [Oryza sativa
  misc_feature (387)..(412): Homolog of NCBI NO: 34908256 NR Description: putative protein phosphatase 2C [Oryza sativa
  misc_feature (101)..(360): Homolog of NCBI NO: 15222398 NR Description: protein phosphatase 2C (PP2C), putative; protein At1g07430.1, supported by cDNA: 118185., supported by cDNA: supported by cDNA: gi_20259128 [Arabidopsis thaliana] thaliana
  misc_feature (370)..(412): Homolog of NCBI NO: 15222398 NR Description: protein phosphatase 2C (PP2C), putative; protein At1g07430.1, supported by cDNA: 118185., supported by cDNA: supported by cDNA: gi_20259128 [Arabidopsis thaliana] thaliana

SEQ ID NO: 93866 - protein, 386 aa, Arabidopsis thaliana; identical to SEQ ID NO: 90110
  peptide (1)..(386): Ceres Seq. ID no. 12722183
  misc_feature (77)..(374): Pfam Name: Protein phosphatase 2C Pfam Description: Protein phosphatase 2C
  misc_feature (1)..(386): Homolog of NCBI NO: 15242182 NR Description: protein phosphatase 2C (PP2C); protein id:
  misc_feature (1)..(382): Homolog of NCBI NO: 33309516 NR Description: protein phosphatase 2C [Prunus avium]
  misc_feature (58)..(382): Homolog of NCBI NO: 15227078 NR Description: protein phosphatase 2C (PP2C), putative; protein At2g29380.1 [Arabidopsis thaliana] >gi|25352214|pir||F84695
  misc_feature (13)..(382): Homolog of NCBI NO: 10432446 NR Description: protein phosphatase 2C [Nicotiana tabacum]
  misc_feature (71)..(352): Homolog of NCBI NO: 34902050 NR Description: putative Serine/threonine phosphatases [Oryza
  misc_feature (340)..(382): Homolog of NCBI NO: 34902050 NR Description: putative Serine/threonine phosphatases [Oryza
  misc_feature (5)..(331): Homolog of NCBI NO: 34908256 NR Description: putative protein phosphatase 2C [Oryza sativa
  misc_feature (357)..(382): Homolog of NCBI NO: 34908256 NR Description: putative protein phosphatase 2C [Oryza sativa
  misc_feature (71)..(330): Homolog of NCBI NO: 15222398 NR Description: protein phosphatase 2C (PP2C), putative; protein At1g07430.1, supported by cDNA: 118185., supported by cDNA: supported by cDNA: gi_20259128 [Arabidopsis thaliana] thaliana
  misc_feature (340)..(382): Homolog of NCBI NO: 15222398 NR Description: protein phosphatase 2C (PP2C), putative; protein At1g07430.1, supported by cDNA: 118185., supported by cDNA: supported by cDNA: gi_20259128 [Arabidopsis thaliana] thaliana

SEQ ID NO: 93867 - protein, 365 aa, Arabidopsis thaliana; identical to SEQ ID NO: 90111
  peptide (1)..(365): Ceres Seq. ID no. 12722184
  misc_feature (56)..(353): Pfam Name: Protein phosphatase 2C Pfam Description: Protein phosphatase 2C
  misc_feature (1)..(365): Homolog of NCBI NO: 15242182 NR Description: protein phosphatase 2C (PP2C); protein id:
  misc_feature (1)..(361): Homolog of NCBI NO: 33309516 NR Description: protein phosphatase 2C [Prunus avium]
  misc_feature (37)..(361): Homolog of NCBI NO: 15227078 NR Description: protein phosphatase 2C (PP2C), putative; protein At2g29380.1 [Arabidopsis thaliana] >gi|25352214|pir||F84695
  misc_feature (1)..(361): Homolog of NCBI NO: 10432446 NR Description: protein phosphatase 2C [Nicotiana tabacum]
  misc_feature (50)..(331): Homolog of NCBI NO: 34902050 NR Description: putative Serine/threonine phosphatases [Oryza
  misc_feature (319)..(361): Homolog of NCBI NO: 34902050 NR Description: putative Serine/threonine phosphatases [Oryza
  misc_feature (1)..(310): Homolog of NCBI NO: 34908256 NR Description: putative protein phosphatase 2C [Oryza sativa
  misc_feature (336)..(361): Homolog of NCBI NO: 34908256 NR Description: putative protein phosphatase 2C [Oryza sativa
  misc_feature (50)..(309): Homolog of NCBI NO: 15222398 NR Description: protein phosphatase 2C (PP2C), putative; protein At1g07430.1, supported by cDNA: 118185., supported by cDNA: supported by cDNA: gi_20259128 [Arabidopsis thaliana] thaliana
  misc_feature (319)..(361): Homolog of NCBI NO: 15222398 NR Description: protein phosphatase 2C (PP2C), putative; protein At1g07430.1, supported by cDNA: 118185., supported by cDNA: supported by cDNA: gi_20259128 [Arabidopsis thaliana] thaliana

SEQ ID NO: 93868 - DNA, 1965 bp, Arabidopsis thaliana; identical to SEQ ID NO: 90112
  misc_feature (1)..(1965): Ceres Seq. ID no. 12722185
  misc_feature: MA Experiment ID: 20000328 Result: Down-regulated in Transcription
  misc_feature: MA Experiment 20000328 PARAMETER Experiment Name: At_42deg_Heat_Sub_P Parameter: Age (day) Value: 14
  misc_feature: MA Experiment 20000328 PARAMETER Experiment Name: At_42deg_Heat_Sub_P Parameter: Organism Value: A. thaliana
  misc_feature: MA Experiment 20000328 PARAMETER Experiment Name: At_42deg_Heat_Sub_P Parameter: Plant Line Value: WS
  misc_feature: MA Experiment 20000328 PARAMETER Experiment Name: At_42deg_Heat_Sub_P Parameter: Temperature (deg C) Value: 42 vs. 22
  misc_feature: MA Experiment 20000328 PARAMETER Experiment Name: At_42deg_Heat_Sub_P Parameter: Timepoint (hr) Value: 6
  misc_feature: MA Experiment 20000328 PARAMETER Experiment Name: At_42deg_Heat_Sub_P Parameter: Tissue Value: Aerial
